United States Patent Application Publication US 2011/0166335 A1 - sequence listing, part 3

SEQ ID NO: 1993 - DNA, 6032 bp, Xenorhabdus sp.
  CDS (74)..(1438)
caagagcaaaccacccgttatacgggtggttatgatttccattcattggcaaattggtaaaagagagaattccatgaataccaccgatacgatagttgctcaggccacccctccgggacgaggtggtgttggtatcctgcgtatttctggtcccaaagctgcggcagttgctgaggtggtattagggaaactcccgaaaccccgctatgccgattatctgccatttcgtgatgtagatagctcagttttagatcagggcatcgccctttatttccccggccctaattcctttaccggtgaagatgtactggagcttcaggggcacggcggcccggttattcttgatttactgctgaaacgtattctgactatttccggtgtgcgaatcgctaatcccggtgaattttctgaacgtgctttcctgaacgataaactggatttggctcaggctgaggcgattgccgatctgattgatgccagttctgaacaggccgcgcgctctgcgatgaactccctacagggaacattttccaaacaggttcaccaaatggtggaagaactgactaacctgcgcatctatgttgaagcagcgattgattttcctgatgaagaaattgattttctttctgatggcaagatagaagccaagctggatgaagtaatcgtggagctcgaacaggtgcgttctcaggctcgtcagggtagcctgttgcgtgaagggatgaaagttgtcattgcaggccgcccgaatgcaggtaaatccagcttgctgaatgcgctggcggggcgtgaagcagcgattgtgacggatattgcaggtacaactcgtgatgttttacgcgagcatattcatattgatggaatgcccctgcatgtgattgatactgctggtctgcgcgaagccagtgatgaagtggaacgcattggtattgagcgggcatggcaggaaatcgaacaggcggatcgcgtgttgtttatggtagacagtacgacgactgatgctatcgaaccagaaaaaatctggccggaattcatggctaagctaccagaatccctgcctgtaacgattatccgtaataaaacagatatgacaggtgaagccagcggcatatcagaaattaatggctacacgttaattcgtctttctgctcttgcagatcaagggattaatctgctgcgtgatcatctcaaagaagcgatgggctttaacagtaatactgaaggtgggttcctcgcacgacgccgccatttgcaggcactgaataccgccgcagaacacttgcaggaagggcaccaacaattggtattcgctcgttccggggagttattagcggaagaactccggctggcacaacaggcattgactgaaatcaccggagaatttacgtctgatgatttacttgggcggattttttcaagtttttgtatcgggaagtgatgtcgaaaggtatggaataaaacagcaaattagagcagcgaaaatgactgtctagtttaagaagctaataattattacaccttgagtatgaatatattgatatatgcaaacttatagtttagtgtgtgttcaatatttacactcagggtgtgaaaatgtcttcaaaaataaactggttagtaagtcatactgtaccaggagccttaattctccaaccgtggttgattgaaaatggtatcagctactccttaacgcaaaagtacactcagaatggttggctaaaaaaactgtttacaggagtctactaccgcccaaattcaagacaagactacaagccggagtggagcgatgcactaaaagctgtgatagaacagcttcattttccagttcatcttgcaggtttaactagcttaacctatcagggacttagccactatttaccattaaaatcggaacaagtatgggtaggagtaggaagaaagcaatctcttcctaaatggtttaaagaatttcctgaccaacgctggttatattgcagcaacaataaattaagtgaattatctgacacagattttactcttgtacaagtaaatggaagagaacttaaagccagttctcctgagttggcagcttatgaacttattgactcaatagggaaaaatataagttttgaacatgcggctgagttatttcaggggctggtaaatttgagtccgagaaaagttcagtcattgttattacgtagtcatgctgtacaaaccaaccgtatttttctatttcttagtcattactatggtcatcaatgggtgaagcgtcttgaagaatcacagatagaattgggttctggtaaacgtcaggtagtcgctcagggacgttatgatgaacgctacaaaattacagtacccgctacctttgatgtctgaaatatattcaatctaaataagatagttatggataaaaactcagttttctatcagcaggtaaaactccttatcagggtattacctatcgtagctaaagaaaaagtatttgcattaaagggtggcactgctattaacctgtttgtgcgagagtttccacgtctgtctgttgatatagacttagcttatttgtcatcggagccaagagatgaagccttgttgaactctcgtgctgctttgcaacgaattactgacgatattaatactcaacctgatgttaaggctgtttttcaggacaataaacctgatgaactgcgtattgttgtgttcaatcatgttgctactgtcaaagttgaagtttctccggttgccctgggaactctccataaacctgaagaaagatacgtaaccgaatttgttgaggatgaatttggttatgctgaaattcaggtggttagcttgccggatctctatggagggaaaatctgtgctgcgatggacagacagcatccgagggatctgtttgatatggggatgcttcttaatgaagaggggatttccagagaaatttttgtcggatttttgacttacgcactgagtcatccaagaccaattaatgagttaatgtctccaaattggcaaaaattagatgagaagttttacaacgagtttgaaggaatgacactcaaacctgttgaattagtagaattggaaacaactcgtttaaaaatgcttgcagctctacaagctcattttactgaaaaagatcgtgattttttactttcctttaagaaaggaaagcctgagtggtcactgtttgatgagccttctgctgctgaattgcctgtgattcgttggaaattaatcaatattgaaaagctgatgaaaaatgaaggaaaacatctagagcagctaactaagcttgaaaaaagtgttaactcgtggctgaagaaaggggtttacaaacaaataagaaagtaattgagaaaactactcaagaaaatccccataattactgtatgaacgcctccccgtttgcaaggcttccgttgttttaacattgacgagtagttgcagctctgtatccggccttattgcagccagcgctgcgggccactatgagattcgctgacctgatccttattcctctggcgggctttatgccctggcaattattcaggtttctcaggtcacggtcttaccgtctttgtcatcactctggctgccatagcaactttttagcattcacccttttctaacgagttaatatttatccgtatccgcgattaatatggcctgatactgacatgatttttttcgtatttacggtcatgagcagctattgcccatattgttcgcgccagtttatttgccatcgccacgattgccacactggtcggacgtcgttttttcagttctgttatccatggactcggttctttagccagtaaggctacagccctagcaccatggataaacagggttcgcagataggtgtccccgcgtttgcttattcctaataggcggactttccctcctgaaccgctctgcttgggcacgagaccaacataggcagcaaactcacgcccagatttaaacgctgatgtctcccccatagtggcaactgccgctgtagcgattaagggtcccacaccgggaatttccatcagccgctgacaagtttcactctgttttgccacactgataagctgcttttcaagaccatctatcagtgaatccaattcactcaatctgttgtactggtcttccagcacagtgataagatatggcggtagctttgtcttcattctctccaaggctgccggtagctccctgtccatcgctgctcggcctttatggatggtttcaccaaattccagtagcgtcccgtgtagggcattaatctgtgcggtccggaatttcaccagctgtctacgcgaacgatgcaggaccagtactgattgctgttcttccgttttgacggcgatttctttgccgggttgttgtaccgccatccaaatagcacgggcatccatcacgtcatttttgttgcccatgacgaacgctttgacgaagcgaccctgcatcaacctgactttgtgcccttgcttttccagttcgcgagcccagtgctgagaaccgccacaggcttccataccaataaggcaaggctcacggttactgaaaaacgtcataaaatcttgactacgcaactgcttatcaaccacttcacctgtgtgctcattaatgaagtggacttggatcagatgttttgcaatatcaacgccaaccggtgtacatttcatgttgtggagtctccagtctgagggagctttatgcatcccgtattgggcactatgatgccggaaatctgcgaggctccacacctttatgtactttcccttcattcatcattgtgctccagatttaatgagtggggagcgttcatctcattcctctaaagttagagtggatacgtctagatctgtgcatgttacggtaattttattaaaattaaattttgctaatataatgaggtcagaaatattttttcctctaggtgtattaattcctactttttctgatagattcataatagaatctggataattacttaaggtaaattttgggtattcataattagcgttataaataattttaccaacatatccagtataggttccattcttgccatcaggacatccagcataagctgaactaattgaccaagttattaaaaaaacaataatcatgagtggatttgtgtatttcatgatgttacctctatcttttgtatttaaattattatgcaatttaaattaattcggttttttataaatattatttaataatatagagaggggaaaatttacagtctgattatgaatgcggtttttccacaaagctcagagaatattatgataaccactttatgtgcttttaattatagcacctatatcatgaagtcaatgttactaaataacttttcataatagtgagacactcgatttactttctctgaaagagtctctttgcagattttttcaagaattttttcacattactgagcagttgccacatataccgacaacaatggttacgtgtgactgtttcatgtaacgtgtgccataagtattctattttgttcaaccaaggcgagtagacgggcaggaatacagggcgagatctcacatttttcataaggttatttaggtcaaataaaagtcaatatacggacttttataagcatttctctccttaaaacgttaagatcacgctattccataaacagtgtgcttaataatgaatatttttaattttatcagaaaaatagatgacccacgttctgacatcaataaaaaacatgaattgatggatgtcatttttttggccttttctgctgtgttatgtggcgcttctggctggaaatcgattcaagaatttggtgagttacaaatagagtggcttaaacaatatacctcatttactcacggcattcctcgtcgtcactgtgtggctaatattatcaaaatgatagatcaagacgcattggtcgaagccttttatggctggatcaaccagcgccgggttacggcgggcaaaagtctcatcgcgattgatggaaaaacgctgagaggaaccgcaaaggacatgtttagagcacatggtccgag

SEQ ID NO: 1994 - DNA, 6032 bp, Xenorhabdus sp.; identical to SEQ ID NO: 1993
  CDS (2050)..(2361)

SEQ ID NO: 1995 - DNA, 6032 bp, Xenorhabdus sp.; identical to SEQ ID NO: 1993
  CDS (2407)..(3339)

SEQ ID NO: 1996 - DNA, 6032 bp, Xenorhabdus sp.; identical to SEQ ID NO: 1993
  CDS (5689)..(6030)

SEQ ID NO: 1997 - DNA, 9045 bp, Xenorhabdus sp.
  CDS (2)..(2194)
actcctacccgcgcaaagcgccggagatatgccgccagcattaaaagatgaatttatgcagcggcttgatcgccagctggtatggatgatcagccccggaacggaagagaatgaagcacccgctgagtattggcaggaacagctggaaaaaacaccctttctggctcatgtcaaagggccgataaatgcagatcatcaacaggaatggggtactttttactataagcaccgtaatgccatgcttgatcccatgacccgtgaccggctgcaatcagaaggtactcaacaggcaaactggattttgtctcaggtttattcggctttctcaggcgtcagcgggcaggaactcagcaatgatccactgatgttggtcaggggatcgcagctagctcttcagcagacatccagccgtttacggctacagcatggctggctgaccgccaaagacggtacaggaaggatctggtatttgctccatgctgaactgaacggctcttcgtttgatatgcagcaagcacatcaggctgtcactgaactgggtaagctggagcaatcactgaaaaatcgtttccctgatgcaaaagtgatctcaaggggaacactattttacagtgattatgccagccagcaggcaaaacatgatatttccacactgggcagcgcaaccgtactgggagtactactgctgatttacggtgtgtttcgttccctgaagccactgctgttatgtgttctctccatcagtatgggtgcattggcaggcacggttgtgacactgggtatattcggtgaacttcactttatgacactggttatgagcatcagtatcatcggtatttctgccgactatgcgatttattatctgactgagcgtatggttcacgggcaggaagttacaccttggcaaagtatgcgcaaggtattgtctgctctgctgatggcactggcaaccaccgtcattgcttatttgatcatgatgtttgctcccttccccggtttacgtcagctcgctgtattcgctgctgcgggcttaaccgcttcttgcctgacagtgatctgctggtatcccatattggctaagaatctgcctgttcgcccaatcccggcgatgattatgctaatgcgctggctagctttatggcgacgtaacaaattgttttgcatcgggttacctgtcactctgacactatttgctctaatcggtatttcgcgtttacacatcaatgatgatatcgctcagctacaagcactacctcaggatatccatcaacaggaaaaacatattgccgaactaaccggacaaaggagtgatcagaagtggtttgttgtttatggcgataacgcagaacagacactacaacatctggaaaattttatccccctactggagctggaaaaacagcgaggtacgttcgaaaactatcaacgactgccattatcttctcttgctcaacagcagaaagatctgaagctactcaaagcctctgttccaaatatcatggcacgcctgacagaaacagggctgccggtaaaacagccggatttacacccaatgactgtcatgcctaatgactggcttaacagtgtgatcagcgagggctggcgcctaatgtggatcacgttgccaagcggtcagagtggagttctacttccggtaacaggtgtgaaagacagcgttcttatgcgtcagttagccgagaaacaaaccggcatcagttgggtcgatcgcaaactggcatttgatgaaatgttccagttttatcgcaccatacttggctggttgctggcaggctccattgtcttaatcgggatcagttatgtgatcaggcttggtctgcgtcgtggtgcagtcagtatcctgccatcgctgctatcactcggttgcgcactggctgttctcggcttcagcggctacagtctcaatctattctcaatactggcactggtgctggttttggggatcggtattaactataccctgtttttcagcaatcctcgtggcacacctctgacttcgctactggcaatcaccgttgcaatgtgcacatcactgctcactctgggcatgctggtattcagcaatactcaagcaatcagtagttttggcattgtattatgtagtggaattttcacggcatttctgctctcaccgctggcaatgcctgaacgtcccaaaaggaacaaaaaagcatgatgcgattatttatcctgtcactggtatgtctgctggcagcctgtactaatttaccggaaaatggcatccccagagcatggctgaaaccgggagtacgtgtctcacttcctgcaccgggtatcacgccagccatcaatgaacagcaattattgaccgcaacagtgaaaggcaaacagcagtcattaattgttctgctaaacgccagtgaagaccagttatcactggctggcttatcatcactgggtattcgtctgttcaaactgacttatgaccataatggcatccatgcggaacaatctctggtactaccggaaattccgcctgccagccaggttctggccgatatcatgctcagttactggccggtttcttcatggcttccactcctgcctgaggactggacgctacaggacacgaataacatcaggcaattacatgataataaaggtcatttaattactgaaattcaatatgacacccaaaatggcagacggtatccgatacacgtccggcagtttatttttggttatgacatcgccattcagcatttagaagagtaaaacatgatttatatttctgccgtaggcatgcttaatgccttgggtaataatgtagatgacattgcacagaatctggtttccgggcacgctcccggcatgtatgcgcgctcaggctggttacagcctgataaaacctgctgtctgggaggcgttgatgctgaattgcctgctattcccccgcatttgcaccagcataatagccgcaacaaccaactgttactggctgccttaatgcagataaaaccccaagtggataaagccatagcacaatatggacgggagcgggttgcagtcattatgggaaccagtacttccggccttaacgaaggtgatactcatgtcaaccggacagttaaccaacaacccgatgaatcctatcactattatcagcaagaactaggcgatccttcccgatttattgccaattaccttgaattgacaggaccggctttcaccatttccaccgcctgctcatccagttcacgggcgattatcagtggtcagcgtctgatcgagatgggaatggttgatgtggcgattgtgggaggagcggatacccttagccgtatgccgatcaacggtttcaatagccttgaggctctctcggaaacattgtgtgaaccattttgccaggatcgtcagggcatcactatcggcgaagcgtctaccctgttgttgctaacacgagaaccccactccgtagcactgcttggtacaggggagtctagtgatgcatggcacatgtcagccccccatcctgaaggaaagggtgccactgaagctattaatatggcattgagtaatgcaggactctccacacaagagattggctatatcaacctgcacggaacgggaacaaaactcaatgaccagatggaatcactgatcatcaatcagctctttggcgagagtaccccatgcagttcaaccaagcatttgacaggccatactctcggtgccgctggagcctgtgaagctggtttgtgctggctgttgctgagccggaaattacccttaccagcacaggatttctcccgttcgggaatagatacttcgttggcaagctgtggccttctggcacaatctgtgctgttagaaaaaccggttatcatgtccaactcctttgcttttggcggaaataacaccagtctgattctgggagcggtataatgtctgactactcacccgctcactcttatttacctgtccatcactatatcccccacgaagccccgatggtgctgctggaaaaggttataagtgtctccagtgaaagcgtgcattgtcaggtaacagttaaccatgaaggcgtactggcacctttccttaacgcagaacagaatctgccaaactggtttgccattgaaatgatggcacaaactatcggagtttggtctggctggcatcgcaaagaacggcaggaagaagattcatctctgggtatgctacttggcggcagggcagtgcgcagtcaggttcctgcgttcacatacggcagtattttggatattcgaatgaatctgttattgcaggatgaaaaattcggtagttttgaaggtgaagtcagctgtaacggtatcgtactggtaacaggccgactaaatacctaccaaccagaaaaagaagaacttaaacaactatttaaacgggatggagcagtataatgcgttcagttttagtcactggtgccagcaaagggatcggcagggcaatcgcctgccaattagcagcagatgggttcaccactattgttcactatcaccgcgatgcgaaaggtgcagaagcaacgctggaacagatccaggctaacggtggcaacggacggatattaagttttgatatctcagatcgcgatgcctgccgtacaacattagaaaaagatatcgaagtacacggtgcttactacggcattgtttgtaatgctggtatcgctaaagatggagcatttccagcacttgacggaagtgactgggatagtgtcattcatactaatctggatggtttttacaatgtgatacatccctgcatgatgccaatgattggactacgtcagggtggtcgcattatcacgttgtcatctgtctccggtttgatggggaaccgtggacaagtcaactatagtgcggctaaggccggcattatcggcgcaactaaagcgcttgcaatcgaactggcaaaacgaaaaatcaccgtgaattgtattgcaccaggattaatcgataccgatatgatccaaattgaagaaatcgctttaaaagaagctatgaatatgatccctatgaagcgcatggggcaggcaaatgaagttgccgggcttgccagctatttaatgtctgatattgcaggctacgtcacccgtcaggtaatttccgtcaatggaggaatgctatgacacgcagagtcgtcatcacaggaatgggtgggatcaccgctttggggcacgactggcaatcggtctcctctggattaaaatccggcgtgaatgcagtgcagcaaatgcctgaatgggcagaatatgatgggcttaatactcatcttggggctcccgttactgattttactttgcctgatcactatacccgcaagcgtatccgctctatgggacgtgtttcactgatgtccactcgggcaactgaactggcgcttgaaatggcggggctgattggctatcccatcctgacaaatggtgaaaccggtattgcttatggttcctcaacaggcagcactaaacccgtcagtgaattcgccaccatgctaaccgaaaaacataccaataatattaccggcacaacttatgtgcagatgatgcctcataccactgcggtcaacacaggtctgtttttcgggctgcgtggcagagtcattccaacctcaagcgcttgtacctctggcagtcaggccatcggttatgcatgggaagccattcgtaatggttatcagactgtgatggttgctggtggtgctgaagaattgtgcccatcggaagccgctgtatttgataccctattcgccaccagccagaaaaacagcgaaccaaaaacaacgccttccccatttgatgctaatcgtgacggcttagtgattggcgaaggcgcaggcacccttattctcgaagagctggaacatgccagagcacgtggtgcaaaaatttacggtgaaattatcgggtttgccactaactgtgatgcctctcatatcacccagccaaaatcagaaacgatgcaaatctgtatggaaatggcgctgaaatcagccgggcttcaacctgcggatattggttatatcagcgctcacggtacagcaactgagcgtggagatgtcgcggaaagtcaggcgactttcaacatctttggtaacagaacgccgatctcctcactgaaaagctatttcggtcacacactgggtgcctgcggtgctctggaagcatggcttagtattgaaatgatgaatgaaggctggttcgcaccgaccatcaacttgaatgaagttgatccggcttgcggtgaactggattacattatgcatcaaccacgtacaatccagactgagtttatccagagcaataactttgcttttggcgggattaatacttcattggtgatcaagcgttggcaatgatttaaatggaaaaaaacaagaagtcgaattgaagttaaaatgatacttcttgtttttatcctacacagactaaacacaaaatatagcgcacaatactacagctcaataactctttgacgcaggaattccttatctttatctcataacattttcaaccgaatttaagagctataaaatcgggatagcagataccacatagtaattttaatgatctcttataataattagactattaactttaatactaaattcatggttatccaaacccaattaattcattataaaacaataaattgactttattttcatttaaaaactggtatgaactattagatttcaactacaataaatgctaataattgccctttcattatcttccctgtcttcataaatcttttcattcatcagtatcagtttttctcattgtatctatctgatagaaacggctatagtccgcacaactcaagactcttgagcaaaatatcactgcttgaatcactacgacatatccctgtccttggtatatgtcgttattgccattcggcaagatcctgatgagaagcagcgcatacctgactgattttttatgtggagacgacagtagtgaaactgctgcgcaagaatgacagtgcatttgtacctgttgcgggcttgactgtgtttgcgattgcttctggttacctgatgagcttaattccgttatcaatggcggggttcagcatcgatacaggctacgcaagctggttagccagttcttattacgttggtttattaataggctcactcatgattgaacctgttattgccaaaatagggcaccgtttttcatttgtaagttttttgctgcttttagcagcaacagttatggtattgcctttttttcccaataaggaaatgtggttgcttattcgctgcatagctggagtagccgttgccggtgtttttgtggtagttgaatcctggttattgattggcgacagccctaaagagcgtgcaaaacgtctgggtctttacatgacgtcgctatatggtggtacaacactcggtcaactgggcattggctttatcggcactcagggcatgattccttttgcagttattttagcgttattactgcttgccactctgccgccattatttttacgtcagggtcagcctccggcattacagcatcagcgcctgtcactgaaaaaaatcactcgtttcagtaaaccggcaattgtcggctgtctgacttcagggattgtgatggggactatctatggcctgatgcctttatcattgagtcaaagtaagttcaacaccgaacaggtctgtgtattaatggcagcgattattctgggtggaatggccattcagcctattatcagcaagctgtccattatagtcagtaaaaccctgttactggcaatggcttcactgttaggtgtatttgctgtcggtatgacctacctttctgaaagttatatcgtcatgatcgtggcgctggcgctgttaggcatgtcatcttttgccctctatccactcgccatcacacttgcctgtgacaaactggattcatcctatattgtcgccgcaactcaggttatgttgctaagttatagtatcggttctgccatggggccattaggggcagggaacttcatgtttcaacatcatacggttcagcataccggagcgatgcagaataatggattaatggacttcttcttcctggtcttactgacgactgcggtttatatgctattagcagctatttgtcgcaaagatcgtgtactggcaaattaaaaatacggagatattttaatgcagatacaacaagctaccgaacatgatttcccgacactgctccaaatttgggaagcctcagtgcgcgctactcatgattttttacctctgggaatgatcgatgagttgcgtccattggtaaatgagtacttacccaatctgaacgtttataagatagtgaacgatcagaataacgtggccggttttttgagtgtcgaacaaaatcgggtggaaatgctatttgtatcaccagagatgcgtggaaaaggtgttggcaaaatgttgttagagtttgcaatcagtgaattgaaaattaatgagctggatgtgaatgagcagaatcaacaaggtgtcggtttctaccagtatatggggtttaaaactttttcccgttcagaaactgacgggcaagggaatccattcccgttacttcatatgaaacttcagggcgggattccactttgtctttaatttaatcaaagataagctgactgcggaattccccagaccatgtggctcttcggcgtttagccgcttgactatcctttatactggtattctgtttaatcacatttaacgcaattcggttaaaaagcgccatttgcgcagccccatcagggtctttgagtgagatgttatcttcccgaaaggccacatctaatacccaatgcagctcattttccaccgcccaatgtcttcttattgccttagctgcggtttctgcatctaacgggagagagctgacataccagcgtgagtcgcggtgggcaggctgacctttcgtgctgcgttcactgaccacttcaatcacactctgtattgaaggccactgttgctgaagctcttcaggcaatgccgcttgaatttgcataacactttagagca

SEQ ID NO: 1998 - DNA, 9045 bp, Xenorhabdus sp.; identical to SEQ ID NO: 1997
  CDS (2356)..(2754)

SEQ ID NO: 1999 - DNA, 9045 bp, Xenorhabdus sp.; identical to SEQ ID NO: 1997
  CDS (2761)..(3924)

SEQ ID NO: 2000 - DNA, 9045 bp, Xenorhabdus sp.; identical to SEQ ID NO: 1997
  CDS (3990)..(4418)

SEQ ID NO: 2001 - DNA, 9045 bp, Xenorhabdus sp.; identical to SEQ ID NO: 1997
  CDS (4424)..(5146)

SEQ ID NO: 2002 - DNA, 9045 bp, Xenorhabdus sp.; identical to SEQ ID NO: 1997
  CDS (5149)..(6372)

SEQ ID NO: 2003 - DNA, 9045 bp, Xenorhabdus sp.; identical to SEQ ID NO: 1997
  CDS (6961)..(8160)

SEQ ID NO: 2004 - DNA, 9045 bp, Xenorhabdus sp.; identical to SEQ ID NO: 1997
  CDS (8173)..(8631)

SEQ ID NO: 2005 - DNA, 9045 bp, Xenorhabdus sp.
  CDS (12)..(413)
tgctctaaagtgttatgcaaattcaagcggcattgcctgaagagcttcagcaacagtggccttcaatacagagtgtgattgaagtggtcagtgaacgcagcacgaaaggtcagcctgcccaccgcgactcacgctggtatgtcagctctctcccgttagatgcagaaaccgcagctaaggcaataagaagacattgggcggtggaaaatgagctgcattgggtattagatgtggcctttcgggaagataacatctcactcaaagaccctgatggggctgcgcaaatggcgctttttaaccgaattgcgttaaatgtgattaaacagaataccagtataaaggatagtcaagcggctaaacgccgaagagccacatggtctggggaattccgcagtcagcttatctttgattaaattaaagacaaagtggaatcccgccctgaagtttcatatgaagtaacgggaatggattcccttgcccgtcagtttctgaacgggaaaaagttttaaaccccatatactggtagaaaccgacaccttgttgattctgctcattcacatccagctcattaattttcaattcactgattgcaaactctaacaacattttgccaacaccttttccacgcatctctggtgatacaaatagcatttccacccgattttgttcgacactcaaaaaaccggccacgttattctgatcgttcactatcttataaacgttcagattgggtaagtactcatttaccaatggacgcaactcatcgatcattcccagaggtaaaaaatcatgagtagcgcgcactgaggcttcccaaatttggagcagtgtcgggaaatcatgttcggtagcttgttgtatctgcattaaaatatctccgtatttttaatttgccagtacacgatctttgcgacaaatagctgctaatagcatataaaccgcagtcgtcagtaagaccaggaagaagaagtccattaatccattattctgcatcgctccggtatgctgaaccgtatgatgttgaaacatgaagttccctgcccctaatggccccatggcagaaccgatactataacttagcaacataacctgagttgcggcgacaatataggatgaatccagtttgtcacaggcaagtgtgatggcgagtggatagagggcaaaagatgacatgcctaacagcgccagcgccacgatcatgacgatataactttcagaaaggtaggtcataccgacagcaaatacacctaacagtgaagccattgccagtaacagggttttactgactataatggacagcttgctgataataggctgaatggccattccacccagaataatcgctgccattaatacacagacctgttcggtgttgaacttactttgactcaatgataaaggcatcaggccatagatagtccccatcacaatccctgaagtcagacagccgacaattgccggtttactgaaacgagtgatttttttcagtgacaggcgctgatgctgtaatgccggaggctgaccctgacgtaaaaataatggcggcagagtggcaagcagtaataacgctaaaataactgcaaaaggaatcatgccctgagtgccgataaagccaatgcccagttgaccgagtgttgtaccaccatatagcgacgtcatgtaaagacccagacgttttgcacgctctttagggctgtcgccaatcaataaccaggattcaactaccacaaaaacaccggcaacggctactccagctatgcagcgaataagcaaccacatttccttattgggaaaaaaaggcaataccataactgttgctgctaaaagcagcaaaaaacttacaaatgaaaaacggtgccctattttggcaataacaggttcaatcatgagtgagcctattaataaaccaacgtaataagaactggctaaccagcttgcgtagcctgtatcgatgctgaaccccgccattgataacggaattaagctcatcaggtaaccagaagcaatcgcaaacacagtcaagcccgcaacaggtacaaatgcactgtcattcttgcgcagcagtttcactactgtcgtctccacataaaaaatcagtcaggtatgcgctgcttctcatcaggatcttgccgaatggcaataacgacatataccaaggacagggatatgtcgtagtgattcaagcagtgatattttgctcaagagtcttgagttgtgcggactatagccgtttctatcagatagatacaatgagaaaaactgatactgatgaatgaaaagatttatgaagacagggaagataatgaaagggcaattattagcatttattgtagttgaaatctaatagttcataccagtttttaaatgaaaataaagtcaatttattgttttataatgaattaattgggtttggataaccatgaatttagtattaaagttaatagtctaattattataagagatcattaaaattactatgtggtatctgctatcccgattttatagctcttaaattcggttgaaaatgttatgagataaagataaggaattcctgcgtcaaagagttattgagctgtagtattgtgcgctatattttgtgtttagtctgtgtaggataaaaacaagaagtatcattttaacttcaattcgacttcttgtttttttccatttaaatcattgccaacgcttgatcaccaatgaagtattaatcccgccaaaagcaaagttattgctctggataaactcagtctggattgtacgtggttgatgcataatgtaatccagttcaccgcaagccggatcaacttcattcaagttgatggtcggtgcgaaccagccttcattcatcatttcaatactaagccatgcttccagagcaccgcaggcacccagtgtgtgaccgaaatagcttttcagtgaggagatcggcgttctgttaccaaagatgttgaaagtcgcctgactttccgcgacatctccacgctcagttgctgtaccgtgagcgctgatataaccaatatccgcaggttgaagcccggctgatttcagcgccatttccatacagatttgcatcgtttctgattttggctgggtgatatgagaggcatcacagttagtggcaaacccgataatttcaccgtaaatttttgcaccacgtgctctggcatgttccagctcttcgagaataagggtgcctgcgccttcgccaatcactaagccgtcacgattagcatcaaatggggaaggcgttgtttttggttcgctgtttttctggctggtggcgaatagggtatcaaatacagcggcttccgatgggcacaattcttcagcaccaccagcaaccatcacagtctgataaccattacgaatggcttcccatgcataaccgatggcctgactgccagaggtacaagcgcttgaggttggaatgactctgccacgcagcccgaaaaacagacctgtgttgaccgcagtggtatgaggcatcatctgcacataagttgtgccggtaatattattggtatgtttttcggttagcatggtggcgaattcactgacgggtttagtgctgcctgttgaggaaccataagcaataccggtttcaccatttgtcaggatgggatagccaatcagccccgccatttcaagcgccagttcagttgcccgagtggacatcagtgaaacacgtcccatagagcggatacgcttgcgggtatagtgatcaggcaaagtaaaatcagtaacgggagccccaagatgagtattaagcccatcatattctgcccattcaggcatttgctgcactgcattcacgccggattttaatccagaggagaccgattgccagtcgtgccccaaagcggtgatcccacccattcctgtgatgacgactctgcgtgtcatagcattcctccattgacggaaattacctgacgggtgacgtagcctgcaatatcagacattaaatagctggcaagcccggcaacttcatttgcctgccccatgcgcttcatagggatcatattcatagcttcttttaaagcgatttcttcaatttggatcatatcggtatcgattaatcctggtgcaatacaattcacggtgatttttcgttttgccagttcgattgcaagcgctttagttgcgccgataatgccggccttagccgcactatagttgacttgtccacggttccccatcaaaccggagacagatgacaacgtgataatgcgaccaccctgacgtagtccaatcattggcatcatgcagggatgtatcacattgtaaaaaccatccagattagtatgaatgacactatcccagtcacttccgtcaagtgctggaaatgctccatctttagcgataccagcattacaaacaatgccgtagtaagcaccgtgtacttcgatatctttttctaatgttgtacggcaggcatcgcgatctgagatatcaaaacttaatatccgtccgttgccaccgttagcctggatctgttccagcgttgcttctgcacctttcgcatcgcggtgatagtgaacaatagtggtgaacccatctgctgctaattggcaggcgattgccctgccgatccctttgctggcaccagtgactaaaactgaacgcattatactgctccatcccgtttaaatagttgtttaagttcttctttttctggttggtaggtatttagtcggcctgttaccagtacgataccgttacagctgacttcaccttcaaaactaccgaatttttcatcctgcaataacagattcattcgaatatccaaaatactgccgtatgtgaacgcaggaacctgactgcgcactgccctgccgccaagtagcatacccagagatgaatcttcttcctgccgttctttgcgatgccagccagaccaaactccgatagtttgtgccatcatttcaatggcaaaccagtttggcagattctgttctgcgttaaggaaaggtgccagtacgccttcatggttaactgttacctgacaatgcacgctttcactggagacacttataaccttttccagcagcaccatcggggcttcgtgggggatatagtgatggacaggtaaataagagtgagcgggtgagtagtcagacattataccgctcccagaatcagactggtgttatttccgccaaaagcaaaggagttggacatgataaccggtttttctaacagcacagattgtgccagaaggccacagcttgccaacgaagtatctattcccgaacgggagaaatcctgtgctggtaagggtaatttccggctcagcaacagccagcacaaaccagcttcacaggctccagcggcaccgagagtatggcctgtcaaatgcttggttgaactgcatggggtactctcgccaaagagctgattgatgatcagtgattccatctggtcattgagttttgttcccgttccgtgcaggttgatatagccaatctcttgtgtggagagtcctgcattactcaatgccatattaatagcttcagtggcaccctttccttcaggatggggggctgacatgtgccatgcatcactagactcccctgtaccaagcagtgctacggagtggggttctcgtgttagcaacaacagggtagacgcttcgccgatagtgatgccctgacgatcctggcaaaatggttcacacaatgtttccgagagagcctcaaggctattgaaaccgttgatcggcatacggctaagggtatccgctcctcccacaatcgccacatcaaccattcccatctcgatcagacgctgaccactgataatcgcccgtgaactggatgagcaggcggtggaaatggtgaaagccggtcctgtcaattcaaggtaattggcaataaatcgggaaggatcgcctagttcttgctgataatagtgataggattcatcgggttgttggttaactgtccggttgacatgagtatcaccttcgttaaggccggaagtactggttcccataatgactgcaacccgctcccgtccatattgtgctatggctttatccacttggggttttatctgcattaaggcagccagtaacagttggttgttgcggctattatgctggtgcaaatgcgggggaatagcaggcaattcagcatcaacgcctcccagacagcaggttttatcaggctgtaaccagcctgagcgcgcatacatgccgggagcgtgcccggaaaccagattctgtgcaatgtcatctacattattacccaaggcattaagcatgcctacggcagaaatataaatcatgttttactcttctaaatgctgaatggcgatgtcataaccaaaaataaactgccggacgtgtatcggataccgtctgccattttgggtgtcatattgaatttcagtaattaaatgacctttattatcatgtaattgcctgatgttattcgtgtcctgtagcgtccagtcctcaggcaggagtggaagccatgaagaaaccggccagtaactgagcatgatatcggccagaacctggctggcaggcggaatttccggtagtaccagagattgttccgcatggatgccattatggtcataagtcagtttgaacagacgaatacccagtgatgataagccagccagtgataactggtcttcactggcgtttagcagaacaattaatgactgctgtttgcctttcactgttgcggtcaataattgctgttcattgatggctggcgtgatacccggtgcaggaagtgagacacgtactcccggtttcagccatgctctggggatgccattttccggtaaattagtacaggctgccagcagacataccagtgacaggataaataatcgcatcatgcttttttgttccttttgggacgttcaggcattgccagcggtgagagcagaaatgccgtgaaaattccactacataatacaatgccaaaactactgattgcttgagtattgctgaataccagcatgcccagagtgagcagtgatgtgcacattgcaacggtgattgccagtagcgaagtcagaggtgtgccacgaggattgctgaaaaacagggtatagttaataccgatccccaaaaccagcaccagtgccagtattgagaatagattgagactgtagccgctgaagccgagaacagccagtgcgcaaccgagtgatagcagcgatggcaggatactgactgcaccacgacgcagaccaagcctgatcacataactgatcccgattaagacaatggagcctgccagcaaccagccaagtatggtgcgataaaactggaacatttcatcaaatgccagtttgcgatcgacccaactgatgccggtttgtttctcggctaactgacgcataagaacgctgtctttcacacctgttaccggaagtagaactccactctgaccgcttggcaacgtgatccacattaggcgccagccctcgctgatcacactgttaagccagtcattaggcatgacagtcattgggtgtaaatccggctgttttaccggcagccctgtttctgtcaggcgtgccatgatatttggaacagaggctttgagtagcttcagatctttctgctgttgagcaagagaagataatggcagtcgttgatagttttcgaacgtacctcgctgtttttccagctccagtagggggataaaattttccagatgttgtagtgtctgttctgcgttatcgccataaacaacaaaccacttctgatcactcctttgtccggttagttcggcaatatgtttttcctgttgatggatatcctgaggtagtgcttgtagctgagcgatatcatcattgatgtgtaaacgcgaaataccgattagagcaaatagtgtcagagtgacaggtaacccgatgcaaaacaatttgttacgtcgccataaagctagccagcgcattagcataatcatcgccgggattgggcgaacaggcagattcttagccaatatgggataccagcagatcactgtcaggcaagaagcggttaagcccgcagcagcgaatacagcgagctgacgtaaaccggggaagggagcaaacatcatgatcaaataagcaatgacggtggttgccagtgccatcagcagagcagacaataccttgcgcatactttgccaaggtgtaacttcctgcccgtgaaccatacgctcagtcagataataaatcgcatagtcggcagaaataccgatgatactgatgctcataaccagtgtcataaagtgaagttcaccgaatatacccagtgtcacaaccgtgcctgccaatgcacccatactgatggagagaacacataacagcagtggcttcagggaacgaaacacaccgtaaatcagcagtagtactcccagtacggttgcgctgcccagtgtggaaatatcatgttttgcctgctggctggcataatcactgtaaaatagtgttccccttgagatcacttttgcatcagggaaacgatttttcagtgattgctccagcttacccagttcagtgacagcctgatgtgcttgctgcatatcaaacgaagagccgttcagttcagcatggagcaaataccagatccttcctgtaccgtctttggcggtcagccagccatgctgtagccgtaaacggctggatgtctgctgaagagctagctgcgatcccctgaccaacatcagtggatcattgctgagttcctgcccgctgacgcctgagaaagccgaataaacctgagacaaaatccagtttgcctgttgagtaccttctgattgcagccggtcacgggtcatgggatcaagcatggcattacggtgcttatagtaaaaagtaccccattcctgttgatgatctgcatttatcggccctttgacatgagccagaaagggtgttttttccagctgttcctgccaatactcagcgggtgcttcattctcttccgttccggggctgatcatccataccagctggcgatcaagccgctgcataaattcatcttttaatgctggcggcatatctccggcgctttgcgcgggtaggagt

SEQ ID NO: 2006 - DNA, 10941 bp, Xenorhabdus sp.; identical to SEQ ID NO: 351
  CDS (2300)..(3718)

SEQ ID NO: 2007 - DNA, 10941 bp, Xenorhabdus sp.; identical to SEQ ID NO: 351
  CDS (2)..(1663)

SEQ ID NO: 2008 - DNA, 10520 bp, Xenorhabdus sp.
  CDS (8257)..(8835)
  unsure (1)..(10520): unsure at all n locations
ctaaaagggctggcggtgaaagttcagggcaaaatgaagtcatccttaccttgaataaatctggcatgggccctgtgactgcagccgacatcatccatgatggtgatgtcgaaatcgtcaagccgcagcacgtaatctgccatctgactgacgaaagcgcttccattagcatgcgtattaaagttcagcgcggtcgtggttatgtgccggcttctgcccgaattcattcggaagaagatgagcgccctatcggtcgtttgttagtagatgcttgctatagcccagtagagcgtattgcctacaatgttgaagcagctcgtgtagaacagcgtactgacttggataagctggttatcgagatggagactaacggtacaatcgatcctgaagaggcgattcgccgtgcagctactattctggctgaacaactggaggctttcgttgatttacgtgacgtacgtcaaccagaagttaaagaagagaagcctgaatttgatccgatactgctgcgccctgttgacgatctggaattgactgtccgctctgctaactgccttaaggcagaagctatccactacatcggtgatctggtacagcgtactgaggttgagttacttaaaacacctaatctgggtaaaaaatctcttactgagattaaagacgtactggcttcacgtggactttctctgggcatgcgcttggaaaactggccaccagcaagtattgctgatgaataactagatcacaggttaaggttttactgagaaggataaggtcatgcgccatcgtaagagtggtcgtcaattgaaccgcaacagcagccatcgccaagctatgttccgtaacatggcaggttctttggttcgtcatgaaatcatcaagacgactctgcctaaagcgaaagaactgcgtcgcgtcgttgagccgctgattactcttgccaagaccgacaacgtagctaatcgtcgtctggcattcgcccgtactcgtgataacgagatcgtggcaaaactgtttaatgaactgggcccgcgttttgcgagccgcgcaggtggttacactcgtattctgaagtgtggcttccgtgcaggtgacaatgcaccgatggcatacatcgagcttgttgaccgcgccgctgagtctcagacagaagcagcagctgcagagtaatctgtagaagcataaaaaaccgggataatacccggttttttatcgccttttaattcttcccgccattatctcttcttatcttccccattactttttgatttctagctgacagcagaacatccggcgatgatttattaatctattctggtagtattgattttatttccctgtttgatgagaggctgccatgtatcgtattggtcaattggcgaaattagcgaatgttactcctgatactgttcgtttttatgagaaacaaggattgatggagcatgaagaaagaacagaaagtggttataggctttatacaaaacaggatttacaacgactacgctttattcgctatgcaaaacaattaggttttacattagagacaattgtagagttattgtctatccgcgttgatcctgaacatcatacctgtcaagaatctaagagaattgttgatactagattacaggaaatagaagaaaaattattagaaatgcaaaaaatgcgcgattctttaaaaatgttaagcgatgcttgttgcggaagcgcacatatcagtacttattgttcaatattggaaatattagaagaaggggctacgaagaagtgatttttctttattctttgtgcattaagagtactattgataagctatatttattcaaataaccatatttcgaggtcactatgacaacgtataggcataaaaaaggcgttatcaaagataatgctatagaagctcttttacatgatcctttgttcaggcagcgaatagaaaaaaataaaaaaggtaaaggaagttataatcgtaaagcaaaacatgggaaaggaagtggttgggaggccaatgataataattttttcaagttattatcattggccttctaattttctgagtacaaatatttccgaattggtagctgtgtaagtgacttatagaaagaatgggcttggttggaatagcttttcaacttcaggaacaaattttttatctgtaataaacatgattacatggtcgccttgttgaataatgctgtaatcattagcgatgatgacttcttctccgcggacaatggcgccaatggttgttcctgagggaagttttatatctcctatttttctcccaactactttggaagtatgttcatcaccatgagcaatcgcttcaatagcttcagcaacacctcgtcttaatgaaaatacactaacgatatcggctttgcgaacatgcccaagtaatgcagatactgtggcttgttgaggtgagatagcgatatcaatgacaccaccttgaactaaatcaacatatgcactacgttggataagtaccattgcttttttggcacccattcgttttgcaagcatggctgacatgatattagcttcatcatcgttagttaatgcaatgaaaacatcaacttgctcaatatgctcttctgcaagtagctcctgatcagaagcgtcaccatagaacactatagtatcgtgtaatagctctgcaagttcagttgctctttcctgattatgctcaataagcttaacgctataatctttttcaaggcgtaaggctaaacccgcaccgacgtttccgccgccaacaatcatgatacgtttgtatggtttttccagacgctgcaactcgctcattactgctctgatatgttgtgatgcagcaacaaaaaatacttcgtcgccagcctcaataacggtagagccttgtggtctgattggacggtcttgtcgaaatattgcggcaactttgctgtcaatatgcggcatatgttcgcgaagagaagataatgcattccctacaagtgaaccaccataataagcttttactgcaacaatactgactcggccttcagaaaagttaacaacctgtaaggctccgggatattggattaatttgtagatatagtcgataactaactgctctggagatataagataatcgataggaatatcaccgggcttaaataacttttctgattccctaatatattctgatgaacggatccgggcgactttatttggtgtattaaatagagaataggcgatctggcatgcgatcatgttggtttcatctgaatttgtaacagcaactaacatatcagcatcttctgcaccggcttctcttaaaactctgggatgagaaccatgcccattcacaacccgcagatcgaatttgtcttgtaactggcgtaaacgatctgtatcggtatcaacaacagtaatgtcattgttttcatcaactaagttttcagctaatgttccaccaacctgaccagcacccagaataattatcttcatagctattctctttatgtgttagaagttgcaattgttttgctattttagcaaagtcattacattctctcgcccggtagagcgagagaaaagctattctattattgcttagtcaatcgagcataaaagaagccatcaccacctgttatctcgggagtaatttgtattcctggggtctcttgagtacctgttccagagagcttggcatccggattgcgttttaaaaatgctttaacttgctcgctattttcatcaggtaaaattgagcatgtggcataaaccagagttccacttttctttaagtatggccaaatagcatcaagtatttcagattgaagcgtcactaactgatcgatatcctcatttcttcgtaaccattttatatctggatggcgacgtatgacacctgttgctgaacatggtgcatcaagaagaatgcgattaaattgttctccgtcagcccatttgtgtgggaaacgcccatcacccgttttaatgacagcatttaaattaaggcgctgtaagttttcttccacacgcttaattctttgttcatcaatatcaacggcaagtactttggcgtttggtgccatctcaagtatatgagttgttttgccgcctggtgcagcgcaaagatcaagtatttcttctccatcacatggcattaataattcagcacagccttgtgcagaacgatcctgaatagtaacccagcctttatcaaacccgggcagtatattgacaggacaagggttcaatagacgaattgcgttgggatgatctgtgtctaattctgcggctatattggctttttgtagcaaagaaagatattgatttgtagagtgatgtatctgattgacacgtagccacattggtggtttttgattattcgcaccgacaatatgttgccaattgtgaggataagctttttgaatacgagttaatagccatttgggatgtaaatagtgaccgacatcattagattgttcgactaactcttcttgctgacgctgaaattgtcgaagaacgccattaatgagtcctttcaattgtggacgctttaaactgattgtcccattaactgtttctgcgatcgctgcatgtgccggtatacgtgtataagtaagttgatacattccaaccatgatcaaatagtggaaaatgcgttgcttacctttcaatggttttgccattaattgggctataagccattccagctgaggtaaaactctcattacaccaaagcagagttcctgtaggagagctttatctttatcggatactttttgttggagttcgggtataacagtgctaagtgactgtccttgctccagcacttggctaatcgcttttgcagcgatgcttcgcaggttatatgtttttttcatggcatggtcaaaagctgagtttcatcagcgtaataatagtagtaaagcgagaagatgcctgtatgctgacaccatacaggcaatgaatgttagttgattttgttacccggagtgaaccattcgcgcttagaatttaataaatcggcagctgacattgctttttttcccgggggctgcaattgagtaatattcaatattccatcagttgtagcgacctgaataccttttttatccgcgtggagaattgttcctgggatttggttagatttaccgccaatagcatgagccttccatactttaatgggctgttcatcaataaagaaatagcttattggccaagggttgaatgcacgtacacaacgttcgagctgaattgctgataaattccaatccattctggcttcatctttgctgagtttttcagcataagtagcaagaatattattctgactttccggctgactattacccgatgttattagacttaatgtattaagcaatgcatcggagccgatatcggcaagtttgtcgtacaggctcgcagtagtatcttcgtttgtaattgggcaggttgcttttaacagcatatcgcctgtatcaaggcctgcgtccatttgcatgattgttacccccgtttctttatctccagcccagatagcacgttgaattggtgcagcaccgcgccaatgaggtaataaagaaccatgaacattgaggcaccccaaaggtggcatatctaataccgcttggggaaggatcaaaccatatgcaacgacaaccatgatatcggcttgttgttccatgacccattgctggctttcttctgtacgtaatgtttttggctggaaaacagggagatgatattcttcagccaatacttttacaggacttggtgtcagttttttaccccttcctgccggtttatcaggttgagtgagtacgccgacaatttgatgttgagattttaataaagccgctaaatggtgagccgcgaaatcaggggttccggcaaaaataatacgtaaagaatcagacactgttatttcccgtaatgataaaatttacttagccttggctcttagtcggtcaattttttcgactttttggcgaatacgctgtcgttttaacggagacaagtaatctacgaagagtttaccgagcaagtgatccatctcatgttgaatacaaatcgccaacagaccatcggcttccagctcaaatggttgaccgtgataattcagtgccttaattttgacttgctcgaatcgtggcacaaatagcacgttgttcaagaactgataaacaaccttcttcgatacctgtttctcctgactcggttactagctctgggttaataagtacaagtctttggtcacgattctctgaaacatcaataacaacaatgcgttgatgaatatcaacctgagttgctgctaagccgattccttcttctgcatacatcgtttcgaacatatcatcgatgatacgctggatttctgcatcgactttttctactggcttggcaattgtgcaaagccgctcatctggataatgtaatacttgtaaaactgacatatatgtttagaactgcatccaaaaagtgagtgataattagcgcctattctagacatttcctgattagattgacagtatcgcctacaaattaatcatgtgagcatgacaacatattgagtcaggatgacaataatggaaatgatggaaatatggttgagaatgaaaatggtatctcacctttcagtagcaaaagcagtgtctataattgagcacctactgcaggttaaaaatattactcatgctgtgatgaaagattgtggcttatcacctacacagtgtgtgcaatttttaaaggcaaatccttctgttttgctttccagtcttaattggttggagcaatcagaaaatcacttattaaccttttctgatccagaatacccttctttgttgaaacaaatttattcgcctccactgatactttttgtctctgggaaagtaagcacattatctgagaaacaagttgcaatagtgggtagccggtcggcaagtttttatggtgaaaagtggggaagagtatttgctggagggctagcggagaatgggatagtaataaccagtgggttagcggttgggattgatggtatctgccatcaggctgctattgatgcaggggggaaaaccgttgctgtattggggagtggacttgaaaatatttatcctaatcgtcatcgaactttagcctgttgcattaaagaaaatggggttctggtttctgagtttttccctgacacgccacctaaagctaaaaattttccaagacgaaacagaattattagtggattaagtttagcgattttgattgtagaagctcatcaaaatagtggttcactgattacagcacgctgtgcacttgaacaaggaagggatatttttgcattacctggcccactaggaaggccttcgagtgatggtaatcactggttgatcaaacagggagcttatttagcaaccagtgtaattgatataatggaacatattaatgctaattttcaatggattaatctggaagagggcaatgaaaaacaatttgagcaaacagagttgccatttgctgaggtgctggttaacgtaagtgatgaagttacacctgttgatataattgctcagcgctcttctcttcctattacagaagtcatgactcaattattggagcttgaattaatgggaaaagtggctgttgttgctggtggttatgttcgagtgaattgaaaaattgaattttctcttaacctgaactttatggttttccaataagtatcgtgattagttttccgtgagtaagatatgcctaaaaaagtaccctttgcagtaaaacaaacagaatattgcgctgaatgtggtgctgaactagtgatccgcaacggggcctatggtccattttatgcttgttccaattatccatcatgcagttatgttcggtcgttaaaaatatcatcagatggacacgttattaaggaactggaagggcaaatttgttctaagtgcggttcaactttggttttacggcaaggacggtacggtatttttattggctgtagtaattatccagaatgtaatcatattgagttgattgataaacctgatgactcttcagttaattgccctcagtgtcagaaaggtaagttatttcagcgtaagtcacgatttggtaaaacattttacgcttgtaatcgatatcccgaatgccagttaacactgaataataaaccggtacaaggagaatgtgagctttgtcattatcccttgttggtcgaaaagaaaacagcacagggtattaaactgttttgtgctagtaaattgtgcaataagcagcaatccattgaaactgagaaataaaatgagtaatgaagcatctcctgcatttgatttaattattacggctttaaaagaagaaaaagtcattgcttatcctacggaagctgtttttggattgggttgtgaccctgacagtgaaaaagcggttaataaattattattgctgaaaaatagacccaaggaaaaagggttaatccttattgctgatagttatgagaggttatgtccctatattgatgacaatcagttggataatgagcagaaaaggacaatcttctcttgttggccgggaccggtgacatgggttatcccagccaaatctgggacaccaaagtggttgacgggaagattctcaacactggctgtcagagttactgatcatcctttggtcagagaattatgtgctctttatggaaaacctcttgtatcaaccagtgcaaatttaagtgggctggaaccatgtcggagttcagaagaagtttgtcgacaattcggcaacgattttcctgtgctggagggggaagtgggtggacgtaagaatccatcagaaatcagagatgctttgacaggtaaactatatcggcaagggtaaggaataatggataaattcgcggtttttggtaatccgatcgcacatagtaaatctccttatattcatcaattatttgccaaacaaacgggtattgaacaccaatatgggagaatacttgctccgttagaacattttgaacaaacattgaagcaattttttgagcaaggtggtttaggtgcgaatataaccgttccctttaaggaacgagcttatgagtatgcacatcaactgagtgagcgagctaaacactgtggtgcagtcaacacattcaagctaattgaaaataaccagcttctgggtgataacactgatggggttgggttattagcagatntgcagcggcttaacttcattagcaaagggcagcatatcctgattattggggctggtggagcagcaaaaggagttatatctcctttactagactttggatgtacggtgactattactaaccgtacttttgctcgtgcacagggtatagtgaatatattctcctcatttggtcatattcaggcagttgaaatgaagtctcttctgaccccatattttgatcttattattaatgcgaccgcttctggccttgatggaagtgtacctgaaatatctccatcaattttccgtaatggtggtgcttgttatgatatgtattatcaaaaaggattaacgcctttccttagttttgccaaggaaagcggagcctcatttttggctgatggattagggatgctagtgggacaagcggcgcatgcttttgaactttggcatggtgtcttaccaaaagtagaacctgttttagctgctttaagagaagaattacgtttatgaatcaagcaattcactttcctgaccgtgaagaatggaatgggcaggaaaacaaagttatctttcctgctatggtcaatggtttattggtgcagtgcctgatcagtgctgatgaattaactcgacgttatggtaatgactttcatccgcttgagctatttcgccagcatcgttgggatttggaggaagaatttgaagaaatcatcctacgtgggcaggatgatcaatttggatgctattcgttaccgtctgatatgtctgctaggtaatcatctttccagcgggcgtagttattagcagaataaagcagcccttctaattcttcatgtttgagttttcgcacttgtttcactgggctgcctatatacagatatccactttctaatatttttcttggtgggacaagactaccggccccaataatgacattgtcttcaatgatagagccatcaagtataattgaactcatcccaacaagtactcggtttcctatcgtacagccatgtaacattgctttgtgaccgacagtgacttcctcgcctatgattaatgggaagccatcaggattatcagatgatttatgagttacatgtagaatagaaccgtcctgtatattggtacgagctccaatagaaacataattgacatcaccacggatgacaactagcggccagatacttacattatctgccaatcttacatctccaatcacaatagaagtagggtctagcatgactctttggccaatttgaggccgtaagtttaaatatttacgtaaaacggtagacataaaaacctcaataacagtaagagaggataatattgcgtgaaatgttattgaggaaaagatcacccttaga

SEQ ID NO: 2009 - DNA, 10520 bp, Xenorhabdus sp.; identical to SEQ ID NO: 2008
  CDS (7770)..(8255)
  unsure (1)..(10520): unsure at all n locations

SEQ ID NO: 2010 - DNA, 10520 bp, Xenorhabdus sp.; identical to SEQ ID NO: 77
  CDS (4090)..(4419)
  unsure (1)..(10520): unsure at all n locations

SEQ ID NO: 2011 - DNA, 10520 bp, Xenorhabdus sp.; identical to SEQ ID NO: 77
  CDS (4391)..(4603)
  unsure (1)..(10520): unsure at all n locations

SEQ ID NO: 2012 - DNA, 10520 bp, Xenorhabdus sp.; identical to SEQ ID NO: 77
  CDS (4628)..(5575)
  unsure (1)..(10520): unsure at all n locations

SEQ ID NO: 2013 - DNA, 10520 bp, Xenorhabdus sp.; identical to SEQ ID NO: 77
  CDS (5665)..(6951)
  unsure (1)..(10520): unsure at all n locations

SEQ ID NO: 2014 - DNA, 10520 bp, Xenorhabdus sp.; identical to SEQ ID NO: 77
  CDS (7050)..(8426)
  unsure (1)..(10520): unsure at all n locations

SEQ ID NO: 2015 - DNA, 10520 bp, Xenorhabdus sp.; identical to SEQ ID NO: 2008
  CDS (9660)..(9929)
  unsure (1)..(10520): unsure at all n locations

SEQ ID NO: 2016 - DNA, 10520 bp, Xenorhabdus sp.; identical to SEQ ID NO: 2008
  CDS (8845)..(9663)
  unsure (1)..(10520): unsure at all n locations

SEQ ID NO: 2017 - DNA, 10520 bp, Xenorhabdus sp.; identical to SEQ ID NO: 2008
  CDS (6576)..(7640)
  unsure (1)..(10520): unsure at all n locations

SEQ ID NO: 2018 - DNA, 10520 bp, Xenorhabdus sp.; identical to SEQ ID NO: 2008
  CDS (1358)..(1771)
  unsure (1)..(10520): unsure at all n locations

SEQ ID NO: 2019 - DNA, 10520 bp, Xenorhabdus sp.; identical to SEQ ID NO: 2008
  CDS (778)..(1170)
  unsure (1)..(10520): unsure at all n locations

SEQ ID NO: 2020 - DNA, 10520 bp, Xenorhabdus sp.; identical to SEQ ID NO: 2008
  CDS (3)..(737)
  unsure (1)..(10520): unsure at all n locations

SEQ ID NO: 2021 - DNA, 14620 bp, Xenorhabdus sp.; identical to SEQ ID NO: 78
  CDS (3)..(287)

SEQ ID NO: 2022 - DNA, 14620 bp, Xenorhabdus sp.; identical to SEQ ID NO: 78
  CDS (2608)..(2913)

SEQ ID NO: 2023 - DNA, 14620 bp, Xenorhabdus sp.; identical to SEQ ID NO: 78
  CDS (12661)..(12831)

SEQ ID NO: 2024 - DNA, 14620 bp, Xenorhabdus sp.; identical to SEQ ID NO: 215
  CDS (12926)..(14053)

SEQ ID NO: 2025 - DNA, 14620 bp, Xenorhabdus sp.; identical to SEQ ID NO: 215
  CDS (9695)..(11614)

SEQ ID NO: 2026 - DNA, 14620 bp, Xenorhabdus sp.; identical to SEQ ID NO: 215
  CDS (5725)..(5982)

SEQ ID NO: 2027 - DNA, 14620 bp, Xenorhabdus sp.; identical to SEQ ID NO: 215
  CDS (5232)..(5432)

SEQ ID NO: 2028 - DNA, 14620 bp, Xenorhabdus sp.; identical to SEQ ID NO: 215
  CDS (4615)..(4893)

SEQ ID NO: 2029 - DNA, 14620 bp, Xenorhabdus sp.; identical to SEQ ID NO: 215
  CDS (3452)..(4576)

SEQ ID NO: 2030 - DNA, 14620 bp, Xenorhabdus sp.; identical to SEQ ID NO: 215
  CDS (3246)..(3437)

SEQ ID NO: 2031 - DNA, 14620 bp, Xenorhabdus sp.; identical to SEQ ID NO: 215
  CDS (2423)..(2890)

SEQ ID NO: 2032 - DNA, 14620 bp, Xenorhabdus sp.; identical to SEQ ID NO: 215
  CDS (89)..(1006)

SEQ ID NO: 2033 - DNA, 7191 bp, Xenorhabdus sp.; identical to SEQ ID NO: 216
  CDS (2929)..(3576)

SEQ ID NO: 2034 - DNA, 7191 bp, Xenorhabdus sp.; identical to SEQ ID NO: 216
  CDS (1837)..(2520)

SEQ ID NO: 2035 - DNA, 7191 bp, Xenorhabdus sp.; identical to SEQ ID NO: 216
  CDS (805)..(1728)

SEQ ID NO: 2036 - DNA, 7191 bp, Xenorhabdus sp.; identical to SEQ ID NO: 216
  CDS (20)..(430)

SEQ ID NO: 2037 - DNA, 12024 bp, Xenorhabdus sp.
  CDS (3019)..(3222)
  unsure (1)..(12024): unsure at all n locations
ccgcttattgctctggccgcagataccacatttgttgaaccggatgaaattgttcctgttggttctctcgatccggatcatattgtcacgccgggggccattattgattatctcattgttaaataaaaagggaattaactatggacgttaaagaactgatcgctcgccgtgtagcccttgaattgaacgatggagatatcgttaaccttggtattggtcttccgactcaggtggcgaactatttgccagagggagtgcatattaccctacagtctgaaaacggttttctcggtttggggcctgttacacagatcgataaagatttggtgaacgcaggagggcaaccttgtggtgtcttgccgggagcttctatgtttgacagtgctttttcttttgcactgatccggggtggtcatattgacgtcagtgtactggggggcttgcaggttgaccagaatgcaaatctggctaattggatgataccgggaaaaaggataacgggtatgggtggtgcaatggatttggtcactggggctcgtaaggtgattattgcaatggaacattgtgcaaaagagggttcagccaaaattttgcgtgagtgtactatgccactgacagcagtaaatgcggtggatacattgatcacggaacttgcagtattccgtttcgaaaataatcagatgatattgtttgagtatgcaccgggtatagatattgacactatcaaaatgaaaactgaggctgaatttatcatctctcctaatgtaaagccgatgttttctggtgtgatcggagatggcctatgataggtcgcatttctcgtataatgacacggattgttagccgctacctgcctgatcccctcatcttcgccatgttactcaccatacttacctttttcattgcgctatcgttgacgcccagcactcctgtggatctggcaaaaatgtggggggatggtttctggaacttacttgccttcggaatgcagatggcgctgattatagtcacgggacatgcactggcaagttccgatccggttaagcgcctcctgaggctgacagcttcactggcaaaaaatcctgctcagggagtgatgttggtgactttttttggctccgttgcctgtgtgattaattggggatttggtctggttgtcggcgcgatgtttgcccgtgaagtagcacgtaggatacccggctctgattatccgctgctgattgcttgtgcttacatcggctttctgacatggggagggggtttttccggctcaatgccgctgttggcagcaactcccggtaatccggttgaacatatttcaggtctgatacccattagccagaccctatttaccagttacaatatctttatcactctcagccttatcgttgtgatgccgtttgtcacccgtatgatgatgccgaagaaagaggatattgtgataatcgatccagtcttgctggaagaagagcctgattatcagaaaaaattgccagaaaatgccccgttatctgaacgtatggaagaaagccgtattatcgcagggcttatcggaatactgggatttacctacctcggcatatatttcttcagcaatggttttaatattaccatcaacacagtcaacatgattttcctgctgaccggtttattactgcatagaaccccgatggcgtatatgcgagcgataagtgcagcggcgaaaagcactgcgggtattctggtgcagtttcctttttatgccggtatacagttaatgatggaaggctcagggttgggcaggcttatcactgagttttttatcagcgttgccaacaaagatacattcccgatgatgacgtttttaagttctgcactaattaactttgctgtgccgtctggtggaggtcactgggttattcaggggccgtttgtgatgtctgcggctgaagctttgggggcggatttaggcaaatcggttatggctatcgcgtacggtgagcaatggatgaacatggcgcaaccattctgggcattaccggcactggctattgcaggcctgggtgtgcgtgacattatggggtattgcatcaccgcgcttcttttctccggcttgatatttattataggacttaccatgttttattaaatgatacatttcgcggtggctggcctttgtcactccttttccgccgcgatgcatcctgaagcccatgtatataaataaatttttgctttagggtaatttcgccactctggcttccactacgacacccagaatatgaatattctcactgagaggtatcatactgtactgaggattcagtggcttaagatatgtatcatatccttccgtaattaattgtttaaacgttaatttttcttcaccctcaagttttgcaataactaatttattagcgaggggttttactttcgggtctactaaaatgatcattccctgcgggatactgattccatttggtgaagtcatagaatcattttttacttccagccaaaaagcatggcgtgaacactcaacagtgctgtcgtaccgctgtttaatactgtagggcaatatgggttcttcacaccaattgccggcatctgcccagtcgagtagcgggtattgtttgcaggtatcgggtttctcaaccagagcaatattcttgccataaacagcggttaagagtttctttgcctgtttgtccaatgtggggctgaaatctgtgattgtgacctctaatttattggcaaaataagcggctatctccaaattaagcgcatttgtaccattaagataatgcgagattgctccctggctcttgccaagttcatccgcgaatttttcctgagagatacctagctgtttcttctttgacacgtatatgtcttttaagcgtttggcatctgcaagttgttctgctgtgagtttctttttcataaaactcattttaataccaatgctattaaaatagtaaatactaaaagtattgaaatatttaatactttggatattattctgaaatacaggaggcctatatggaaaagatttcattatcagaatatgtaaaacaaaatggtcaggcgaaaacagcggatttaattggagttcatcaaactgctattagtaaggcattacgtgccgggcgaaaaatatttctgatccgtcaggaggatgggagttataaagctgaagaatgtcggccatttccgagtcagaaaccacctgaatcagggaaataatgagtttcagcagtattaattattgattcttgttaattagttagttgattttattctcatctgttttgtgtatattctttcggagaaaatatggcttattacattcgttgttatctcaaaacaatggggagtttttttgatattatgcccgcaaatgattatcaggaaattttggataataaaaagaatctggaaaatcaagcctattcggcctgccatctggcctttgcctcctcccgatgtattaagggattacgaatccatattgtctggaagcactgaaagaatattattattcagggagaaagagcaaaaatttcagtatgacaataatagattggcgctggatggcatgataaaaaaagagaggagaggacagtggatggggttttccattgcgatgtttatcttaattattgcgacattttttgcattcagaggtgaaatggtatttgcaggaacgttagttaccattgatctgattgggctggcagccgtatttgtgataggaagaaagttaagcagtaaatgatccggccaaaattcgacagtaattccagtattgttgcagtaaacgcaaaagacttctgcatttattgctctttttcagagtaaacgatctcatgataataacccccgaattaaacattaacggtatgagattttattatgtctgttcctgcatttggattaggtacttttcgtctgaaagatgatgttgtcatagcatcggtaaaaaacgctcttgagctggggtatcgcgcgattgatactgcgcagatttacgaaaatgaagcagcggtaggccaagcgatagaagaaagtggtattgcccgtgaagacatttatattacaacaaagatctggacagaaaatctgagcaaagaaaaagtgatatcaagccttaaagagagtcttgtgaaactgcgcacgaattatgtggatttggcactcattcattggccgtcaccaaataacgtggtgagtgttgcagaaacaatgaatgcgttgctggaagctaaagaaatggggttaacacgtgaaatcggtgtttcaaatttcaccattgatttgatgcaacaggctattgatgcggtaggcgctgaacatattgccacgaaccagattgagctttccccttatctgcaaaatcgtgatgtcactgcttgggcacaagagcatggtattcatatcacttcttacatgaccttagcgtatggcaaagcgattcatgatgaggttatcggtcgcatagccgaaaaacaccagtcgactcctgcacaggtcattttgtcttgggcaatgtcattggggtatagcgtgatcccttcttcaactaagaaagagaatttagcgagcaacttaaaatctaccgcattgaaacttgatgcagatgacatggccgctattgctactcttgaatgtaacgaacgtatcgttaatccggaaggccttgctcctcagtgggataattaatcactcctgcctgttcatttactgggtcatccctcagcattgctgagggaaaacatattcaaatattacactaccaacgaatctgcgcctttcggctggtagaacgatttgaaaaacattttgctaaaatatccaatattttattgggatcaatgacctgtaaagtagatttacaacatttcgacgatggtaataccaccgataatagagataagggcagcaagagtactgagtaacacagtttctgcggaggtatctgtgtaggctttgttagtgattgccagagcagggactgctgttgcggttggcaaaaacccgataataaatgccgatttcagcatatcgctttgaagacctaatgcgagacctgtaccaaggactaaagctgcctgtacaaagtttttcacgaagacgttaaaaacgatttcaacactgatctttaatttaatgcctgagagtaataggccaaggaagaacagggcaacaccacccgccgttttacctaattcatcgacggagttttgcaaaatttccggtagcttgacgccaaaaattgccagcagtgctcccagaatgggtaagaacactaatggttgagcaatgtcttttccaaccgattttaaaacactactatttttcttcctgtcacttatcatcagtaaagtgaaaggaataataataatcgtatagattaaattcccaagtatcatggcaatcaggccggatgaaccgacggttgccaataataccggtggcccacagtaagccatgtcagggaaagaaacggataatgcctgcatggccgagtcttttttatcatggcggaagagaatcttacctgcaaaaaaaccgataatataagatgcaatcaacccgacagctaacgttaataagtagttaatattcagtagtactgatggtggtgcttttgcggctgcgagaaataaagcaaagggtaaggcaatcttaacaacaaagtcggcaaatgcttgtgaatattcacgttttatcaatccatatttaccggacagccaacctaccgctaaacctaaaacaataggcccgagtgcagccattattatttgtagtagcataaagccccttaaaagatgaaataacaatacacgttaatcagaatagcaggcttatgaggtatctgagatccttatactactttaatcccagataggacagaatggccagttgaacctttagtgctgagtttaaggtagttgaggaggttaaccccgtaatatgggatatcctcattagtcgtttttctatttttcaataaaattaatatgataagtgatttggcttctatctcttgctttactttcaacgagttagttttgtgtgagctgattaaaataagtgtgtaacttcaggggattgtactgaaattacaagccgaatatcaataaaatcatcatacattctggctattggtacggtaaactctgtcacaaaatcgagcaatgagagaggcatctggttataaaactaatatagttattcactacagagaaataatatggatattaaaacgttatgtaaactttatcagtcaaaagaagatattaaatatctctttttctgggggcataaaacccaccatactgaactcatcactaaatcatgcttaagccagtggtatcctgcgaaatttgtcgtagatggcgtcagttatattagtgcagaacattatatgatggctgggaaagcccggttatttaatgattttgctacaatggaaaaaattattaatgcaaaaaatccgggagccgcgaaatcttatggtcgggaagtgagagggtttaatcaatcaatttgtaacgagcatcggttaaagattgttattgatggaaatatagctaaattttctcaaaatccggcaatggaggcatttttattgcggacgggagataaagtattagtagaagccagccctgtagataggatttggggtataggaatggcagaagataatcctgatatttataatcccttagcatggaatggtttgagcttactaggctttgctttaatggctgtgcgcgaaaaattaaaaatcgagggtgagtgaatatagaatatgcccgacactcttgttcattaggatatacacttcgtctttcaagttttgcctctttgttggctgcgctcgttcgccccagtcaaatagttatctatgctcctggggattactgagaggctcctgcctctcaccggaggccagcctttggctgggcaaattagttcccgacaaatttgtctctcccttgccgccgcgatgcatcttgaaattcattgtgtatagaatcaatgacaccatcaataataaaggagctggctatgttttctggtaaaaaagttatcattatccacggttatactgcttcaccttcatcaaattggtttccctggttaaaagaagtgctgactgaacaaggtgcagaagtaattgtaccggaaatgcctgaatcgttatcacctacaccggaagcgtgggccagaaagctaatggagattgcacccaatgtggatgataatacaatctttattggtcatagccttgggtgtgtgactttacttcgtcacttagaagtaatcaaagacacgactgataaaattggtgggtatattttggttgcaggatgcgattctgcgcagagtaccatgccggaattagactgtttcactgttcagccattgaattatgtatttttacgtgaagtaacagcacaccgtgtttctatcatttcttctaatgatgaaattgtatctcccgaatcatctcatgctcttgctaattcattacaaactgaaattattaatattgagaatgcagggcattttctcgacagggaaggttttatccgtttgctgccggtttatgatgccctgaaaacaatggtatccggttgaacagtatctactcactttacttctgttattttgcctaaactatcatcagccatcagataaaaaagatgttttgtggaacaggcttatctatttttatgtttcgcattacgttgcctgatgtgctggtcatgggcaatatgatcagtcaaaacaatattattgccgttaattttattttgggcagaggtgaaggtcatgattatttccgcttcaactgattaccgggctgcggcacaggataagctaccccctttcctgtttcattatattgatggcggagcctatgcagaacacaccctgagacgtaataccgaagatttatctcatattgagcttcgccagcgtgtgttgaaagacatgtctgaactgaatctggaaacgtgtctatttggtgagaagatatcaatgcccgtggcattggctcctgtcggtttaagtggtatgtatgctcgccgtggagaagtacaggccgcccgtgccgcgactaaaaaaggtattccattcaccttatctacggtatctgtatgcccgattgaagaagtggcttcagcaatcgagcgcccgatatggtttcagctttatgtattaaaagatcgtggttttatgcgtaatgttctggaaagggcaaaggaagccggtgttaaaaatctggtatttactgctgatatgcctgttcccggtgctcgctatcgcgatgctcattcaggaatgagtggcccgaatgcagcgatacggcgttttttacaggcaatcacccacccgcgctgggcgtgggatgttggtgtgatgggaaaaccacatgatcttggcaatatatctgtataccgtggtacaccgaccaggctggaagattatatcggttggatagggagcaactttgatccgtctatatcatggaaagatttagagtggatacgcgatttttggcaagggcctatgattattaaaggtatccttgatcctgaagatgctaaagatgctgtccgttttggcgctgatggtattgttgtttccaatcacggtggacgacaactggatggtgttctctctagtgccagagcattaccggctattgcagatgctgttaaaaatgacattacaattctggctgactcgggtattcgcacagggttagatgtcgtaagaatgcttgcattgggtgctgacagtgttttattggggagagcctttgcgtatgctctggcagcagcgggagaaacgggagtttccaacttattagaattgattgataaagaaatgcgggttgctatgacgctgacgggagcgaaatctgtcaatgatataaattcagatttattagtaaataatctgcgcccattattttaacttactgctggtttgaagttagtagagtcagcaaggtatgaagctgctgactcttttttattagatcccgattgggcgatacccttgccattctggtttatcaggcagcccgttagggttttcagtcagatgaatatagtagccactcacttgtcccaaaagcaggcactcatcaacatctttcagattatctttatgtaattgatcatagccagtaagcaaatatttttttgctttttcttttgcttcttcagctgtacggccaacaaaaaaaccgtattcatgggcttctgccagtgaattgttttgatagccacctacgtttacaaaataaagtcgtaaatccccggcgtattcatttttgctgagagaaatatcatagccatctgcccatctaacaggcatatagccatccagatgaagtttatctttatcaccaaaccacacatcgcgtaacacgggataggcttcttcaaccttatttatagcaacaaactggacatcatgaacttcgatattggattttccggcatttccaccaagataaaacatatataactgagtcatacctttccttattgctttttttaatttttactctcagaagcaagatgataattgatttaaagcacaatttgaccgtaagaaaatagtttagcttttcctgtcagataaacacgttttccttgcacttcacacaatatatcaccaccccgttcagataactgacgggcgcggaggatggatttattaagccttttaccccagaaaggcgctaaaacacaatgcgttgaacccgtgacaggatcttcattaacacctttcgccggagcgaaatggcgtgaaacaaagtcagtggatgaatcgccgggagcagtaatggccagtcccggtaaagggagggaagcgactttatcgaaatcaggttgaatatggcggacttgctcagcagaatccaatacacagatataacggtcatgggaggcaaatactgctttgattttttgccccagagcatcctgaataacaggaagtagggtggcttcttcctggcaatcagcggcagggaaatctaatgtaaaaacaccatcctgatgagtcatatgcagatcaccggaacgggtcttaaatgtaattaatttattttggtatgaacatttttcaacgaggacaaaagcggttgccagtgtggcatgcccacataaattcacttcaactctgggagtaaaccagcgcaggtgatcaccgactaaaaaagctgtttctgaaagattgatttcagcagcgatagcgataagtacctcatctgacagccattcatccagtaagacaacagcagcaggattgccggaaaagtctttttctgtgaaagcatcgacatgataaatagggtatgaagacatcagaaactcactttacataaaaaaatctcagctagcatgttgaaattgcttttgattgtaaaggggtatttgtttttggcctactaactacctataactggtagttgatcttagtggagaatgactattaaataatgatttttagttataatcacactaggatatttatgcagtttaaaaggatcatcggcttgctttttcttatggtaattggctgttctcaggcgttcgcgcatgattttagctataaaagtgatatacctgctgataacaaaacgccagaagaatacctgaaaaaaagagaagggttgggtactaacaactggcaggttgataaactggcacaagacaacgcgctggttgagaaacgagaagaggaagcggataaatatgcccgaaaagatcattcaaaagcacatcttgggttttcttatgattgggataatcaaaaactgaaatttcctcatgattgggataatcaaaaactgaaatttcttcatgatggggataatcaaaaactgaaatttcctcatcatgacaaagactgggacaggaatcgagcctcccgacgcanatgctaccgggaaaccagacaaaagctggaacaaaaatggggaaatggctattccaatatggagattgaggatgcctgtagaagggcttattagagggttccttgagccacttatttaactttgtaacttaatattttttggaaatcaggctgtcacttttggagtgagagcctgattttttaagttatgatgattgatatgtaatggctttcagtgactttatagccaagaaagacttaacctgaaaggggctgagcatctagtgaatattatcgttattatcaccatacaaagatggcataccttcgggacgtgttttaaaacggcgatgtaaccacatatattgttctggtgcctgcatgatctcctgctcgatgatcttattcataaatgcggcggcctctgtttcatctttttcagggaagttttctacagcaggttgaataatcagctcataaccttttccatccggtagtcgacgcggagtaaaaggaagtagaaccggattcgataatcgaaccagaattgaagtcccggttgttgttgccgcatgttcaactgcgaataatggagcaaatacacttttacgtgggccataatcatgatctggtgcataccagacaatttcaccatttttcagacagcggatcattcccttgagatcttttctgtccagcatatatttgttggagcgtaagcgcccccaagtttgtagccagtccagaaccggattatcatttggtcgataaacaccgatacccggattcagtataccgaaaatgcgagcacccaattccagtgtcaggaagtggatcccaataataatgatcccctggcctgtggtctgtgctttctggatattttcctgtcctgtcactttgaaccagcgctttactctccaatcaggccagaaccatgccataccagtttcaagtaatcccatgcccacggattcaaaatttttgaccagccacttatcccgttcttcctgtgacatatcggggaaacagagcagcagattacgctcagcgattttagcccgtttttttaaaaagcgctgtgagagccggcca

SEQ ID NO: 2038 - DNA, 12024 bp, Xenorhabdus sp.; identical to SEQ ID NO: 2037
  CDS (3892)..(4698)
  unsure (1)..(12024): unsure at all n locations

SEQ ID NO: 2039 - DNA, 12024 bp, Xenorhabdus sp.; identical to SEQ ID NO: 2037
  CDS (6233)..(6784)
  unsure (1)..(12024): unsure at all n locations

SEQ ID NO: 2040 - DNA, 12024 bp, Xenorhabdus sp.; identical to SEQ ID NO: 2037
  CDS (7066)..(7626)
  unsure (1)..(12024): unsure at all n locations

SEQ ID NO: 2041 - DNA, 12024 bp, Xenorhabdus sp.; identical to SEQ ID NO: 2037
  CDS (7822)..(8973)
  unsure (1)..(12024): unsure at all n locations

SEQ ID NO: 2042 - DNA, 12024 bp, Xenorhabdus sp.; identical to SEQ ID NO: 2037
  CDS (10580)..(11044)
  unsure (1)..(12024): unsure at all n locations

SEQ ID NO: 2043 - DNA, 12024 bp, Xenorhabdus sp.; identical to SEQ ID NO: 217
  CDS (6251)..(7156)
  unsure (1)..(12024): unsure at all n locations

SEQ ID NO: 2044 - DNA, 12024 bp, Xenorhabdus sp.; identical to SEQ ID NO: 217
  CDS (2485)..(2991)
  unsure (1)..(12024): unsure at all n locations

SEQ ID NO: 2045 - DNA, 12024 bp, Xenorhabdus sp.; identical to SEQ ID NO: 217
  CDS (1673)..(2428)
  unsure (1)..(12024): unsure at all n locations

SEQ ID NO: 2046 - DNA, 12024 bp, Xenorhabdus sp.; identical to SEQ ID NO: 217
  CDS (2)..(814)
  unsure (1)..(12024): unsure at all n locations

SEQ ID NO: 2047 - DNA, 12024 bp, Xenorhabdus sp.; identical to SEQ ID NO: 2037
  CDS (141)..(806)
  unsure (1)..(12024): unsure at all n locations

SEQ ID NO: 2048 - DNA, 12024 bp, Xenorhabdus sp.; identical to SEQ ID NO: 2037
  CDS (932)..(2128)
  unsure (1)..(12024): unsure at all n locations

SEQ ID NO: 2049 - DNA, 561 bp, Xenorhabdus sp.
  CDS (74)..(559)
cgttgccaaacacctcttcaacctgcttgtcatcccctataaatgggcggtgctctgggccgggctggatgtgacgaaatcgtcgctgatctataccgcgccgcaggaattcttcttcacgcagatcaaggtcgcgatgttcggcgccatggtgatctcctttccggtgatcgcctcgcagctctataaattcgtggcgcccggtctctacaagaacgagcgcgccgccttcctgccgttcctcatcgcatcgccgatcctcttcctcatcggtgcggcgctcgtctatttcttcttcacgcccatggtcatgtggttcttcctcgccatgcagcaattgcccgaggatggcgaggtggcgatttcgctgatgccgaaggtgtcggaatatctcagcctcatcatgacgctggtgctgtcctttggtctggtgttccagctgccggtcgtcaccacgcttctggcgcgcgtcgggcttctgaccagagactggctgcgtgaaaagcgcaagttcgccatcgtcatggcctttgtggtcgcggccgtcctgacgccgccctt

SEQ ID NO: 2050 - DNA, 12269 bp, Xenorhabdus sp.; identical to SEQ ID NO: 79
  CDS (1008)..(1784)

SEQ ID NO: 2051 - DNA, 12269 bp, Xenorhabdus sp.; identical to SEQ ID NO: 79
  CDS (2892)..(4670)

SEQ ID NO: 2052 - DNA, 12269 bp, Xenorhabdus sp.
  CDS (2894)..(3094)
agcgtgaacgtgtgctgaaggagcagggctatcgtgtgcatattcagagaaaagcggcacgtaataagcccttatcacactgccaaaaaggccgaaataagaaaatagcgaaaactcgggcacgcgtagaacatatctttggctcactctctcagatgggtgaaaaaattattcggacgataggccagctgcgagccaattttgcgatgacgatgaaggcaacctgctatgatttgcaacgtttggtttatttcggaaaatcgggtattcatgctttttaatttcgagatgtgatgaaaaagtgatgcgtttgtttttttcccctgaacaagcaagaaaaagtcatacacaataaggtcagttattggtgagttcaaaattgatcttattttttgtattgagagtttttagaggttccctttattagataagaatggtcaagcatataaaagcccaacccctggccaatatggagggcatcgtaaaaataagatatatggtcgtttgagctgtccagtagccctgcgagttatcgcaaaaggctactatatcaagaatcgagtattctttcctaatgaagaaactgcaattgcagctggattccgtccatgcagtgtatgtatgaaggcaaaatatttaaaatggaaagtttccattcaagatttaaatagttacaaaagtgattattaacaaatcaaattaacaggcaatgtttttagtttaatatattcaacaaaatttatatttgccaaaataaactaataatcacatttaaacaaggtattatttacctatctttgttcatatacacatagattatagatattaattttgttttttattaatcacacccaataaactcccgccaaataatgccaactaactaattacaatttaaataatcaaagttaacaataaacaatgaaactaatattcatttattaatcctctaaaattctctgtcatatataaaaacaaaaaagcaagaaacggagtttttaataatttatttgtcactacctttagggtcgtattactcacataataattagtgttttttttcacaaaaagagatggtatccaatatgaaagaaataatatgcactaataattttttagataaactgtctcagttgataaattttgaaatatttcgggatagtgaattttggaccgaagagagagatgtatggaagaggtctataaggcctcagtcatttccttatactgagtttaacgatatttcgcaagataatttatttgattattcttcgcttactttaaatagagctcttacagctctatatgaacaagattttctctatttgccagaatcatccgaaaatatacttgatgatatatgtaatgcatataatgaaaagttgaggtccttggcttatacccttattccgatattagaaagaaaagtatttcataaattacaatctggagtaaaaattggaggaacatggaataaaaaatcatttaatgagtacttttctactaaactggaggatagttccaattccgaaatcatatcattagaatcaattaaaaaatcctctaatcccaaaataatggcccgctttttgcttatgcaacatgctattgatttcttgccagaatcctcacacatggcaagatattctaaaggcgattatggtgaaacgcaatctgctgtatttcgagttttactagacgaatttggatatggaaaacattcagtaaaacacagtatcctatttaaagacacattaaaatcagcaggcatgcaccataactcccatgcatattggaacttttacttaacatcatcattattaaataataattatttccatatggttactagaaatccagaacgatttttcgaatatgttggagctatcacttatgccgaaaattcatttggcccttactgtggaaaagtaaagaaactattagatctctgtttcgaaaatattgatactagatattattctgaacatgttcatatagatggttatcatggaaatatgacactaaacgaaatacttttcgcattggtagataaatttggccctagtatttacccagaatttattaagggtattgaaatgtcctgcatacttcaaaaaattatggaaaacgatttattagcccaaatagattggatggagaaacggcatcaatactgtaagttagcaatagatataaaagataaagtattagctaatattgataatataccaatcgcatatctaaatgaacccaaaggagaattatcagtaccacatgtacatgatggtgatgaattttgtattgtcgatgaaggacttttacgattctgccatggcccagattgttttagcgacttggaatctggtcaatgcgttgtcattgcaaagaatagacttcatggtgcactagtactttctgaatattgcaagtacagaatactttctattggagattaccgtcaatatgcaaattatactgtttgagatgccatatgactcctttgtcttaaagacaactagtaaatatattcaagttttgagaaataaagaaggagaattgagtttttttgatatgacatgtaaacatagaggaggcccccttacccacggtttagaacataatggatttatagtttgtccttggcatggtaataaaactaaaaagtgcaccattccgtctttagacatcccttacataaaaaatgaaaaaaaagtcattatatttataaatgaattagagaaaataataaaaatttacaacaataaccattagatatttggtgagtaatatgattaaagaaaaagaaaacttaacaaaaaagcaagatatatatagaataaaaaacaataaagatttagatgaaataaaaaacataccacactggcactttgctatgcttaacgatactcaacgtaatagagcatttttcgatgcatttgaatccatagatttctcaggtaaaactgttcttgacataggcacaggttcgggattactagcaatgttcgcagctcgtaacggtgctaaacatgtttatacgtgtgaagtaaactcattactgtcagaaaaagcaaaaaaaaatcatcaaagttaatggattccaaaagcatattactgtaattaacaaattatcaactaatttgatttcaggtgttgatttaccagaaaacattgatattttggtctctgaaactgtagattgtggtttttttggagaaggttttggccacgctctattacatgcacagagatatttattaaaggaaaatgcaataataataccatgtgcagtaagccttaaggcttgtcttctagcaagtcaagatatagctaaattaaactacatttataatgaaatatataatctagacatcagcgaatttaacacattaagaacaatgggatacttccctgtcagactgcaaacatggccacataaaatagcaagtaatattgttaaattttataactcaacattcaaatcaggcaattcttttgaaaaagaaggaaacttatctttcactgcaaacacaaacacacttgttcacggagttttattttggtttgaattacatctaacgaatgatatatatttgacaaactcgcctaataacaatcattcccactggatgcaagcagtacaattatttgaatgtccaacacatgttaaaaatggttgtgaatatcaaacaaccttatttataagtgagaatggagttcagtttggagatatactaaaaccaattatttcttaaatagataattattgtctatactgtattagttatcaaataatatacctaattgtattctatagattttaaaatttagtgaaatggtaacggactcaacaaccaccgactaaagtcggtgggttagtgattaacggactgaaagtccggatacgcatcggctaaacgatgcgtcaattatccagcctgaagtgatcattcgggttcggttcaaaatgatgcgccagataggcctttatcatctcttccgttaactgacctaccgtcgcacaaagatagcctctgccccaaaaatgctgaccccagtaacgctttttcaagtgagcaaactcttcaaacaacttacttgctgtccttccctttattcgcctcatgatttctgagggcgctaagctcggaggacaactcaccagtatatgtacatggtctttgctcacgaccccttctactatcctgatttcgaacgcttcacaggtctgacgaactaactctctcacccgtaaaccaacttcacctgttagcactttgcgcctgtattttgttacccacacaaaatgatactcaatctgaaataccgtgtggctgccatatctgtaatccatattgcacctctcgtgcaacacagtatcgcagctaaagctgaccgactaaagtcggtggttttaaccttttatatggaaaaataaatctaattcttcttttataaatccaaaacgatcgtaacaatcctcgttaaacaatataggatagtcaacagccatagataataagtggtttgtcattccttcctgagccgattcaattatttcatttccttctatcattacgagatttactgaattaggtttatagcgggcacgaaacctatcgtatccatcagggtaaaaatattttttaatccatctaacagcttcgcgtatatcagcccccaataaatttctttcaactgtcttgataaaactttttacactcacaaaattaatcgggtttccttgaaataccagcattaagccacctcacatcctctatatataggagctatgccagtccgtagaggtgtacgggttttcggtgatcagcctaggcatagctttattctttaacatcttggatagtctactaaagtcgatttatcctgtctatttatccagttacgcacgtttaccaaatttgccatgtatcacattttcacctcgttctaatgcttccatatagtcggcgtaccattgaagcatctccctgcgaccatccagatattgagcatggttatatgtgcctcgaatgctgttcttatcaacatgagcaagttgtgtttcaatccactcagacgggtatccttgttcgtgtaaaattgtgctcatggtatgacggaaaccgtgccctgttgcccgccccatataaccaatacgcctgattaatacatttaatgccatttcactcattggctgggattattttattctgcccggaaaaacatatgttccttgccctgtaattggttttatctgcgataaaatatcaatcgcctgagttgataatgggacaatatgaggacgacgtattttcattctttcggcagatattttccattgagctttatgaaaatcaatctctgaccattcagctttgcgcaattcaccgggacgaacacctgtgataatttgtaatcgcattcccatctttataatgaaactacctgtataagtatttaatactttgtagaactgtggtaattcatcaacaagtaaaaatggataatgttcttttttatgtggaacaaaagctgatactaaatcaggtgctgggttatattcggctcttcctgtgactattgcgtatcgccaaacttcaccacaacgctgacgtactttttttagtttctcagtcgcccccctatcatttaatagagataagacagccattagttccattggcttaatttcagcgataggtctgttacctatgtagggaaaaacatctttttcaaatgtttccatcatttcattcgcatatgatgctgaccacctgtctacacgttttttgtaccattcacgagttattttttcgaaggtgttattgagctctccctgagctgcaagttttttttgttttttatcttgattgggatcaatgccctcagctatcagtttcttagcttcatctcgtttctttctggcttcagccaaagaaataagtggagaagtaccaatagcaagtagcttttcttttcctgcaatacggtattttagtctccaatatttagatccattaacctttattagtagatacaagcctccaccatccgatagtttaaaatctttatctcgaggttttgctgtgtcaatctgccgggccgttagtttcatatgtctagcatcctcgcaactgtgggggtacttttttaggaagtaaaaaacatacccccatatataccccctaattggggtacatttcaatagataacagtagacgataatagagtatgatttttaactattctttgattttaatgggattaatggactttaattgactaagggagatgtttatgtggagcggatgaagggaatcgaaccctcgtcgtaggcttgggaagcctctgctctaccattgagctacacccgcatcagagatttaacgcaactcaacaaccaccgactaaagtcggtgggttagtgattaacggactgaaagtccggatacgcatcggctaaacgatgcgtcaattatccagcctgaagtgatcattcgggttcggttcaaaatgatgcgccagataggcctttatcatctcttccgttaactgacctaccgtcgcacaaaaatagcctctgccccaaaaatgctgaccccagtaacgctttttcaagtgagcaaactcttcaaacaacttacttgctgtccttccctttattcgcctcatgatttctgagggcgctaagctcggaggacaactcaccagtatatgtacatggtctttgctcacgaccccttctactatcctgatttcgaacgcttcacaggtctgacgaactaactctctcacccgtaaaccaacttcacctgttagcactttgcgcctgtattttgttacccacacaaaatgatactcaatctgaaataccgtgtggctgccatatctgtaatccatattgcacctctcgtgcaacacagtatcgcagctaaagctgaccgactaaagtcggtggttttaaccttttatatggaaaaataaatctgaaattgtaaaagagtttttcaataaagggattgaattaattcttacagaaaaaccaattatggatggtgtagtggaatgcttggaacgattagcgcaaaaaatattaagattggtattgcctctgcttctccgttatccctcctgttaaatatagtcgaacaatgtgatatcgctaaatattttgactatatctcctcagcagacgatatgccatataataaaccccactctatggtctatctcaatgctgcggaaaaattgaatgtttcacctacaaaatgtataggaatagaagattcaaaaaccggtatgattgcagttaaagcagcctctatgaaatgcgtcgtgataccaaataacattgagtacaatcactcatactgggatgttgccgactggaaaataaaaaatatgtctgaattaaaaaatatcatctaattaccaaaaactatacatagctctcattattttcatgtgtatagatagatttattttttcaaattatcttaatattatcaatatgaactttttcccattatatatacccaatatttaatagcaacaaatcggcgtcaggtaactatctgacgccgatgataatttatctcaactttttgagtaaacagcattaaggcggatctccagcttatccaaagcctgtgttgccagccggatacttccaagggcacagatatcctgtacttcccgctctatttcttcaggggataaaacacctgtacaaagtgtgtacacaatgcgagtaataaagagctgatgcaactcattcatgggcatgtcaagctgtttaggatcaagctcaggagcctgtacactgagtggtatgtctttacggagatgctcagcctgaaataccgattcaaaactcgcagctgcccgtatgcgatcacctaaccaccaattcgatgccggtattccctgccattgcaacaaggttgaaagaaatgatgtggcatcatattggcgtccttcttgcactgaacgaaagaccgtcgaattctctatccagggtgaaatgagcaccgtcgggacacgtatcccaagcaaatcaaagccaaaacctccctcagtatcattacgataagcattgttggtataaggaggcggaacatgatcatagatgccaccgtgctcatcgaaagtgattatcagcagtgtctgatcgaagtcaggcccctgacgtaaagcattgtagatgtccgccaccatttttaatccgggagccatatctgaaggaggatgacaagagttaggacccatgcctgatgaatttccaacccatgcaggttcaataaaactgaacgctggcaatgtgcctgctttggctgatgatatgaattcgctgatatccgtgttgtaatggttagttttctgatcaacttcgtcaatatgtccctttaaaaacaattggttggtatattgcagttttccccacgtagcgtggtaataaagtttccagtccttgataccgtgagcccataacacatcccaaactgagggacgacgaggagacttaggccacgaaatatagatttctccggaatcaaaattctccgttttgcagaaagatgatcctgttagcgaaaaagcccgattcgggtcaatagggccaggcaaggagcagaaccaggtatcggaaaccgcatattgcttcgccaacagactcagtggttccagcatactaggatcgtaataatccatgacctcattaggcgattttccactgaagctatagctcttgacgaaacctttcatttctggaatacgcccagcaccgggctcagctccatcaaataattgttgaataatacctgaatatgtatgatcgggatcacttcttgggtagtccacactgtgtacggagaatttggtttgatagtagcggtgaccatttttatccgcattccagttcgtattactggctccatcaaaaggcttatcaggcccaataaatttcccgactttatccacggtataaagatcaccgaacatatggtctaaggagcgattctccagcatcagatataccacttttttgatcctttgccgcatccagggaattgttcccgggccatcctctccgccctgtactcctgttggcaattctaatggaacaagcggtgttataccgaatagtacggtgtcggcaggtaatacattcttccaagcggtgatcgtttttgaaggtaaacccggatgtgccagcgttggatcaacaggccaaagagtaatatcgcgagaatcaggatcccagccgacaattctgtcacccagcgtgcaaagtttcgtgctcgggtcaattgtccactgcataccgggaatttgtggttcaggcagaatatcagaggcacttccaccgtcaaacatccacgtccggcactgaccattacttctatcccggctgacgacataacctgcaacaggtattaaatccgcattcgtgattgtttgccagtgtccggtaatattttgtggactatcagcagtaagcatcaatgtactgctgaatggatcgaaacgccgacattgataggcaccggtgtctggtttgtataacagcaaataattacctaaaggaataatttctgtcgaaggatccagctcagcactcaggtctccttgtgccatcagagacggcagaaaatccgcctgagcgatatcgacttgccacaaacggaactggctggatgcgattttcctgtcgataacatagttaccaatgggaataagttgatgccctgatttcactgtctgccaattgcctgacttaactaaatgaagctcagcagtatcagagtcaataaactggtaaagattccagtcaccggttgagggtatccattggacaaggaattcatatgtaagggacattgaactttctctctattgtgtgttagtcaggtaatagcatcttttatttaagatatttgatgctattcaaaatgatttttaataagtgtcttcattcaattttttgttttttattaaatgtaatttaaggtcattaacccaatattatttttaatggaaaattaatttgtttaaattaaaagtatagttgaaaatataaaaacacaaaaataaacaacaaaaaaagataaattactttattcatatttatataaatatattaaatacttaataatgtattaaaataaatagattttaccactcaaatccaatgcaatagagattaaattaaatatattaataattatacacttcgtctttcaagttgcctctttgttggctgcactcgctcaccccagtcacatagttatctatgctccaggggattaatgaaaggctcctgcctttcaccggaggcagcctttggctgggcaaattcgttcccaacgaatttgtcactcccttaccgccgtgacgcatcttgaaatccattgtgtatatatcttatcctgaacggccaatggaggggtgtcctcctgaaccccaccacttgacaaagctaccctagcgggcaattgccacacttgatttgatatgtttaaggtggacaacaatcgtaaaggtcacaacgaccaataatgaccatgctccccatttccctgcatgaacaacagaccaagcgcctaactgattaggatattgccaaaccccaaaaaaggttccgaagttttccgctaaccagataaaaaaaccaattaatataaacgataataatagcggcatttttcgttctttatccaatggcgtataaaaaatagtgccacgggcatacaacccaaaaataaaagccgtcaggtaccagcgataatcatcaatataatgatggctaaagaaattgatataaatagccagcgctaccaatgttgccatccagtacggtggataatgctcaatgcgcactttaaagaagcgccatgactgtataataaagctcccgacagcggcatacataaaacctgtaaacaacgggactccccaaagtttcgtgaacgcggcatcagggtattgccatgaactgatagaagctgatgttttaaataactccatgataaaaccaactaaatggaatacacatatcgctttaaattcatcccatgtttcaagcttaaatcgtattaacagagcctgaaaggctactgcaaagaccaacagcacatcataacgcggtatatccaagataccttttgccggcactaaaaataaagctaaaaaaaagaaaccggcaaataaacacgaacgggcattaatcaaaccaaagaaaagaaactctaaaataaaccgtttaacacctgtactattattgggcttatgtgccattaatattttgtcaattctattcagaacattaaatttctggtacatactttccattcaattaacctattgttgttaattcactacagcaatccctatttcacgtcacaaattctaacaaaatatggcatgttatacacttcgtctttcaggttacttttttattatctgcactcgctcacctctgccaccgcgatgcatcttgaaatccattgtatataaagagctaatattgatttttctggtaatcgcctgctcttttatcccgaatgacaggcttaaccgttgtgttcgtaaggctcactaaaacagaaatcacagacttccttacaaacatttctcatctatttaatcttcaatcagcaaaaacctctataatgctgcactaaaatcagccgcttctgtttccagaaaataaacaaccaacacgttaaaaaaacaaagatgataacttgatgtaaatcaatttagtcattattgacgaaacgaaaagtaccagcctcatccaatatatccagcataaaaatagttataccagataaaaaataacatatcccgtagctaaaatgaccagaaaaacttcacaatcatgagttatgatcatgcagtaataaataaaaacagaatcattcactgataaacattaactatttttcatgaggaaggatgttgaaagattgcgagattatctgtaatgataccatgatgaattatacccactaagtcgtaaatgacagtctgaaatattacggaatcaattacaaataacttgtaaacggaatacattcgtataatttattatgagagcatttaagggttctttgaattcgggtttttatcctcttcacccttctcaagaagatgtgttttacgagcaggcactttatgaaaatagtcctatacatagccttagctggtatacatttttagaagaaaatattgatatagcgattttacaaaaagcctgggatcta

SEQ ID NO: 2053 - DNA, 12269 bp, Xenorhabdus sp.; identical to SEQ ID NO: 2052
  CDS (3)..(278)

SEQ ID NO: 2054 - DNA, 12269 bp, Xenorhabdus sp.; identical to SEQ ID NO: 2052
  CDS (7090)..(7416)

SEQ ID NO: 2055 - DNA, 12269 bp, Xenorhabdus sp.; identical to SEQ ID NO: 2052
  CDS (3081)..(3734)

SEQ ID NO: 2056 - DNA, 11173 bp, Xenorhabdus sp.; identical to SEQ ID NO: 131
  CDS (9971)..(11173)

SEQ ID NO: 2057 - DNA, 11173 bp, Xenorhabdus sp.; identical to SEQ ID NO: 131
  CDS (9129)..(9971)

SEQ ID NO: 2058 - DNA, 11173 bp, Xenorhabdus sp.; identical to SEQ ID NO: 131
  CDS (7748)..(8953)

SEQ ID NO: 2059 - DNA, 11173 bp, Xenorhabdus sp.; identical to SEQ ID NO: 131
  CDS (2265)..(7706)

SEQ ID NO: 2060 - DNA, 11182 bp, Xenorhabdus sp.; identical to SEQ ID NO: 329
  CDS (91)..(1809)

SEQ ID NO: 2061 - DNA, 11182 bp, Xenorhabdus sp.; identical to SEQ ID NO: 329
  CDS (10124)..(10870)

SEQ ID NO: 2062 - DNA, 11182 bp, Xenorhabdus sp.
  CDS (2)..(253)
cagaagtgtagaaattggttctttactgcttgggcgcgacccagataccggtaaacaaaaagaatcaccgatggaattgatgagactggctattcctcgccgcgtctataccaatgatcatatggattatgtcgttgaagcctttattgaattaaaacagcatgctgctgatatttgtggattaacatttaattatgagccaccagtgttgcgccactttatggctaaattaaagccgatttctgataattaagtcatatactgggccgcaatacactctcaagttgcttatgctgcaacttgagaaggactttagtaattacatgaagttactgatatattttctgaaaaatcaataatattaaaaccagaaatttttgttgttttaacggtagttgtacctaataaccactggaatgaaactgcgggtgcaacactgattgttatatcattctgatgccagatacgcgaagtgtgagcatgaccacaaccaataaatttcaccttatgttttttacataatgttaataaatccgcggcattttccagcatacaactgtccacaatgggtgtaccaaccggtatgatgtggtgatgcataaataccgcagtattaaatttcttgtttaaaataattcttttttctaattcagcaaggttattttgtgtaataaagccataatcctcacctttaacgacagtatcaacataagtaatgaaccaatttttatcattatactcaccggaagtgatgttatattttggttttatctctgtaattacggtatcaatattatttttcaggtcatgatttccggctattgtcatatagggagtctgacatgaatccattcttttgaagaaatatcggtaagcatcgatatcaccatcatttgttatatcaccggaaacaatgattaaatctatttcagtaattccctttatgcggcatatttcctcacagatagtatcaaaattgtcatacaggtttgcattaaataattgatgttctctgctctgtgtcaggtggatatcggttatctgaatggctttcattttttcttacctcccaaaaatagacggattatatgatattttttaatcgtctacatcagcagattctgatttgttattcttatagcgacctcataatttacaattggtaatttaactcgtgttatattaaatatcccgatgtttaattaggctatattaatggctggatttaaaagtcacgataaagatattggagatgaaaatttaattaacctgaaatggatgaattgatatttttttattaaagcttaaattttttttgaaatatgtgaaggagaaatatcgattttagtcgatttttttattgttcgtctcttgcattatgttgtctcgttgatatcatcttataagatttagtgtgttatgaatttaccttatgattgtatatattataatgcaggaggtaaaaataagaaacagggtaggctttcagttacataccagaaatgtatcatgtgaataaattatgttttctattttattagcgtgtaattatatagaatataatattcaggctgtaattgttattatttgttttgctcaccagggaactaatgtaaaaataattattttaaataatgaattctgaagttgttgttataaaatttgattttgtatttattatttttactcatgattttaaaggttgtgtctccgcggtaagggcgttcatcctcaggcgcatagatgactatgtgaatgggatgtgggatgaccaagtgtaaccaacaaagcatcaatctgaaagatgacgtatatatcaataattgaaacttaaaaaataacgcccaattttatgggcgttatttatatgagcgttccggaaccacctttataaaaggtggttcattctttttgctgctttattgattattcattaccgcctgaagtaatgctttgcccgtatcctgaatattgggctgcagcatcatagagtcatgatctcctttaatcgggataatagtcagttgctcactgggtagaatttgatcccattttagcgccattgtttctccttcggcgacttcatccattgctctgaacagagtaacgttcgtgtttatcgcctgtggtatgtaacagttagctgccacagagatgttatagcgcatttgcacaagatcactgacattttcccgcgtgaccttcggtggtaataaattgagcttctcagctaatattaacatcgcgtcgtaatcacgttcattagctagcttattgaattcatcgttaatgtcttctgggatatcgtacgggagtagttcgagcagtgtggcacttttctcaaacatcattccggactgtttctcttcagctgaatagaaatccagataattagaagcgctgtccagtaacccgataaagtttactgtttcaccatcggcaattaattggcgggacatttcataagcaatcgttccgcctgatgaccatccagccagatgataagggccatgtgcttgtatctggcgaatgcatttaatatattcctgagccatgttgttgatggtgggttgtatgccttcttctgcaagggtatcgctggcaataacaccataaattgataattcgtcattatccatatatggctcaagatcgtaggcatagtgaacatcgccattgactgcgtgaatgaggaacagtgaagtattgccattcccctgacggacagtcactatattctgctgttgcggcagtggcgcgtctgactgaatatatgttgccagttcactgattgtcgagtaaaccagcagatcgcggatactgatatctttagctaaagcctgattcagacgggtagcaacctgcagggttaatagggaatgaccaccaagctcaaggaagtgatcatggcgtcctatttgttccagccggagtacgtcctgccatatcgctgcaataagctcttctgtttcaccgacaggagcttcatagttgcgactgataacggaagatttatccggtgccggtaatgcccgacgatccagtttgccattaggtgtcagcgggaatgtatccagaatcacaaaagcactggggatcatatagctggctaagtttacgtgcaaagagtgacgcaggtcttccagatcgagagttgtacccggctgtggcaccagataggccaccagacgtttatcacccggagtatcttcccgcacgataacaatcgcgtctttaattccgggataagcaaagagtctggcttcaatttctcccagttcaatgcggaacccgcggatcttaacctgaaaatcattgcgtccgaggtactcaatcgtaccgtccggcaaccagcatcccaaatcacctgttttatacatacgtgcatcagtttgatggctgaatgggtcaggaataaagcgttctgctgtcagctcaggctggttgagataaccccgagcaacgcttgcaccgccgatatgaatttccccggaaacaccgagaggagccggttgtccctgtctatcgagaatatataggcgggtattggttaatggataaccaataggcagtgttggttcggtatacagggaatgaccatccacttttaatacggttgcaatgacggtggtttcagttggaccataggagttaatccagcggcaatgttgcgtttcagccagtgatttccagagagtcagatggtgaagctccgctttttcgcccccaacgataaccagacgcagcgaagggctgaaatcacatcgtcctgagaccagctcctgtacccactgatgccagaaagcggtggggagatcggtgacggtaattttctgctcccgcaggaaacgaccgaagttactgtccggtacacggagatcggcaggtcgcaggatcagggttgcgccggttgccagtgttgcaaaaatatccgacacggtggtgtcgaaagcaacagaagtaaattgcagcacacggtcagaaggggttagttcgttcgtctgacgctggacgtgaacgaagttaaccacattacgatgctctatcatcacgcctttgggctgcccggtggagccggaggtatagatgatataggccagatgatgtggtgccagccccgattgtagatgttcaggattgtgggtcggttgctgtgccacattgctccgatgcgcttcactatccattaaccagacagggacttctgttgccagccggttctgtaaatgtttttgagtcagtaatagcttcggtttacagtcggacaggatgtaagccagtctttccgtcggataatctgtatccagaggaacatagcctgcaccggctttcaggatcccgaacaggccgataatcatatccgggctgcgctcaacgcaaattgctacccgatcatccggttgtacacccgcggcaatcagagcatgtgccagttggttggcccgttggttcagttcagcgtagctgagttgctcatcaccactcaccagcgcaatggaatctggtgtgaaagaaacctgctgttcgaagagctggtggagcagaatattctgcggataagcgatttcagcaccgttaaaatccaccagtaattgtgtcttttccgctggtggcagaacagagattgcctgaatattttgtgcaggcgcgttttgtaataatgaagtaaccagaccttttagtgcggttgccacataggcattaatgcgactcgggtcaatctgttggctgcattggatagtgagttcaaattggtcatcataggcatcaacatccagtgataaaggataattgctgcgggaatctttagtgttaaacgtttcaatgccttcccagattgctgcgagttcctgctcatcttcctccgtttcatctgaaccatgacgaaaattaagcagactgttaaacaggggcagagaagcgggaataccgctgcaacgctgagcaatgaccagaggtgtctgttcatgtaccagtaatgtgctgagttgccggtaagtttcctgaactgtttgctgaacattgcgcccttgcagaataacccgaatgggtaatgtattgataaacatccccattattttttctgtttctttaccgccttgtaaccgccccattaaaacggtaccgaagacgacatcgtcacggccactacactgagccagtacctgtgcccaggcaacatgaaacagaactgcggtactgacaccctgttgacgggcgcattgctgaaccatccgggaaagatcactatccagtgtcagaacattttccacaactttatcgccactgtccttagcatcaagcaggccgaatggcagggtcggctcttctacgtctcccagcagctgacggaaataggactggtgttgttcaaggggaatatttttagtctgggcaatgaaattacgataaggcaatgctgttggcagttgttcatgctggccctgtaacatggcattgacttcatcaaataccagtttcagcgataaattatcgcaaaccagatggtggtgaagtaaggataagtaccatttatcactatttggttctctggcaatgctggcagataataacggcgctttgttgatattcatccggacgatatcagggtcggtatagctctgaatttgttgttccgcattgatttcaggcgacagttccagctctgtgacaggcatgggggcatggcgatgaacgacctgcaccggctctggcagattctcccaatggacggcagtgcgcagaatatcgtggcgctcaatgacctgttgtactgtttgcaggaatgtatccagacgtgaacgactgtcgaaagtcatcagcaggttgtccagatacgtatcaccggttgtttccagcaaatggtggaacagaataccttgctgtaatggcccgagtggatagatgtcctgaatgttactgacaccgcctgtcacttgtgaggctatctggtcgatattcgcctgagacagtgttaccagtggcagcatatccggtgtaattgcctgacagttatccgggatcaggtttggtggcacaggcgtgttgtttgtatcagattcggtttgctgagttaaattggttgccatagctgccagtgtcggggatgcgaataccgcactgacatcaatggctaggctgtgttgacggagtttctcaatcaggctgacgactagtagtgaatgtccgcccagctcgaagaaattgtcatggcgtccgacttgttccagccccaacagctcctgccagatacttgccagttgttgttctgcttccccttccggtgcctgatattcccggctgatgatggcggtatggtcaggagccggcaatgctttgcgatcgactttcccgttgggtgttagtgggaaagcatccagaacgacgtaagcaccgggcagcatatactccatcaattgcgcgcttagttgttcacgtaactggaggatatccagtattgtctccggctgcggtatcaggtaagcgaccagacgtttattgccgctttcatcttcatgggcagtcactacaacatctttgactccatcacactgagccagttgtgcttcaatttctcccagttcaatacggaatccacgtattttgacctggaaatcattgcgttccagatattcaatcgtaccgtccggtagccagcgtccgagatcaccggttttatacatgcgggcattggcttgttggctgaacggatcggcaataaatcgttcatcagtgagatcaggacgattcagatacccccgggcgacacctgcaccaccgatatgaatttcacccgcaacgccgataggaaccggctgtccctgagtatcaaggatataaatttgagtattggtgagtgggctaccgataggaacggtattggtgaggccggattcctggttgtctggtttccataccgtggcgataacggtggtttccgtcgggccataggagtttatccagcgacaggactgagtctcaggtaaagtctgccatgtattgaaatgacgcagttcagctttttcaccaccgacaatcaccagccgtaaagaagggctgaaaccacagcgcccggcagccatttcctgaacccataagtgccagaaagcggtgggcagatcggaaacggtaattgcctgttcctgtaagaactggctgaagtttttatcgggtatgcgcagcgaggccgatctcagtactaatgttgctccggcggccagtgtggcaaaaatatcggacacggtggtatcaaaggcaacagaggtaaattgcagcacccgatcagaaggtgtcagttcattcgtttcacgctggacataaacaaaattcacgacctgacggtgctcaatcatcacccccttcggttgacctgtagagccggaagtgtagatgatataagccagatgatgcggtttcagccccaattgatgtggttcagggttgtcggtagattgttgtgccacattatccagatagtgatcgttgtccattatccagacgggaacttcagtattcaggcggttctgtaagtgctcctgagtcagtaatagcttcggcttacagtctgacagaatataggccagccgttcagtcggatattccgggtctaacggtacataaccggctccggctttcagaatgccaaacagcccgatgatcatatctgcgccccgttcgacgcaaattgctacccgatcatccggttgcactccggcagcaatcagggcatgggcaagctggttcgcctgctggttcagttcatgataggtgagctgctgttcttcactgattaaggccgggctggtgggggaatgggcgacctgttgctcgaacagttgctggagtaatatttcctgcggataagaggctgttctggcattaaagccggccaataactgattacgttcattcggtgtcagtaacggtaaatcagcgacacgctgagtatcatcagccaccataaccgttaacagtgtttgcagataccccgccatccggtccatcgtcgcctgatcaaacaaatcgctggcatattccagttcaccgattaagccttcatccgtgtcatgcagtgacagggagagatcaaagtgggagctgttttcggataaatccagttcgctgatcgttaatcccggtaattcgaactgctgttgtccgggagtattatccagagacatcataacctgaaaaaccgggctataactcagactgcgcggtggttttaacgcttcaactaattgttcaaacgggagatcctgattttcaaaagccgtgacagtatgagctttcacgtgtgccagcaattcactgacggtagggttatcctgtaactgaacccgcagtgctaatgtattgacaaaaaagccgattaacggctccagatcgcgatatttacggttagcgactggcgtaccgataactaaatcatgttgcccgctaagacgggaaagcagtattgaccatccggtcagcagcgtcataaataacgtaatgccgtgacgttgcgcaaaggcttttaattttccggttaaatccggtgacagggtaaccagagcttctccaccggcataagtttgccgcgccggacgcgggcggtcagtggggagtgtcagaagtgtcggcgcatcctgtagcgtattacgccaataatccagctgcttttccagtgccttaccctgtaattctttccgttgccagagagtataatctgcgtactgaatttttaatggcggtaatgggtcaggctgttcgtggcagaagctcaggtacagagtagaaaactcctgcatcatgacgttaactgaccagccatcagaaataatatggtgctgggtgagtaacagaatattttcatcttctgccagtctgaataactggccccgaattaaggggccgttttcaaaatcgaaaggatggctggcttcagatttgatggcgttctggatagcattttgtcgatcatcatcggctaatagacgcaaatcctgcatacttaaagagaaaccgaaatctttcccatgaacaatttgccgcgccgttccttctcctccgtcttctgccagcccaatagtggtgcgcagaatttcatggcgggcgacaaattctgtccaggcgcggccctgtaaggccgcgatgttcaattggcccttcagatgaagggcggcaggaatgtggtatgccgtcagggcagccggatctaactgagcgaggaaccacaggcgctgttgcgcccaggatagcgggatctcctgctgcggatcacgggcagatatcggtgctttttcggttgtcaggctattttgcatacgctctttcagtttcttctggagtacagcctgccttaattgattcagtgtctgttcatttttgctcatagtttatttccctctagttgttctccatttaacatggcaagcaactcatcttcagataggttctccagctctttttgcatatcttcaatatcctgatcgaaaaaggtttccacttgctttgataagataagctcagccagtttggctaatgccgaatgacggaaaatatccgtaattgaaatttccagatggaactcttcttgtaatcttgccgataattgcatgattgataatgagtttcctcccagctcaaagaaatcatcatgacgaccgacttgctccagccccagtaaggtttgccagatagccgccagctgctgttctgtttctccctctggtgcttcatacgcccgcgtagcggttgcagagcggtcaggaaccggcagtgatttgcgatccagcttgccgttcggattcagcgggaaggcttccattacgacaaaggcgctggggatcatataatccagcagatgagtactgagctgttcacgtaaatcagcgatatccagctgagcatcaggctgtggaactaaataagccaccagtcgcttatcaccggtttcgtcttcacgcaccatagcaatagcatctttgaccccttcacaggctgccagctgagtttctatttctcccagctcaatgcggaatccgcggattttgacctgaaaatcattccgtccgaggtattcaatcgttccatccggtaaccagcgacctaaatccccggttttgtacattctggcattcggttgttcactgaacgtatccggaataaaacgctcatcagtcagctcaggctggttcagataaccccgcgccacgccggcacctgcaatgtgaatttcaccggaaacaccgataggaacaggttttccgcgcgtatcaagtatatagatacggctgttggcgagcggataaccgattggtagtgtttctgcgctatagtccggatgactgtccactttcagaacagtggcaatcaccgtcgtttccgtcgggccgtaagagttaatccatcggcatgaacgggtttccggtagtgtctgccaggtcatcaggtgacgcagttccgctttttctccgccgacaatcaccagacgcagagaagggctgaagctacaacgtcctgcggccatttcctgtacccataagtgccagaaagcggtaggtaaatcagtcaccgtgatttgctgttgttgcaggaattgagcaaaagctctgtcgggaacacgcagttctgacgggcgcataattaaggttgcacctgcggcaagggtggcgaagatatccgatacagtggtatcgaacgctaccgaagtgaactgaagtacacggtcagacggcgtcagttcattggtctgacgctgaacatggacaaaattaaccacgttgtgatgctcaatcatcaccccttttggctgtccggtagagccggaagtatagatgatataagccagatgatgcgctgccagtcccagttgttgcggatcagggttatggattggctgccgggctatacactcgatatggctgttatcatccagcatccatacaggcgtatcagtcgataagcggctatgtaagtgctgctgcgtcagtaataacttcggtgcacaatctgacaaaatatagttcagtcgttcggtagggtaatccgtatccagaggtacatatcccgcaccggattttaaaataccgtataaacctatcaccatatccagaccacgttcgacacaaatagctacccgatcatccggttgtacacccgcggcaatcagagcatgggccagcctttagaggacact

SEQ ID NO: 2063 - DNA, 8009 bp, Xenorhabdus sp.
  CDS (3)..(380)
gtgctctaaagcccaatgaaagaaaagtgctgtttgtgattgctgaaaaactgggaatttcccgtatgcaattcgaacagtttctggcgatgatggaaggcggtcgtcattttggcgggcaatatcagcagaatggtcattatcagggagccgcccaacagcgagcgacgctggaagatgcctgtaaggtgctgggggtcagtcagagtgatgatgccacaaccattaagcgggcttatcggaagctgatgagtgagcaccatcccgataagctggtggcaaaaggtttaccaccagaaatgatggagcttgccaaacaaaaggcacagtccattcaggccgcttatgatctgatcaagaaagagaaaggctttaaatagccgttgtcagaaagaagttaacggcaattaaaagtcggcgatacattcaaaatgcatcggagaaccataagccggatgagtgatagacagctcctgtgcgtgtaattgcaggcgaggagctaactcttttgcctgttgatgcgcatagaaccgatcacccagaatgggatagccaagtgccagcatatggacacgaagctgatgagaacgtccggtgataggcgcgagcctgacgcgggttgcctgtgcttcatattcaagtacctgatattcggtctgtgccgattttcccgtctcaaagcagactttttgtttcgggcgattcggccagtcgcagattaacggtaaatcaaccagcccttcttccggttctaatttcccccagacacgtgcgatatagacttttttcggttcacgctcacgaaattgtcgtttgagttcacgttcagccgctttggtcagtgcgaccaccatgataccactggtcgccatatccagccgatgaacagattcggcagagggaaattcggcctgtacccgggtcatgatactgtctttatgttcctcagcttttcccggaacagaaagcaatccgctgggtttattgacaaccataatgtgctcatcctgataaagcacatgtaaccaggggtcagtcgggggattataaaactccagcatagtcgctccaatgggtttggaaaattgggttggaaaaaataacggggcgcattctaacagcatatcgatgggataaaacagaggggcacctcgttatggatgccccttatgacagaataactattctttattgatgagagacaacgaccagacgaattgcatccagacgccagcttgcctgatccagattcagcaacagatgcttatgctcggattcaatggcttccagttcatcatcacggatattcgggttgaccgctttcagggcttccagacgtgataattcagcggacagaacttcatcagcttcttttttcgctttctcgattaactcacgcgcctgttgttcaaccagaggttcagactgctgcaaaacagcatgaacttctttttgaaccgcgttaaccagcttgctggcattatggcggttgatggcattcaactgacggttaaaactttcaaactccacctgaggtgccagattagtacctttcagatccatcaacaagcgcaacggtgtcggaggcaggaagcgggttaattgcaggtgtttcggtgcctgagcctcaacaacataaactaactcaactaatagcgtgccaaccggcagtgctttgtttttcagaatagaaaccgcacagcttccggtatcgcctgacaggacaagatccagaccattacggataatcggatgctcccagctcaggaactgagtatcttcacgtgataaggctttttcacgatcgaatgtaacagaacagccatcctgtggcagacccgggaagtcaggcaccagcatgtgttcagacgggttgagaatgataatgttatcgttgcgatcttcctgattgataccaatgatatcgaacaggttcagggcaaaattcaccaaatcagtattattatcctgtccggcaatggtttcagccagaatctgcccttgctcgccaccattagaattcatctccagcagacggtcacggccttgctccagctgttgtttgagctgttcgtgatgtgtgcggcactcggagataaactcgttgaagcctgtttgttcgttaggcttggcgaggaaattcagcagcgtttcatagtacttatcataaatcgggcgacctgtcgggcaggtatgttcgaatgcatccagaccttcgtgataccagcgcagcaggacagattgtgcggtattttccagataaggtacgctgatcgtgatattgcggttctgaccgatacgatccagacgaccgatacgctgttccagcaaatcaggattgaaaggcagatcgaacataacgagctgattggcgaactggaagttgcgcccttcggaaccaatttcagaacacagaagcacctgtgcgccttcttcttcggaagcgaagtaagccgctgcacggtcacgctccagcagggacagtccttcatggaataccgcactgcggatcccttcgcgttcacgcagaacctgctccagttgcagggcagtttctgctttagcacagatcaccagtactttttcatcgcggtttgccagcaggaagccaagcagccattcaacacgggggtcaaagttccaccatgttgcattttcgccttcaaattcctgataaatccgctcagggtagagcatatcttttgcacgcgcttccaccgtttttttcgcgcccataatttcagacactttaatagcggtctgatactgggatggcagtggcagcttaatttcatgcagttcgcggtgagggaaaccttttacaccaccacgggtattacggaacagcaatcggctggtgccgtggcgatccatcagcatcgcaactaattcacggcgggcgttttcactctcttcttccttattgctattcgccgctttcagcagaggttcaatatcctgttcgctgatcagctcaacaatcagattttgctggtcattgctcagcgtttcaccagacagcagtaacgttacagcatcagcaaccggacggtatttctgctgttcgtcaatgaaagcctgataatcgtggaaacgatttggatcaaggagacgcagacgggcaaagtggctttcctgccctagctgttctggtgtcgctgtcagcagcagaacagacggaatctgttctgccaattgctcgataacctgatattcacggcttggtgctttttcactccattccagatggtgtgcttcatccacgaccatcaaatcccagcccgcctccagcaaatgctcaaaacgctgtttattacggcgaacaaaatccagcgaacagataactaactgctctgtttcaaatggattatcgctatcatgctgggcttcagaataacggccatcatcaaacagagaaaagcgcaggttaaagcggcgcagcatttccaccagccactgatgctggagactgtctggcacaataaccagcacacgttcggcacgaccagccatcagttgttgatggataatcataccggcttcaatggtcttacccagaccaacttcatccgccagtaacacgcgcggagcatggcgcttaccgacttcattagcgatatgtaactgatgagggatcaaactggcacgaatgccgcgcagaccactttctgccagacgaaattgttcactttgatgcttacgagcacggaaacgcaaggcaaagcgatccatgcgatcaatctggccggcaaacaagcgatcctgtggtttattgaatgtcagcttactatccagaaatacttcccgcaggatgacattttcttcttcagtatctaaacgagtaccgatgtagttcagcaggccattctcttgttgaacttcatcgaccttgagtttccagccttcgtgactggtcacggtatcgcctgcattaaacataactcgggtgatcggggaatcattgcgtgagtagaggcggttttctccgctggctggaaaaagcaatgtcaccatgcgcgtgtcaagcgccacgactgtacctaatccaagttcgctttctgtatcgcttatccagcgttgaccaagagtaaatggcataaattttggctcagttttctgttagataatgttatttatggttgcagggtggctgcttttgttggatatcgatcatcattggttatcgatagggttcgtctttatgactagttttcatgactagttctgtgacacttttcgggagtaatttccctttaaaggggcgttatgttaattgaagctgagcaagtcgtcacctgcaaaaacatcaattaatcgaaagtaaggttcatttgccctgtcagcagggtggtaaaatcatcctgaagaaacggcagaatggcatctgcaatcggcataatctgcttactgatatagtgttcatagtccggtggagaggtgagattttccagcggctcaggcccggactgggtgataatgtaactaatccagccaccgctctgatactgtaacgggcggtttttctgcttgttgtactcatccgccagacgagctgccctgacatggggaggaacattacgctgataatcagtgagattacgccgcagccgttttcggtaaaccagacgtttatcaaactcaccggcgagcgtattggcgatataattacgtatataatcctgataaggcttcttataaaaaataagggaatacagctcctgctgaaatgcctgtgccagcggagtccagtcacttcttactgtttccagccccttaaataccaatttatcgccgcttaacccggcataacgttttttactcccttcttctgctccccttaccgtcggcatcagaaaacggcgatagtgggtttcaaattccagttctagtgtactttcgaggttgaattttgtcttgaggtgatctttccaccactggttgacgtactgagtcagcgaatggccaatctggctggcttctttttcggagtgaggttttttcaggcagacaaacgtggaatcagtatcaccataaattaccttataaccttctgattcaattaattttcgtgtctgatgcataatcttgtggccgcgtatggtaatcgatgaggtcaggcgcggatcaaaaaaatggcaaccggaagcgccgagtacgccataaaaggcattcatgataatttttagcgcctgagcaagcggagcattgttttgctgctttgctttatctcgctcatgccagatataagtgacaatatcgggtaagcagtgctgagtgcgggaaaaaaatgcctcccggaaaccgggaacagaatgttctttatcgggctgggcaaggccttccaccattccgaccggatcaataagaaaagtacggataatggaagggtagaggcttttatagtccaataccagaacggaatcatacaaaccggggtatgaatccatcacaaaaccaccgggactgtggtcggtgaaactcgttggctgaaccggcgccacatagccgattcggtgcatacgaggcaggtaaagatgagtgaatgcagccactgaacctccggcacgatccaccgctaaccctgtgactgtcgcccgttccagcaaaaatgccatgagattggttttctcaaaaatccgattgaccagaatacagtcctgcaaattgtagtgagcgagggcgggtttatcttcctgaaagcggcgattaatttcatccatccggtcataaggactatcaatcgctttcccttcccccaataactcctgagcgacatattcaaggctgaacgaaggaaaattccatgtcgcggttttcagcgcatcaataccatcaatgatcaagcgacctgccgcagaggcgaaaaaatgcccgggtttaaaaccgtgttcgcgccattccagcaatccttttccacggccaaaccgcaaaggaatgttatagcgttcagcatgtttctggagcactcttaaatcaaactgaatcaggctccagccgataattgcatcgggatcgtaaacttccagccactcattgagcttctccagcatttgtggacggctggcaacatattccagcttgaaatccagttcctgctgttcaccattctccgatcccagcataaataccgttttctctccgcagcctgccaagccgatagaatacagctcgccatgctgactggtttctatatccaaagaaacccatttcagtttgggacgatagtcaggattgggtttcatttgataactcccgtcggccttttggctaaaccagacgggagcagtaataaaacgttccatcataaagcgatccggcgggcggatatcggtttcgtaaaggggaatattctgttccttgagaaccttttcaaaatgctgtagatggtggtattgtgaacaatacaaagcggagacaggctggcggttaaaatctttcagagagagttttttcagctcataatggcgctcctgagccagccgtttttcagcttcaggcaaatcacgttgagggataaaggcgacagctttctgatgaaggatagtaatacgtcggctaccgttatccgtggctaaccaatacaccaactcaataccggatggcgtatctttccagtgacgagagaggatgaagccttgttcagcgtgatttatctgcatactatttgagctttaaggtaaggtacactttcttttgtgagagataggctttaattatagcatttcatgtttatttatacagttgtttttgtagcaagctgatatcatgacggtcgatagatatcattatttattctcatatattgagatttttttacaaacgatattaaggtttgttgatatttagtgttcatcatttactccttctatacataatggatttcaagatgcatcgcggcggcaagggagcgaatagatgatcgtatgttggttaaaaacaggttaaatataaatgaggttaatatatgccatttgagcctccattcagagacaaatttcagaaaggcgatttgatatatgggttatcccaggaaattataaagagatattcaactaaaattgaattttttgaagatgcaaaaattcattatgataataaagattatcctccgataacgattgccagttacttaattccttcagaaataaggaatatgaataattatattaaaaatcataaggatagtaaaaatcctgagtgtatcaatagaatgaattttgctaaagaacaattgcaatatatagaaaatgaaaagtataagaaatataaaaaaaactattttaatcatttgagattaaatgaaaaataccgtagtgtcactgagagtgaaaaatacactgatcagctcttgggaagaaaaagtaaaggaggattatcttgggtaacaataggtaatgacctattaaataaccaaaataaccaaaataaccaaaataaccaactgacgagagatatgcatgttcatttcatacagggcgagatctcacatttttcataaggttatttaggtcaaataaaagtcaatatacggacttttataagcatttctctccttaaaacgttaagatcacgctattccataaacagtgtgcttaataatgaatatttttaattttatcagaaaaatagatgacccacgttctgacatcaataaaaaacatgaattgatggatgtcatttttttggccttttctgctgtgttatgtggcgcttctggctggaaatcgattcaagaatttggtgagttacaaatagagtggcttaaacaatatacctcatttactcacggcattcctcgtcgtcactgtgtggctaatattatcaaaatgatagatcaagacgcattggtcgaagccttttatggctggatcaaccagcgccgggttacggcgggcaaaagtctcatcgcgattgatggaaaaacgctgagaggaacctgcaaagggacattgtttgaagctttgcatgtggtcagtgcttatgatgttgaatcgggaatagcgctttgt

SEQ ID NO: 2064 - DNA, 8009 bp, Xenorhabdus sp.; identical to SEQ ID NO: 2063
  CDS (7211)..(7498)

SEQ ID NO: 2065 - DNA, 8009 bp, Xenorhabdus sp.; identical to SEQ ID NO: 2063
  CDS (7626)..(8009)

SEQ ID NO: 2066 - DNA, 8009 bp, Xenorhabdus sp.
  CDS (6949)..(7602)
acaaagcgctattcccgattcaacatcataagcactgaccacatgcaaagcttcaaacaatgtccctttgcaggttcctctcagcgtttttccatcaatcgcgatgagacttttgcccgccgtaacccggcgctggttgatccagccataaaaggcttcgaccaatgcgtcttgatctatcattttgataatattagccacacagtgacgacgaggaatgccgtgagtaaatgaggtatattgtttaagccactctatttgtaactcaccaaattcttgaatcgatttccagccagaagcgccacataacacagcagaaaaggccaaaaaaatgacatccatcaattcatgttttttattgatgtcagaacgtgggtcatctatttttctgataaaattaaaaatattcattattaagcacactgtttatggaatagcgtgatcttaacgttttaaggagagaaatgcttataaaagtccgtatattgacttttatttgacctaaataaccttatgaaaaatgtgagatctcgccctgtatgaaatgaacatgcatatctctcgtcagttggttattttggttattttggttattttggttatttaataggtcattacctattgttacccaagataatcctcctttactttttcttcccaagagctgatcagtgtatttttcactctcagtgacactacggtatttttcatttaatctcaaatgattaaaatagttttttttatatttcttatacttttcattttctatatattgcaattgttctttagcaaaattcattctattgatacactcaggatttttactatccttatgatttttaatataattattcatattccttatttctgaaggaattaagtaactggcaatcgttatcggaggataatctttattatcataatgaatttttgcatcttcaaaaaattcaattttagttgaatatctctttataatttcctgggataacccatatatcaaatcgcctttctgaaatttgtctctgaatggaggctcaaatggcatatattaacctcatttatatttaacctgtttttaaccaacatacgatcatctattcgctcccttgccgccgcgatgcatcttgaaatccattatgtatagaaggagtaaatgatgaacactaaatatcaacaaaccttaatatcgtttgtaaaaaaatctcaatatatgagaataaataatgatatctatcgaccgtcatgatatcagcttgctacaaaaacaactgtataaataaacatgaaatgctataattaaagcctatctctcacaaaagaaagtgtaccttaccttaaagctcaaatagtatgcagataaatcacgctgaacaaggcttcatcctctctcgtcactggaaagatacgccatccggtattgagttggtgtattggttagccacggataacggtagccgacgtattactatccttcatcagaaagctgtcgcctttatccctcaacgtgatttgcctgaagctgaaaaacggctggctcaggagcgccattatgagctgaaaaaactctctctgaaagattttaaccgccagcctgtctccgctttgtattgttcacaataccaccatctacagcattttgaaaaggttctcaaggaacagaatattcccctttacgaaaccgatatccgcccgccggatcgctttatgatggaacgttttattactgctcccgtctggtttagccaaaaggccgacgggagttatcaaatgaaacccaatcctgactatcgtcccaaactgaaatgggtttctttggatatagaaaccagtcagcatggcgagctgtattctatcggcttggcaggctgcggagagaaaacggtatttatgctgggatcggagaatggtgaacagcaggaactggatttcaagctggaatatgttgccagccgtccacaaatgctggagaagctcaatgagtggctggaagtttacgatcccgatgcaattatcggctggagcctgattcagtttgatttaagagtgctccagaaacatgctgaacgctataacattcctttgcggtttggccgtggaaaaggattgctggaatggcgcgaacacggttttaaacccgggcattttttcgcctctgcggcaggtcgcttgatcattgatggtattgatgcgctgaaaaccgcgacatggaattttccttcgttcagccttgaatatgtcgctcaggagttattgggggaagggaaagcgattgatagtccttatgaccggatggatgaaattaatcgccgctttcaggaagataaacccgccctcgctcactacaatttgcaggactgtattctggtcaatcggatttttgagaaaaccaatctcatggcatttttgctggaacgggcgacagtcacagggttagcggtggatcgtgccggaggttcagtggctgcattcactcatctttacctgcctcgtatgcaccgaatcggctatgtggcgccggttcagccaacgagtttcaccgaccacagtcccggtggttttgtgatggattcataccccggtttgtatgattccgttctggtattggactataaaagcctctacccttccattatccgtacttttcttattgatccggtcggaatggtggaaggccttgcccagcccgataaagaacattctgttcccggtttccgggaggcatttttttcccgcactcagcactgcttacccgatattgtcacttatatctggcatgagcgagataaagcaaagcagcaaaacaatgctccgcttgctcaggcgctaaaaattatcatgaatgccttttatggcgtactcggcgcttccggttgccatttttttgatccgcgcctgacctcatcgattaccatacgcggccacaagattatgcatcagacacgaaaattaattgaatcagaaggttataaggtaatttatggtgatactgattccacgtttgtctgcctgaaaaaacctcactccgaaaaagaagccagccagattggccattcgctgactcagtacgtcaaccagtggtggaaagatcacctcaagacaaaattcaacctcgaaagtacactagaactggaatttgaaacccactatcgccgttttctgatgccgacggtaaggggagcagaagaagggagtaaaaaacgttatgccgggttaagcggcgataaattggtatttaaggggctggaaacagtaagaagtgactggactccgctggcacaggcatttcagcaggagctgtattcccttattttttataagaagccttatcaggattatatacgtaattatatcgccaatacgctcgccggtgagtttgataaacgtctggtttaccgaaaacggctgcggcgtaatctcactgattatcagcgtaatgttcctccccatgtcagggcagctcgtctggcggatgagtacaacaagcagaaaaaccgcccgttacagtatcagagcggtggctggattagttacattatcacccagtccgggcctgagccgctggaaaatctcacctctccaccggactatgaacactatatcagtaagcagattatgccgattgcagatgccattctgccgtttcttcaggatgattttaccaccctgctgacagggcaaatgaaccttactttcgattaattgatgtttttgcaggtgacgacttgctcagcttcaattaacataacgcccctttaaagggaaattactcccgaaaagtgtcacagaactagtcatgaaaactagtcataaagacgaaccctatcgataaccaatgatgatcgatatccaacaaaagcagccaccctgcaaccataaataacattatctaacagaaaactgagccaaaatttatgccatttactcttggtcaacgctggataagcgatacagaaagcgaacttggattaggtacagtcgtggcgcttgacacgcgcatggtgacattgctttttccagccagcggagaaaaccgcctctactcacgcaatgattccccgatcacccgagttatgtttaatgcaggcgataccgtgaccagtcacgaaggctggaaactcaaggtcgatgaagttcaacaagagaatggcctgctgaactacatcggtactcgtttagatactgaagaagaaaatgtcatcctgcgggaagtatttctggatagtaagctgacattcaataaaccacaggatcgcttgtttgccggccagattgatcgcatggatcgctttgccttgcgtttccgtgctcgtaagcatcaaagtgaacaatttcgtctggcagaaagtggtctgcgcggcattcgtgccagtttgatccctcatcagttacatatcgctaatgaagtcggtaagcgccatgctccgcgcgtgttactggcggatgaagttggtctgggtaagaccattgaagccggtatgattatccatcaacaactgatggctggtcgtgccgaacgtgtgctggttattgtgccagacagtctccagcatcagtggctggtggaaatgctgcgccgctttaacctgcgcttttctctgtttgatgatggccgttattctgaagcccagcatgatagcgataatccatttgaaacagagcagttagttatctgttcgctggattttgttcgccgtaataaacagcgttttgagcatttgctggaggcgggctgggatttgatggtcgtggatgaagcacaccatctggaatggagtgaaaaagcaccaagccgtgaatatcaggttatcgagcaattggcagaacagattccgtctgttctgctgctgacagcgacaccagaacagctagggcaggaaagccactttgcccgtctgcgtctccttgatccaaatcgtttccacgattatcaggctttcattgacgaacagcagaaataccgtccggttgctgatgctgtaacgttactgctgtctggtgaaacgctgagcaatgaccagcaaaatctgattgttgagctgatcagcgaacaggatattgaacctctgctgaaagcggcgaatagcaataaggaagaagagagtgaaaacgcccgccgtgaattagttgcgatgctgatggatcgccacggcaccagccgattgctgttccgtaatacccgtggtggtgtaaaaggtttccctcaccgcgaactgcatgaaattaagctgccactgccatcccagtatcagaccgctattaaagtgtctgaaattatgggcgcgaaaaaaacggtggaagcgcgtgcaaaagatatgctctaccctgagcggatttatcaggaatttgaaggcgaaaatgcaacatggtggaactttgacccccgtgttgaatggctgcttggcttcctgctggcaaaccgcgatgaaaaagtactggtgatctgtgctaaagcagaaactgccctgcaactggagcaggttctgcgtgaacgcgaagggatccgcagtgcggtattccatgaaggactgtccctgctggagcgtgaccgtgcagcggcttacttcgcttccgaagaagaaggcgcacaggtgcttctgtgttctgaaattggttccgaagggcgcaacttccagttcgccaatcagctcgttatgttcgatctgcctttcaatcctgatttgctggaacagcgtatcggtcgtctggatcgtatcggtcagaaccgcaatatcacgatcagcgtaccttatctggaaaataccgcacaatctgtcctgctgcgctggtatcacgaaggtctggatgcattcgaacatacctgcccgacaggtcgcccgatttatgataagtactatgaaacgctgctgaatttcctcgccaagcctaacgaacaaacaggcttcaacgagtttatctccgagtgccgcacacatcacgaacagctcaaacaacagctggagcaaggccgtgaccgtctgctggagatgaattctaatggtggcgagcaagggcagattctggctgaaaccattgccggacaggataataatactgatttggtgaattttgccctgaacctgttcgatatcattggtatcaatcaggaagatcgcaacgataacattatcattctcaacccgtctgaacacatgctggtgcctgacttcccgggtctgccacaggatggctgttctgttacattcgatcgtgaaaaagccttatcacgtgaagatactcagttcctgagctgggagcatccgattatccgtaatggtctggatcttgtcctgtcaggcgataccggaagctgtgcggtttctattctgaaaaacaaagcactgccggttggcacgctattagttgagttagtttatgttgttgaggctcaggcaccgaaacacctgcaattaacccgcttcctgcctccgacaccgttgcgcttgttgatggatctgaaaggtactaatctggcacctcaggtggagtttgaaagttttaaccgtcagttgaatgccatcaaccgccataatgccagcaagctggttaacgcggttcaaaaagaagttcatgctgttttgcagcagtctgaacctctggttgaacaacaggcgcgtgagttaatcgagaaagcgaaaaaagaagctgatgaagttctgtccgctgaattatcacgtctggaagccctgaaagcggtcaacccgaatatccgtgatgatgaactggaagccattgaatccgagcataagcatctgttgctgaatctggatcaggcaagctggcgtctggatgcaattcgtctggtcgttgtctctcatcaataaagaatagttattctgtcataaggggcatccataacgaggtgcccctctgttttatcccatcgatatgctgttagaatgcgccccgttattttttccaacccaattttccaaacccattggagcgactatgctggagttttataatcccccgactgacccctggttacatgtgctttatcaggatgagcacattatggttgtcaataaacccagcggattgctttctgttccgggaaaagctgaggaacataaagacagtatcatgacccgggtacaggccgaatttccctctgccgaatctgttcatcggctggatatggcgaccagtggtatcatggtggtcgcactgaccaaagcggctgaacgtgaactcaaacgacaatttcgtgagcgtgaaccgaaaaaagtctatatcgcacgtgtctgggggaaattagaaccggaagaagggctggttgatttaccgttaatctgcgactggccgaatcgcccgaaacaaaaagtctgctttgagacgggaaaatcggcacagaccgaatatcaggtacttgaatatgaagcacaggcaacccgcgtcaggctcgcgcctatcaccggacgttctcatcagcttcgtgtccatatgctggcacttggctatcccattctgggtgatcggttctatgcgcatcaacaggcaaaagagttagctcctcgcctgcaattacacgcacaggagctgtctatcactcatccggcttatggttctccgatgcattttgaatgtatcgccgacttttaattgccgttaacttctttctgacaacggctatttaaagcctttctctttcttgatcagatcataagcggcctgaatggactgtgccttttgtttggcaagctccatcatttctggtggtaaaccttttgccaccagcttatcgggatggtgctcactcatcagcttccgataagcccgcttaatggttgtggcatcatcactctgactgacccccagcaccttacaggcatcttccagcgtcgctcgctgttgggcggctccctgataatgaccattctgctgatattgcccgccaaaatgacgaccgccttccatcatcgccagaaactgttcgaattgcatacgggaaattcccagtttttcagcaatcacaaacagcacttttctttcattgggctttagagcac

SEQ ID NO: 2067 - DNA, 8009 bp, Xenorhabdus sp.; identical to SEQ ID NO: 2066
  CDS (3912)..(6821)

SEQ ID NO: 2068 - DNA, 8009 bp, Xenorhabdus sp.; identical to SEQ ID NO: 2066
  CDS (1366)..(3699)

SEQ ID NO: 2069 - DNA, 8445 bp, Xenorhabdus sp.
  CDS (2)..(394)
caaagcgtggaaaaggggggggacacgggtcgaagcgctacggatgcaatgtaaagagaatctggaaaaaatggtggtgatcctggcgtttattgcggttcgtgttcatcagttacgctatgtgggactcaataaatcagaggcggagaaacaaagttgtgaaacgttattaagcccgttagcgtggaagttattgtggacaaagcaagagaagaaaaaactccctaagacagccccaagcgtttattgggcctatattaatttgggcaaactggcgggctggtatgactctaaacgaaatggccgagtaggatgggaaaggctgtgggaaggatggttcatgttacaaaccatccttgacggttatttactgtccaagtctcttgacctatgaaatatgatcaagagacaggctctttgagcggggttttttcgtatatggcaaataaaaaataaatcctgctctctgaattcactgtcgggcattgagcaatctaataccatattctgaaaaaacactatcagctgaaatcagcgttaatccttccatttgagattgtacaataagcattctatcaaacgggtcaccgtgatggcgtggtaaatcaccggcattctctgcatgaagatgtgttatagctaaaggaataaaattatttctttccataatcaaatcaaaatcagctttgaattccaatttgcctaatgcacgttttatggatatctcccagggagttactgcgctgacaaagatgctatttgttcctttcatgatcatgcttttggctaagttgcctaaagatggatcgttggttacccaccagatgagtacgtgggtatccagtagaagtcgtttcataaagatccttcaaacattttttgtatgtcatcgtcagcttcataaaatcgttcatttatactaatttcattttcaaaaccaccaggagttctatccatttggcagataggaactaactgaacataaggttttcccgctttagcaataatgaccacttcaccatcaactgctttatctgccagctggctcaaatgagtttttgcctcgtgcatatttgcctgaatagtcatgttcccctccgttaaattagctaggttagctaagtatgaattatactctatttgcatataatttcatcattaagttccatttcttgtatgagtagaaattttgtcttaatttttcaatttaattgataatgctattaattccatctgaatagggtgaatttaaaacttttctttttctttattcgttttagcctcttacctcgcttactttcctgataactctttttgctcattatttaagtatccggtcacaaatttaaaattataaagtataggatgcaatgctttatataagtgatatttttagtgtttttctctgcatgtgtgtctcgcgtcatagtttataactatttttgttaatattattttgcgtttgtgtttttctattgtttcatattttgctgaggttatattgacgtcagtcataacaattgtttaattgataatcgaaaacaataacacaggccgggacagtgatatttaggcaggaaattctgggcttggctaaggcacaataaacaccacaaacggagcttatgtaatgattctctccaaaaagaaaaagcccggtttactgaaattgggtattggtcttgtttctttggctgtagctgctggtgtgcaggcaaaaacactggtctattgctcagaaggttcacctgaaggttttaacccgcagttattcacctctggtaccacttttgatgccagtgccagaccaatttataaccgtctggtggatttcaaattaggtacaacagagattattcccagtttgtctgaacgatgggacgttagtgatgatggtaaaacctacacattccatttgcgtaagggtgtgaggtggcatagcagtaaagatttcaagcccacacgtgatttcaacgccgacgatattatctttacctttatgaggcagaaggataaaaatcatccatatcatcaagtatccggtggcggctatgaatattttagcggcatggatatggagaatattatcaataaaatagagaaggtggatgactatactgtccgttttgtactgtctcgtcctgaagctccttttctcgctaatctggcaatggatttcgcctcaattctttccaaagaatatgctgatgtcatgatgaaggcgggtacgccggaaaaagtcgacctgaacccaattggtacagggccattccagttagtacagtaccagaaagattcccgtattctttataaggcgtttaaggattattgggaaggacctgcgaaaattgaccgtctggtcttctctattacccctgatgcttctgttcgttatgcaaagctacagaaaaatgaatgtcaggtcatgccatacccgaaccctgctgatattgcgagtatgaagcagaacaaagatattgtcctgaaagagcaggctgggatgaatgtcggttatctttcttacaatgtcactaaaaagccaatggataacctcaaagtgcgtcaggcactgacgatggcagtgaacaaagatgccattattgaggcggtatatcagggggcgggccagaaagcgaaaaacctgatccctcctacaatgtggggttataacgatgatatcaaagattatgcttatgatccggctaaggctaaagagctgctgaaagaagctggtttcgcgaatggtttcgaaaccgatctttgggcaatgccggtacaacgcccttataacccgaatgcgcgccgtatggcggaaataattcaggcggactgggccaaaattggagtaaaagccaaaatagtcagttatgaatggggtgaatatctgaaacgggcgaaagatggtgaacctcaaaacgttatgatgggctggacaggggataatggagatcctgataatttctttggtacgttgtttagttgcgcagctaaagatcagggttctaactattcaaaatggtgtgataaacaatttgaagacatcattctacctgcccgtaaaacagctgatgttgccaaacgcactgagctttataagcaagcgcaagtagtgatgcatgaacaggttccggcgttgattgttgcccactctacggtttatgaacctattcgtaaggaagtgaaaggctatgtggttgacccacttggcaagcacctcttttacaacgtagacctcgaataattctgttttttcatttgttatgactaccatcccccgaatttccccgggggatggttattcttctctggtaggcaagcaggtctgtgtaatacataaacagcctgagagctgtaattaataattaaaaagagaattcaggatatgctgcaatttatcctccggcgtctggggctagtgatcccgacgtttattggtattactctgctgacttttgcttttgtgcatatgatccccggtgatccggtactgattatggcgggagagcgtggtatttcagctgaacgtcatgctgaactgatggcagcaatggggctggataagcctctttgggagcaatatcttcattacatcaatggcatactacatggtgatttgggttcctccctgaagagccgtattcccgtatgggatgaatttgtcccccgatttcaggccactctggaattaggcatctgtgccatgttattcgccatttctgtcggtatttcagttggagtgctggcggcggtcaaacgtggttctgtctttgatcataccgcagttggtctggcactgaccggttattcaatgcccattttctggtggggcattatgctcatcatgctggtttctgttcattggaacctgactcctgtttctggtcgtataagcgatagtgtgtttcttgatgacagtcatcccctgacaggttttatgctgatagacaccttgttttggggagaagacggcgatttcgtcgatgctgtgatgcatatgatcctacctgctgttgtgttaggaactatcccgttggcggtcattgtgcgcatgacccgctcatccatgctggaagttttgggcgaagattatattcgtactgcgcgggcaaaaggcctgagccgtttgcgtgtcattatcattcatgcgttacgtaatgcattgctgccggtggtcacggtgattggtttgcaagtgggggttatgctggcgggcgcgattctgaccgaaacgattttttcatggccggggctggggcgttggttgattgatgcacttcagcgccgtgattatccggtggtacagggtggagttttgctggtggcaaccatgatcattttggtcaactttgcggttgacctgctgtatggcattgtcaacccacgtatccggcataagaaataaggagcgcatgatgactcaacttactgaacaatcagcatcaagtgctgagcaaacagtatcaggtgcgccaaaaatgatgacgccgatacaggaattctggcattactttaaacgtaataaaggggcagtcattggccttgcctatatcgttctgatgttattgatcgcgttgtttgcaggcctactggcgccacatggccctgctgaacagttccgcgattctctactattgcctccggtgtggcaggacggaggaagctggcaatttattctcggtactgacgatgtcgggcgagatatcctttcccgcctgatgtatggcgcacgtctttccctgttggtgggttgtctggttgttgtgatgtcgctggtgatggggattattctgggtctgttatccggttattttggcggtgcggttgacgcagccattatgcggatagtcgatattatgctggccttgcccagcctgctgttggcactggtgctggtggctatcttcggcccgtctattgtgaacgcatctctggctctgacatttgttgctctgccccactatatccgtctgacaagggccgcggtgctggtggaagttaaccgtgactatgtgaccgcgtctcaggttgccggagcaggcgcaatgcgtcagatgttcatcaatattttgcctaactgccttgctcctctgattgtgcaggcatcattgggattttcgaatgctattctcgatatggcagcattgggttttctggggatgggggcacagccgcctacaccagaatggggaactatgttgtcagatgtattgcaattcgctcagagtgcctggtgggtagttacttttccggggctggcgatcctgttgacagtactggcatttaacctgatgggagacgggctgcgtgacgcgctcgatcctaagctcaagcagtaggggtatggaatggcattgttgaatatagaccaattatcggtgcacttcggagatgaagatgcaccattccgcgccgttgaccgtatcagctacagcgttgagcaggggcaggttgtcggtattgtcggggagtcaggttcgggtaagtctgtcagttcactggcgattatggggctgatagattatccgggcaaagtaatggccggaaaactggagtttgatggttgtgatctgacaaaaatttctgaaaaagaacgtcgtcagttgattggtgcggaagtttcgatgatttttcaggatccgatgaccagcctgaatccctgctataccgtgggttatcagatcatggaagcgttgaaagtccatcagggcggcagccgcaaaacccgttatcagcgggcgattgatttgctgactctggtgggcattccggatcccgcttcccgtttagaagtgtatccacatcagttatcaggcggaatgagccagcgtgtgatgattgcgatggcaattgcctgtcggccaaaactacttattgcggatgaaccgacaacagcactggacgtcactattcaggctcaaattattgaactattgcttgaattacagcagcaggagaatatggcgctgatcctgatcactcatgatttggcgctggttgccgaagccgcacagcatattattgtgatgtatgcaggtcaggtagtggaagccggaagggcgactgaaatattcaaagcgccccgccatccttatactcaggcattattgcgggcattaccggaatttgcggtagacaaggcccgtctggcctcgttgccgggtgttgttccgggtaaatatgatcgtcctgtcgggtgtttgcttaatccgcgctgcccttatgccacggaacgttgctatcaggtagagcctgcattgcaattggttggagaacgtcaggttaaatgccatatgccgctggatgataaggggaggccgacgatatgagtattcaagaaacggttatgcacaaacaggctgttcacaacacgagtgggcaggaaaaagcttccgtccctttgctgaaagcgacagagttaaaaaaatattatccggttaaaacgggggtattttcacctgagcgtatggtgaaagcattagatggcgtctcatttgaactggaaaaaggcaaaacgctagctgtcgtaggggaatctggctgtgggaaatccacgttagggcgcctgctgactatgatagaaaagccgacagaaggggaactgtattatctggggcaggatttattgctgccagataaagaagccgaaaaactgcgacgtcagaaaatccagattgtattccagaacccttatgcatcattgaatccacgaaaaaaagtggggcagattctggaagagcctttacttatcaatacaacactgacatcagaagagcgcagagaaaaagttctgcaaatgatggagaaagtcgggctaaaatctgaacattaccagcgttaccctcatatgttttctgggggacagcgccagcgtattgccattgcccgtggattaatgctgaatcctgatgtggttattgcagacgaacctgtttccgcgctggatgtttcggtacgggcgcaagttctgaatctgatgatggatttgcaacaagaactgggtctgtcatacgtatttatttctcatgacctctctgtcgttgagcatattgcggatgaagtgatggtcatgtatttggggcgctgtgttgaaaagggcgacaaacatacgattttcaataatcccagtcacccttacacgcaggccttgttgtctgcaacaccgtgtttaaatcctgaactccgtcgtgaacgtatcaaattaacaggagaactgcccagtccgatgaatccgcctccgggctgtgcttttgccgcccgttgccgcccatgcttttggcccatgtattcagctccagcctaaactcaagcaatacggcgagcgggttgttgcttgctttgcagtagaacagaatcaaaatccaccggcgtaattgccacgggccgtagcataacgtatcaaatgtctacgcagtagctgatttaaacctttagtctctaataccccgccaattacggcggggtattcatctaaacgagacgataagaataaaaatcaagtatactcagccgcattaataaggcgttatagcccgtctttggttaattactggtttggataaaatgaaatcgcgtgtcaaacgttcgttaactattaaacagatggcggcagtgactggagttactttggtcactcttgctattttcattactatccaattatcgcatttgttgcagcagcgaaaagatgattatattaaccaactccataatgcggctgctcagattcaaactcccctgacagatgctttattgagttctgatctcaatacagcgaaaacattactgatcgggctgaaaacatcgggtattttagggcgggctgaactgatatccagagatgactcccggattatgagtctggatttcgcaactcatcggcctataccagaactggcaaagcgagttttcggcattcctgtagaaatcaatattcctttacatgtctatggtatttcatccaaagacttggcatcgcaggggcatctcatcctacaggttgattccaatcgtgtgtatcgctttgcattaaatacacttgcgttaatgttgacgacttacttattgcttgcgcttattattacggtgtcagtaagttggtgtgtaaatcgtatcatcatacatccgttacgtgacatcgcgagagaactgaatgaagaacatccgccagcttccatgatctgccccaaaggtcatcaggatgatgaattgggtctgctggtaaaaggttataatcgccaaataagtaagcaaaagtctcgatgaaatgaaaccttacaaggtgaataaaggtctatacacaatggatttcgagttgcatcgcggcggcaagtgagagaattctcaggagcatagataaccgtatgtttataaaaacggtgactgaggtgaacgagagcagccaacaaagaggcgacttgaaagacgaagtgtataagagtttgcgag

SEQ ID NO: 2070 - DNA, 8445 bp, Xenorhabdus sp.; identical to SEQ ID NO: 2069
  CDS (1631)..(3241)

SEQ ID NO: 2071 - DNA, 8445 bp, Xenorhabdus sp.; identical to SEQ ID NO: 2069
  CDS (3416)..(4402)

SEQ ID NO: 2072 - DNA, 8445 bp, Xenorhabdus sp.; identical to SEQ ID NO: 2069
  CDS (4365)..(5336)

SEQ ID NO: 2073 - DNA, 8445 bp, Xenorhabdus sp.; identical to SEQ ID NO: 2069
  CDS (5346)..(6326)

SEQ ID NO: 2074 - DNA, 8445 bp, Xenorhabdus sp.; identical to SEQ ID NO: 2069
  CDS (6395)..(7300)

SEQ ID NO: 2075 - DNA, 8445 bp, Xenorhabdus sp.; identical to SEQ ID NO: 2069
  CDS (7561)..(8262)

SEQ ID NO: 2076 - DNA, 8445 bp, Xenorhabdus sp.
  CDS (7668)..(7973)
ctcgcaaactcttatacacttcgtctttcaagtcgcctctttgttggctgctctcgttcacctcagtcaccgtttttataaacatacggttatctatgctcctgagaattctctcacttgccgccgcgatgcaactcgaaatccattgtgtatagacctttattcaccttgtaaggtttcatttcatcgagacttttgcttacttatttggcgattataaccttttaccagcagacccaattcatcatcctgatgacctttggggcagatcatggaagctggcggatgttcttcattcagttctctcgcgatgtcacgtaacggatgtatgatgatacgatttacacaccaacttactgacaccgtaataataagcgcaagcaataagtaagtcgtcaacattaacgcaagtgtatttaatgcaaagcgatacacacgattggaatcaacctgtaggatgagatgcccctgcgatgccaagtctttggatgaaataccatagacatgtaaaggaatattgatttctacaggaatgccgaaaactcgctttgccagttctggtataggccgatgagttgcgaaatccagactcataatccgggagtcatctctggatatcagttcagcccgccctaaaatacccgatgttttcagcccgatcagtaatgttttcgctgtattgagatcagaactcaataaagcatctgtcaggggagtttgaatctgagcagccgcattatggagttggttaatataatcatcttttcgctgctgcaacaaatgcgataattggatagtaatgaaaatagcaagagtgaccaaagtaactccagtcactgccgccatctgtttaatagttaacgaacgtttgacacgcgatttcattttatccaaaccagtaattaaccaaagacgggctataacgccttattaatgcggctgagtatacttgatttttattcttatcgtctcgtttagatgaataccccgccgtaattggcggggtattagagactaaaggtttaaatcagctactgcgtagacatttgatacgttatgctacggcccgtggcaattacgccggtggattttgattctgttctactgcaaagcaagcaacaacccgctcgccgtattgcttgagtttaggctggagctgaatacatgggccaaaagcatgggcggcaacgggcggcaaaagcacagcccggaggcggattcatcggactgggcagttctcctgttaatttgatacgttcacgacggagttcaggatttaaacacggtgttgcagacaacaaggcctgcgtgtaagggtgactgggattattgaaaatcgtatgtttgtcgcccttttcaacacagcgccccaaatacatgaccatcacttcatccgcaatatgctcaacgacagagaggtcatgagaaataaatacgtatgacagacccagttcttgttgcaaatccatcatcagattcagaacttgcgcccgtaccgaaacatccagcgcggaaacaggttcgtctgcaataaccacatcaggattcagcattaatccacgggcaatggcaatacgctggcgctgtcccccagaaaacatatgagggtaacgctggtaatgttcagattttagcccgactttctccatcatttgcagaactttttctctgcgctcttctgatgtcagtgttgtattgataagtaaaggctcttccagaatctgccccactttttttcgtggattcaatgatgcataagggttctggaatacaatctggattttctgacgtcgcagtttttcggcttctttatctggcagcaataaatcctgccccagataatacagttccccttctgtcggcttttctatcatagtcagcaggcgccctaacgtggatttcccacagccagattcccctacgacagctagcgttttgcctttttccagttcaaatgagacgccatctaatgctttcaccatacgctcaggtgaaaatacccccgttttaaccggataatatttttttaactctgtcgctttcagcaaagggacggaagctttttcctgcccactcgtgttgtgaacagcctgtttgtgcataaccgtttcttgaatactcatatcgtcggcctccccttatcatccagcggcatatggcatttaacctgacgttctccaaccaattgcaatgcaggctctacctgatagcaacgttccgtggcataagggcagcgcggattaagcaaacacccgacaggacgatcatatttacccggaacaacacccggcaacgaggccagacgggccttgtctaccgcaaattccggtaatgcccgcaataatgcctgagtataaggatggcggggcgctttgaatatttcagtcgcccttccggcttccactacctgacctgcatacatcacaataatatgctgtgcggcttcggcaaccagcgccaaatcatgagtgatcaggatcagcgccatattctcctgctgctgtaattcaagcaatagttcaataatttgagcctgaatagtgacgtccagtgctgttgtcggttcatccgcaataagtagttttggccgacaggcaattgccatcgcaatcatcacacgctggctcattccgcctgataactgatgtggatacacttctaaacgggaagcgggatccggaatgcccaccagagtcagcaaatcaatcgcccgctgataacgggttttgcggctgccgccctgatggactttcaacgcttccatgatctgataacccacggtatagcagggattcaggctggtcatcggatcctgaaaaatcatcgaaacttccgcaccaatcaactgacgacgttctttttcagaaatttttgtcagatcacaaccatcaaactccagttttccggccattactttgcccggataatctatcagccccataatcgccagtgaactgacagacttacccgaacctgactccccgacaataccgacaacctgcccctgctcaacgctgtagctgatacggtcaacggcgcggaatggtgcatcttcatctccgaagtgcaccgataattggtctatattcaacaatgccattccatacccctactgcttgagcttaggatcgagcgcgtcacgcagcccgtctcccatcaggttaaatgccagtactgtcaacaggatcgccagccccggaaaagtaactacccaccaggcactctgagcgaattgcaatacatctgacaacatagttccccattctggtgtaggcggctgtgcccccatccccagaaaacccaatgctgccatatcgagaatagcattcgaaaatcccaatgatgcctgcacaatcagaggagcaaggcagttaggcaaaatattgatgaacatctgacgcattgcgcctgctccggcaacctgagacgcggtcacatagtcacggttaacttccaccagcaccgcggcccttgtcagacggatatagtggggcagagcaacaaatgtcagagccagagatgcgttcacaatagacgggccgaagatagccaccagcaccagtgccaacagcaggctgggcaaggccagcataatatcgactatccgcataatggctgcgtcaaccgcaccgccaaaataaccggataacagacccagaataatccccatcaccagcgacatcacaacaaccagacaacccaccaacagggaaagacgtgcgccatacatcaggcgggaaaggatatctcgcccgacatcgtcagtaccgagaataaattgccagcttcctccgtcctgccacaccggaggcaatagtagagaatcgcggaactgttcagcagggccatgtggcgccagtaggcctgcaaacaacgcgatcaataacatcagaacgatataggcaaggccaatgactgcccctttattacgtttaaagtaatgccagaattcctgtatcggcgtcatcatttttggcgcacctgatactgtttgctcagcacttgatgctgattgttcagtaagttgagtcatcatgcgctccttatttcttatgccggatacgtgggttgacaatgccatacagcaggtcaaccgcaaagttgaccaaaatgatcatggttgccaccagcaaaactccaccctgtaccaccggataatcacggcgctgaagtgcatcaatcaaccaacgccccagccccggccatgaaaaaatcgtttcggtcagaatcgcgcccgccagcataacccccacttgcaaaccaatcaccgtgaccaccggcagcaatgcattacgtaacgcatgaatgataatgacacgcaaacggctcaggccttttgcccgcgcagtacgaatataatcttcgcccaaaacttccagcatggatgagcgggtcatgcgcacaatgaccgccaacgggatagttcctaacacaacagcaggtaggatcatatgcatcacagcatcgacgaaatcgccgtcttctccccaaaacaaggtgtctatcagcataaaacctgtcaggggatgactgtcatcaagaaacacactatcgcttatacgaccagaaacaggagtcaggttccaatgaacagaaaccagcatgatgagcataatgccccaccagaaaatgggcattgaataaccggtcagtgccagaccaactgcggtatgatcaaagacagaaccacgtttgaccgccgccagcactccaactgaaataccgacagaaatggcgaataacatggcacagatgcctaattccagagtggcctgaaatcgggggacaaattcatcccatacgggaatacggctcttcagggaggaacccaaatcaccatgtagtatgccattgatgtaatgaagatattgctcccaaagaggcttatccagccccattgctgccatcagttcagcatgacgttcagctgaaataccacgctctcccgccataatcagtaccggatcaccggggatcatatgcacaaaagcaaaagtcagcagagtaataccaataaacgtcgggatcactagccccagacgccggaggataaattgcagcatatcctgaattctctttttaattattaattacagctctcaggctgtttatgtattacacagacctgcttgcctaccagagaagaataaccatcccccggggaaattcgggggatggtagtcataacaaatgaaaaaacagaattattcgaggtctacgttgtaaaagaggtgcttgccaagtgggtcaaccacatagcctttcacttccttacgaataggttcataaaccgtagagtgggcaacaatcaacgccggaacctgttcatgcatcactacttgcgcttgcttataaagctcagtgcgtttggcaacatcagctgttttacgggcaggtagaatgatgtcttcaaattgtttatcacaccattttgaatagttagaaccctgatctttagctgcgcaactaaacaacgtaccaaagaaattatcaggatctccattatcccctgtccagcccatcataacgttttgaggttcaccatctttcgcccgtttcagatattcaccccattcataactgactattttggcttttactccaattttggcccagtccgcctgaattatttccgccatacggcgcgcattcgggttataagggcgttgtaccggcattgcccaaagatcggtttcgaaaccattcgcgaaaccagcttctttcagcagctctttagccttagccggatcataagcataatctttgatatcatcgttataaccccacattgtaggagggatcaggtttttcgctttctggcccgccccctgatataccgcctcaataatggcatctttgttcactgccatcgtcagtgcctgacgcactttgaggttatccattggctttttagtgacattgtaagaaagataaccgacattcatcccagcctgctctttcaggacaatatctttgttctgcttcatactcgcaatatcagcagggttcgggtatggcatgacctgacattcatttttctgtagctttgcataacgaacagaagcatcaggggtaatagagaagaccagacggtcaattttcgcaggtccttcccaataatccttaaacgccttataaagaatacgggaatctttctggtactgtactaactggaatggccctgtaccaattgggttcaggtcgactttttccggcgtacccgccttcatcatgacatcagcatattctttggaaagaattgaggcgaaatccattgccagattagcgagaaaaggagcttcaggacgagacagtacaaaacggacagtatagtcatccaccttctctattttattgataatattctccatatccatgccgctaaaatattcatagccgccaccggatacttgatgatatggatgatttttatccttctgcctcataaaggtaaagataatatcgtcggcgttgaaatcacgtgtgggcttgaaatctttactgctatgccacctcacacccttacgcaaatggaatgtgtaggttttaccatcatcactaacgtcccatcgttcagacaaactgggaataatctctgttgtacctaatttgaaatccaccagacggttataaattggtctggcactggcatcaaaagtggtaccagaggtgaataactgcgggttaaaaccttcaggtgaaccttctgagcaatagaccagtgtttttgcctgcacaccagcagctacagccaaagaaacaagaccaatacccaatttcagtaaaccgggctttttctttttggagagaatcattacataagctccgtttgtggtgtttattgtgccttagccaagcccagaatttcctgcctaaatatcactgtcccggcctgtgttattgttttcgattatcaattaaacaattgttatgactgacgtcaatataacctcagcaaaatatgaaacaatagaaaaacacaaacgcaaaataatattaacaaaaatagttataaactatgacgcgagacacacatgcagagaaaaacactaaaaatatcacttatataaagcattgcatcctatactttataattttaaatttgtgaccggatacttaaataatgagcaaaaagagttatcaggaaagtaagcgaggtaagaggctaaaacgaataaagaaaaagaaaagttttaaattcaccctattcagatggaattaatagcattatcaattaaattgaaaaattaagacaaaatttctactcatacaagaaatggaacttaatgatgaaattatatgcaaatagagtataattcatacttagctaacctagctaatttaacggaggggaacatgactattcaggcaaatatgcacgaggcaaaaactcatttgagccagctggcagataaagcagttgatggtgaagtggtcattattgctaaagcgggaaaaccttatgttcagttagttcctatctgccaaatggatagaactcctggtggttttgaaaatgaaattagtataaatgaacgattttatgaagctgacgatgacatacaaaaaatgtttgaaggatctttatgaaacgacttctactggatacccacgtactcatctggtgggtaaccaacgatccatctttaggcaacttagccaaaagcatgatcatgaaaggaacaaatagcatctttgtcagcgcagtaactccctgggagatatccataaaacgtgcattaggcaaattggaattcaaagctgattttgatttgattatggaaagaaataattttattcctttagctataacacatcttcatgcagagaatgccggtgatttaccacgccatcacggtgacccgtttgatagaatgcttattgtacaatctcaaatggaaggattaacgctgatttcagctgatagtgttttttcagaatatggtattagattgctcaatgcccgacagtgaattcagagagcaggatttattttttatttgccatatacgaaaaaaccccgctcaaagagcctgtctcttgatcatatttcataggtcaagagacttggacagtaaataaccgtcaaggatggtttgtaacatgaaccatccttcccacagcctttcccatcctactcggccatttcgtttagagtcataccagcccgccagtttgcccaaattaatataggcccaataaacgcttggggctgtcttagggagttttttcttctcttgctttgtccacaataacttccacgctaacgggcttaataacgtttcacaactttgtttctccgcctctgatttattgagtcccacatagcgtaactgatgaacacgaaccgcaataaacgccaggatcaccaccattttttccagattctctttacattgcatccgtagcgcttcgacccgtgtccccccccttttccacgctttg

SEQ ID NO: 2077 - DNA, 8445 bp, Xenorhabdus sp.; identical to SEQ ID NO: 2076
  CDS (7357)..(7590)

SEQ ID NO: 2078 - DNA, 11928 bp, Xenorhabdus sp.; identical to SEQ ID NO: 80
  CDS (212)..(703)

SEQ ID NO: 2079 - DNA, 11928 bp, Xenorhabdus sp.; identical to SEQ ID NO: 80
  CDS (743)..(1078)

SEQ ID NO: 2080 - DNA, 11928 bp, Xenorhabdus sp.; identical to SEQ ID NO: 80
  CDS (8319)..(8786)

SEQ ID NO: 2081 - DNA, 11928 bp, Xenorhabdus sp.; identical to SEQ ID NO: 80
  CDS (9041)..(9451)

SEQ ID NO: 2082 - DNA, 11928 bp, Xenorhabdus sp.; identical to SEQ ID NO: 80
  CDS (9492)..(9755)

SEQ ID NO: 2083 - DNA, 11928 bp, Xenorhabdus sp.; identical to SEQ ID NO: 80
  CDS (9849)..(10772)

SEQ ID NO: 2084 - DNA, 11928 bp, Xenorhabdus sp.; identical to SEQ ID NO: 80
  CDS (10876)..(11559)

SEQ ID NO: 2085 - DNA, 11928 bp, Xenorhabdus sp.
  CDS (10516)..(10821)
cccccccttgttgatctgctctaaagcgtactgttttgccataattgttgcaggcactgatggcgcaagggggttgccagcaacgcctccactgattgtggccggaaatagtccccgttatcacagaccccgctcgttttttgccctgatgattttttctgtaatgctggcgagcgggtaaaatgcgatttaaaacgtgtaaacatcacttttctccttgtcaaatttggctcagtgtcggtcaatcccacgctgaaacaaggcgaaactctttttgcgaaaatgaaaattgtttgtatgacttacccttaaacgtaaaaaagcgccccgaaaggcgcagtcgtgaaacaaagaggatgaaaacagaaatcaggccgcgtgttcataggcctgcaaacgctgcgaccagttgcccagataatgggccggtgtgtagcgtgtccgttggctgccgggatcattcagcacatcaccaatcgtgaccgctgccggaataccggtcagggaaagctggatatacgccatcaccgccgccagcgggtcgatatcaatcgcagacacccacatactggacaacggatcatgtccctgctctcttaatacctctgcggctgccagcatcatacaggccgcaccgcagcaaggttcgtggaaggtgataaagggtcgggtctgcaacaagtcagatacctcattcaactgcaattgtgccatcattctggccacactccagggggtaaagaactgctgaagtcccttattccccagctccagttgcataaacacgctgccgagaaaatcacagggagcttctgccagggccagcgcggtataggaaaaaagtttcacaatccggtcaatatcttcccgttcatacttgttgatagttttcagatagaactgctcgagttcctcactgaaacagtatttattgtgaatggccgccatcgcacagttgcaaaaatcctgaaaaacccgataacggttacgggaacgggcggtttgtttaaacaacgaaataaactctttctggtagtccggacaagaagccatggcatgttttcctgataaaaaaaggaaaacacgccccggaaggggaacgtgtttcccctttcggttgaagtgaaaatatgctgatacaacgttaaacagcgggttactgcccgacggccatcgccggtaatgccagtgccgtttcgggcttatcgccgttaaccagatacagggccggacggttttcgtgtcctacctgcccgttgtggctgtccacatgctcgccctggtcatagcagtcatagcctttgaggctgcctgacggttcgctgtaccagtggcggatttcacagtcaaacaccgaggacagttcgcccatcagttcggctgacggcgctgcccacggggtatcaaaccgcaccgtcagactgctgacatggcgtcgttcccagcggacatgatgaccgaacggccattccagcccatagtgctcatcgtagcactgcgctgtggtggtcattcctttcagtaagccactgtttccgttaatctctgtagccaagcgggttggtcgtatcatcagcatatcgcagggctgcgccgaggtcggataaaccgccagtttctcccagcacgcattgatatcaagattgtcagaccagctcaccacaccaaaccagtcggtatactggcggatcagcaggcgggcaatcatgtcacgcgctgataccggtatagtctcccagcgcaacaggcttaagcctgactggcggtagatactgtcaatccgcttcatgttttctgcggttaacaacacattgtcctgcaacaacgccaaccactgttcaaacgccagattctgcgcagtcggcgctgccgtaccccgcaccagttccggatacggtgtgtaagtgaagggcttggtgggttttaatatccccgcacagcccgccagaaacaggcgcaggctctgtaataccgcctgccggtaacgggggacttcttccccgcagacccattgttgcatcacatcgagacaaacagatttaccggtgacgtccagttgattagtgacccattctgccatggttaagttcctttgatttttaagtttaaaaaaccggcgaaactgttccccccacgggagtcagttcccccgatgggtgattgaagaaaagtgtcagttgaaatcctgtctgaaaatatcggcaacctgactgtcgacaatgaccgtcagttcatcatgcatgcccagatacggtgtactacctgatatttcagacgcattcatgcgggttaaatcgtatttatccccccgttcattgatagcatcagacggccggatgccactggcgataagttcggttaccgtttcggtttcacacaatgccgtgtcattcaggctcagaccaaaatgacgtttcagcaacgcggcggtaatcatctgccagacggttaaacgtcaggcttccagggtgacaccatcaaacgctgaccgttgcgctatgccggagaatatcctgcacttcgtgatgatagtggtaatcaggtgaaatcatatgcagtgacaataaattcgcctcatgccacaagacacgggccgccccggcattctgccagctcagctcaaaggtggccgactgacacaagtgctgttgtttctgcaccagtgataaacgttctgatgtcacggtgaccggctgtgcccagacaatctcgtcatcaaagcggccaccgagtaccttgttatcttgggcgtcataaatcatcaccgtgagtggaaaaaaagcccgccggcactgagctgagggcatttccgataccggccagtcacccaaaagatggatcactttcagccgctgtaccgcttcggtgaccgagtcggtctcacacacggtcagcgtttcctcccgcagcgattggggtcgttggggatgctgcatcaggccggtgacctggacggtaaaaatagcttcctgcgagaccggtgtcgtgctctccggcgcaggtaaaaaaatcgggttcatggtgtagctctccttgattggacgtcaataaaagacaacacccgcccggtaacaggaaggtgttgtcggctccccggtcaggcgctaaagaaaaggattaataacctcatcggctgataacgttattgtggattgttattatgttgggtatgtataaatgacggacagacaatgtcttcctcaaacttcagcgaaaatgctgagttgataagcccggcttccggatggtgttgcgcatattcccgcagggcactgaagcggaaagcagtcgcaccggattcatccagcacagcgatacgggttaacagtaccgacgtcaccgccagaccaaacgcctccgctgagagcgtgacgctgaatgcggtttccggcaggaaaaccgaatacattttcttcgctgtcggcaccatataggccagccggtcatctattgactggattgtccagtaatccggctggtaattcccacctagtttgaacgccgtattagccagcaaaaagctcagtaccagccgctccagcggagttgaactcggaaataccgcagacagtgacagactgtccacctgaatcagttcgttgttggacatgaaattctcctgtagataaaaaagacggagaatctctgcccgacgggaagacattccccgtccgggtgactgacctgagggtcagcgatgagttgaaaaaaaaccttcatcatctataccgatgatatctgcttccaaaggggcgcagatgtaccacactgccgtgtactcccttacaggctacgggagtgtgcgtgtcgctacccgaaggtgatcctgacaagcgaccggatcatttaaaaaactttattaaccccaattctggataagaaattgacgagaagcctgttcaaggagccgtgttttggtgcaagtcgaaacagctccggggaggaacaggctatgaacaacttagttgaaattttcatcgatgtcgatgacttttgtcgttttttcattccacaatgggaacagttttgtctcaataagggatatcgcctacgtcgtagaaaaggtcacatgtatcccagtgaaatcatgaccatcctgatcctctttcatctgtcgcattatcgtgattttaaaaatttttatctggagcatatttggcgatatcatcatcacgattttcccaccttgctcagttatactcgttttatcagtgtcgcgccttccgttttagtgcctctgtgcagctatctgactcaacctacggggatcgcctttattgactccacgcgtttgagcgtgtgccataatatccgtattccccgccataaggtatttgaagggacagcacagcgaggaaaaacctcaatggggtggttttacggtttcaaattacacctgattattaaccatcttggcgaaattctggccctcaaaatcacggctggaaatacggatgacaggaaagtggttcgggaattagcaaaagaattaatcggttccttgtatggcgacaaaggttatcttagtcaggaactggcaaacgatttagcacaaaacggtgtcactttcatcacgaaaaagcggagtaatattaaagcgagtgtgctggaagattgggataagatgatgttatcaaggcgttttattatcgagacggttaatgggcaattgaaaaatatctgtcaaatagaacattctcgtcatcgaagtataaaagggtttctgttgactgttttaacggggttaattgcttattgtcataaaaagaagaaaccatcactgaaagttttctactcagaagaagaagatattccagtgacagcttaaacagaattggggttattttaacgttgacgtcaaagctaccggaattatcttcataataggtatctaaaaatatcagggttaactcaccctctgtgggaactgtcctgtggagtactccattgccaatttcataggtgttatcgccaatctttgcgattaatccccctccgggaggatgaggaggtacgccttgaggggcagaccaaggattgggtatattatcaagagaatactgaacccatcccgaagcagtcacagagattacatcccctttgtggagtattaatccagtaggttgaccctgttgaagttttccagaaacagttccagaccaatcatacatagtattacctccaaattatattttgaaagcgacagaagaattaagattgtgattatttagtgtcaggcatttgcacctgaacagaaacaaatctaccatcgggaatatcgattaaatcaccgtcagagtagccttcacgtatatttctggcgaaagctggggcatctgagtgttcacggtggtaggtcattaattttatggaaccatcgggtagaatgttatgatcgatccaaattagcggtaatttgtttttagataatggtatttcaatatcgctatctgtgtcgctttgtatgccatcagtattaaatccagaggttcctttaataagataaactcctttagaaatacgctcagtagtaacaccttcaaatttatcactagtagtagatgtaccatctgagtaaattaaaattgtaggtaatttttttttggtaacgctgctgctagtagcatatgtattggctgttcccctaatggtgtaccaaccatgccagctgcgaccttcatcccatgactggcgtattgcaatttccccgatatgtgatgtataacgctgtgtaacaacggaataatcaccttgcacttccaatataccaaagctatacagacctatgggaaaatcaggaaccttgtcagcctgtggaatattaacaacagcgaaccctgttgataaaaagtgttgaaagggagcactggaattcacgacccccagagcattagcactgacggctgtaacatcttttgccatcaaatggatgtcggtcgccagagactttccatttattgaacggctgttaggtaccgcattcagcgcttgattgactgtatttcgtagaccgatattatttacaaattccgctttatctggaatatccgctccattctgctccttagacaagcgaatattagcattctgattagcaatactagccaaatcatatgctgctttcaccgcttttggtgttgcagacattgtctcgctatcactaccgacatcattactcaggacaacaaatcctttatcttgcagtgtggcatctgggtgattacgactagcagcatgttctgcaatagatcctttgacatattccggtgttgcaacgatcacgagattactctcgtctgagacaggtacatcagattttttatcttgcatattcattccctcatctaatcaacaatacacattgctaaataatatgaaggcggtgggagacttctccgccggtgaacatcaataaaagggttcatcaatacaggagaatacagcttgattactatttgatagggagcatgttttgttggcagaatgacataaaatgacaggcggggaattaataaaatttatatggccattgataaaaatgaatgtatagaaaattacacaactacaattaattaaaaaataattttattcgattagttttattacgggttaaggattgtgatttaggttgattaagatatcaattatatttttcacatgggtttttagtaattaataatttctatttatcaataatattgaatttcctgcaaaaaccaagagtcaatatgtaggaatgtcgctattttatttggagtgatatatatgccagaattaaaaaatactattttagatttatctaaattactcactataggccattcattcaatgcgtatcctaatggcaatatttacataggcaaaatagataccgatccggctatatctgggaaccagattcaggtttatcttgagcttgaggatggaacgtatatttctgtaccgcaaccactgagtatcaatccggccggataccttgtttataacgggcagattgctaaattcgttaccgagcaaggccactcaatagcggtgtatgattcttatggggtgcagcagttctattatcctaatgtactgaagtacgatcctgagcagttcaatgaaaaattgaaagataacggtatagataagttagtcggatcatcgttcagcggttcagtttacagtggttacagtttaggaatttttaaacgagcaggtaattttaggaaaggttcggtagtaaaatccaaatttgacgtgcttttattggatggtaaatattatgcctaccatctggatgtcgaacacgttgttactgaaaaggaaaatgttcaggctaactgggctcaacgggtatccagtgaatgatattcgtaattttggggcaaaagcagatttagttgagaaaggaattaatgctacagattgtagtgaagcatgggagctatgctatctgttttgcaagcaatacggttacgcaatggtattgccagatgctcctatctatgtaactaaatcgtgtaaagttggcaatttaaatatcatatcagaatcaggaaaggcaggatttgccgatccatattacggacgtagagaagataaaacaaacttcattgatggaagtaaatcagccaattggacgtacttttataactatgacgaaggattaaataaaacatggtttgatatgtcttcaattgcgacaggatgtttagtatgctcagataaagacatttctatccttgtaaaaaaatacgatgaagagtttaagctcagcggtatcggtgttcttggaaatcatcgcgcaaagaatcaaataggcattgattcaggttttcctgaaggatacgaaggagttagatctgagcttagtaacatttctgtagttggatgtggaagtcatggaatattatttaggactggttttgaaatatcgtcacctagcggcctaaatctttacgcaaataatgggtatggtttatacgttgacgctcatgataaaatagattcacctgtagaatatctaacatttaataggataaaagctgacaacaataggttgggaggcagggcgcgagcatactttgattaatatttgtacttaaaatgtcaatattattttttaactcttttgttaactataaatgtctaaagaaccatgatttagatcaattattacccgatataaaaccacaaaaatgacatattgaaaattattaatctttaaaaagcagtaaaaatagtgtgctcgcgccctggttgggagggttgggcttcaaacatgttagggtaatggtggtatttgatgatgtgataggaaataattcaggtcagtacgattgcccatacatgatagatccgctattggggtactggagaaagataacgccatctatttatgataacagagcagcgctagttaaaatagaaaacggagcattgaaccatgtaggcgactacgggtctatacataatctcacttttagaaatataaaaggagagcaagttgttaacttaatatccgttaataataagataggcgataagggagttataacaaagttgactttggataatatacacgccgtagagtcaagtaaacttaataatgatttaaaggtgtgtgtgtctttaatagattgcttgtatcttgatgatgtgcaagtcaataatatctatgtaacagacaacataattaaattagagattgataatataaagtatatcaaaaacgatagtggttctacaaatatagatattaaaacagtaaaacagaaagctctatttaaaaagtcaggtacagtaatcgacagtggttcaacaacaaatacgcaattagttaatttcacgattcagaatataaataacacctccgaaaacagtaaaaaccctacaaacacctacagaattacagcaattaactttaataaagtagcgtatgttgatgtttttctgtttaaatttaacggttcatataagtgtaggatagtggacgataatgcaggaggaataattatttccacagcagcagatagcaacggtaacatatcaacaaccatagaagaaaattgttcttattatctaacatggctataagttctgagttggtatttggtaatggaagtgtagcagggtgtgatagagcatatttttgacaggcattgaaaggaaattacagattgcatgcttggaagtctagctgctatctgtgtcgtttttgtgtctctgctaacgacacatgaacgacagccaaagatattgaaaggagatgaatgacacaaaacgggatgcgagcaaggataaatctttatatttcaatatgatatttagtggtctactttcttctaagccgtaggtcacaggttcgaatcctgtaggggaaatcaatatgttacgccaatctcagacccgcttgatttttcccttgtgtcgtatttgtgtcgttatcttcaaaaagcacatcaattttgcaagcatgttcacttaaatggttgggtgctaaatgtgcatatcttctaaccatttcgatagattcccacccccccatttcttgaagtgctgaaagtggaacccctgattgtatcaaccagcttgcccatgtgtggcgtaggtcgtgaaaacggaagtcttctattcctgcttttttaaggccgatattccaggcactattatcatcaaccctcatttttctcactgctggggttaatgttccgtctggtcggtgcttggctttagtatgcacaaagacccaccttgagtgcttgcctatctgatcccgtaacacccggcatgcggtatcattcagagctacacctatcgctttcccggctttggcgttctctggatttatccatgccacttttctttgcatatcaactcagagaattacggacagccgacgatgtttaactttgatgaacgtccggtcggtcaggttgatgttcaggggcccgccaagcaactggcgatccatccctcccgcgtcattatcctgtgtgaaggggcggaagatggcgatatcttctccggtacgccgttacttcgggcaccttcgagtgccttgccgatgactatatcttagtgacaggcgtttgatatgggcgtcaaagtcacggggatccgtgaagcccagtcccgcctcaatgccttaattgatgatatccgggggcgcaaggtggttcgcgctgtgtataaggcgctgtatatcggcagtacacaggcggccctctataccccgattgatactgccacgctgattaactcccagttccgtgatgtgcgctttgatggcgtacggctcacgggacgcgtgggttattcggcaaactatgccgtctatgtccatgaccccaatgtgaggcaggattttcgccgggctacggcgaagaaagcctttctgaaatccggctttgatgagatgcggcgggaaatcgataacgcggttgcgcaggagctgaaactctgatggtctttgaacacttccgccattatctggcaaaggctgaactcactgatggttttaaaatccagatgctcaattggattgagcagaaaggggatggtggtcaggcccaatatatggtgttccaacccgcgggcggcacaggtcggctggatgatttaggggcggatgaccatgtgcaggtcattctggtcagtgggcagaataatcctcagccggttatccagcgcgcgcaggacattctgaattatgtcgcggcccaccctgatgatgcgtgtctgaatggcgtctttaatctcggcggcctgactacccccattcctacccaagagaaccggtatgtcatccgactactctttcgttgtacatcctaatcaggtcgccttgcgcggcctttttgttattataagaggttattcacatggctatccatcgcttcaccaaacgtggtcacagtatgcttgctgccatcttctgtggcgataaagtcaaattcagctttgacgacgacataaaacagtgcacctcctgtttttgtggccctctctgttacggcccgttcagttatgcgtggcaagataagtaatccatgtttgactagtgccggggctagtgcgttataaacagcatcaatccccctgaacatgaacttttgaactttattctcgctgttttttttaatccctgtttcagccagttctttggcaacattgctgatagctttgtagactgcactcataactacctcgataaccaataattgaggataaattcaatatcaggctgctttaatagccacgcaaaatagctgggggttagttttcttaacctcttcaaatgtcatgcctttgtgcttgccaaatctgaacttgtgcagcaatgagggctggtgactaatctccagcatctcttcatcagaccaaccagattcatccttgatacgcttaaatagtgcggcggtgactatgcagtcatacagtgccctgtgtgcatgtaatccatccggtacaaaaacatccagttttagtgcatatcggagatattggttgctgtgactttccatgtctggccacaaacgcttggctaatttcaatgtacagataaacggtacatccatctccggcatcatgcgtgaatcgaaagcggcattatgtgcaaccagaaagtcagcccctttgtatttatcaataacatcctcaattaacggagaatcagcgaccatttcatccgtaatatggtgaatcgccattgccccgactgagatctgtctcttgatcatatttcataggtcaagagacttggacagtaaataaccgtcaaggatggtttgtaacatgaaccatccttcccacagcctttcccatcctactcggccatttcgtttagagtcataccagcccgccagtttgcccaaattaatataggcccaataaacgcttggggctgtcttagggagttttttcttctcttgctttctttag

SEQ ID NO: 2086 - DNA, 11928 bp, Xenorhabdus sp.; identical to SEQ ID NO: 2085
  CDS (10172)..(10450)

SEQ ID NO: 2087 - DNA, 11928 bp, Xenorhabdus sp.; identical to SEQ ID NO: 2085
  CDS (9887)..(10066)

SEQ ID NO: 2088 - DNA, 11928 bp, Xenorhabdus sp.; identical to SEQ ID NO: 2085
  CDS (7243)..(7353)

SEQ ID NO: 2089 - DNA, 11928 bp, Xenorhabdus sp.; identical to SEQ ID NO: 2085
  CDS (3959)..(4828)

SEQ ID NO: 2090 - DNA, 11928 bp, Xenorhabdus sp.; identical to SEQ ID NO: 2085
  CDS (6775)..(7113)

SEQ ID NO: 2091 - DNA, 9744 bp, Xenorhabdus sp.; identical to SEQ ID NO: 81
  CDS (1340)..(2221)

SEQ ID NO: 2092 - DNA, 9744 bp, Xenorhabdus sp.; identical to SEQ ID NO: 81
  CDS (4548)..(6038)

SEQ ID NO: 2093 - DNA, 9744 bp, Xenorhabdus sp.; identical to SEQ ID NO: 81
  CDS (6805)..(7236)

SEQ ID NO: 2094 - DNA, 9744 bp, Xenorhabdus sp.; identical to SEQ ID NO: 81
  CDS (7504)..(8847)

SEQ ID NO: 2095 - DNA, 9744 bp, Xenorhabdus sp.
  CDS (8517)..(9743)
gaacgttttttttatctgcaggctgtaaagattcactgaactgataaagcttatccgggctttgttcaaatacaacgactttgcattgaacgcacaataaaacgctggtgatgtgtgattttataagtcagatagtcaatgatgtctgcctcgcgatcacacaccgaaatcacgttattcatctcactgccaaggcgggcttctgtggcctgagaggcccgttcctacttataactttccttgtctttatatggacgggaagcccgttgcgctttcttgccatactgactcagcgctcttatccagcgcgtttgttcaatcaggccaatgagctgttcttctttgggagcaaaaagtaaaacagaatgggcatgcagaccggtggcactttttcgggatgtggtatagcccatttctttccggacggtctgatgagtaaattccagtgaggtcgtatcttccaatgccagcaaacagtcataggatttggcgtgttcagccgtcgccgcaaatccggcctcggcaatagaggttgcgttaatggcctgattacgcgtaaaccgataagcggcttcaatatccgctggggttttgagtgattgcacaatagattgcccgatatgattggctaacgaggcggtgaatttgataagccgttttgtacgccgactatcgcccaaatttgcgcgagaaaaagtttcatcagcccattgttctgcgtgagtttggaacattttaccgtacctcaatgaaatcgttattactcagatcggtaaagtggaaaaagattcaaaaaatcccccgattttttatcgggggatttgtgtatgaaagacagattcaacatggggtttattcatcaaaaatcatttattgtttactggtaagctcactgaattacaaaatcccttgcgccagcatggcatcagccactttcacaaagcccgctatgttcgcaccctgtacatagttgatctgtttgccttctccaccatattccacacaggattggtgaatatcgagcatgatgtgatgtaagcggatatccactttttctgctttccagttctggcgtatcgcattctgcgacatttccaggccggaagtggctacacctcccgcattggcggccttacccggcgcaaacagaacacctgcttcaaggaaagcatcagtagctgcgatagttgccggcatgttggctccttctgctaccaatttcacaccattctgaatcagtattttcgcatcttccaaatgcagctcattctgtgtcgcgcaaggcagagcgatatctacaggcactgaccacgggttttgcccctcaaggaaagtcagcccacgttctttggcataatcctcaacacgcccataacgtttatttttaatctcttccagatgagccagtttctctggagtgaatccttcttcatccagaacagtaccgccggaatcggataccgtcaccactttagcccccagttccagacatttttcgatggtatattgagcgacatttcctgctcccgaaaccgatacccgcataccatccagcgccataccatgacgtttcagcatcgcatgaatgaaataaaccagaccataacccgtcgcttccgggcggatcagactgccaccaaaagaaagctctttacctgtgaaaacacaggccgtgttgttggataactttttcatcatcccggccataaacgccacttcccggccaccaactccgatatctccggcaggaacatcagtatcaggccccagatggcgatacaactcggtcattaatgcctgacagaaccgcataatctcaccctgacttttccctttaggatcgaaatcagaaccaccttttccaccgcccattggtaatgttgtcagcgcattttttaatgtttgctcaaaacccagaaacttcagaatagagagattaacggaagggtgaaaacgcatcccgcctttaaatggcccgatggccgaattgaactgtacccgccatgcgcggtttacctgaacctttccctgatcatcaacccagctgacgcggaattgaataactctttctggttcaaccaaacgctctaataacccctgttcacgatattgcggattgcgctcaagaaaaggccagagagaggtcaatacttctcttactgcctgtaaatattctggttgatgtggattgtgatactgaacagattcaagaaatgagactaaagatgatggtacattcatttatagcttcctttatacattcagatgtgatgccctccccatttcctttgttattttttgtcgaaaatgtgaggtaattacggtttgctttctgaatataccactattttatgattgaatttcaataactatttttattaattttgttgaaaataaattttataatttcttaataaaaagctttttaaagcaccttatcctttacggaagcaaaaaaatcgcctgcaatgagcaggcgattccatagaataagttttcagcagaatattaatcttcgtcacgcaacggaacgataagcatatcaacatggactgtgttaatgagctgacgagctgatgacatcagcttgctccaaaaatcctgatgatgaccacagacaacgagatccatatcatattgcttaatcgcatcaacaagtacttgccctaaatcgccgctaccactcagcgtttcctgaatttcatagcttgaattctctgacagctctttcagggagttacgggtttcatctgcgatacgtgcctgcatatcaccaagattgacatctatcaggccggtgtataaatcagagtaatttacatcaacatggatcaaggaaaccttagcattgtatggccttgccaaagaaaccgctttatccaccaagaccctgctttctggagatagatcaactgctacaagaatatgtttataagccatataagtgaactccttccataaaatggattggcggcattaaacgccatgattttatacttatactataactgcttgacgcctcttttgagtgtcgtcgtgatcacaacttgttactttatttagttaaccagttgaaagaaaagatatctgctttcaataccataactgtattaaacattttatctctgatactgaggccatttttcaatatcacttggcttttctaataagccatttcctcctaaaatttaatactgtgactatttacattgctaccttttcagataaattcttaatccatacacaatatcccgttgccactctaaggagggggaatatgttcagtatgcttgcattcttctgggcaatttgcattatctgtattatcaatatattacgttatatttcttcactacgtgctttattatctattctgcgtcaggcagatccgatgctatatcaagccattgatgggaatggtttttttactggtaatggccaattcagtaaacaaatgcggctggtacgctacattaacacacaaggctatctcaaccatcacaatgatgatgtcatctttttctgcgaaaggctgcgtaagcagtttatattgacgaaagtgttatgtgggattgtcttactgtgtctggtaggaatagcggtagtctgataacaacagagaggaaaagcgagttgaaaataaaaagtggcaataaaaagggttgagctgctgatagagctgccaaccctttttaataacttaagcttagatcaattgcagagcaatccaatacaggcagcctgacagggcaattgaaatcggcaatgtcagtacccacgccagcatgatatttttgatagtcttactttgaacaccaccaccatcaaccagcattgtacctgcgaccgcagaagaaagaacctgtgtcgtcgataccggcatccccgtataactagcaaccccaatcgatactgcggcggtcacctgagcggaaaccccctgagcataagtcatgccttttttaccgattttttcaccaatagtgacagccacacgtttccagccaaccattgtgcccagagacagtgccagcgccaccgcgatgattatccacattggtgcatattcaacggtattcagcagatctttacgcaatttatgcaggaaacgtgcatcttccatgctggtttctggcaatttagccacagcacttgctgtatcagcaatacacatcaacatgcgacgcatgctgttacgttgatccggattcagctcactatagttctgaatacttcccagcattgtttccgtggtattcagcacatccagtgcccgtgaattatcacagtggaaattcatatccagttgatcttcaaccggagatatagccggagtcagttcaattgcatgggtaagcgcaggttcatgatgctcataatactgctgcaaatgcacaacagcatcatgggtacgagcaatgtcatagcttgttgagttcatattcacaacaaagccagcaggcgcgacaccaatcagtaccagcatgatcagaccaatccctttctggccatcattggcgccatgagaaaaactcacaccaacagcagaaaggatcagagctgttcgtgtccagaatggtggtttacgtttaccatcctgcttttcacgttcagccggcgtcatatggatacgacggcgctttttagtaccactccagtaacggcgcagtaaaaagaccatcgctcccgcgatcaccaaaccaatcataggagacagaatcaaggacataaaaatctgtatcatcttcggaatattcagcgcatcaacaacagaagagctggtcactatcgcattggtcaggccaattccgataatagaaccaatcaacgtatgagagctggatgccgggatcccgaaataccatgtgcccagattccagataattgccgccagcagcatggaaaagaccatcgccaaaccatggcttgagctgacattcagtaggagatctgtaggtaatagatgaacaatcgcataagcgacacttaatccaccaagtagaacaccaaaaaagttaaaaacccctgccatgacaacagcaaattgcgagcgcatagcgcgggtataaataacagttgctactgcatttgcggtatcatgaaacccattgatggcttcataaaaaagcacaaacaacagagcaagtactaacataaggccggtataaaaatccaggccagtaaacagatgtagcataaacgttaagccagttagtaggacatgaacgcggcgcattatcagtgacaaacgctggcgggaaaagagaaatatgacctttttttgatttaatgacaataaaccggcagcgaatgatttacttttatcataaaaatcaaaaaattatgtgatttttatctttttatatttttttgatgaaaaatggcctgccataataaaagttcaaccaagtacttatttttctctgcatttcgcagatagtccctccacaatgaagtgtatttcctgaaaaataatccggcaagaaagttattctgcaagtatagagatagcaaacgaatggaaaaatttgatgtagtaattattggtgctggcgcggctggcttgttttgcgcagcacaggccgggcagtcaggactaaatgttctggtactggataatggtaaaaaagcaggccgcaaaattttaatgtccgggggcggacgctgtaattttaccaatatgtatgccgaacccgcagccttcctttcagccaatccgcacttttgtaagtcagcacttgctcgctacacacaatgggattttattgatttggtgcaacgtcatggtattgcctaccatgaaaaaacgttagggcagcttttttgcgatgactcggctcagcagattattaacctgcttttgaaagagtgcgaagccggtcaggttacgattcgcttacgtagtgaagtcactcagatagagaaaaatgagcaagagttcgaaattactgcatcagggaaaaaagtaagcgcgcactcacttgttgtggcttctggcggattatctatgcccggtttaggtgcctctcctttcggttatcgcattgcggaacaattcggtcttaatatcctgccaactcgtgccgccttagttccttttaccctacacaaaccattgctggaacagcttcaaactctctccggtgtggcggttccttccgttgttaccgcacaggacggaacggtgttcagggaaaatatcctgtttactcaccgtggactttccggccccgctattttacagatctccagctattggcagcccggtgaatatgtgagtattaacttactcccgaatatcgacttggatgacttcttaactcaggaacgtgaaacccaccctaaccaaagcctgaaaaacacccttgccaaactgttgccaaaacgtctggtagagtgcctgcaatctctgggtcaactaccagaactctctctgaaacagctcaattcagcacagaaaaaagatctggtcactaccctgcaatgctggcaggtgcagccaaatggtactgagggatatcgcaccgcagaggtgactctcggtggcgtagacactaatgagctgtcatcgaaaacaatggagtcccataaggtgaagggattgtattttatcggtgaagttgtcgacgttaccggctggcttggcggatataatttccagtgggcatggagttcagcctgggcctgtgcgcaggcactggtggctgtggaaataaatcacactaggcatcaaactacctgatagtaattcaatgaattttgttatctaaaaaagtgggaccatgatcccacttcaacttattaatggtcgagtactctggttaccaacatgggcgaactgataaagaaaaaacatattattttcgatgagatttttcattgtaaaaaatcattttatgattttaaggtctgattttctgtactgcttttgttcttgatagaaattctcatgagtcccgatatcaagtagatataactctaatttattttctttccaatgatatccgagcataatcaattgattgtttagtgaaaacttatgcactcttaaaaaatcaagatcaccttttttattttcacctattttggggtttttaattattttttcaatttcatcttctacaagatatagactctgttctggtagtttacttaacgctttagaaaaacgccttgtttcgtaaacctcaatctcatttttttgttcttctaacatatttacttattctcccatgctctacttctttttgagctagtaaaatttcatggataaatgaataagttaaatctggattatcctcggcaattcgcccaattttagcccaatgctctatttgctttggaacgcttctgtttgatgcttcagcatgaatcctaacatcatccacaaattcatcatccaacctaacgctaatggccatgatgacctccagttttatgaatttttaacttgcactgtcagaatacaacaatttgtcgcaatttgcaattttttggcggataaatgcccaccaaagctagtgttataaaatacgtaagttctgtatcagataatcaataaaaacgcggcatttgaggcgaatacgatgatcaccggcaaacacaatcgtgatgtcctgcttgggcaatgtatagtcgggaaacaactggatcagctcccctttagcaatttcctctttcaccatccactccggcagaatggctacaccgagtccggaacacaccatcgccttagtagctaaggctgaattagagtgaaaccgggccatagcacgaaattcgaacgcttcctttttatcgttgcgtaaagtccactgtgttggtgcctgtaagttactgttagcaatccactgcacagcatttaaatcatcaagggatttaacgggattgttttttaaccactctgatgaggccactataacaatggcataattacccagttttctacttcttaaagtagagtcacgcaaagtccctaagcgaattgccagatcaaaccgttctgaaattaaatcattcaatgatgaatcagcgtaataattgatgcctaaatttggatgaagtttgcaaaactcaccaattaacggcagtaaaaattgcgcaccaaattccgcagtggatgtaatactcagagttccggacaaagaacgatgaatgtcagatatgttttcaatagatgtctgaatattagaaaatatttcccgaaaatccttatataggacttcaccggcttctgtcagagtgatgcctcgtgtattgcgaataagcagcggcacattcagagcttcctccaacgatttcacatgaatactcgccatcgctttgctaatgaaaagccgttttgcggcaagagtgaatgacccacaatctactaccgcaagaaacgtttgaattcggtttaagtgattaaaaatcatagattgttaaatattagtaaacactgagttcaatttaatctaatcgacactaccgagcaagccaaattagactccaaaccggaggataaaatgacatatcgttatcgtattgcctttatttttttagctggctttttcattgactgcataaatatttttatgtcagcgattgcattgcctaatatttcccacgagctcaacatttctgaatctagcgtggcctgggtagcaaacagctatattctgggattgacgctcattattccactaagcacctggtttgccagtcatctgggtgccagattgaccatggcagcttccatggcaatattttctgtaggagctttactatcagggctatccaacgattttgtgtcattgatcctgtttcgatttattcaggggataggcggtggattactgatcccggtaggtcaggcactcacctttggcctgtttaaaaaagatgaacgcgcaaaagtatcgacgctgattatggctgtcgcgctaattgcaccggctatttctcccggtgcaggcggagtcatcgtggatcacttttcctggcgctgggtatttctctgcaatatccctttcagtctcatcacggcattactggcaatattatggatcaaaaaggaaaagaccaccgcccgccgaccggatctcatagggctattattggtaagtctggcacttactgcactgctgtttggcatgtcactgtatgcgggttctagcagcccatggcttcccctcaccttagccggaactggcattttatttagcctgctctacgtcagacatactcgcagcatagagcacccaattctcgacctgaatgtgttgcgcaataaccgtatgctcttctctgtcttagtttactatgctgtaccgggcatatttaccggtgtgaatctactcaatattttctttctccagcaggtgattggctggactgccagtgaaaccggacttttgatgatattgttcgcgggtggatcattctgtgccatggtagcttgcggtcatctctataatcacattggcgctgcccgactattctgtactggcctgatactgcatgccggggggatcgtcttgctgacactggtcggggcggaacatgaattactcttgcttgttgctgcttacttgctgatgggaattggcggaggtatttcagccaataccgctcagaccactgcgatgctgcattttcagggggaacatctggcacgtgccagcactgtctggaacctcaatcgccagatgtcattcagcatcggcgctgcggtttttacactgctctttaatctgctacaac

SEQ ID NO: 2096 - DNA, 9744 bp, Xenorhabdus sp.; identical to SEQ ID NO: 2095
  CDS (5519)..(6742)

SEQ ID NO: 2097 - DNA, 12203 bp, Xenorhabdus sp.; identical to SEQ ID NO: 82
  CDS (3906)..(4058)

SEQ ID NO: 2098 - DNA, 12203 bp, Xenorhabdus sp.; identical to SEQ ID NO: 82
  CDS (4395)..(5450)

SEQ ID NO: 2099 - DNA, 12203 bp, Xenorhabdus sp.; identical to SEQ ID NO: 82
  CDS (6228)..(6929)

SEQ ID NO: 2100 - DNA, 12203 bp, Xenorhabdus sp.; identical to SEQ ID NO: 82
  CDS (6844)..(7644)

SEQ ID NO: 2101 - DNA, 12203 bp, Xenorhabdus sp.; identical to SEQ ID NO: 82
  CDS (8024)..(8854)

SEQ ID NO: 2102 - DNA, 12203 bp, Xenorhabdus sp.; identical to SEQ ID NO: 82
  CDS (8857)..(9669)

SEQ ID NO: 2103 - DNA, 12203 bp, Xenorhabdus sp.; identical to SEQ ID NO: 82
  CDS (9752)..(10411)

SEQ ID NO: 2104 - DNA, 12203 bp, Xenorhabdus sp.; identical to SEQ ID NO: 82
  CDS (10484)..(10585)

SEQ ID NO: 2105 - DNA, 12203 bp, Xenorhabdus sp.; identical to SEQ ID NO: 82
  CDS (10732)..(11073)

SEQ ID NO: 2106 - DNA, 12203 bp, Xenorhabdus sp.; identical to SEQ ID NO: 467
  CDS (11446)..(12201)

SEQ ID NO: 2107 - DNA, 12203 bp, Xenorhabdus sp.; identical to SEQ ID NO: 467
  CDS (8720)..(11362)

SEQ ID NO: 2108 - DNA, 12743 bp, Xenorhabdus sp.
  CDS (2)..(106)
  unsure (1)..(12743): unsure at all n locations
agctctgcgtttagatctggaccgtatcgaacattgggttggtctgggtgcatctgtgtctgatcgtgttgcggcactgatcaaagacgctaaaaaagcagcttaatctgtcgcggtggtaacaatgagcaaacaatctggcctggagcaccctgttgatccaatcgtgttggggaaattagggtcagcgtacggcatacgtggttggctcagagttttttcctccaccgaacaagccgaagacatctttgaatatcagccgtggtttattcagcgttccggccagtggcaacacgttgagctggaaacatggaaatatcacaatcaggatttgatcatcaaaattaaaggtattgatgatcgggatgccgctaatctgttcactaacagtgaagtagtggtggactcatcccaattaccagcactggaagacggtgattattactggaaagacctcacgggttgccaggtaatcaatacggcgggttataatcttggcattgtccaggatatgatggaaactgggtcgaacgatgtgatggtaataaaggcaaacctgaaagatgcattcggtatcaaggagcggttgattccgtttcttgatgggcaggttatcaagaaagttgatctcgctaccaaaattattgaagtagattgggatcctagtttttaatctccggtaaaccggttgagaagtgggacgctatatgtggattggggtaattagcctgtttcctgaaatgttccgcgcaataaccgattacggggtaactggtcgggcagtgaaaaatggcctgctcagtatcgattgctggagtccgcgggattttacctacgacaggcatcgtactgtggatgatcgcccttatggtggtggtcctggcatgcttatgatggtgcaaccattacgggaagccattcaggcagctaaagcagcggctggtgttggtgcaaaggtgatatatctttcacctcagggacgtaaactcgaccaacagggagtttgcgaactggcagcaaatgagaaattaattctggtttgcggccgctatgaaggtattgatgagcgcgttatccaaaccgaaattgacgaagaatggtctatcggtgattacgttctcagcgggggagaacttcctgcgatgacaatgattgattccatatcccggtttattccaggggtgttggggcgtcaggcatcggcagaagaggactcgtttgctgacgggctgttggattgcccgcattatacccgccctgaagtgttggatgggatggaagtcccgtcagttttactgtcaggaaatcatgcccaaattgatcgctggcgcttgaaacaatcactgggtcgtacttggctaagaaggcccgaacttctagaaagcctagctctgactgacgagcaaaggatgttgctggctgaattccaacaggaatatcaggatcaggcaacgaattaatctagacatgtccaataaaggaatgtctctgatatatcagtttacctagggtaagagagttattatgagcaacattattaaacaacttgaacaagagcagatgaagcaagacgtaccttcattccgtccgggtgacaccgtggaagttaaggtatgggtcgttgaaggttctaaaaagcgtctgcagacattcgagggcgtggttatcgcgattcgtaaccgcggtctgcactctgcattcactgttcgtaagatttctaacggcgaaggcgttgagcgtgtattccagactcactccccagtcgtagacagcattcatgttaaacgtcgtggtgctgttcgcagagctaaactgtactacctgcgtgagcgttctggtaaggcagctcgtattaaagagcgtctgggcgctaaataatacgcttttgctacatccgaaagttataggccagcaaattgctggcctttttagtttctctttcagaaaaataaatagcccgcaatcagcgagctattctgtcagtccactccgtggatcacataaaagtgttgactaagacataccctactgtacaggcactgctaacaccaatcaggcccggcacaagaaagctatggttgatgataaatttcccgatttttgttgtacctgagcggtcaaaaccgatgcaggccaaatcacttggataggtaggcaaaacaaaataaccataagccgccggaaagaaggcaattaaaagtttaggatcaacaccaagttgtaatcccattggagcaattgcggtcaaagctgcggcctggctgttaactaattttgacaccagaaacagcactaatgcataagtccagggttttgcctgaacaatatcttccagtaccagtttcaaatcgcctaaatgtgaatgaaagaaggtatcactcatccatgcaactccaaaaacagaaaagatagcaaccattccggctttgaatacggcgctattagctatttcgctggttttgactttacaggtcatcaaaatgattgaacccgcgatcagcatcatcatctggataaccagattcatagagagtggttttaattcaccttttacttcaaaaacaggccgtagttcagtgcatgaaccgaacaataccacgattgcaatggcagcgaaaaagatccaggtggctctgtatgcctgtttaggaaagacctgatctaacagagtttctgaattaccgtagataaattctcgttgtttaggatctttaattttttcctgaaattcttcgtctttatctaaatctttacctcggcgtaaactccataatgcagcaagtacaaccccggtcagtgatgcaggaattgaaatggtcaggatttctaagatcccgtaggcatggccgataccatgactggccgcgataattgatactaaagaaacgacggcaacagaaacgggagaggcagtaattgccatttgtgaggcaacagatgcgactgccatcggacgttcagggcgaatgcctttttttaaggcaatatcaccgatgatagggaacatggtataaaccacatggcctgtaccacaaaggaaagttaacatccatgtagtgagtggagctaaaatagtaatgtgttgtggatggcggcgtagaaggcgttcagcacactgcatcatcacattcaggccacccgcagtttgtaaaacagatgcgcagccgatcactgcaagaatagttagcattacatcaactggtggcttacctggctctaatccaaaaacaaatgtcagtataaaaagcccaatgccactgatcagccccaatcccatgcccgcataacgcgtacctatcaataagcatataattattatggcaaattgcagcgttatcatatctatccttaatgaatgagtaaaaaatgaacgttgataacctacttcttttagacagagttattcaaccattcttcataaatgtttttttatagtttcgacttaacattaaaaacacatgttaatattattaaaataaaaatataaaaacgggattaagatcttgtttttatcaactgatttttaaaagtaattaacttttttgtaaataattaatcaatggttaataaaatattgctattggaggtttaattgttaaatatattattcaatcattaacgttcaggttgtttaatatatttctattgataattagaatatatgtgaattatttatgcattgattaatatcaattaccagaaaggtttggtgtaaaataacatttacattttcgtaaaaaaatataaacaatcggattgtattctttacggagcgtggtatgttatccggcagacgctaaaaacttaaacagacaaataaagcaggtatgaaaaatgatcatgcaaaaagatgcgcttaataacattcacattctcgatgaacaagttctgattacaccggaagagctgaaactaaaatatccattgagtagcagtgacttgaatgctattacaaacgcgcgtaatactattgcagatatcatccatcatgatgatccccgtttgttggtggtatgtggcccatgttctattcatgatgtggatgccgctcttgattatgcccaacgcctgaaatcactttctgccgaactgagcgattgtctgtatattgttatgcgtgtctatttcgaaaaacctcgtactactgttggctggaaaggcttgatcagtgatccttacatggatgggtcgtttgatatggatggcggattacatattgcccgtcgtttattactgaatctggtagaaatggggttgccactggcaaatgaagcacttgatcctaacaatcctcaatatttgggcgatctttttagttggtcagcgattggagcaagaacgactgaatctcagactcaccgtgagatagcttcaggcttatcagtatcagttggttttaaaaatggtacagatggtaatttaaatacagcaattaatgcgatgaaagctgcctcaatgccacatcgctttatgggaataaatcagtctggtcaggtgtgcctgctgcaaacccggggtaatccaaacggccatataatattacgtggtggggcagagcctaattatagtgctgagcatgtgcgtgactgtgaaaatcagatggttaaggcaggtttagttccatcactgatgattgattgtagtcacggtaactctaataaagattttcgtcgtcaaagtgttgttgtggattctgtcgctgagcaaattatgcaagggaatcaatccatcattggtatcatgttagaaagtcatattaatgaaggaaaccagtcttccgagctaacccgttctgaaatgcaatatggtgtttctgtcactgatgcttgtattagctgggaaacgacggagcaggtattaaaaaaattacatcagcaaatcaagccacatttatcaaaacgaaacataacgatgaaacaggcagggtaattgacatggcagcagaattatcgcaattgcgggaaaaaattgatgaggtagacaaagctctgctcaatttactttccagacggatggatttggttgctgaagtcggtgaggttaagagtcagcttggtttaccgatttatgcccccgaaagggaggccagtatgctggcttctcgccgccaggaggcagaaatactggggatttctcccgatttaattgaagatattctgcgccgtattatgcgtgagtcttatgccagtgaaaatgataaaggcttcaaaaagctcaatgctgatatagggcctattgttattgttggtggttctggaaaaatgggccggttatttaaccggttattgaccttatcagattacgaagtcaggatccttgaggcgaatgactgggagcaggctgaaactattttagctggtgctggtatggtcattatcagcgtacctattcatttaactgaagatattatccaccgtttaccccctttgcctgaagagtgcattttggtggatttggcttctatcaaacaaaagccacttcaggctatgcttgatgtacacaaagggcctgttttgggattacacccgatgtttgggccggatgtaggaagttttgctaaacaagtggttgttttttgtgatggccgacagcccgaatcatacctgtggtttctggagcaaatatcagtctggggcgctcgactacataaaatcgatgcagatcagcatgataaaaatatgagttttattcaggcactacgccatttcaccactttttcttatggacggcatcttttaaaagaagatatcgacctacagcaactattagcgctgtcttcacccatttatcgtctggaactggctatggttggccgattatttgctcaggatccacaattgtatgcagatattattatgtccagtcctgaaaatctcgaactgattcgtcgttatcatcagagcttcggtcaggctttggcgcttttggaaaatcaggataaaaaagcatttattgcaagctttaatcaggtgagcgaatggtttggtgatgaagcaaaccggtttatgaaagaaagccgggcactcttacagcaggctaatgataatcgggtataagtgaatcggttgctgtgaaggaaaagccggatgttgccatccggtttactattcagaatggatcgaccgaggggacattttctgagggataacatcctaatattttcaaaaagtgggtaattccagacaattccttaagagcctgttgcattttcatggaacgaatattggcctgaacatcaatataaaacatctcttcccatggcttaccgtttatcgggcgtgattccagtttactcataataatattgtgcttttttaagataatgagtgtgtcaaccagagcaccagcctgctgtcccgtggacataataaaagtcgtttttgctggaacttgatctgatacttcaatcggtttctgggcgacaacaataaaacgggtgctgttattttgttggtttgccagattattttctaaaacctccagcccgtaaagtgcgcctccggcttcacttcctaataccgccacatccggtgaatttatctcagttaccttttgcatggcaacggcagtactttcacaatagatgatattccagtgagggaattgattaagatattggctgcattgctggaatggctgagggtgactgtagactgtttttatcttagaaagatcactctctttgctaaccaataagcagtgattgatcggaagagtaatttctcctaccaaagataatggagtgtgctgcaacaggtcataaacatcatttattgctccggaactggtgttttccagcggcaggataccgtaatcagcctgaccaatttccactaatgaaaagatatcaggaaatttatgacagctacattcaattaactgattgaaatgtcgtgccgaaaactgtcgggctgcaagatgagaataagagccttttgggccaagaaaggcaattcgtgccgtatcataaggcgtctggttcagatgttgctgtagcagggcttgttgtgtcagtactgaatcttcaatgatcatttggaacagacgggtaatgtaaaacccatccaacccacgagacttacctttatcaattaacacatccagtaattctcgttcccgatttttatcccgtatggggcgattatcatgaagttttgtttgtgcaacatcacaggctaattgccggcgttgtgctagtagatccagtaaatcagcatcaatgctgctgatttttttacgaatgttaattaaatctcgttccatagtacattcctgacatttttattataaaagtaatttgtatctttcaaattgcaacccgtaatctagcggggccataaattatggtctgtaaaaaaaaacctcccgttggtagggaggttttcttgttcgtcttctttttatcttttaaaaacgagaaaccccctcataggaaggtaaaaaagaaaaagaagaaaaacagtttaatattcatgtcatttatatcttaatttttgcagaatcaaatagtgtactttaattaacctatttgctgaggtatgtcaatagatggggaaaagagatacaggaataaaagaacaataaaacgcgctccttgagcgcgttgagaaaacaaaacaggttatatttccagattaagattggattctttcacactatgttctgctctgcgggcttctcctttatgctgaactttattaagttggcgttctaatttcatcagcaattcattgatagcagcatacatatcttcatgtttggcacttgcaaccagcgtagcatttggcgtgccaatcgtggcatcgactaaaaatccttgtggctcttttgaaagtacaatatgtggattaattagattgacttgccatttgttcaacttatttagacggtcttccacatgactacgaatcgcgggggtaatttccatttgtttgctggttatgtttactaacatatagttacctctttcttctgttgctccgtctttgatggctccagcataactcgcttttggagaaaaagaatgatctaaatcacttttattcggggatgctgacgtggataagcgaaattgtgattaatgatgaagatatggacaatatttgttgctaagagagaagtaatgcgtcattatcgatcagttatggtattatcaacttaagaaataattctggaatttaaatagatttctgtccggttataatgttctcccctaaaaaaatagcagccacatagctgctatttttatgacgttcttttgaaacgatgcgctttcgaaactctagactggattggctgcaattaatgccgcaactttatgtgcttcggtttcaagccccagagctttgtatgccttttccatataaggcagcgcttctctggttgattgggtatccggataattctgtagcatttgctctgtacggttgacgactgcgacgtaagcgccacgtttagtgtaatattgaacaacggcaagctcatgtttagctaaacgatctttcagaaagactaaacgtttgtaggcatcggctacatactggctgttggggtaataacgtaccaattgactgaaatcgcggaatgcggcacgggcattttcaggatcacggtctgagcggtcaaggcccaaaaagtcctgcagaaggttatcatccatcgcctgtaataccagaccacgcatatacattacatagtcaatatgtgggtgggttgggttcaggcgcatgaaacgttcaatggatgcaagagcgagaggaaattctgctgatttataataagcataaattaaatccagctgaacctgctgagaatagggtccgaaaggataacggttatccagggattccaattgcttgatagccgctttatagttaccgttttgcagtttttcctgcccgtttgaataaatttgagatggcgggatatcaggaacagcctctttattgctggagcacccagataaaaccaggctcaatgtggtcgctgccaccagatatttcatgcgaatcatcacgtgttgattaccctctgattgttttctgggagactatccgcgaagctcccggcgaaagatagagtacaatagcacactattttaaatgaaacggcctcgccgtcaaaactcaacgtaaaatatagaagttatatatggcacaacaaatacgacttaatacgacagtcgctgaatctcagctcggtcagcgtttagatcaagctttggctgaattattacctgattattcccgctcacgtataaaagagtggattttgaatgataaagttcaggttaatggcaaaataattaataagccaaaggaaaaagtactgggcggagaagaaatttctattgatgctatcattgaagaagatgcccgttgggaaccgcaggatatagaactgaacgttgtctatgaagatgacgatattctggttattaataaaccacgtgatttagttgtacacccgggggccggaaaccctgatggcacgatactgaatgccctgctatatcgttatccggagattgcagatgttccccgggcaggcattgtccaccgtcttgataaggatacgacaggcctgatggtagttgcaaaaacagttccggcacagactcgtttggtcgaatcactgcaattacgtgaaattacccgtgaatacgaagccattgcgttggggcatatgacagcaggtgggatcgtagaagaaccgatatctcgccatccgacaaagcggacacacatggctgttcacccaatgggtaaacctgccgtgactcactatcgggttatggaacatttccgggcacatacccgtcttcgtttacgtctggaaacgggcagaacacaccaaatccgtgtgcatatgtcacatattaaacatccattggttggagatcagctttacggtggtcgtcctcgacctctgaaaggcgcttctgaggaatttcgcgaagtgatgcgcaactttgaccgtcaggcgttgcacgcaactatgctgcgtctttatcatccgataacaggtattgagatggaatggcatgcgccattacctgacgatatggttaagctgattgatgtgatgaaagcggatgccgaatttttaaagatgaaatggattggtagttaaatgacaccactgatttctcctgactggccacagcttgagggtgttggcggntgtagtacgacncgggcgggggggatgagtctccctccctatgagagcctgaatttaggcagtcacgttggcgatgatcctctatacgtggagcgaaaccgtgaactgttggtgaaatatgcacgattgccacagcagcctgtctggttagaacaagtacatggaacacgggttatcaggctagcggggcagtcagtagaaaataatcaggctgatgcagtttatactaatcaagttgggcaggtatgcgctgtaatgacagcagattgtctgcctgtacttttttgttccgtcgacggtgatgaagtcgcagcagctcacgcgggatggcgtggattatgtgccggtgtgttggaaaatacggtggctcaatttacgacaaaacccgatatgattcaggcatggctggggcctgctattggccctgaacagtttgaggtcggacgtgaggttatggaagcctttttggcaacagatcctaatctggagcaggcttttacaccttatgggatgaaatttctggcaaatatctatttactggctagattaaagttgaagtctattgggataaaaaatgtttttggaggcgcggcttgcacggtctcagaagaaaagacttttttttcttatcgtcgtgatggtgttaccggacgtatggcaactttaatctggttgaagtgatctatcgcgcagggcgatctttggtgcatagcgcaagtttccaattaacttttcagagaaccttgaatatttaaggaatgaccttatttaatctccagtagcaaattctgaccagtattggaggtgttatgcgtctggatcgtcttactaataaattccagcttgctctcgctgacgcccaatccctcgcattagggcgtgataatcaattcatcgaacctatccacttgatgagcgcatttctcagtcaagagggtggctctgttcgtcctttattaatgtctgccgggattgatacaggaaacttgcatgatcgactgaatctagctttggacagattaccaaaagtagaagggagtggcggtgatgtacaggtatccaatgaattagggcgttatttaaacctgtgcgacaaacttgctcagaaagcaggtgataactttatttcttctgaactctttgttctggcagcactggaagagcgtggaacgttaagtgacatattaaaagctgcaggagcaacaaaagacaaaatcactaaggcaatagaaatgatgcgcggtggtgaaaaagtaaatgatcagagtgccgaagaccaacgtcaggcactaaaaaagtacacaatagatctcactgaacgagccgaacaaggcaaacttgaccctgtaattgggcgtgatgaggaaattcgacggacaattcaggtattgcagcgccgaaccaagaacaatcccgttttgataggtgagccgggcgttggtaaaacagctattgtcgaagggctggcacagcggattgttaatggtgaagttcctgaagggctgaaaaacaaaagagtcctgtcccttgatatgggcgcattattggcgggagctaaataccggggagaatttgaagaacgtttgaaaggcgttttgaacgatctctccaaacaggaaggttcggtcattctgtttatcgatgaattacatacgatggtaggtgccggtaaggcagatggcgcgatggatgccggtaacatgctgaaaccagcactagcccgtggtgagctgcattgtgtcggtgcgacgaccttagacgagtatcgccagtatattgagaaagatgcggctctggagcgtcgtttccagaaggtttatgttgctgagcctaccgttgaggatactattgctattctacgcggacttaaagagcgctatgaacttcaccaccatgttcagataactgatccggcaattgtggcagcggcgacattatctcatcgttatatttcagatcgcatgttacctgataaagcgattgacttgattgacgaagccggagccagcctgcgtatgcagatggattcaaaaccagaagcgttggatcgtctggaacgcaggattattcagttaaaactcgaacagcaggcgctaaaaaaagaatcggatgaagcgagtaaaaagcgccttgatatgctgaatgaagagctggtggaaaaagagcgcgaatattctgaactggaagaagagtggaaagcggaaaaagctgagcttactggtactcagaatatcaaagctgaattagaaaatgcccgtatagaattggaaaaagcccgtcgcagtggtgatttggctagaatgtctgaaatccagtacgggaaaattccagaattggaaaaacagttagcagcagcaacaacagcagaaaatcaccccatgaaactgctgcgtaacaaagtgactgatgctgaaattgctgaaatccttgctcgctggacagggattccagtatccagaatgctggaaagtgaaaaagataaactattgcgtatggagcatgaattacataaacgtgtaattgggcaaaatgaggctgttgatgcagtagcaaacgcaatt

SEQ ID NO: 2109 - DNA, 12743 bp, Xenorhabdus sp.; identical to SEQ ID NO: 2108
  CDS (116)..(673)
  unsure (1)..(12743): unsure at all n locations

SEQ ID NO: 2110 - DNA, 12743 bp, Xenorhabdus sp.; identical to SEQ ID NO: 2108
  CDS (708)..(1460)
  unsure (1)..(12743): unsure at all n locations

SEQ ID NO: 2111 - DNA, 12743 bp, Xenorhabdus sp.; identical to SEQ ID NO: 2108
  CDS (1525)..(1878)
  unsure (1)..(12743): unsure at all n locations

SEQ ID NO: 2112 - DNA, 12743 bp, Xenorhabdus sp.; identical to SEQ ID NO: 2108
  CDS (3841)..(4929)
  unsure (1)..(12743): unsure at all n locations

SEQ ID NO: 2113 - DNA, 12743 bp, Xenorhabdus sp.; identical to SEQ ID NO: 2108
  CDS (4935)..(6056)
  unsure (1)..(12743): unsure at all n locations

SEQ ID NO: 2114 - DNA, 12743 bp, Xenorhabdus sp.; identical to SEQ ID NO: 2108
  CDS (9151)..(10131)
  unsure (1)..(12743): unsure at all n locations

SEQ ID NO: 2115 - DNA, 12743 bp, Xenorhabdus sp.; identical to SEQ ID NO: 2108
  CDS (10132)..(10863)
  unsure (1)..(12743): unsure at all n locations

SEQ ID NO: 2116 - DNA, 12743 bp, Xenorhabdus sp.; identical to SEQ ID NO: 2108
  CDS (10992)..(12743)
  unsure (1)..(12743): unsure at all n locations

SEQ ID NO: 2117 - DNA, 12743 bp, Xenorhabdus sp.
  CDS (9404)..(10747)
  unsure (1)..(12743): unsure at all n locations
aattgcgtttgctactgcatcaacagcctcattttgcccaattacacgtttatgtaattcatgctccatacgcaatagtttatctttttcactttccagcattctggatactggaatccctgtccagcgagcaaggatttcagcaatttcagcatcagtcactttgttacgcagcagtttcatggggtgattttctgctgttgttgctgctgctaactgtttttccaattctggaattttcccgtactggatttcagacattctagccaaatcaccactgcgacgggctttttccaattctatacgggcattttctaattcagctttgatattctgagtaccagtaagctcagctttttccgctttccactcttcttccagttcagaatattcgcgctctttttccaccagctcttcattcagcatatcaaggcgctttttactcgcttcatccgattctttttttagcgcctgctgttcgagttttaactgaataatcctgcgttccagacgatccaacgcttctggttttgaatccatctgcatacgcaggctggctccggcttcgtcaatcaagtcaatcgctttatcaggtaacatgcgatctgaaatataacgatgagataatgtcgccgctgccacaattgccggatcagttatctgaacatggtggtgaagttcatagcgctctttaagtccgcgtagaatagcaatagtatcctcaacggtaggctcagcaacataaaccttctggaaacgacgctccagagccgcatctttctcaatatactggcgatactcgtctaaggtcgtcgcaccgacacaatgcagctcaccacgggctagtgctggtttcagcatgttaccggcatccatcgcgccatctgccttaccggcacctaccatcgtatgtaattcatcgataaacagaatgaccgaaccttcctgtttggagagatcgttcaaaacgcctttcaaacgttcttcaaattctccccggtatttagctcccgccaataatgcgcccatatcaagggacaggactcttttgtttttcagcccttcaggaacttcaccattaacaatccgctgtgccagcccttcgacaatagctgttttaccaacgcccggctcacctatcaaaacgggattgttcttggttcggcgctgcaatacctgaattgtccgtcgaatttcctcatcacgcccaattacagggtcaagtttgccttgttcggctcgttcagtgagatctattgtgtacttttttagtgcctgacgttggtcttcggcactctgatcatttactttttcaccaccgcgcatcatttctattgccttagtgattttgtcttttgttgctcctgcagcttttaatatgtcacttaacgttccacgctcttccagtgctgccagaacaaagagttcagaagaaataaagttatcacctgctttctgagcaagtttgtcgcacaggtttaaataacgccctaattcattggatacctgtacatcaccgccactcccttctacttttggtaatctgtccaaagctagattcagtcgatcatgcaagtttcctgtatcaatcccggcagacattaataaaggacgaacagagccaccctcttgactgagaaatgcgctcatcaagtggataggttcgatgaattgattatcacgccctaatgcgagggattgggcgtcagcgagagcaagctggaatttattagtaagacgatccagacgcataacacctccaatactggtcagaatttgctactggagattaaataaggtcattccttaaatattcaaggttctctgaaaagttaattggaaacttgcgctatgcaccaaagatcgccctgcgcgatagatcacttcaaccagattaaagttgccatacgtccggtaacaccatcacgacgataagaaaaaaaagtcttttcttctgagaccgtgcaagccgcgcctccaaaaacattttttatcccaatagacttcaactttaatctagccagtaaatagatatttgccagaaatttcatcccataaggtgtaaaagcctgctccagattaggatctgttgccaaaaaggcttccataacctcacgtccgacctcaaactgttcagggccaatagcaggccccagccatgcctgaatcatatcgggttttgtcgtaaattgagccaccgtattttccaacacaccggcacataatccacgccatcccgcgtgagctgctgcgacttcatcaccgtcgacggaacaaaaaagtacaggcagacaatctgctgtcattacagcgcatacctgcccaacttgattagtataaactgcatcagcctgattattttctactgactgccccgctagcctgataacccgtgttccatgtacttgttctaaccagacaggctgctgtggcaatcgtgcatatttcaccaacagttcacggtttcgctccacgtatagaggatcatcgccaacgtgactgcctaaattcaggctctcatagggagggagactcatcccccccgcccgngtcgtactacanccgccaacaccctcaagctgtggccagtcaggagaaatcagtggtgtcatttaactaccaatccatttcatctttaaaaattcggcatccgctttcatcacatcaatcagcttaaccatatcgtcaggtaatggcgcatgccattccatctcaatacctgttatcggatgataaagacgcagcatagttgcgtgcaacgcctgacggtcaaagttgcgcatcacttcgcgaaattcctcagaagcgcctttcagaggtcgaggacgaccaccgtaaagctgatctccaaccaatggatgtttaatatgtgacatatgcacacggatttggtgtgttctgcccgtttccagacgtaaacgaagacgggtatgtgcccggaaatgttccataacccgatagtgagtcacggcaggtttacccattgggtgaacagccatgtgtgtccgctttgtcggatggcgagatatcggttcttctacgatcccacctgctgtcatatgccccaacgcaatggcttcgtattcacgggtaatttcacgtaattgcagtgattcgaccaaacgagtctgtgccggaactgtttttgcaactaccatcaggcctgtcgtatccttatcaagacggtggacaatgcctgcccggggaacatctgcaatctccggataacgatatagcagggcattcagtatcgtgccatcagggtttccggcccccgggtgtacaactaaatcacgtggtttattaataaccagaatatcgtcatcttcatagacaacgttcagttctatatcctgcggttcccaacgggcatcttcttcaatgatagcatcaatagaaatttcttctccgcccagtactttttcctttggcttattaattattttgccattaacctgaactttatcattcaaaatccactcttttatacgtgagcgggaataatcaggtaataattcagccaaagcttgatctaaacgctgaccgagctgagattcagcgactgtcgtattaagtcgtatttgttgtgccatatataacttctatattttacgttgagttttgacggcgaggccgtttcatttaaaatagtgtgctattgtactctatctttcgccgggagcttcgcggatagtctcccagaaaacaatcagagggtaatcaacacgtgatgattcgcatgaaatatctggtggcagcgaccacattgagcctggttttatctgggtgctccagcaataaagaggctgttcctgatatcccgccatctcaaatttattcaaacgggcaggaaaaactgcaaaacggtaactataaagcggctatcaagcaattggaatccctggataaccgttatcctttcggaccctattctcagcaggttcagctggatttaatttatgcttattataaatcagcagaatttcctctcgctcttgcatccattgaacgtttcatgcgcctgaacccaacccacccacatattgactatgtaatgtatatgcgtggtctggtattacaggcgatggatgataaccttctgcaggactttttgggccttgaccgctcagaccgtgatcctgaaaatgcccgtgccgcattccgcgatttcagtcaattggtacgttattaccccaacagccagtatgtagccgatgcctacaaacgtttagtctttctgaaagatcgtttagctaaacatgagcttgccgttgttcaatattacactaaacgtggcgcttacgtcgcagtcgtcaaccgtacagagcaaatgctacagaattatccggatacccaatcaaccagagaagcgctgccttatatggaaaaggcatacaaagctctggggcttgaaaccgaagcacataaagttgcggcattaattgcagccaatccagtctagagtttcgaaagcgcatcgtttcaaaagaacgtcataaaaatagcagctatgtggctgctatttttttaggggagaacattataaccggacagaaatctatttaaattccagaattatttcttaagttgataataccataactgatcgataatgacgcattacttctctcttagcaacaaatattgtccatatcttcatcattaatcacaatttcgcttatccacgtcagcatccccgaataaaagtgatttagatcattctttttctccaaaagcgagttatgctggagccatcaaagacggagcaacagaagaaagaggtaactatatgttagtaaacataaccagcaaacaaatggaaattacccccgcgattcgtagtcatgtggaagaccgtctaaataagttgaacaaatggcaagtcaatctaattaatccacatattgtactttcaaaagagccacaaggatttttagtcgatgccacgattggcacgccaaatgctacgctggttgcaagtgccaaacatgaagatatgtatgctgctatcaatgaattgctgatgaaattagaacgccaacttaataaagttcagcataaaggagaagcccgcagagcagaacatagtgtgaaagaatccaatcttaatctggaaatataacctgttttgttttctcaacgcgctcaaggagcgcgttttattgttcttttattcctgtatctcttttccccatctattgacatacctcagcaaataggttaattaaagtacactatttgattctgcaaaaattaagatataaatgacatgaatattaaactgtttttcttctttttcttttttaccttcctatgagggggtttctcgtttttaaaagataaaaagaagacgaacaagaaaacctccctaccaacgggaggtttttttttacagaccataatttatggccccgctagattacgggttgcaatttgaaagatacaaattacttttataataaaaatgtcaggaatgtactatggaacgagatttaattaacattcgtaaaaaaatcagcagcattgatgctgatttactggatctactagcacaacgccggcaattagcctgtgatgttgcacaaacaaaacttcatgataatcgccccatacgggataaaaatcgggaacgagaattactggatgtgttaattgataaaggtaagtctcgtgggttggatgggttttacattacccgtctgttccaaatgatcattgaagattcagtactgacacaacaagccctgctacagcaacatctgaaccagacgccttatgatacggcacgaattgcctttcttggcccaaaaggctcttattctcatcttgcagcccgacagttttcggcacgacatttcaatcagttaattgaatgtagctgtcataaatttcctgatatcttttcattagtggaaattggtcaggctgattacggtatcctgccgctggaaaacaccagttccggagcaataaatgatgtttatgacctgttgcagcacactccattatctttggtaggagaaattactcttccgatcaatcactgcttattggttagcaaagagagtgatctttctaagataaaaacagtctacagtcaccctcagccattccagcaatgcagccaatatcttaatcaattccctcactggaatatcatctattgtgaaagtactgccgttgccatgcaaaaggtaactgagataaattcaccggatgtggcggtattaggaagtgaagccggaggcgcactttacgggctggaggttttagaaaataatctggcaaaccaacaaaataacagcacccgttttattgttgtcgcccagaaaccgattgaagtatcagatcaagttccagcaaaaacgacttttattatgtccacgggacagcaggctggtgctctggttgacacactcattatcttaaaaaagcacaatattattatgagtaaactggaatcacgcccgataaacggtaagccatgggaagagatgttttatattgatgttcaggccaatattcgttccatgaaaatgcaacaggctcttaaggaattgtctggaattacccactttttgaaaatattaggatgttatccctcagaaaatgtcccctcggtcgatccattctgaatagtaaaccggatggcaacatccggcttttccttcacagcaaccgattcacttatacccgattatcattagcctgctgtaagagtgcccggctttctttcataaaccggtttgcttcatcaccaaaccattcgctcacctgattaaagcttgcaataaatgcttttttatcctgattttccaaaagcgccaaagcctgaccgaagctctgatgataacgacgaatcagttcgagattttcaggactggacataataatatctgcatacaattgtggatcctgagcaaataatcggccaaccatagccagttccagacgataaatgggtgaagacagcgctaatagttgctgtaggtcgatatcttcttttaaaagatgccgtccataagaaaaagtggtgaaatggcgtagtgcctgaataaaactcatatttttatcatgctgatctgcatcgattttatgtagtcgagcgccccagactgatatttgctccagaaaccacaggtatgattcgggctgtcggccatcacaaaaaacaaccacttgtttagcaaaacttcctacatccggcccaaacatcgggtgtaatcccaaaacaggccctttgtgtacatcaagcatagcctgaagtggcttttgtttgatagaagccaaatccaccaaaatgcactcttcaggcaaagggggtaaacggtggataatatcttcagttaaatgaataggtacgctgataatgaccataccagcaccagctaaaatagtttcagcctgctcccagtcattcgcctcaaggatcctgacttcgtaatctgataaggtcaataaccggttaaataaccggcccatttttccagaaccaccaacaataacaataggccctatatcagcattgagctttttgaagcctttatcattttcactggcataagactcacgcataatacggcgcagaatatcttcaattaaatcgggagaaatccccagtatttctgcctcctggcggcgagaagccagcatactggcctccctttcgggggcataaatcggtaaaccaagctgactcttaacctcaccgacttcagcaaccaaatccatccgtctggaaagtaaattgagcagagctttgtctacctcatcaattttttcccgcaattgcgataattctgctgccatgtcaattaccctgcctgtttcatcgttatgtttcgttttgataaatgtggcttgatttgctgatgtaatttttttaatacctgctccgtcgtttcccagctaatacaagcatcagtgacagaaacaccatattgcatttcagaacgggttagctcggaagactggtttccttcattaatatgactttctaacatgataccaatgatggattgattcccttgcataatttgctcagcgacagaatccacaacaacactttgacgacgaaaatctttattagagttaccgtgactacaatcaatcatcagtgatggaactaaacctgccttaaccatctgattttcacagtcacgcacatgctcagcactataattaggctctgccccaccacgtaatattatatggccgtttggattaccccgggtttgcagcaggcacacctgaccagactgatttattcccataaagcgatgtggcattgaggcagctttcatcgcattaattgctgtatttaaattaccatctgtaccatttttaaaaccaactgatactgataagcctgaagctatctcacggtgagtctgagattcagtcgttcttgctccaatcgctgaccaactaaaaagatcgcccaaatattgaggattgttaggatcaagtgcttcatttgccagtggcaaccccatttctaccagattcagtaataaacgacgggcaatatgtaatccgccatccatatcaaacgacccatccatgtaaggatcactgatcaagcctttccagccaacagtagtacgaggtttttcgaaatagacacgcataacaatatacagacaatcgctcagttcggcagaaagtgatttcaggcgttgggcataatcaagagcggcatccacatcatgaatagaacatgggccacataccaccaacaaacggggatcatcatgatggatgatatctgcaatagtattacgcgcgtttgtaatagcattcaagtcactgctactcaatggatattttagtttcagctcttccggtgtaatcagaacttgttcatcgagaatgtgaatgttattaagcgcatctttttgcatgatcatttttcatacctgctttatttgtctgtttaagtttttagcgtctgccggataacataccacgctccgtaaagaatacaatccgattgtttatatttttttacgaaaatgtaaatgttattttacaccaaacctttctggtaattgatattaatcaatgcataaataattcacatatattctaattatcaatagaaatatattaaacaacctgaacgttaatgattgaataatatatttaacaattaaacctccaatagcaatattttattaaccattgattaattatttacaaaaaagttaattacttttaaaaatcagttgataaaaacaagatcttaatcccgtttttatatttttattttaataatattaacatgtgtttttaatgttaagtcgaaactataaaaaaacatttatgaagaatggttgaataactctgtctaaaagaagtaggttatcaacgttcattttttactcattcattaaggatagatatgataacgctgcaatttgccataataattatatgcttattgataggtacgcgttatgcgggcatgggattggggctgatcagtggcattgggctttttatactgacatttgtttttggattagagccaggtaagccaccagttgatgtaatgctaactattcttgcagtgatcggctgcgcatctgttttacaaactgcgggtggcctgaatgtgatgatgcagtgtgctgaacgccttctacgccgccatccacaacacattactattttagctccactcactacatggatgttaactttcctttgtggtacaggccatgtggtttataccatgttccctatcatcggtgatattgccttaaaaaaaggcattcgccctgaacgtccgatggcagtcgcatctgttgcctcacaaatggcaattactgcctctcccgtttctgttgccgtcgtttctttagtatcaattatcgcggccagtcatggtatcggccatgcctacgggatcttagaaatcctgaccatttcaattcctgcatcactgaccggggttgtacttgctgcattatggagtttacgccgaggtaaagatttagataaagacgaagaatttcaggaaaaaattaaagatcctaaacaacgagaatttatctacggtaattcagaaactctgttagatcaggtctttcctaaacaggcatacagagccacctggatctttttcgctgccattgcaatcgtggtattgttcggttcatgcactgaactacggcctgtttttgaagtaaaaggtgaattaaaaccactctctatgaatctggttatccagatgatgatgctgatcgcgggttcaatcattttgatgacctgtaaagtcaaaaccagcgaaatagctaatagcgccgtattcaaagccggaatggttgctatcttttctgtttttggagttgcatggatgagtgataccttctttcattcacatttaggcgatttgaaactggtactggaagatattgttcaggcaaaaccctggacttatgcattagtgctgtttctggtgtcaaaattagttaacagccaggccgcagctttgaccgcaattgctccaatgggattacaacttggtgttgatcctaaacttttaattgccttctttccggcggcttatggttattttgttttgcctacctatccaagtgatttggcctgcatcggttttgaccgctcaggtacaacaaaaatcgggaaatttatcatcaaccatagctttcttgtgccgggcctgattggtgttagcagtgcctgtacagtagggtatgtcttagtcaacacttttatgtgatccacggagtggactgacagaatagctcgctgattgcgggctatttatttttctgaaagagaaactaaaaaggccagcaatttgctggcctataactttcggatgtagcaaaagcgtattatttagcgcccagacgctctttaatacgagctgccttaccagaacgctcacgcaggtagtacagtttagctctgcgaacagcaccacgacgtttaacatgaatgctgtctacgactggggagtgagtctggaatacacgctcaacgccttcgccgttagaaatcttacgaacagtgaatgcagagtgcagaccgcggttacgaatcgcgataaccacgccctcgaatgtctgcagacgctttttagaaccttcaacgacccataccttaacttccacggtgtcacccggacggaatgaaggtacgtcttgcttcatctgctcttgttcaagttgtttaataatgttgctcataataactctcttaccctaggtaaactgatatatcagagacattcctttattggacatgtctagattaattcgttgcctgatcctgatattcctgttggaattcagccagcaacatcctttgctcgtcagtcagagctaggctttctagaagttcgggccttcttagccaagtacgacccagtgattgtttcaagcgccagcgatcaatttgggcatgatttcctgacagtaaaactgacgggacttccatcccatccaacacttcagggcgggtataatgcgggcaatccaacagcccgtcagcaaacgagtcctcttctgccgatgcctgacgccccaacacccctggaataaaccgggatatggaatcaatcattgtcatcgcaggaagttctcccccgctgagaacgtaatcaccgatagaccattcttcgtcaatttcggtttggataacgcgctcatcaataccttcatagcggccgcaaaccagaattaatttctcatttgctgccagttcgcaaactccctgttggtcgagtttacgtccctgaggtgaaagatatatcacctttgcaccaacaccagccgctgctttagctgcctgaatggcttcccgtaatggttgcaccatcataagcatgccaggaccaccaccataagggcgatcatccacagtacgatgcctgtcgtaggtaaaatcccgcggactccagcaatcgatactgagcaggccatttttcactgcccgaccagttaccccgtaatcggttattgcgcggaacatttcaggaaacaggctaattaccccaatccacatatagcgtcccacttctcaaccggtttaccggagattaaaaactaggatcccaatctacttcaataattttggtagcgagatcaactttcttgataacctgcccatcaagaaacggaatcaaccgctccttgataccgaatgcatctttcaggtttgcctttattaccatcacatcgttcgacccagtttccatcatatcctggacaatgccaagattataacccgccgtattgattacctggcaacccgtgaggtctttccagtaataatcaccgtcttccagtgctggtaattgggatgagtccaccactacttcactgttagtgaacagattagcggcatcccgatcatcaatacctttaattttgatgatcaaatcctgattgtgatatttccatgtttccagctcaacgtgttgccactggccggaacgctgaataaaccacggctgatattcaaagatgtcttcggcttgttcggtggaggaaaaaactctgagccaaccacgtatgccgtacgctgaccctaatttccccaacacgattggatcaacagggtgctccaggccagattgtttgctcattgttaccaccgcgacagattaagctgcttttttagcgtctttgatcagtgccgcaacacgatcagacacagatgcacccagaccaacccaatgttcgatacggtccagatctaaacgcagagct

SEQ ID NO: 2118 - DNA, 12743 bp, Xenorhabdus sp.; identical to SEQ ID NO: 2117
  CDS (5478)..(6635)
  unsure (1)..(12743): unsure at all n locations

SEQ ID NO: 2119 - DNA, 12743 bp, Xenorhabdus sp.; identical to SEQ ID NO: 2117
  CDS (4790)..(5122)
  unsure (1)..(12743): unsure at all n locations

SEQ ID NO: 2120 - DNA, 12743 bp, Xenorhabdus sp.; identical to SEQ ID NO: 2117
  CDS (3728)..(4462)
  unsure (1)..(12743): unsure at all n locations

SEQ ID NO: 2121 - DNA, 12219 bp, Xenorhabdus sp.
  CDS (3)..(1001)
tgtcctgtaaggtgagcccgctatgggatttgggaaataatatacagcaaggggttgttgcggccggtgaaacgtttatggcatatgcaggcggtcatcatcaggagaaatcacagcaatcccgtgataatggcggatcttctcccgcgttattgcctgaatttcagattgggctacattttttgcagggctatatttatccggtagagaatcgttatttaaagtttcctgacttattaagtaaggatattaaaatcccatcatcacctttattggtcaatgatcaaaaggccaaccgtccggttgaggttattcagaaaacggaggtcaggttaggaagcagggataaggtactttttgccggggattcgatgatgcaaggagtggctccacatctgaagcgccgtctttatcaggaatatggtgtttccggtatcaatttgagcagacaaaataccgggctgacttattctagtttctttgactggccgaaagcgatccgcaatgcgttaaatcaggatccggatatcaggctggttatcgtatttttagggccgaatgatccgtggggtattcctgcaaggcccggagaaagttacctgaaatttgcgagtgaaagttgggaaagtgtttatcgccaaaggatcgaagttatcctgaatgatgcccgtgagcataatgttgatgttatctggatcgggccacctaatatgcgccagaaaaagctttccggcaatatggcttacctcagtaaattgtatcaggcagaggtggcaaaaatgggtgagatttatgtttccgtcaatgatatgttcaaatatcagtcagaaaattattcagattatattggtgatggcagcagtacaatcaaactcagaagtggtgatggtattcactttagtttgagtgggcagaaagtcattgctgactctatcttttcattaatcaccgcgattcaggagccagttgaggaaaatgcagccattcagacagttccataggtttttccggttaatgggtgcaggtttaatcttcttgctttctatgggcttattatcatgccatgagaaaaagcctctaccaccatcggaatctcaggtaacgcagataaattatcagaagcagctagtggacttttctgagcctaatctcgcattgttggctgataaattgcggcacagtcattcccatacgctgcatatcgtacaattaggagactcccatacagctgctgattttttcacaggtaaactacgggatttatttcagcaacgttatggcgatgcggggccaggttttgtcagcccgatgactattccggggcagcgcaatgcgagagtcaaattttccggtgataagacgggctggtggctttcttccagccgaaaagaggacagggctgatttccctctgggtgggtttatcgctatgcccgaacgtgctggtagcacaataacaatgaatttatctccgtctgacaatcacaagtatcgaatgcgtgttctttatcagtctcatgatgaaacttatttgaaaccgcaatcctctcctttatggcgattacctgagacacaaagtgaatggcgtttttcaccggataaccctgttttttttccgcttaagctctcagcacatgatgctcagttaaaaatgggtggctggctgataagtcgccagaatagcggggttatgttatctgcactcggaattaatggcgcgaccattaatatgctgaataaatggcagccggaatggattaatactctggcacaattgaagccggatttagttattctcgcctatggcacgaatgaggcttttaatgatgctttagaccttgatagctatcgtcaggaactgaccgcgaaaatacagaggatccgcagtgttatacccgaagcggtgatcctgctgattggcccgaatgattctttgaaaaacaaatatgcgacaggctgtgaagagcagcaacctgccttgcttagagatgttattcgagttcagcaggaagtcgccagcaaacaacatacgctgttctggaactggcaggcatttatgggaggaacatgctcaattcgcatctgggagcaacagggccttgcgcgtcctgattatatccatctttctgctgcgggttatgaacgtagtgcggaagggctctataagcagtttattgagttagttggggagtaaatcggtggtgaggacaggatgctaaaaagatcttaaaatggcacttttaaaagtgctataataagtctttattaataaggaggacagtatgtcatatcagattttgacaacgatagcagccagtattaccgatctaaaacgtaacccaatgggaaccgttgcagatggagaaggtggggctgttgctatattgaatcgcaatgaacccgcattctattgtgtacctccagagctttatgcgtactatttggaacttgccgaagatgctgagttaaacaaaatggctgatgagcggatggagtttcccgaatttgtgagcgtaaatctcaatgagttatagtctcaaatttgaaaaacgggcattgaaagaatggggaaagctcggtcatcccgttcgggagcaatttaaaaagaagttggctgaacgtatggaaaatccacatgttccatctgctcgattaagtggccgtcataaccgctataaaataaaattacgttcttctggttaccgtttggtttacgaagttaatgacaatgaaattgttttactggttatcgcagtaggtaaacgggaaggaaatgaaatttatttagtggcgaacaaacgtgactaacaaacaaaaacggcactttatccaccagataatgtgccgttaatttattacagcagggcgaaatagatcataccgataatagccccggtggtgcctaaaatagtttccatgatagtccaggtttttaaggtctgtccttcagttgctccggtaaatttgccgaacaaccagaaaccggagtcgttgacatggctgaggatcagtgacccccctgcgatacagacggatagtgctgccatttgtgcgccggaataacctaattcaccgataacaggcaaaactaagccgacagtggtcaggcaggcaactgtggcagaaccctgaatcacacgcacagctcccgccagaataaaacaggccagagcgattggcagacccgccccaaccaatgcgttacctaatgcagggcctacaccggaatcaaccagcacctgtttgaagactccgcccgcaccagtcaccaataggataattcccgctggctggagtgccgcagagcacacttccatcactttttctttactcataccacgacggattgccagaccataaatagccaccagacaggcaattaaaatcgcagtaaacggatgtccgataaattccagccactgatacagggctgattgttgatcaacaaaacgggcggcgatagttttcaaaccgactaataccagcgggaatagtaccaatgccagacttaaagcaaaggaaggcatctggctcttaccgatgcttggggtattcagatctttgggtaaatccagtgtgacatgtttactgatgaaattaccgtatatcgggccagccagtaacatgccgggaattgctgcactcaggccaatcaggatcatccagccaaaatccgcacccatttgggaagccagcatcattggcgtcgggcccggaaccaaaaatgccgccgctgccgcaacaccggcaaacagtggaatagccagttttacgacattgccgccagtccggcgcgcaacggcaaaaactacacctatcaacaatacgactgccacatcaaaaaacaagggtaatgcacagataagccccgcaacacccagcgcataattagcccgtttttcaccgaaactacccagtaatttcacggcaatctgatccaatgcgcccgtttcatgcaggatttttccaaacattgcaccgagcgcaacaacgacagcaaggaagcccagtgtgccggacatgccgttttgcatcgtttgggtaattttttctaatggcataccggaaaacataccggcgcccattgaaaccagcattaaggcgataaaggcgtgcattctggccttcattactaaaaacagtaacagaagaacagaaccgacggctgtcagcaccaacgttaatgtactcatgaatgtccctcagtaatacgttcaattgttgtcattgtatttttaattacttcgtcaagacttggtttgatatcaatgaaatgaacatctttttcatcaattgtcggctcttccagggtctcaaattgtgagataagcatctgcggtttgaaaaagtgccctttacgggctttcaggcggctttcaattaattcaagattcccctgcatatacaaaaatgacagatttttattgccactacgcaggatatcccgatagtgttttttcagggctgaacacaccagcaaagaaacactattagtacgctgcatggcaaaaatggcatcgttgagggctttcagccacggttgacgatcatcatcatttagggcatgaccctcagccattttctgaatattggcgcggggatgaagaaaatcaccatctaaaaaagcggcactcagttcacgggcaacaccattggcaacggcagatttaccgctgccggatacccccatcaatataaaaacgtggtttggtcgctgggtatcgctcatataaaactcctttatacagattttgccacttggctaccctgtgactgatctgcaaaattttctctgtgaaatattacccgtgtaatgttaccggtaactatttatcggcaacattatcagtagcaaaggatggtgagcaatcaatcaagattggcaaaaaaggaaaatgtgaggcttatcgcaattgaaggtgggaaagcatcatattaagctacaaaaattaaacactttcgcctaatgaaagtgtaaatccaacatcaataagggtttgttccagtttttcacctttcaggcgagcgagtaatgcttctgctgccttgcgtcccatttggtcacggggagtcagtacactggcgagttttggtgtcattacctgaccgacatcatgtccgtgaaaaccggcgacagagatttcttccggtacgttgatcccctgaccctggcattcaaagatagcaccaatcgcgatatcgtcattagtacaaaatagtccattgacatcaggggtatttcaggcaggtttcctgtaaaagctgggcacctaatgattttgatgaacttgccgtcgtcatcattttctttggttgtagacccgcgctgcgcattgccacttcatagccttgtagacgtatcagcgtcctttcatcctgtcgggcaccgagatagacgatactccggcatccacgtccgagcatggattcagtcatctggcgcgcagcttcaaaattatcgataccgacagcgacatcaaggcaaggtgagacactgtccattaattcgacgacgggaataccagtagtttccagtactttcagtgtcttaggcgtatgcgttcgttcagccagtatcagaccgtcaatattataggaaagcagggaaagcagacgttcttcttctttctgtgcagagtaaccgtaatgagcaagcatagtctgatagccatgacggtcagtcatatattcaataccgcggatcacttcagcaaatacctgattagtcagtgaaggcagtaaaacaccgattgttcggctggtggagttggagagaatatccggcacacgattaggaatgtaacccagttgatccagagctgccgcaatccgttttcccagaggttcagaaacttgattgggattgcgtaagaaacggctgactgtcatctttgtgacaccgacgagatctgcaacatcttgtaaaacagggcgttttttcttcattttcaatgcggtgtaatcaatattggggggtacaaactaataaagtgtgtttttaacatatttgggcgtcatgataatacgatttttagcaaaaaactctggctaactcacattccatagatactctatttatttttccatatgacaggttaaaaccaccgtctttagacggtgactttgactttaatgttttgacctacgcgcgtttacgaggtgcgtggttcgacgactttcagtcgtcagcaccgaagtgcgctaacccacctacttcagtaggtggtagttaagtcataagctgtaataatgttttcgtagataggaaatcagaataaaccggatagatatgaatacaacgactaatataacctattggaaccgaatggttcctgaactgacggttacggatttttcgctttctcttgacttttatcagcgcatattgggttttaacgtgttgataagaagggaagatcctgattttgcttatctgagtttgggggaagcacaactcatgctggaagcatttcatgatagtggctggaataccggagagttgagtaagccactgggacgtgggattaatctccaaattgaagtggataatgttgcttctttactggttagtctgaaggataacggtattaaattgtatcgttcagtaacagataatcattattgcatcggcgagacttcggtatgtcagcgtgagtttctcgtgcaggatcctgatggttatttactccgatttagtcagtttatcgagagtacatgaaataattaggatgaaaaacaatcaactctaaatgatttatttcatgttagttattcatttttaagcattttaggttaactttaagtggcagaggttatgctagtctgccgagtcctccatttttcctttgagtttattatgaccttaactaactatagcaaattgttagcaactgcattctgccttgtaacttcatatagttatgcagacagcgagcgcccacttttttcattgacgatgactgagtctggtgtacagcaaactaatagcgatggtagtttgtcccactcagctaaatcagagtcccgtattctgccgatttggggggatgaagcccgagccagaggctatgatcttcctgaaccattcggggtcagttatggttatatgaacctgcgccagaatattattgtggatagtattaagtttgaatttgctaatccaatatggaaaccttttgaagacgctacttttataaaaacagatagcactcgtcaaaaaagtgaatctcatatgctaaaactagatacttgggttttaccttttttgaatgtatatggcgtatatggaaaaactaaaggtacatcaaaaactattttagatagtgttgatttcatgggagctgaaatattagaagatggtcccgtgccttttgtgttgaatttcaaagggaattcttatggtgcaggttttactctggcaggaggatataatcagttttttgctgttttagatactaattatactcgtactaaattagatatcttagatggagagcttgatgcaactgtcgtaagtcctcgccttggttatgagtttgtatttcaaccgttatttgtgggacagggcaacacaaaagtccagttatggacaggtgctatgtatcagaatataactcaacgttttcaaggtaatgtgagcgggcttaataatttaccagataaaataggtggcttggtcgatctggcagagcaggcgggaggaggtaacgtcaaattcgacgtcaaacaacaccttgcccataaatggaatagtacagttggtgcccgttttgaggtcacccgtaatttcaatctattatcagaagttggttttggtaaccgaaacagcttctatatttccggcgagtttcgtttttaatgttgcgctttacgactatcaaaaggctggtgatatccagccttcttattttgactacctcagctgctcatgcagatatcctgcctgaccgcaaaaaaattgacggctggctcagtgagttaggtggagataatcagttcgacgccagcaagaaaattgactggggtgtattgcccggccctttttatacaccggaaatgggcgtagggcttggtgtggctgtggtcgggctttatcgccctgacagccacgacgatattagtcagaattcttcactggggctcagtgggtttggctcatccaccggcgcttttggcctcaatttcaccaattataactttcttgccagtgaccagtggcggttatttgtttctggcaccctcaataacatacctacctattattggggaaaaggttacagcgcgggaaaggataacagtaataaacaaagttatcgttcgcgtgaatttgatattcgtccccgagtgctttaccgcgttgctgatgccacttatatggggctgggtgtaaatttttcctccgtcaatgccggtgatgctcaggcgaaaaaatattttgaacagtctgttggcggggcttcggttatcagttctggtgtaagtgcatactttagttatgatagccgggatttcctgcctaatccgcagtatggtcaggcgattgagctgatttacacctatttctctcctgaattaggagcagactatcgtttctctacgacacagttacagttctcgacttatcaccagctatctgaaaaaacagtactcgcttttgataactatgcgcgttttagtgccggtgaagtaccgtggaatcagctatccctgttggggaatagcctgcgtatgcgcggttattatgaaggacgttaccgcgacaaaaatattttcacaactcaattggagctgaggcataagctggactggcgtcacggcgttgtcggctgggttggaatgggaacgttgagtgatactccgtcaaggttgggagagcggcactggcttccttcaattggcgtcggttatcgttttgagtttaagccacgtatgaatgtcaggttagattttggtattggaaaaggcagtaccgggttttattttcaggttggagaagcattttgaagtatttggtcacactattgttaagttttctgctggcagcctgccaaaacaaatcagtaccggttacaactgtcgagccgatgctcaaaagtacgacacatgaacaggcaaaaacggactggctagccctgcctcctgttaaatctcctgaaggtttaagggcatgttgtgcattcggttatgatcttaaagtgaatacattagggttttctgtacctctctatcatattgataatattgttgaggcagataaattgggagagcatcactataacgatagcgttcttggggcaagcgcggcgttattgggggtcagcaatgaaaaaatcggcctgctgtatactgagaaaggcgggttcattgatatttcccatgtcagggatactgcggactatacgctttatctttttagccagatttatgctcaccttggtcaggaatggacactgtctttggataatgagcttgcggcacgtaagattcacttttttgcctttaccccgccaacagatcccgcagaacgctacactctgagtgcgtatctggctgcaaagctggcatttcagttagccgcctggcatgagattgcccaatggtacggttatcagtctattcccggtttttcagaggctatttcagctttttccccggaagatctctactccaatttattgggcgcgagactagcgctgacgcttattctgcaaggtcaggcatcttctgtgagtcacttttctgttgcgatagcgaatatcctgccaatggccttaaatgagctgggcgcttacgacaggtcaggcacaaagaagatgtttgataaggtggatggtttatggtggaacagctaccagcgtattccacaaaagtttctggtattgcgcagggattatgaaacccgggataatcgttatccattaatgcccttcggcaaggaaaagtttgctttacgcctctcattaccggattcctatcggaatttttcattggataaactggctgaatttcagttatggccaacaaagagcatgaaaaacttaccttcaccgcaacattattggtcagtgaaagattttccaatgttggcggagaatgctgaaaaacaagacagatatcaacaacagttgaatagcaaatagtttttgtgacactcagctgcatcgtgttttatcttctgtttttcagcgggtttcagcatgtagcaggaaaagtcttttttcctgctacatcaatttatgctgacaggacgattttcagtgctttctctttggcggcattgccaaatatgtcataagcagtctctatttcactcaatgaataatggtgagtgaccaatttttccggtgaaatcttaccggattgaacgcttttcaacagcatgggcgtgctgcttgtattgaccagcccagtggtgatggtgatatttttgatccagagattttccagatgtaaatcgacggatttgccatgaacaccaacattagcaataaacccgcctgcggcgatgatatcctgacatatctggaaagtcgcagggatccccacacactcaatagcaacgtcaacaccaatgccatcagtcaatttgtggatggtttcaaccacgttttgccgtgtcgggttgataattgtgttggcaccaaactgctgagcaacgctgagacgattatcatcggtatctatcatgatgatatgtgccggagagtaaaactgggatgccagtagcgcagagagtccgacaggccctgcaccaattaaggcgatggtatggcccggctgaaccctgccattgataacaccaatttcaagcccggtcggcagaatatcactgagcattaaggcggcttcttcatcaacatcttccggcaggcgatgaaggctattatcagcatggggaatacgtactttttctgcctgcgtaccgtcgattttatgccccagaatccagcccccatctttgcagtgcgcataaagctggcgcttacaatagggacagctaccacagacggtaatacaggagatgataactttatcaccgactttgaggttacggacagaatcgccgattaactcaacaataccaataccttcatggcccagtgtccggccctgctcaacagtaggaacgtctcctttgaggatgtgcaggtctgtcccacaaatggtggttttgacaatgcgaacaatagcatccgtgggctcaatgagttggggtggcgctttctcttcccaaagtttttttccggctccgtgataaacaagtgctttcatataacccccttcacaatggttttacaatgttaagaactacagcaagccttggtgcttgaatatcttcatgtatatttcatgcacaaccgcatgttttctctgattgtaatccataacgtgagttacattatctgctgcctgaagtttagcagagatatagcgttcccgatcttcagggtgttttctgagccagtcgcggaataaaatatggcggatatgttcagggcaggcagggccaaatacgtggagattggcttttggttttgccagacgaaaacagcgatgctgataaaagctgggttcacgtacggttaagtagtaacctagcttttccagtgctggcaaatactttttttcctgtatgggatcttccacaataagatcgatatcgatgattggtttggcggcaagatggggcacagacgttgagccaacatgctccagccggaggactgtgctgcccaatacagattttatatcagcagaaagttgttgccactgagtgacccattcaggatcataatccacgacttctataacttcttcgataggttttccatgcacccacggattttcattgggatctggcggcgggaaaaaagtaatctcttttggggcaatcactaatgtctctccatgctatttggaaagagggaatagcccccttgcggggacattcgtgttaatcgtcctgttgatgctgttccttctctgcctgaactttttctttttcagtcatttcttttttctttttcagtttatgccagatacggctttcctgccctcgccagagacgctgaatattatcgtggtggcgcataagtatcaggcatgaaagcatggcgacgggaaaggtaaattcaggtttaaaccaccagacgtaaaaaggtgcaaccagcgcaccgataatcgcgcccaatgaggagtaaccgcttaatatacggtcagc

SEQ ID NO: 2122 - DNA, 12219 bp, Xenorhabdus sp.; identical to SEQ ID NO: 2121
  CDS (1129)..(2193)

SEQ ID NO: 2123 - DNA, 12219 bp, Xenorhabdus sp.; identical to SEQ ID NO: 2121
  CDS (2342)..(2533)

SEQ ID NO: 2124 - DNA, 12219 bp, Xenorhabdus sp.; identical to SEQ ID NO: 2121
  CDS (2523)..(2807)

SEQ ID NO: 2125 - DNA, 12219 bp, Xenorhabdus sp.; identical to SEQ ID NO: 2121
  CDS (6325)..(6717)

SEQ ID NO: 2126 - DNA, 12219 bp, Xenorhabdus sp.; identical to SEQ ID NO: 2121
  CDS (6955)..(7857)

SEQ ID NO: 2127 - DNA, 12219 bp, Xenorhabdus sp.; identical to SEQ ID NO: 2121
  CDS (8055)..(9002)

SEQ ID NO: 2128 - DNA, 12219 bp, Xenorhabdus sp.; identical to SEQ ID NO: 2121
  CDS (9083)..(10138)

SEQ ID NO: 2129 - DNA, 12219 bp, Xenorhabdus sp.; identical to SEQ ID NO: 468
  CDS (8136)..(9365)

SEQ ID NO: 2130 - DNA, 12219 bp, Xenorhabdus sp.; identical to SEQ ID NO: 468
  CDS (7492)..(8031)

SEQ ID NO: 2131 - DNA, 12219 bp, Xenorhabdus sp.; identical to SEQ ID NO: 468
  CDS (7164)..(7271)

SEQ ID NO: 2132 - DNA, 12219 bp, Xenorhabdus sp.; identical to SEQ ID NO: 468
  CDS (950)..(1987)

SEQ ID NO: 2133 - DNA, 12219 bp, Xenorhabdus sp.; identical to SEQ ID NO: 468
  CDS (575)..(913)

SEQ ID NO: 2134 - DNA, 12219 bp, Xenorhabdus sp.; identical to SEQ ID NO: 468
  CDS (1)..(267)

SEQ ID NO: 2135 - DNA, 607 bp, Xenorhabdus sp.
  CDS (334)..(606)
attgagaggtaatcctaaacataaaattacctttccttaaaaagtggcctgttgtacagttacacaaatttaatagatatttctataaattcctagctgccattgattgatttatttaaaagtaaaaatagagataatatgttttcatataaagataatccgattcgagcattttacaccgaacaatatattcgggtatatcaggcattttcagattcaattgccgacagcactatacaaaataatactttcgtttctcctccttttagtatgacacgcatgacatggattaaactctcatttttatggatgatgtaccgatccggctgggggatgaaagacgatggtcaaaaacgcattttagcaattgacattacccatgaaggatttcgggaaattatccagcaaggcgttattagccactatcattctgaattctctgattccagggatgcctggaaaaagaaagtacaacacagtgatgttgttattcaatgggatccggaacgggatatctcattgaacaaattagagcagagaataatcgaaatcggattgcgaaatcaagctgttgaaaactatgttagtcattggattagtaatatca

SEQ ID NO: 2136 - DNA, 13731 bp, Xenorhabdus sp.
  CDS (2000)..(2722)
gagccatgtgctctaaagctttagagcagttcatcacggtaaacgtcccgaatattgtgcggcgtcacttgtgttgaagcgcagcgattaccaagtgacgccgccgggcgtcaacgtccagagcacgtagagcctgactttacgaccgatttgatccacgcgttactcaaagtcacccgttatttcgggcattttctgatcctgaacccgttattagtttatttttgacctcatgcctggcaacaggctgatgcagtaaaaaaggagaaatcacaccacgtcatgattaatgaggcgttcatcctgagtaacctcaggcactgaacggggagtacttcaccgccgtgctcagcacgtagcgaactcctgcaaaaactcaacgcaattttcccctgctacacattatctgacgcactacggaacggtgaacctgaaccgacacgcagggactggtttaaaaacgaataaaaaataagcaaattgatagggggtgcggggatgacgcagaaatcggcacggtcgaaaatcgaacggttcagaaaagaatttatcacccatgcccgaaaaggacgcggaagttttgccaccgtgtcggatcgtgaacggattgcccggcagttccttcactttctgaaagacaagggtatcaggcttcgacaaatggacagcctcaaagcaaaatatattgagcgctatattgctgaacgtaaggccaacaaaattagccaccgaaccctgcaaaatgagatgtcagcactgcgaacgattttgaggcaggcgggcaaacctaaactggccgcaccggataaccctcgtctgagtaaccgggcactgggtattgtcgggacgagtcgcacagggactaaaacggcattaacgcctgcggagtttcaggcggttttcctgcaggtggaacaaaaagaccggcgtgtcgcggcggtgatgcaactggcgtatgtgctgggactgcgtaccaaagaagcggtggaagcctacaaatcgttagcgacctggaagaaagcactggaaaacgggcatacgtctgtgcgagtggtgttcggtactaaaggtggacgccccagacagacggtcatactggatcgggcagccctgcaacacgcgattgcttatgctgaacgcgagcaggccgggcatggcggtaaactgattgataagccgacgatcacgcaggccatcgaccgttaccgctatattgtcagatatgcaggactgcacggcaataaagcgccacacagtatgcgttatcattttgctcagcaatccggggagcattatatagcgcagggttttagtgaacgagaagcgctggcgctggtatcgatggatttggggcatggcgacgggcgcgggcgctatatctggcaggtgtattaccggaatagtgatgatgagtgaggctatattggatagaaaactcagaaagctcacacacagaaaaatctggggatctggcttacaatccttatttacaacagtgcctaatactacagccgtaatcatcccaaaattaatgtgttatctgataatcaataaactgagaaatcgtatcatttcaagctgttctacgggcagatttccgattgagaaaaacaaatacggttgtagtattaataagtgaatacaaccctgtcctatcggacagggagttatttaatgatagttacaaactaccttcacacgtagaatctggagtatttctggaaaaccattaactgacggcttctgtacttttccagaaaaaatgaggaattgctgttttttttctaaaaactcttttcaatgtaccattttccagattatttatcatgtcattatgggatagtaatccaggcaaacgggtctaaattaaccaattaattttttgagatacttttgttcattcaatgtgtcattaatagcgcattgtggtttatcatctattttccgtctcaaatcaccctgaacccccataatgaaagccacctccatcagtcacgccttcgggcacctcagcgatccgcgagtcaaccgaactttgcgtcactcgcttatcgatattctcactatctcaatttgcgccatcatctgcggctgtgaaaatttcaatgacattgaagaatatggcaaaaccaaagaagactggtttaggcaatttttggagttacctaacggaatacccagtcatgataccttcaacgatgtcctcaaccgactcaatcctcacgagtttgaccacgcctttaccgcgtgggtgaaaagtctggctcacctgtccgaagagattattgtgttagacggtaaaacgatgcgaggcacgctggataaagccaaggggggcccggctatccatctggtgagtgcttggtcagtcgccaatcagctttgttttggccaagtgaaagtatcggacaaatccaatgagatcaccgcgatccccaaattgttgaccttgcttgatattgaagaggcaacaatcacgactgatgtgatggactgccagtatcagatagcggatcagattgtggcaggtcaggcagattatatgttggcgttgaaaggcaaccaaggcgaattttatggggatatcaaactgtttttagatacccatctggccactcacttcaccgggatagcacatgaccgaaaccggtgtgtcgacggggatcatgggcgtatagaacagcagcaggtatggctggtcggtgatgttaacggggtttgaggttcaatgatgtaaaaaaccacgttaagaagataataagaagataatttactgtttaaattaatattattagtggtctcaattctccatttctaatcccttctggcaagataaaagtatagtgcccagcatttatattacgctaactggtggaaatttatcccactgtaaccccttgtcctcaagaaattgatagtaggcccgcagtgcccgtgcgcagggagataagtcttcagctttctttacggccttgaggtaaaacaggtaactgttggtttcgtgattgaatatgccatcttgccaaaaaagtgttggcagcgaaccgatgttgtcactggagggccggcaatggaatgtaccatcatccagtttgtgtagttcagtctctttgaaaatgtcactggagtgcacaaggtatgtcataaattatcctggaaattttcactgcccatgtatacaggatggacagtgattaattattttccagatttatttacgtgtgtaagatgtttttcctacactaacccctcatggtaaactcttcgctgcatttttcctggcttgttttttggccttgttttttgcatttttacttatataggcagttaccgaagggtcaaatatacttctgtttttaaaactgggatcattcaatagcgaaaataggttttttggaggagtcaaattatacttacctaatacatctctaagttccttattagatggagctcttccaagtacccccataagtctagacagtatcatttctatcttattggtgtttgttacatcaatactcgctacttcagaatcattttttaaatagtaataggtatcctttacgcttacggaataataaaacgaatcattcgttttttgtgattcgctattgttttttactaaattagctagttcggctgaatcagaaaaatatgccatttggtttatttgaattgccgatgatacatcattgttgagcaataatgagcgctgtgtatcagcgtatgtcctataattattagtgactgtttctttggataaatattctgcttccgtcattggattaacacctatttcagtgtttcgataaaatcttccattgttactgccgatgtgtttacgatgagcctcatcgtattcttgataggcatgtccgaatttttcaatattattaaccgccttctttaaagcattcgttgcttttatgttatcccctcggcctagcccatgggctgagactgtatgaagaattgtatgctcagaacttaatgcaggcctcggttctggtggcttcttattagaattaccggccctcgtctgaggtatcataggcactcctttttttccatacaaacggtctacctcattttttctattcccgtgcgtccctgcagaactaatagtcattaagttaaacttatcaataggaaaagaaacggtactttgttcgtcgtagtaattaacaggattattcctgaccattctaaacaggttaagtccgtccaccgtccctgccgggtcagcgcttagccacctgcccgcccacggctggtagtaacggtatccgtagtagtacagccctgtcgcgtcacgctccttgcctgagtagcggatggtcttgtaatccgcctccgtctgactgcgcgccgtccagactgctgtgtccccgtacggatagtactcctccatactgatgacgttcccgtcgctgtccagctccagttggctgctgccggtaaggttgtcatagctgtaacgcacctggtcattgacgatatccgctggttttccgctatcccaatgaagcacccgcacctgcgcacgccccgactcccccatacagatgacctgctggctctctttctctgtttcgccatttcttgtagtgcgcaattccagctccggcagatacaccacccgctgcgcctgagtgctgtttctcgtctgctgcgtgctgactttgaggatccgctgactgccgccgtcatagcggtagctttcactgtcgtcagcgttgccgttacgcgagactggcgttaccttcagcagttcgttacgtggcgtccagctcagggtctggcccggctgcagcgtgttctgctgtccgcccgccgtgaacagcgcgtccacctctgacggtgtttgggtgagagtgcttaacacgcctcggttactgcggttactcaccgtgatgtccgtcgtgtagctgttgtttgtcgccggggcgctgtggcgcatctgcgtcaggttgccgccggtatcgtaagcgtagatgcgggtgtagttggtgtatgcggtgctgtctgcgggaagcggaacggtgacggaaatcaggctgctaccctgccgaccggtatttgccatttctcgcccggtggcactgaccagctggtacagactgtcatagatataggtgttctccggcacgactttctggttgcgccagaaacgggttgtctcggcatcgttggtaatacgcagtacgttccccaccgggtcatactcatagcgcaggtcctgcaacaccttcgtcccctgagcatgtccctgtgggcgttcggtttttatgccgacaaggcgctgagtctccggttcgtaggtgtaggtggtcaccacgccgttaccgtgctcttcgcgtagcttctgacccgcagcggaatacgtcagggacttcacgatgacctgctctgtcccgcccgccagccgcagccagctaccggtcagcaggcctgctacgtcgtacgccagccgttgtacgttacccatcgcatctgtgcaggtcagtaatgcgcccgtggcatccaccgtgctcagggtggtgaagctttccggcaccagccggtcgttccaggcggattcattgcctccctgccagtctgcgtccgtcccgtccggcagcagccggcgcgtaacggacagcggtacgccgttaagcgcaatactgtccgtctggtttagtccggcggtgtcatagtgacgcacgcactctccggccaggttgttgttcttctctgcctgactgttcccagcccagacaaaacgctctgtgatacgggccgtttcgccagcaggctgttcggtgatactgagcgggcgtccgggtaaggtttcatgctcatactgccatgtacgggtgaccccggttgcattgatggccagtacggggcgccccgtaatatcattcagcatcagggtattacccgcatcgacactccttatgcgcactgcttcgcctgtcagtgccgtctcatagactatgttaggattgaccgtattatccgtttgttgtaagtcaaacagacgcggatcaatactgtgcgccagttgacccgcgagcgtaaaccgatggcgggtgatccgttcatcagttttggtgggggtatccgggtggcggtgataacggagctcacggatggtcagccaccggttatccagaacagccacctccggcgtgttttgatgcaggttattgcctctgtttaaagtcataagccattgcctttatagggtcgttaaccttcccccgtctctgggggaaggtgtgattatttgacgttattgtgtgagctgagagccggtgtcgttttcatcttcattcacgacaaaccagggcgtcagctggttttgacgtaaatagcctttggcggttcttacctggtattcccggccgaggggatcataacggtatgtatcggcatacaaatcctgccgggcactgtcatcgcggaggtactgccaggcatccaggaaaaagggctggtaggttccgacaggttgtcctttaccgtcatattcagtccggcccgagaccgcccagcgggttgttgtatgggcaactataggttttcctgtctcgtccgtcatcaggctgccgtctgcggcgcgttgccaggcttctcccggcgcatggtataccgcactttgcagtaaacggccaaagccgtcgctgtaagtgacgctcttacgcagttgttgctcaggataggtgtcataacgatcagtggccagcgtcaggacatggacgggttcccgtgaatcggccaatgcctgcccattcagcacaatgccctgacgttgtacccagcgacggaaacccagcgcacaaacccgtttatcttccgtcactactcccgcgtcaagcagtgcctgcctcgtaaagccggctatatattcctgataggtgtgcgccaacggcatccaactcagcggcgcatagacgatgcagttagcgatcggcagatgggggtttaatccgagtgcctcctccactgaggttggtggtgtaaatgggcgcttttcaggcggggtgtaaccctgcggggtgcctgcctctgtcccccagaaccggctggatgatacctgccccagcgcattcagggtgatgtgttgttggttgtcattcgcatccgttatctgaacgggggtcaggaagcggtaatcataggtggcatttgtgtataggccggcagcatcctgcatgcgaatgacggcacagtaatgggtatcccaatgaatgacgttttttccaacctgcaccgtagcacgctgggccaacggacggtaaaacgcctctgccccgccgtaatcggtatagccctgacgggcgacccaaaccgccgattccgccccggtattgaacgggcgtggaacacacaaatagcctgcctcaattaattttttttccaaggcttcaggggctaatgtgccattaaaggcctgcaacgccagctcatcaaaaaccgcggtttcggtataagccaccaatgcctgtcgggtcgggttttctccggggccgatataggccacgcgttgatgccccaaataggtcaggggcgtccccggcgctatcagactgtttgcggccagcaagttctctactgtaaaaccttcacggggtacccgttctgccgggtaggcccaggcatcgcttcgtacaacatcagtcaaccccagtccctgatattccgtgtccgtcagatgatggtaacgttgccgttgccgggtaagccgcaattgctgttgctgatcatcatagctgctgtcaaataatgtttccggcagcgtatccgggtaaggcgagacagcgggcttaggacgacggggatacgcaatctcgacggtctcccgtgggaaaccgtagcggtcactgttcaggaccacctgctggtgacattggggatcttcggcaacacgttcatattgccaggttctttgctcaatcacactggtccaggcggcgggtgaataaccgggcaaccccgcaatcagcctgacctggggccggctgtccatgacagtatacggaatgctagcttgtgcagtgccgtcgtcaccatagacttcactgtgtaacggttggccttttaatgcccggtgcagccagtaagcttcctctgttgaaggaacgagtgtgacatcctgttctttatcagggtcaaaatgcgtaaaacggcaggtaaagggcgggaaagcctgtttgtccccgtgccagaattcatttgccaacagggtatcaacggcgggaactcccgtggcaaaccagctgatcgtgatagcgggcgacaggggatcggtgactgacgaatgggttgcctgggccagcttatcggtatctttctgtctgacccggccaaatccccggaactcacgctccctgccatcccaggcaccatgggcataatcctgctctgacgtcagccggttacccgtgatttcatcccgtacttcagtgcgccacaacacgtggatgggaaagggcagataactggtcacagcacgccccgcgctttcggcctggtgtttttcatccagccagaactgcgctgaactgcggtaaaacagggtggtctccgcgcccatattgttgttgataatattcagtaacccgggtttgtattcagtcatatccaaccgccagtgctgcacagtcatatggggaaccgtcagaataatgctggatacgcccaacccctgcgtatcagcaatatgtaactggcacgtccggtcaaaccggacattctcaggcagattgatgcgcaccggcgccgcaaattgattgccgctttcattgataaacagctccagataggtgctgtggacatagagaatatcggtcgtgccggaaccatctatatcggccaaatacacctgatcgggattaaagtttttggctgaaaccgtcaatccggccagcctgataggttgtccaaaacggccgtgtcccaaattaggccagcatgttacgccgtcagccgcaatttctgccagatgttgctgaccggaacccagcatatcggcaaaggccaccagttttcgtgcatccgcgccggggatcggtaatgtcatcccgtcggactggataacggtgttgctttttttccagcccgttggttgattagcatacaggcgtacactgcgtggcccaatcatgaccaaatcggccagccccgcgccggtcaggtcggccaattgtgcctgtgggtgaaaatattcgaccggcaaagcggatagcgggataaaaggagaccactgtccatcgggtgccagtgtgtgatagccattgactccggcagaggtcacgacccaatccagcttgccatccccgttgaggtccatcagtgaggcattattttgctgggcggggatctgcggcagtggctttatttcaccataggccacggtatcgggttcttccacctgggtgtcacgtacgggagaacgataccaccacgcgtggggagcatcttggtaaaggatgcccggcaaaccttcgccatacaggtccacgaactgatatggctgtaagtgattaaacttgtccaactgtggcatgggctgccaggccggcaacgatgccgtatccagccgttgataatccagctccagcggcggcagggtgacgggtgttccgtcattctcgtgcgctacctgacgggcagaaaccagggtactgatactgtgattgaaatcgtaactcagcatcagacgtgagactaaggcaggcacttcgctggcctcagttttacctgccagcgcattcaggcgatggaacatcagtacctgttggcacaaacggcgggtacggatttcaaagccgtattcaaaacgggagaaacaatcggggcgagccgtccagcttgccgatcctgcctgaaacgcaggcacttcatacagcgagcctgcccgttcgccgtaatcaaacaccagatggaacagccattggtcattggcaggcagcgccttatccagggcaaacaggcttgcctgtggcgtgatattaccgtagtgaacctgcatcaagtagcgttgtgcaccggataacgggtgttgttctttttcatgttcatcgcagccggcgtcatcttcggcacggtattggtagtaaatatgctcaccggtgggtgtcacagtttcttcgagtagccactgggcgatcttgttatcatccgccggattagccacccgggcgtgggcgtttttcccaaagagatgcacttgaccattgggactgaacattatccaaaaaggtttttgcgtattaccctgttccggctgccagtattccagccagctgaaatcctgaacgagacggggctgataacgggtcacctgccagctctcacctaacgtgataccctgcaattggtttgtggtacggatatccggctcgccccgttcatttggggcaacattcatcacctcacccatcgggcataaaaaggtatcgttgccctcataatggggcacgccctgtgcagtccgcaggctgacagccatgggcgcagactgccaccccatgccaaaagcgccattaccgctgccactgctgtaggtgagggacaaggcaggtgcagtgccgcgcccgctggaaatcggcagcggtaatgacagtgaggccattccgtcgggaccgcccccggtaaaggtttcccccattccccggagtgtcccgccgcctttgggcagtgacggtgctgttatcgtaatatcttgactattttgcatataaagctccatgcaggctcctccacacggagcctgtatttataatgtatgagttaatcgtgaggaatatgcagaaattacatgagatcagatccttgccacttatgttgacgcaagcgtttattactttctctaaccaaaccagacacctcattagtaaatgctgtattaccagtctgagcggtataacgaaactctatgacaatgtctttcagtgcattaatgagcctagattgttgagatttatctgcgcgaggaaaatccagacgccaagacgatatcgctccggttccttcaaaaggcaggtaacgttcgtcatttatattggtgtataacaccccagttttattctcctgattagaaataacgatacattggctaacacgaggattggaaagaatactggctggcttaatggggatatctccgtcttgctccggatagtaatacttcagagcggccatatcagggctgaggagggtttcacttgatgtctgagtcagtgttgcctttatttcttcataggggccaagtaacagaggcatattaatcgatatgttgataatctgacgcaggtaatgtccgggatagtcacgatcaaaatctaagggtgacaaactgaaatcaaattgtcccgtttctctgattttttccacgacttcatcccatgtcagagaatcaatcgtgttttccatccactgcttcaatgagactgttttcacaatttccagacgtcggtcgtggcgttttaaatatgtactttccatgtttaatagttgtagcttcaacgcctcacctgctgtcaggccaaaatagttatcgaaccacacattaggctgaataaagcgagcctcatagtcgcccatttcataccgccagcacgcttcaacactcagacacagggaagtgactgcatcataggcctgaaaatagaaggtcgacatctgactgatcaaccattgatacaatgccgaacccgtggtacgtgtcagcaaaagttgataacgcactttggcgtgttcttgttctttacgaacttgatcaagttgcacttgaaccatgcgttttgcgttttgggcgcttttaatttgttcatcaagcatctcactttccgcaaccgattgatcatactgaaattgccactcttcacggcgccgtcggtactgctcactttctgaagtcacataagacatcactctttttccgctagcggaaatacgctgcgcccagccgagtgctctggcaggtcctccccaaaccgagcctcctacgctcgtaccgaatagatttggcacgagatcggcaatcgatgccgcagattccattcccgatgaagcttgttcataagggatagtttccttacgcttatccattgagtctctttctgcggaagaaatgtcatcatccttgagcttgcggtaatacgcttgccgctcggtgacgacttttttacttgaaatcaacgtatcaatagtagcttgctgttgttccaacgcgatttcctgtagctgtaccgcaaaggccgacagttcatccatctgcgactgaactagttcttcctgtaatgcctgttccttctgttcacggtattgcctgaccagatcaccaaagcgcgtcagtgtttccaccgcgctctgtacccgtggtaacagggcacggaagcgatacggcaatatcggtgctaatgcactgacggctcgctgtgacaggcctgaagcactgctttgcgctcgtagcaagtcacgtgggttcaccggtgccgcatacatctcaagcaacatcggtttgccatcgattgtcagattgttgtgcaatgtgtccaaacgctgttgcaacgtatcccacagtgctatcaagtctggattgaccggggcgcgaaaggctttgggatcatccagtaccttccagtgttcatttcgcactttgctcacttctggcaacatttccggtaaaaaacgcgccagcgatccatccaatatggttgcgtcagtcgacaacgcttccaaggtcttcggtgtccaacgcgaggcaaccagcacatctggacgaggccccagtaatgctgtaacgcgtgaatagtgtatccgtgcctccgtcagtgcatcccgcgtcaggcggcggtacaatgcatctccctgcgccagaatgttgcgggcatattccatgaatatcgctttcttgtaacgttccggcgttgaatagcagatagcatccggatcagccacacgccctgcttcctgctcccagacataactgccgggctccagcagaggacatacccgccaataaggtgttttgttggcattatcttcgccttcatgcacacggatttgtggattaaagatgtagtgataccagttttccgcatcacgataactaaactcttgatgcagacggttggctacggcatgaggaatatggaagaagatttcccagaaatagcggccattggcgccatgaaaatccagtgtattcggaacacctacagcattcgatggaggcgctacttcacgtgtattttgtgcttcccaactcaataaattgtccaaagataaagaagcacgggcaacaagttgagctgcaaaagtggtattaaggcggatatgagtaaggtcaggtaacttttgatcttgcagagcgagatattccccgccgttttcctggataatattggggaatatcgaatttggggccctgttatatgctgagttacaaacatttatcttagatttataaaattttgcatatttttcttcttctgttccatttaagcttttttcttcttgaagaaaggctaatttcgcattaagtagtaatttctttcttactttttgagttgatatatttaattcatatatcacttcaattgagtcatctttaccctgtttatttttattgccaaaaagcacaatggcatttaattcaagctcggtattaggtctatcagataaagtttttagcactattggtgtagaccaggttttatccaatttttgataaataac

SEQ ID NO: 2137 - DNA, 13731 bp, Xenorhabdus sp.; identical to SEQ ID NO: 2136
  CDS (661)..(1416)

SEQ ID NO: 2138 - DNA, 12202 bp, Xenorhabdus sp.
  CDS (11581)..(11967)
acattgacagaaacgtctggggaagtattgccttatcgtgttcatcagttcgctattgcgcctgcaagccgtgaaattttgcatcagcgcattgcagcccgatttgaacagatgatcaaatcagggtttgaagatgaagttaaagcgctttatgctcgtagcgatttgcatacggatttaccctccattcgttgtgttggttatcgtcaaatgtggtcttacctcgcaggcgagatttctcatgatgagatggtttatcgtggtatctgcgcaactcgccagctggcgaagcgtcagataacctggctcagggggtgggacgatgtggcctggttggacagcgaccagcctgagcaggccctgaaaacagtcatgcaggttattggtacataaattcgttgattgtgtacaattatcagtacaaagcgtcatttttgagtatttactttttcgaaccaacgggttcttagttaaaaacaacaaaataaggaaaatatagaatggctaaggggcaatctttgcaagatccattcctgaacgcattacgtcgtgaaagggtcccggtttctatttatttagtcaacggcatcaaattgcagggtcagattgagtcttttgaccagtttgtcattttgctgaaaaacacggttagccagatggtttataaacacgccatctctactgttgtgccttcccgtccggtatctcaccacggtagcaatgctaatatggcatccagcgtgggaaattatcaggctggtaacagtccggcagcacaacaggaaaatgatatcgctgaataaatcagtgataatgcctgacataaataaaaacataggtagggagactttacctatgtttttcctatggaattttatacccaatggatttcgagttgcatctcggtagcttgaaagacgaaggggatactcagcctgagggttgcaccattgtttgatcgttacgaaggcggagaactagccgttctggtgcatgtttttttctcacaggaaaaagacacggaaaatctcagtgaatttgaatcattggtgacttccgcaggtgtttctcctgtgcagattgtgacaggaagccgtaaggctccgcatccgaaatattttgtcggggaaggcaaggcagaagaaattgctgaagcagtcaaaaacagtggtgcagatgtggtgctgtttgatcacgcactttctcctgctcaggaacgtaatctggaacgcttgtgccaatgtcgtgttgttgatcgtactggtgtaatactggatatttttgcccagcgggcgagaacacatgaaggtaagttgcaggtagaacttgcacagttacgccatctatctactcgcttagtccgaggctggactcatcttgaacgccagaaaggcggaattggtttgcgtggacccggggaaacccagctggaatcagatcgtcgtatgctgcgcgataaaattaagcagattctggggcgtcttgggaaagtagaacgacagcgtgaacaggggcgtcaggcgcgcaacaaagcagatattccaccgtttcccttgttggttacaccaatgccggaaaatcaagtttattcaatagaataacctcggctgaggtatatgctgctgatcagctttttgctactctcgacccgacattgcgtcggatcgctgtaaatgatgtcggcccggttgttctggctgataccgttggttttattcgtcacttaccccatgatttggtggcagcatttaaggccactttgcaggaaacaaggcaggccaggttattgcttcatgtcgttgatgcggccgataaccggctggatgagaacattcttgccgtggacagtgttctggaagagattgaagcacatgaaatcccttctttgctggtgatgaataaaatcgacatgctggacgattttgaaccccggattgaccgtgatgaagaaaatcgtccggtgcgagtctggctttcagcccagagcggggaaggtatccccctgctattgcaggcactgactgaacttctttccggtgagattgcacattatgaattgcatttgcctccggaagccgggcgtctgcgtagccgtttttaccagcttcaggccattgagcgtgaatggatggaagaaagcggtcagctggggctagaagtcaggatgccgatgatcgactggcgtcgtctgtgtaagcaggagccaaatttaccagactatgttgtctgattgattggcgcagggcgacaaacaaggtattattttggccgccatttcagggtacttagcgttatggagtaacggtgatgaaatggcggtggtgaaatgattgtgccagaattgcagtgacgaaatcagcactgtcatcagcactgtcaaaaggtatcacccaaaaatattggttgcttatgaaacggtgaagtttatcgtttttgcccatggaggttgtgtctgatatatcagtaacagcggcctgtgaagtgggaagcctcacccgtgtgggtggaagagcagtcacctctgaaaaaccagtgaaaaactaaaaagtggagctaaaacatggcgtggaatcagcccggtaataacggacaggaccgcgacccgtggggaagcagcaagaataatggcggcaactccggcggcaacaataaaggtggtcgaaaccgtggggcaactgatctcgacgatctgttccgtaaactgagccaaaaactcggcggcctcggtggaaacaaaggtggaaatggttctgggcagaaccctaaatttggtggacgtcttattggtctcgccattgctgttgtagttgttgtttgggttgtcagtggtttctatacaatcaaggaaacagaacgtggcgttgttacccgtttgggtaaattcagccatatcgtacagcccggcctgaactggaagatgacatttatcgaccgcgttcgtgctgttaacgttgaatctgttcgcgaactggcaacaacgggtgtcatgctgacatcggatgaaaacgtagtgcgtgctgaaatgaacgttcagtatcgtgttactgatcctgaagcctaccttttcaatgtcaccaatcctgataacagtcttcgtcaggcaactgacagtgctgtgcgcggggttgtcggcaaatacacaatggaaaaaatcctgacagcggatcgtactattgtgcgtaatgatacccaaaaggtgctggaagaaactattcgtccataccacatggggatcaccctgctggatgttaacttccagactgcgcgtccgcctgaagaggtgaaagcggcatttgatgatgttatcgcagcccgtgaagaagagcagaaaaccattcgtgaagcagaagcctataaaaactctgtcttaccaattgccaaaggtaatgctcagcgtatcatcgaagaagccaaagcttataaggtcagtgcggtattgaatgcacggggtgaagtagcaagttttgccaaaatcctgcctgaatataaagcggcaccggaaattacccgtgagcgtctttatatcgagacaatggaacgagttctgagtaatacccgcaaagtgattgccaatgaaaagagcaataatatgctggtattgccactggatcaggttcttcgtagtcaggctgaagcagcaaaggctaaatcaccagaagtgaaagtaacaccagagcatcgcagcacgacacattccacaccagcacacgggcaatcaggttatggcagttctggctatggtgattcaagcgacctgcgtggtgatacgacaagacaagggagaccataataatgcgtaagtcgttcgtctttgttattgccgccatattggttgtgctctactcatcaatctttatcgtatatgaaggccagcgtgggatcgtactgcgttttggtaaagtagtacgtgatgctgaaaataagccagtggtttatcagccgggcccacatttcaagatcccatttattgaaactgtcaaaacgcttgatgcccgtatccagacaatggatatcaaggcagaccgtttcctgaccagtgaaaataaagacttgattgttgactcttatctgaaatggcgcattaaagatttcagcagctattatctggctaccggtaatggttcaatttctcaggctgaagttctgttaaaacgtaaattcagtgaccgtctgcgttctgaaatcggtcgtctggatgttcgtggtatcgtgacagactcccgtggtcgtctgacgacggatgtacgtaatgcactgaacctgggaacgagtgatgaagactcttccgcagacgatgcaatcgcttctgctgctgcccgtgtgaagaaagaaaccaaaggtgcacagcctgctttcaatccgaacagtatggctgcactggggattgaggttgtggatgtccgtatcaagcagatcaacctgccggatgaagtttcaggagcaatctaccagcgtatgcgtgcagaacgtgaagcggtagcgcgtcgtcaccgttcacaggggctggaagaagctgagaaggttcgcgcagcggctgataagtcggcgactgaaatcaaagcagccgcatatagtgaggctttgattttacgtggtgaaggtgatgcggaagcaacaaaactgtttgctgatgctttcaataaagctcctgatttttatgcctttatccgtagcctgcgtgcgtacgagaatagcttcaggaatgaagggaatatcatggttctcagccctgatacagacttcttccgctacatgaaagatccatctaaacagcgcactcatagtcgtgctaatgactgatagtttctgataggtaaattgattacagataaatggtctgatatttacctgaactagtagaaataaacgtcatctctgagccactgtaagaaaacttacagtggctttttacgtcattttttatacccacagtctttcaaattgcttcttttgtagctcttatgagttattccgtcattaccaatgcttacttatcagcccgttaatatgacgaaacgaaataacagaagtgagaaaaaatactgaaaggtgctaaatgagatggtagaatccatttttaagcaaccgagtgaacttttgaaatgggtaagaacgttgtcgtattgggcacccaatggggtgacgagggcaagggtaaaatcgtcgacttgctgactgaacgggctaaatatgttgtccgttatcaggggggccataatgcgggccatacattagtcattaacggtgaaaaaaccgttctccacttaatcccatctgggatcctgcgtgaaaatgtcattagcattatcgctaatggggtcgttttagcaccagatgctttgatgaaagaaatgaaacagcttgaatcacgtgggattcctgtacgtgagcgcttgcttatttctgaagcttgtccattgatcctgccttatcatgttgcattggacaatgctcgtgaaaaagcgcgtggtgcgaaggcaatcggtacaaccggtcgtggtatcggtcctgcatacgaagacaaagtggctcgccgtggtctgcgtgtgggtgatttgttcgataaagaaactttcgcagctaaactgaaagaaatcatcgattatcataacttccagctggttaactattacaacgaacctgccgttgatttccagaaaactctggatgatattctggcgattgcggatatcctgactggcatggtagttgacgtttctgacctgctttacaaagcaactcagaaaggtgagctggtaatgtttgaaggtgctcagggtacattactggacatcgaccacggtacttatccttatgtaacctcctctaataccaccgctggtggtgttgcaacgggttcaggtctgggtccgcgttacgttgattatgtactgggtattgtcaaagcttactctacccgtgttggtgcaggtccattcccaacagaactgtttgatgaaaccggtgaatatctgcgccagaaaggtcaggaattcggtgctaccacaggccgtagccgtcgtactggctggctggatatcgttgctatccgccgcgctattcaaatcaactccctgtccggcttctgtatgaccaaactggacgtactggatggcctgaaagaagttaagatctgtgtaggttatcgtcaggctgatggtactgtcatcgacactacaccactggcagcagagaactgggaaggtctggaagcggtatatgaaaccctgccgggctgggatgaaagcactttcggtgtgaaagagcacagtcagttgccagaagctgctctgaactacattaagcgtgtagaagaactgtctggtgttcctgttgatattatttctacaggccctgatcgctctgaaacgatgatcctgcgcgatccatttgatgcttaactgattatttttaatcactaagtatctctaaccgggctttatgcccggtttttgcatttttgggacacagacagccgtacatcaatcatttttctggtgacagcttgctttgcttaatttttaaaatacccacataatgtgaccagttaatgatgataaaccaataatctttacttgtttggtttccaataatccccgttatatccagccacccagaggtaagtgtgcagttaaccagttttaccgattacggcttgcgtgccctgatttatatggcttctttacctgaaggccagatgacaaatattactgaagtaacagaagtttacggtgtatcacgtaatcatatggtaaaaatcattaatcaactgagtaatctgggattagtgaatgctgtcagaggaaaaaacggcggcattagtctgggaaaacccgccagtgaaattaaaattggtgatgtggtgcgtttactggagccacttggattagttaactgcgacagctgccatattactccagcctgtcgtctaaaatcagtattgaatcaggcagtggaaaactttttggaagaattaaatcaatattctttggccgatatggttgaagacaatcgtcccctttatcaattgttgctgacgaaatgaagcaggaaataaagcgcggggataaacagcttactgatgacaacagaggaatagcgatgtcaaaagatccttttcaggaacgagaggctgcaaaatacgaatctcctatcccaagtcgggaatatatcttggatatcctttctaaacacaccactccggtaagtcgtcaggaaatagcacaagaactgaagttaaccagcgcagaggcgcaggaagcattgcgtcgccgtttgcgcgcaatggaacgtgatggacagttagttttcactcgtcgtcagtgttatgcgttaccggaaagattggatctattaaaaggaactgtcattgggcatcgtgatggttatggattcttacgggtggaaggccacaaagaggatttttatctgtcagcagaacagatgaagatggcaatccacggtgatgttgttttggctcaacctttacgtccggatcgtaaaggccgtattgaagtgcgtatcgtccgggtattggagccaaagaccagccagatagttgggcggtattttatcgatgccggtatgggttttgtggttcctgatgacagccgtttgtgtttcgatatcctggtcccgaaagaagaaatttgcggagcaaggatggggaatgtcgttgttgtggaactgacgaatcgcccgacccgccgtactaaagccatcggaaaaattgttgaagtgctcggtgaaacgatgggaacgagcatggcggttgatattgcccttcgaacccatgaaatcccttataactggccaccgatggtggaaaaacagttagctggtctggatgaaaatgtcccggaatcagcgaaagaaggccgggttgatttacgagcactgccgttagtcactatcgatggtgaagatgcccgtgatttcgatgacgctgtgtattgcgaaagaaaacgcggtggcggctggcgcttatgggttgccattgctgatgtcagttactatgttcgcccacaaacccctttggatgccgaagcatgtagccgtggtaactccgtttatttcccgtcgcaggttgtaccgatgttgccggaagtgttatcaaacggattatgttcgctaaatccagaggttgatcgcttgtgtatggtgtgtgaaatgacgatttccgctcagggaaggttgtcttcatacaaattttacgaagcggtgatgaattctcacgctcgtttgacttataccaaagtagggaaaatcctacagggcgatcaagaacagcgggaacattacaagccactggtgaagcatattgagcatttgcatgaactttatcaggcgttggatgtatcccgtgatgagcggggagccatttcgtttgaatctgaagaagcgaaatttatcttcaatgcagaaaggcgaattgagcgcattgaaccggttgtgcgtaacgatgctcataagttgatcgaagagtgtatgattctggcaaatattgcggctgcgcgttttgtcgaaaaacatcgtgaacctgctctgtatcgtattcatgatcgaccacgagaagaaagtattctgaatttgcgttcggtatttaatgaactgggactggaactgccgggaggcatgacgccagagccgaaagatttcgctgaactgatgaaacttgtctctgaacgtcccgaccatgaactgttgcaaacaatgttgctgcgttccatgaaacaggccatttatgatccggaaaatcgcggtcactttggtctggccctgcgtgcttatgcacattttacatcgccgattcgtcgctatcctgatttagtcttgcaccgggcaattaagtatctgctggcacaggaaaacggtactgctgaacagcactggacaccaaccggtggctggcacaacgatatggcgcagatgctgcaattgggtgatcactgctcaatgactgagcgccgtgctgatgaagcgacacgagatgtggctgactggctgaaatgtgatttcatgcaggatcaggtgggtaatgttttcaccggcctgattaccagtgtgacgggcttcggtttctttgtcaggttgcatgacctgttcattgatggtttggtacatgtttccacactggataatgactattatcgtcatgacaatgttggtcagcgtctcatcggtgaatcttccgggcagacttatcggcttggcgatgaagtagaaatccgtgtagaagcggttcacatggatgagcgcaagattgactttgctctgctttctacgacccgtaaggcccgtaataaaggcaaaacagctcgggataaagcgaagaaaggcgcatttgagcgtaaaggtgccaaaaaaggtcgtgattataaaaaatcagataattttgagccagatagccgtttccgtaagaagaaaaaaacggaaaaagccagttcaggcaataaatcagataaaacgtcagacagtcagtcaggaaaagcaggcaaaaagaagaaaatttcagacaaaaccaaaaagatcacggcaaagctgaaagctaaacgcgcgaaaaaaacgcggaaaatagctgatagttaactagcgaaaaatagagacaatagggcggttttcgccgccctccattttttaggtatcatcccgtcatgagtgaaattatctacggtattcatgccgttaaagccttattggagcgtgatccacagcgcttcatggaagtttatgttctgaaagggcgcgaagatcgccgtttgaccccactgttgcaggaactggaaagtatcggcatttctgttcaactggccaaccgccaatggttggatacacagacagaaaatgcggtacatcaggggatcatcgcgagggttaaacccggacgccaatatcaggagaatgacctgcctgatttactggctcagtgtgagcgtcctttcctgctggtactggatggtgtgactgacccacataatctgggagcctgtttgcgtactgcggatgccgcaggagttcatgccgttatcgttccccgagaccgttcggcacagctgaatgcaactgcgaaaaaagttgcctgtggtgctgcagaaagcgtacctctgatccgcgttactaacctcgcccgtactttgcgtttattgcaagaacacaatgtctggattgtgggtacagcgggagaagccactcactctctatatcaaagcaagctgatcggcccgatggcactggtcatgggtgctgaaggtgaaggcatgcgccgtctgactcgcgatcattgtgatgagctggtcagtattccgatggcaggttctgtttcttctctgaatgtctcagttgcaacgggcgtttgcctgtttgaaatcatgcgtcagagaagcgcctaatagtttcttgagttttttctactacgcaggtatagtgacgcgtcgatttttcagccgtacttaacacgttccttgcctccatgggccacggctgaccctgacaggaggctgaataatccgtaaggagcaatgataatgcgtcattacgaaatcgtttttatggtccatcctgaccagagcgaacaggttccgggcatgatcgagcgttacagtgcaactatcactaacgcacaaggtcagattcatcgtctggaagactggggccgccgtcaactggcttatccaatcaacaaactgcacaaagctcactacgttctgttgaacgttgaagctccacaagaagcgattgatgagctggaaactaacttccgcttcaacgatgccgttatccgcagcatggttatgcgtactaagcacgcagtaactgaaccatcaccaatggttaaggctaaagacgaacgtcgcagccgtgacctggtcctggaagaaggcctggttgatgatgttgatgaagctggggattctgaagagtaatcaccgtgacaaccaatcgtttggtgctttctggcacagtgtgcaagacaccgatacgaaaagtcagtccatccggtattccgcattgtcagtttgtgcttgaacatcgttcacagcaacaggaagccggattcaacaggcagtcatggtgcagaatgcccgtgattgccagtggacagttgttacagggatatactcacagtataacggtcggcagtcgaataaccgtttcaggattcattaactcccactatgggcgcaatggtcttagtaaactggttcttcatgccgagcagattgaattgatagattctggagactagccaaatggcacgttatttccgtcgtcgcaagttctgccgtttcacagcggaaggcgtacaagagattgattataaagacattgctacgctgaaaaactacatcactgaaagtggtaaaattgtacctagccgcatcaccggcactcgtgcaaaatatcagcgtcagctcgctcgtgctatcaagcgtgcacgctacctgtctttgttgccttatactgatcgtcatcagtaataggcacagtccattcacgactttgagaggataaggtaatgcaagttattctgcttgataaagtagcgaacctgggtagcctgggtgatcaagttaacgttaaagcgggttatgccgtaacttcttagttcctcagggcaaagctgttcctgcaactaagaaaaacatcgaatttttcgaagctcgccgtgctgaactggaagctaaactggctgacgttctggcagcagcacaagctcgtgcagagcaaatcaaagcactgggcgctgtgactatcgcttctaaagcgggtgacgaaggtaaactgttcggttctatcggtactcgtgacatcgctgatgcagttactgctgctggtgttgctgtatctaagagcgaagttcgcctgcctaacggcgttctgcgtactgttggtgagcacgaagttcacttccaggtacacagcgatgtattcgcacagttgaacgttagcattgttccagaagcttaatctctgattagctacaagaacatgtgaacaaaaaacgctggcaatgccagcgttttttgttttcttatgaaatgatcaccttagctatttcactcactttttcgatgatattttgaggtgctctctcaataaatttgatctggcgatcggcaaaatctaaggattttatctgatgaataagaattgctccttgagtagatagatccttgggtaagatcacttttagaggacactg

SEQ ID NO: 2139 - DNA, 12202 bp, Xenorhabdus sp.; identical to SEQ ID NO: 2138
  CDS (11250)..(11477)

SEQ ID NO: 2140 - DNA, 12202 bp, Xenorhabdus sp.; identical to SEQ ID NO: 2138
  CDS (10524)..(10922)

SEQ ID NO: 2141 - DNA, 12202 bp, Xenorhabdus sp.; identical to SEQ ID NO: 2138
  CDS (9654)..(10388)

SEQ ID NO: 2142 - DNA, 12202 bp, Xenorhabdus sp.; identical to SEQ ID NO: 2138
  CDS (7075)..(9588)

SEQ ID NO: 2143 - DNA, 12202 bp, Xenorhabdus sp.; identical to SEQ ID NO: 2138
  CDS (6626)..(7045)

SEQ ID NO: 2144 - DNA, 12202 bp, Xenorhabdus sp.; identical to SEQ ID NO: 2138
  CDS (5103)..(6401)

SEQ ID NO: 2145 - DNA, 12202 bp, Xenorhabdus sp.; identical to SEQ ID NO: 2138
  CDS (3793)..(4800)

SEQ ID NO: 2146 - DNA, 12202 bp, Xenorhabdus sp.; identical to SEQ ID NO: 2138
  CDS (2561)..(3790)

SEQ ID NO: 2147 - DNA, 12202 bp, Xenorhabdus sp.; identical to SEQ ID NO: 2138
  CDS (1841)..(2230)

SEQ ID NO: 2148 - DNA, 12202 bp, Xenorhabdus sp.; identical to SEQ ID NO: 2138
  CDS (966)..(1601)

SEQ ID NO: 2149 - DNA, 12202 bp, Xenorhabdus sp.; identical to SEQ ID NO: 2138
  CDS (501)..(803)

SEQ ID NO: 2150 - DNA, 12202 bp, Xenorhabdus sp.; identical to SEQ ID NO: 2138
  CDS (1)..(393)

SEQ ID NO: 2151 - DNA, 12202 bp, Xenorhabdus sp.; identical to SEQ ID NO: 2138
  CDS (10934)..(11242)

SEQ ID NO: 2152 - DNA, 10657 bp, Xenorhabdus sp.
  CDS (7091)..(7849)
catgacgaacgctttgacgaagcgaccctgcatcaacctgactttgtgcccttgcttttccagttcgcgagcccagtgctgagaaccgccacaggcttccataccaataaggcaaggctcacggttactgaaaaacgtcaaaaaatcttgactacgcaactgcttatcaaccacttcacctgtgtgctcattaatgaagtggacttggatcagatgttttgcaatatcaacgccaaccggtgtacatttcatgttgtggagtctccagtctgagggagctttatgcatcccgtattgggcactatgatgccggaaatctgcgaggctccacacctttatgtactttcccttcattcatcattgtgctccagatttaatgagtggggagcgttcatctcattcctctgagtggcttcggtgacaagtgcaactttcccttttaatcctctagacatggtaaatctcctgagtgtttttattcagtgaaagtaatttggcgtgttgatttttgcaatcagtgacacttgtctggttattgctcaaaaggtcggttgtgacatgtatattatcgaaccagctcaaagctgatttgcagtgtgatatctgctggcagtgttgttggtttcgggccaatagatttagcaagactgagcgctttcagtgcttcattatccattgcactgtagccggaggattgaatgattttggcggcagtgattgaaccatcatcttgaagtataaagttgacggtgactgtaccttcctgcttcattcgttttgctttgcgggggtaacgcttatggcgctcaatttcctgccggagcctcgcatggtaattgtctgactcactattaccctgacccactaaaggttgagaagttgtcgcctgactcattccactttgtgagttgacctgatcagtaccattcgtttcaagttcctccgggctgttttggggagtctgagatgactgagcagatttcttttctctattttctttcggtttttcttttggctgttttttaggtttttgagtttttattggttcggccggagtatcgatctttttttctgtttgaacgactttatccagtgcaattaccggagctgtcggtgattcaggaacagtcagaactggctgagataattcaaccggttccggctcttctgctaatgctgaggccgcaaccatcgtgattgaaaaacttgtcaaaggagaattctgattaagatgatgggcactgtcgtcgttcgactctgaatgtcggtttaacagccatatcagactgatatgcaatgaaacagcgataagaataccagccagaaaacgcttactgagcgttaactgcaagccgttcactgaattatctgatatggctgtattaatcatactatcctctaaaactgactggtaaggctgagcttaaaggttctgcccggtgccggtatcattgagcgagtcagtggatcaagataatagcggttagttaagtttgtgccagtcagttccattgatatcgcaggggtgatttggtagctgacataggcatcaacggtgaagacggagttccagcgcatcgggttgttggatatccctttatattcattcggcaaaacacccatcaaccatttttcatctttgttttctgctctgctgtggtagagcatccggctgcccagttccagtttttcatcaaacaggcgtccgccgacattcaggttagcggtatattttggctgaatggaagtacgcaagtaaccgcccgggaaaccaccatcaatacattcgggaacaccgtaacgattctgagaatccattcttgcggcagagttattgtcacacaccttatttttcatgttgtagaccaaacccatatcagtaaagaaactgccgttgtcgtaacgagcctgtaattctaaacctgccagtttttgtttatctaactgggcgaaattataggtattatccctgtcgaacacattttcaataacagtattgtaataggagagtttgatatccgcattacgttcagcattcactaactggctgaaatcataaacgaaacctgtttctatggttttggctcgttctggtttaaatttcaaaccaatgtaattttctttaacgcctgaaaaaccgacagtatcttcaaaaatactgggcattcttactgcctcggcataacgggtatagactctgagatcgtcagtgatataggcagtagctgagaatgttggtgcccaagcatgggatttacgttttggggctggttcccaaggagaatctacatcttgtgagagtatcttatcattattactcagactgtttgcactatactcatatttataggcttctctgccgctgattgggtcgataaccttttcattcatatccaattggccattaaaataggggttatcgcttttattaagttttcctgtttcagggttatatttccactcgaatttttcttcaactaaccatcttttttgttgaatacgatcatttctatcttttattttttttgtcttagcacgcaattcacgtttttctgttctgctaagtttagaataatatttttcatcatttcgttttttgaagtcattggcttcgtcctctgttactgttcgccagtagctcattttgtatccgattatttctcccggttctttataatttctatctcttgcgatacgccgttcattaagaaaatcatctttggaccaataggaaacacgtttagcaccagcacccaatgccagccatgaagtaggacgccagtcaaagttaaaagcgagattaatttcctgacgttgcccttttcttgctggggactgaaagaaatacagattatcaatatggctgatgtcatcatcagaacccaagcgttcgcgttggaaatttcccatcagagtaagatccaaattttgggtcagttcgaatttattggaaatatctacaccccaacgattattttgggcattggtgacggctgtattgattaaggttccatcaatattagtgctcctgccttttcctccctcccaatcatagtctctggtaaccggaccacgcggatatccacctgaagtattggtgttacttatcgtgcgggttgtccacagattcatatcaaaatcaatataagggtttgcagcagagtcccatttataatttaggctagccgcctgctggcgggcattggccagcggccattgaggaacactattttctttagcaagcaccgatgccagccttgaaggcatgatatcgccgaactccatacgcgtgttacggaaagcaagttgtaatgcctgctcatcggtgaagtgccaggtgtttttgattaacaccgattgcattttgctggaagtattggggacttcattaccggggcgataaatacgggctgcaaaggggagataaggatctagactcgtttttgggttgagcattaagtttatatcggcttctgttgctgctgcatcatagcgatgtgcaccacctttacctgcaaaatagttgcccttatggcggtaagcataagccagcatcaggtcaaaatattcttgtcgtgttcccactgcaacgcgaaaggcattatctttgaaaccgaacagtttattgtcttttgatgagtgtggagtgatttttagtgcaggatcagattcgattccattgtgtataaaattgggaacatcgcggtaatcctgtcccagtgacaaagacggagtgcgctctttgactgagttactactggtttccagtttggtattgatgccaaatgtttcaccttccggcacgacatcatcaatattgagtgttttgatagagactgctcccccgacggaacctttcaccctgcgattcagggaaggccctttctcaatttcaatgctgctgattaagttaggatcaatatagttgcggttattagcaccgttatagccacgtccaacggtaattgcctgttcggttccatcaatcgtgacgggaatacgcccttgtccctgaataccacgaatattgatatctaaggcaccgctattgcgggcatcaccactgtaaacaccaacagcccctttaatgacatcagcaggagatgcgcctttgtaacgctctatctcctttttgccgatataaatattggagatatctttgtcataaaccgcatcataaccggcttcatctttatctctgttatctgtcacccggattttacctaaatcagttttgctgtctgacgttgtgctggcaggtttggattcagcaaacacaggaggtgctgccagtgaaaatgccagtgacagagctatggtgatgggagttagtccggttttaatttgatatgccattgatatttcttgcctcagttatcatcgcacaaataaaaaatcatcagattttgattaaaaaaacttttccagcctgagcagcacttcgtttttgttatagctgtacatccaatctacattgctgtgattgcgtcggtagcggaaagtaacagaaggggtcatccccatgatttcagccgcaggcactctgataacagcggtgtatatttgctccgtatcatgacgcttagcattcagcatcgggctgtaagcaccaaagcgccgatcacgtaatgtggcaaacaatacgccatggatgccggaatagatttgtccgccaactcctgcccgaactccccattgctgatagcggtcgacgggatattggtcgttaccccgataagtccagtccccgccaccaaacagaataaaatctttgctgatagtgtggaataaattgaggtaggaagaggttaatccaccgtcttttctgcggtaattgtgctgatggcgcagttgtttatgttcagattcaatatcaagagttgtctgagaggttattccccatcgccattttgttttgattccggcggcatggtagaagcgatcaccagcaatttgtttatattcaaataacgggctaaaggagatatcgtggtttctgtttttatagctgtatccactggttaactgaaaggtattttcattttcatcgtggtaattatagtaattttcaccataaatcagaccacggatagcaataccgtgattaccgaaaagttgatgtcttcggcttattgttgcgtcataagacataccccatgctttgacagcttttggtatctgctgttgaatacattgctcttcgtttatttttagacaagcaaagtcctgattagaagacatattcacattattgttgtaggcgtaaccagcagagaacgagccacgccagccatttcttagttttatcgcttcaagataactgttgatgttcttcaatactgcttctggtacttgttttttttcacttagttctgaaaataggcgttctgcttcccgatttttatgatcttgaaaatagactcgggccagttccagttgaacacggggaaaatcgggctgttggttcagaatttgttggtaatgataggtggccagttctaaattttcttcaaggcgagccagccctccctgagcaaaattgaccagcatggaatcatatcctgacaattttttataagatgcaagaaaacgcctgacatccggccactgttggtgaatggtcgcaagaaatagtgcaaaaccaacattatccagattatcttctacctgaaatttttgtccattaatgacaatcaacgctgcattattctcagcaaaaatgggatcaggtgtaatcagtttgttttcattttcctgttggtgatgttgtgcttcctgccaaatattgcgtggggtatcttcatcggcatatatcggcagagagataaaaaaagcaatcaatgccgttaataatataagagtttttctattgtcagacatcgcaaagccagcttataaaacttacgttattaaaaataaaaacagagaacagtgctaaaaaatgaacactgtcctctgataaattagcaattactgtttagagccaccgaaagcagtatctttggaatgatcaccatcaaattttgcataccctgccagactcgatgcattatcgccaaagaaatgaccttctgttgaaccggcgaggttgccaactcttgcatcaccctcgaaactcgcatcagcataaatatcggcattgatatttattgtcatagcatcatttgccattgagccaaccagtgttttctcaccaaaatctgcggtaaatgtaccggacagcgcattatttccgctgtattggttaataccggtcacggtataggttgctgtgccgtcggttggaatattggtggtaatatctttgccggcgtaataaaccgtatgagttgggtcatcagctttaccagtctgagaccattcaccgaagtaaacctcttcattagcgactttgctgaaatggaatacgcccataccaccatgagtgcccggagcaccagccattgagatattgtgaattccattactgtcagcaggtgccatacgtgtcaggccagaaaagccagtgatttgaccaccataaacggaactaatgccgatacccggttcaccgccattgccaccgtgtgggcctttaccgggttgggttggaccaaccttaacgtatgatggtgaacttacctgactctgaccaaatcctactgctgcgtgagcctgtgccataaatcccaaaacgcctaaagtggcgactaataccttaacttttttcatcgttatcctcatttagagtgggggatccctcgttacccaatcataaaaatggcctgatttattgcgcaggagaaatgtacattcttcaaatgataatgtaaatgataattatttttatttgatgttgattttgttgtggttttaatcagtgactaattcaattatttgtattttaatgattttaatttttgataagaagaagagatattttgtcgtttttctaaaaatgtgatgaggttaaatttaatggcctgtagtgattgcgtgattaatagtcccgttctggctgcaaaaaagcacttattttactcagctaattcattagttttttatatgtattattttgattcaaagaaccgtctttaatagggagttaattatggatgcaaaaattattattcagtctgccagagagagggaagatattgaggaaaaatcaagtgattttattgatgccagctggcctttattttcgaactacgacaaggtgtctgaacagtattgggataccttatatgaacccccgtttagtcattttcaaaaatatgccattctgcaacaggggcaggaagagcgtcttattggggtattaaattcaattccttttttatgggaagcaccttcactggagcaactgcctgacgagggatgggatgcaatactgcggcttggtatggaggctaagggacaggcgaatatgttgtcagcactttctgttaccgttgatcctgaatttcgtggttgcaatattccagcgctattaattaataatgtgaagcaaaccgctcgtgaagcaggattacaaggcgtcgttgtacctgtcaggccaagccgaaaaagctgttatccattgcaagattttgtcgaatattgtagttggaaaaatgaaaaagaggagccatttgatccctggatacgcactcattggcgtttaggggccaaaatcattaaacctgcattccgttctatgaatattgacggaacagtggaagaatgggaaaagtggacagaaatgaagttcccgcaaagcgggaagtacattattccgggcgcattggttcccctggtggtggatacagaaaaacagatcgcacattatattgaacccaatttatggatgcttcatagcattgattaattggttaacctctgagaatgtgtatacaccgttgctcgccccagtttacagaaaccgactagcgtcagattacatttttctgctacttcgattgcgagtgaagtagcagcagaaacggcaaataatatctctacaccacaattggcagatttctgcaccatttcataactggcacggctggaaaccaaaacagcgccttgttgccagtctgtttttgaacgcattcccaatagcttatctaaagcaacatggcggccaacgtcttcacatccaccaagtaaatttccttccgagtcaatccagccagctgcatgggtacagccagtcaatgaaccgatgtcttgcagaagaggtaattgtgcaagcgcctgatccagataaaccaatgaaaaagtttgtgtaaaaggcagtggagggatggggcggaagatttctgatatttgctctgtgccacaaataccgcaaccggttcggcctgccatactgcgtcggcgttctttcaattcagcgaaacggcggctggagagttcgatattgacttcaataccgccgtggcagccggaagctatatcaatcccgcgaatctcctgtggagaagtgataatcccttctgatagggagaagccaattgcgaaatgctcgaggtcttttggacttgccatcatgacgacatgggaaatgccgttgtagactaaggccaccgggacttcttcagctacccagtccagcttaggggtgtgtaagtgatttttttgttgtacatagatgcgggtagtgccactgacagcttgctgattttctcgcttttttttatccatctgactaattctcaatcggcttcacttttcatttcattgccaagtttacattatttatccgtaaataaaaaaagcatgttccagtgattaaattaaatacaggttttttatattttattttatatctatctatattatgaaataatcttcattgacataaattatatttttatttgagttataaatgttgactttaatattttgttatttatttttgtttttttatttttgtgtatttttaatgtgttgtttctgaatgtttttataataattatatcgtttcttttgataattgttatatatgcttttaggtcgtgatgatacagtctttaatgtttttaatgtttttaatgtttttaatgtttttaatgtttttaatgtttttaatgtttttaatgtttttaatgtttttaatgtttttaatgtttttaatgtttttaatgtttttattgtttttattgtttttattgtttatatttgatgttttttattaatgaatgaaatttcaattgccctccttgataataaatgattttatctttcagttatcacattaaatattcatttaaagggtaattatcgccgtgtcagacacgtcttctttctattaatgaaaggtgatttaagtgaatatattagataaaaatccaggtattacaaaattaatctcacaacctcaagtaaatgaaagtgaaaaagactggcatcatattgttctcagtgatatagggtttcgacttgatcatgttgattttccttgtatcttctcaaagagagcatttaaaaaaaagttattaaaatttatcttcgtagagaatgcagagaagagtggcattcagcatttagctgaagggcttaaagattatgttgaactttcgcagaattggaatggcgatttaaataccgcatacccgctgtttgttgcgttctcacaagaagcaataagagttcagtctattagtgattatcacgcgtttggctgggaagtcttgcagaaattacatgaaatagatcctgaaccctggccggaaagtatcagtaaatatcccgattcttcagcctggtgcatgtgttttaacggtatgcagctattctgcaatatgagcagtccggcgaaccagtcacgtagaagcaggaatcttggtgagcattttattatggtcatcaacccacgtgagcgtttcgatatcgtcgccggtaatactccggatggtcgtaagatccgtgaaaatatccgtaatcgcattgataaatatgatgatgttccccgttctttgcagcttggctcttatggtacagaagcgcttgaatggctgcagtatggccttctggatgaaaatgtgaagagagagggcaagtgcccgtttatgttcaggaaaaaatgaagccagaattagtttttatgagttatgaccgaagattaacctgaaatttttattgataataatgaaaaggaaactgttccatgattgatcttatcgtttctcagggtcgcatagctgatagggcagcacgcatgattgaaggtgctgctcgtaccgctgaggcgttaaaaaaacactatggtattcaggggcattttattggaaagagcgcgcctcctgagaacgatgactggagtgttagtcttcctcaagcccgtgaaacgcttgttgagttgcgtcaggcaattgaagcgagtattaagggaaaaaaccggacgtttatgctcgctaatacctgttctgcgagtcttgcttcattacctgttgtcgcgcgggagcatccggaagcggtagtgctttggattgatgcacatggtgatttcaacacaccggagacaacagaatcaggttacctcggtggtatggtacttgctgctgcctgcggcctctgggatagcgggcacggttctggtttacgtcctgaacaaattattctggttggtgcccgtgatatagatccacctgagcgtgaaattttgcaaaactttagagcacatggaacgagc

SEQ ID NO: 2153 - DNA, 10657 bp, Xenorhabdus sp.; identical to SEQ ID NO: 2152
  CDS (9420)..(10052)

SEQ ID NO: 2154 - DNA, 10657 bp, Xenorhabdus sp.; identical to SEQ ID NO: 2152
  CDS (10148)..(10657)

SEQ ID NO: 2155 - DNA, 10657 bp, Xenorhabdus sp.; identical to SEQ ID NO: 403
  CDS (9298)..(10092)

SEQ ID NO: 2156 - DNA, 10657 bp, Xenorhabdus sp.; identical to SEQ ID NO: 403
  CDS (6446)..(9259)

SEQ ID NO: 2157 - DNA, 10657 bp, Xenorhabdus sp.; identical to SEQ ID NO: 403
  CDS (4934)..(6247)

SEQ ID NO: 2158 - DNA, 10657 bp, Xenorhabdus sp.; identical to SEQ ID NO: 403
  CDS (3995)..(4687)

SEQ ID NO: 2159 - DNA, 10657 bp, Xenorhabdus sp.; identical to SEQ ID NO: 403
  CDS (1982)..(2812)

SEQ ID NO: 2160 - DNA, 12128 bp, Xenorhabdus sp.
  CDS (1011)..(1739)
cgcgggacgatacggtctagggtgtcagccagtgccgagaaatcaacatatttatcaagaacaagcagcggatcacctaattcatcgatttttcgacggtgatattcggatgcctgtttgtctttttttaaagcagaacgaggcggtatcatgatggcgctaccttgcagagaggtactgtgcctacattttactcaattttgtggctgtgaaaagtttttagaggttcccataagtgtaatatttgattaaattttattttttaaggcgattgttgtaaaagtgaaataatattcaccattatagctagatgttatttaaataattatttgaaattaataatgtgtctaaatatataagtaatgtgtttgaatttatggagtaatcgtatttctgatgaatcatctaatcatgattggactagattattcaatgtgttaagcatgaatttatgcccatatactctgttttcttagcaatatatgaggaatggatatcattataatctaatgtaaatggattttttaatgccgaataaaattattaatccaaaatatataataaaagttagttagcactctttattatgtcaagaaaataattacaattatatggttttatatttaatcataaagtaaaattataaataactttttactattgctgttaatattttaagctgactttttatatattggtatcacgttgtttttatttaagttacatttaaaataaattcgttttttataatcatcctaattattttcacattgttattatttgtttattattaataattttttttatgtttaccatatcagcgtctggtaattgacattaaaatttctaaaatacttaaagacttttacttaaaaactcgttatcttgtttagtatataaaacaaaaatcggctacaaggttggtttttaacctgatttaatacctttgttattgatatgctaaacattaattatggtaaggataaaaaagcatggattttctcagcaggtttttcagtataaataaccacattccggtagaaatatttggttatcaaccttcatatatcgaggctgttggtacaattgcaggtttattatgtatctggcttgcgagtcaggaaaaaattattaactatttatttggtttaattaatgtttccctatttgcagtgatcttttttcaaatccagctttatgccagtcttatgctacaaattttcttctttgctgcaaacatttatggttggtatgcctggagcagagtcgatgaacagcaacaaaaagaattaaagatccgctggcttagccccaaacagatgttcagtgtggctactgtttccctcctttttatcctgataatgacatttaatattgaccaaatatttggttatatggcaaaagtttctgttgttgctttacagggaatgggctttgggatcaccatgcctgacctgctgccagatgctttcccgttctgggattcggtaatgactgtattatcaatagtggctatgattctcatgacccgtaagcatgtagaaaattggctgctatgggtgattattaatgtgatcagcgttgccatttactacaagcaaggcgtattagcgatgtcgttgcagtatattattctgacagggattgctttgaacggtgctcgtctatggataaaagtagctaagaataatcatgaaacatcatctacagtgagtacttccactgaaaattcaaattaataactaacccggaacaggccataatgatttatggcctgttcgttgatattccatttatacatatcctctttctaattttcccttttataaaaagtctgcttatttactcacaaagattatttacagcacttcatctaacagttagattgagatcacaaaattattttaaacaactgtaaacacattaggtgaaaggtcgatgaattaccagaatgacgatgtaaagataagaaaaataacagaattattgccaccagttgcattgcttgaaaaattccctgcaacaaaagacactgctactaccgttcgtgaagctcgcgaagccattcataacattttaactggtgcagatgatcgtctattggtaataattggcccatgttcaattcatgacccaaaggctgcactggaatatgcagagcgtctgaataaattgcgccgcgaattgaaagcagatctggaaatcgtgatgcgggtttattttgaaaaaccgcgtactacaatcggttggaaagggttaatcaatgacccgaaaatggattgtagctttgatattaatgatggattacgcacagcacgcaaacttctgctcgatattaatgatattgggttgccggcagcaggtgaattccttgatatgattactcctcagtatctagccgaccttatgagctggggagcaataggagcacgtacaactgagtctcaggttcaccgtgagctggcatcagggttgtcctgtccggtgggttttaaaaacggtactgacggtacaataaaagtagcgattgatgccatcaatgctgccggttcatcacactgcttcctgtcagtaactaaatggggtcattccgccatcgttaatacgacgggaaatcaggattgccatattattctgcgtggcggaaaagagccaaactacagtgctgaacatgtcagcgcggtgaaagaaggcttattaaaagcagggctgaaaccgcaggtaatgattgatttcagccatgcaaatagtgcgaaacagttcaaaaggcagatggatgtaggggctgatgtttgtggtcagatctccgccggagagaatgcgattattggtgtgatggttgaaagccatctggttgaaggcaaccaaagtttggatgatgatgagccgctggtttatgggaaaagtgtaacagatgcctgtattggctgggatgatacagaaacgctattacagcagttgtctcaggctgtcagaactcgccgaggatgattttgtatgaaaaaagccggagtgatttccggctttttatattttactcaattacttcgctttaccctggtttgcgacagcagctgcttttgcagcaatttcatccgcattacccagataatagtgtttaattggcttcatattctcgtcgaactcataaaccagcggtacagcagttggaatatttaactcaagaatttcgtcttcgtccatattatccagatactttaccagtgcgcgcagagaattgccgtgagcagcgatgataactttttcaccgtttgcaacgcgaggtttaatgacttcttcccagtaaggaacaacacgttcgatagtcgttgccaggctttctgtgacaggaagttcttctggtttcaggtttgcatagcgagggtcatggccgggataacgttcatcatctttggtcagatcaggaggaatgatggcaaagccacgacgccacaatttaacctgatcatcaccatacttagccgcagtttctgctttatccagaccttgcagggcaccataatggcgttcattcagtttccagcttttttcaaccggtagccattgttgatcgacctgatccagaatattccacaaagtatgaatggcgcgttttaaaacagatgtgtaggcgaaatcaaaagcaaaaccttcctgtttcagcaattgaccagcctgttgtgcttcattgcgacctttatcagacagttcaacatcagtccagcccgtaaaacggttctctttgttccactcgctctcaccatgtcttacaagaaccagcttagttacagccatagcttaaactcctatcattactttttaatacaaaatgaaatgctcgctgcgggcattatatggcgcgatagacggaaacagcaaacaatagtcgatgaacttctgtcttaaatcatatatgaaaggagttgcagcctgactggctgcaacttgacatccattgtgtatagataggataacggaaattagctgatgatcgctttaatcggataagtgtaaaacagcagatgtaacacattaagggtaaaatggaatccgacagctacccataaacggccactccacatccacgctataccataaatcaggcctgccagtgttgcgaaggccattaatagtccaccgcctgcgaagtgggcggcaccaaatagcaaagaagtaatgatcagtgcaaaatagggattcatccactgactgagcttttgctgaatatagccacggaatagggcttcttctgccagtgatacaaataaaatattggcaacaacgaaggcaggaaaccagcttggcaggtggagttcaactgccaacccgccaagcgttgtagcaagccctaataatgctggtatcgctgcgattaaaaacgcccagccgtgagcaggagcattaaccactgggttacagcgtaataggcttggcatacagcacaataaaagaaaaggaaccagtgccttgtcaaaattgaagtacatggaaaaaggtgcgctgagtggcccaacctgtactttgtccagatatttcagattatgaaaaccgggaataaaatgtataaataacaaaatactaacgataaccaacatggcttcggtaatgcttttaccgataatatgccttttgctattgaaatagacatgcgccacacccaatacacttatcattaataatgagatgatcgcggggtaggccagtatatgagtgctgatcccaacagcgatagctaagaatgcaatgaaaaatgcgattttttggcgaatatctaacagtgccagcgaagcggcaagtaaagtccagcccatacaattctcggttcttttaaaaaaataggtaaacgatctgaaaaatagggcgggattttatagcaagagacaaaaaattcaaaaaaataataagaattatcaaaaaaatgtttatataacacgctacacttttatcccttttcagcatcagctcagacaggaattgatattttatggatttcaggccggcctccggtcagaggtggcctgaaacatgaagagtattagaaaatcacaaaagagggctaaaagtcagttcagtttcataacgataaatattgccatcaggaacaaatttcagtctatgagtgatgcattctggagcatcttcctgatgatgtgagacaaacagaagttgcgtatcgccatttttaatcatgatatcaatgaaacgcaggactaactgccggttgagtgaatcaagcccttgcaatggctcatcaagaattaacaaaaccgggtgtttcactaaggcgcgggcaattaatacaaggcgttgctgaccccatgacagactatgaaacggactgtttgcagttgtatcggataaacccaataatgccagccactcatctgccaattgtcgttgacgatcagaaacggcctgataaagcccgatggagtcgaagaaaccggaaagaataacattacggacgctggtactgacacgatattcaaggtgaatactattactgacataaccaatgtggcgtttaatatcccagatagtttctccactgcctcgctggcgaccaaataaaaccagctgattactgtaaccctgaggatgatcgccggtaatcaggctgagaagagtggattttcctgccccattctcgccaataatctgccagttttcaccgggattaacctgccagtttagtccatgtaatattggtttatcattgtattgaacaacaacatcatgcattgataccagcggttgatctgagggaaactgttcatcaattcggtattcatctgtttccggcagccgaatatgctttagcttttcactgtgcgctaattgtgcaaccagagattcagccaaaacgtgctttttttctccggatagcatcagctggcaatcggcgagtacaccaattctctcaacaaaatcagggatctggttaaacctgtttaacaggaaaatcagtgtgatacctttttcggccagtgttgctaatagatgggataactgagtgcgggcataagcatctaatccgtcaaaaggttcatcaaggataagaaggtctggatccgccattaatgcctgacaaagcaacacttttcgcacttcaccggtagaaagatacttgaaacggcgtgaaagcagatccttaatgccaaaatatgctgagagctcaaggcacaattcattatctttatggtggagctgaatgatttctgcggcagtgtgtccagtatcgtcctcatcctcactgagcaggtctgtattgttgcgttgccattctttatcaaccagttgctgaagttgctcgaaagagaggcgtacaggagtatgaaacgagcattgtatttcacccgtcagttgggttaattcattcgataaaacacaggccagagaagacttcccactgccattagaaccgacaaatgcccagttctccccagagatgatttttagtgacggtatcttcaggatacgggtgtcacttaaacggaaactaccttgcgatacttgcaattcagacatttttcttccttatttaagcaacatcaactaaaggatcacagaaataagcggaataatgttcaatgtcaatgagtagtcgtctgttattcgttatggatttatatttcgggatgggggaatattaattgttaggggagcattcggatgcccctgacggggcaaatatacccgtcgtcttttaagttatctctttgttggctgcactcgctcaccccagtcgccgtttttataaacatatagctatctatgctcaggggattaatgaaaggctcctgcctttcaccggaggcagcctttggctggctaaattcgttcccgacgaatttgttgctcctttgccgccgcgatgcaactcgaaatccatagggtatatatctaatttaatgctgcaataatcactttatcagcaccaaaaagagcggtgacagtatcactcggctgaaggcctaaactttctatttcctgattggataaagtagcgcagagagattcgccactactcagattcacgataatttcgctgcactgtgctcctgcctcaatctggctgatttggccggataactgattttcaaaaacggcggcgtttttgaaagagtcaatgtctccggaagaagtcgtgttgcaggaaacggtagctccttttcgtaaggtaatccacggtgctttaataagagcgatcacctcttttccttttatcaggcctaagcgttcagcactttgttctgttacagaagcgcggatagatgttttaccatcagccagcaggatacaaatattttgctgaatatttccattatcacgttcaacgactgtaccgaaaaattgatttctggcgctggactgtaaagaaaatcgcgaaatggctgccagcagactatccagaggcagtgaatcctgtttgagagcatcgaatgccttttgctgaatttgttccagcaggccgtaaagctgtatcagccgttcgccataaggagtcagttgagcgccaccgccgcctttgccgccggtcgctcttttaaccaatagctcatctgccagatggttcatctcattaatagcatcccaggcacttttataactgatgccagcctgtctggcaccctgactaatagagcccgtaatttttatctgcttcagcaattcaatccgccgaggatcggcaaaaacccgatgctgcaatttaagagttaataatatttcggcttgcatagtgattcatttcaggtaactatttgaaagtttttacagaataaccgtaagaatcgcacgtttcgtcggttactgttacctttttattgtctagaatagcgtaattgttgtctgtgcagtaaagcgttttgtttcattaccggacgcacattgcccgatggaaatgaagctgaatcaggcacagcttattggtcgattcgatgatagtcattcatgatatgaggtatacatgtttgaactgattaaaagtatagcgtttgaactggtcatggttcctgttgtcatggcagtcattcttggattgatttatgtgttgggtgaattgtttaaccttatctctaaaagtgaaacaaaaggtattgagcgctaattttggtttaatttgatcgccagcgcctctgcgattcttgttcctaaagaaatcatatcctgaaagcatattgttgataaaccctgttactttaaacagggtttatttttatcacggtataagttctatctgacgagtctctttccccagccaaatcacagcacctacagccaccagaattgaaaagccgaacagggaaaaaatcagggagatcgaagaattcatcgctaccagataaccgaccattaaagggccaatgatgccacctatccgcccgactgatgctgccatgccagcaccggttgcgcgaattgctgtcggatattgttctggcgtgtaggcgtagattgctccccaggcaccaagattgaaaaacgacagcaaaataccaaagataagcagctgggtaatactatcagccgtaccgaagaaataagcactgacagccgttccgattagatagctcgccagaacgaatttacgtccgtaacgttcaatcatccatgcggcagtaaagtaaccgggaagctgagccagcgtcatgattagtacatattggaaactttttatcagactaaaccccttcagcatcatgacgcttggtagccacaaaaacataccataataggaaaagactacgcagaaccacaaaatccacaacatgactgttgcccgacgataatcggccgaccatacttcccgtatattatgcataattgaattgaggggtttccgggagcgcatttgtgtatagcgtggcgaatcgggtaaatgcaaacgaaggtagatagcgtaaaaagcgggtagagcactcagcagcatggcaactcgccacccataacttggaataacaaagtaagcaatcaatgccgcggcaagccagccgaaggcccagaagctttccagtatcacaaccagacgcccgcgttcatggggctccacgctttcagacaccagtgttgacgcgacaggaagttctccgcctaaacccataccgataataaaacgcagaaccaataatgctgctaatgtggtcaccaatgccgttaagccactgcctacactaaacagcagtaatgtgacaataaaggctgattttcgtccggttttatcagccatcacgccaaagacaaaagcaccgacagccatgcctatcgaattaatactacctatccagcctaactgttctgagctcagtccccaatcctgtttcagggcggccagtaagaaggataagagaccgacatccagagcatcaaacatccagcccaggccagctattgtcagaagccgttttttggtgatgtctttttgtaatggggtggtttgtaacaaaagttagccttcatgtatgtaacatatcgaatgtttttcgctttaaaaatgcgccctgttccggcacatatcagcagttatattcaatgaattttgtgttgtattgcggccaacaaagaagcaacttaaaagatgaaaagtatataatacaacagggtatagcactgtatataacatcttttctccgtattactatattgacaatactgaagattatttgtgttttctgagtaatctttacatcaaattaatacaaaagctaaaactagctcacaacttgccgattattctcagaatagtattttcatttaacgttgtatcttgttatatacagcgcaccgttttggttatcataagtggaatacaacatgaaaaagcgcgtaataaagaatttctatcagttattggctggggctgtagtgccttttgctcttgttggcaacagttggtcagcggaaaaagtaactgtttttgctgctgcatcattgacgaatgcacttaacgatattgccgaacaatataaaaaagatactcgaggagaagttgttgcttcttacgcatcatcttcaacactggctcgtcagatagagcagggagcacccgcagatctgtttatttctgctgaccaacaatggatggattacatttcgggcaagaaactcattattgaagatactcgtcatactttgttggggaatcaactggttctgattgcgcctaaaaagagtaagctgaataaaatcgatatcaatcaggaaacaaaatggagttctttactggccggagggcatctggctgttggtgatcctgaccatgttcctgttggtatttatgccaaagaatccctgcaatctctgggagcatgggatttagttaatccgttgctggcccgaactaacaatgtgcgtagtggtatggctctggtcgagcgtgaagaagtgccactgggaattgtttatggatctgatgctgttgccagcaaaaaagtgaaagttgttggtgtattcccgcaaaagagtcataaaccggtggaatatccggttgcaattattaaaggtcatgaaaatcaggcggtacaggatttttatgattatcttaaaacccctgaagccgtagaaattttcacacgttacggttttaattcactgtaggaactgttcttttggagatgttaagtgaatatgaatggcaggcaattttactgagtctgaaagtctcagggattgcagtgctgttcagtttgccattagggattttgatggcatgggttctggcacgttgtcagtttttcgggaaatccctgctggatagtgttatccatttaccgctggtcttacccccggttgttgttggttatctgctgctaatgagtatggggcgtcgcggtatattcggggagtttctctatgactggttcggtgttagctttgcatttaactggacaggtgctgctctggcttcggctgttgtttcctttccgctcatggtcagggcaatccgtctggctctggaagcgatagatcttcgtctggaacaggcggcccacacgttaggagccagttcacttaaggtcttttttacgatcactttaccactttcattgccgggtattattgttggctctgtgctggcatttgcccgctcattgggtgaatttggcgcaaccatcacttttgtgtcaaatattcccggtgagactcgtaccattcctcttgccatgtatacattgattgaaatgcccggtgcagaaactgccgccgcacgtttatgtgtgatcgcagtaattttggctctggtgtcattactgctgtctgaatggctgacccgttggggaagaaaacgtctgggggcagcatgttagaattaaatttcgaacaacatctgggtgatctgcatatgcaggttgataccacattgccagcggaaagcattactgccatttttgggctttccggcgcaggaaaaacctcgctaattaatgccattgccggtttgacccggccacaaaaaggccgcattaccttaaacgaacgcattctggtagatacagagcacaaaatatttctgccaccggaaaaacgtcgaatcggctatgtgtttcaggatgcccggcttttccctcattatcgggtcaaaggaaatttgcaatatggcatgtcaccggacatgcaaccacattttggcaaaattgtagaattgcttggtattgagcatctgctatcacgtttcccaataaccttatctggtggagaaaaacagcgggttgcgattgggcgggcattattgacggggcctgaactcttgctgatggatgaacctatggcctcactggatctgccccgtaaacgtgagttattgccgtatctggaaaaattgtctgaagatattaaaattccgatcctgtatgtcagtcacaatctggatgagattatccatctggctgataacgtagttgttatggataaaggaaaaatcaggatgtcgggcacactggaagaagtgtggtcaaacagcatcctgcgtccgtggctgcaaaaggataacctgagcagtatattaactgtaacagtgatggagcatcatcagcgttaccatatgacagcagtggcggtggctgataaggctctctggttgccggaaattaatgtcacagaaggaactgatttgcgtatccgtattgatg

SEQ ID NO: 2161 - DNA, 12128 bp, Xenorhabdus sp.; identical to SEQ ID NO: 2160
  CDS (1939)..(2991)

SEQ ID NO: 2162 - DNA, 12128 bp, Xenorhabdus sp.; identical to SEQ ID NO: 2160
  CDS (8009)..(8110)

SEQ ID NO: 2163 - DNA, 12128 bp, Xenorhabdus sp.; identical to SEQ ID NO: 2160
  CDS (9832)..(10596)

SEQ ID NO: 2164 - DNA, 12128 bp, Xenorhabdus sp.; identical to SEQ ID NO: 2160
  CDS (10614)..(11306)

SEQ ID NO: 2165 - DNA, 12128 bp, Xenorhabdus sp.; identical to SEQ ID NO: 2160
  CDS (11300)..(12127)

SEQ ID NO: 2166 - DNA, 12128 bp, Xenorhabdus sp.
  CDS (11977)..(12126)
catcaatacggatacgcaaatcagttccttctgtgacattaatttccggcaaccagagagccttatcagccaccgccactgctgtcatatggtaacgctgatgatgctccatcactgttacagttaatatactgctcaggttatccttttgcagccacggacgcaggatgctgtttgaccacacttcttccagtgtgcccgacatcctgatttttcctttatccataacaactacgttatcagccagatggataatctcatccagattgtgactgacatacaggatcggaattttaatatcttcagacaatttttccagatacggcaataactcacgtttacggggcagatccagtgaggccataggttcatccatcagcaagagttcaggccccgtcaataatgcccgcccaatcgcaacccgctgtttttctccaccagataaggttattgggaaacgtgatagcagatgctcaataccaagcaattctacaattttgccaaaatgtggttgcatgtccggtgacatgccatattgcaaatttcctttgacccgataatgagggaaaagccgggcatcctgaaacacatagccgattcgacgtttttccggtggcagaaatattttgtgctctgtatctaccagaatgcgttcgtttaaggtaatgcggcctttttgtggccgggtcaaaccggcaatggcattaattagcgaggtttttcctgcgccggaaagcccaaaaatggcagtaatgctttccgctggcaatgtggtatcaacctgcatatgcagatcacccagatgttgttcgaaatttaattctaacatgctgcccccagacgttttcttccccaacgggtcagccattcagacagcagtaatgacaccagagccaaaattactgcgatcacacataaacgtgcggcggcagtttctgcaccgggcatttcaatcaatgtatacatggcaagaggaatggtacgagtctcaccgggaatatttgacacaaaagtgatggttgcgccaaattcacccaatgagcgggcaaatgccagcacagagccaacaataatacccggcaatgaaagtggtaaagtgatcgtaaaaaagaccttaagtgaactggctcctaacgtgtgggccgcctgttccagacgaagatctatcgcttccagagccagacggattgccctgaccatgagcggaaaggaaacaacagccgaagccagagcagcacctgtccagttaaatgcaaagctaacaccgaaccagtcatagagaaactccccgaatataccgcgacgccccatactcattagcagcagataaccaacaacaaccgggggtaagaccagcggtaaatggataacactatccagcagggatttcccgaaaaactgacaacgtgccagaacccatgccatcaaaatccctaatggcaaactgaacagcactgcaatccctgagactttcagactcagtaaaattgcctgccattcatattcacttaacatctccaaaagaacagttcctacagtgaattaaaaccgtaacgtgtgaaaatttctacggcttcaggggttttaagataatcataaaaatcctgtaccgcctgattttcatgacctttaataattgcaaccggatattccaccggtttatgactcttttgcgggaatacaccaacaactttcacttttttgctggcaacagcatcagatccataaacaattcccagtggcacttcttcacgctcgaccagagccataccactacgcacattgttagttcgggccagcaacggattaactaaatcccatgctcccagagattgcagggattctttggcataaataccaacaggaacatggtcaggatcaccaacagccagatgccctccggccagtaaagaactccattttgtttcctgattgatatcgattttattcagcttactctttttaggcgcaatcagaaccagttgattccccaacaaagtatgacgagtatcttcaataatgagtttcttgcccgaaatgtaatccatccattgttggtcagcagaaataaacagatctgcgggtgctccctgctctatctgacgagccagtgttgaagatgatgcgtaagaagcaacaacttctcctcgagtatcttttttatattgttcggcaatatcgttaagtgcattcgtcaatgatgcagcagcaaaaacagttactttttccgctgaccaactgttgccaacaagagcaaaaggcactacagccccagccaataactgatagaaattctttattacgcgctttttcatgttgtattccacttatgataaccaaaacggtgcgctgtatataacaagatacaacgttaaatgaaaatactattctgagaataatcggcaagttgtgagctagttttagcttttgtattaatttgatgtaaagattactcagaaaacacaaataatcttcagtattgtcaatatagtaatacggagaaaagatgttatatacagtgctataccctgttgtattatatacttttcatcttttaagttgcttctttgttggccgcaatacaacacaaaattcattgaatataactgctgatatgtgccggaacagggcgcatttttaaagcgaaaaacattcgatatgttacatacatgaaggctaacttttgttacaaaccaccccattacaaaaagacatcaccaaaaaacggcttctgacaatagctggcctgggctggatgtttgatgctctggatgtcggtctcttatccttcttactggccgccctgaaacaggattggggactgagctcagaacagttaggctggataggtagtattaattcgataggcatggctgtcggtgcttttgtctttggcgtgatggctgataaaaccggacgaaaatcagcctttattgtcacattactgctgtttagtgtaggcagtggcttaacggcattggtgaccacattagcagcattattggttctgcgttttattatcggtatgggtttaggcggagaacttcctgtcgcgtcaacactggtgtctgaaagcgtggagccccatgaacgcgggcgtctggttgtgatactggaaagcttctgggccttcggctggcttgccgcggcattgattgcttactttgttattccaagttatgggtggcgagttgccatgctgctgagtgctctacccgctttttacgctatctaccttcgtttgcatttacccgattcgccacgctatacacaaatgcgctcccggaaacccctcaattcaattatgcataatatacgggaagtatggtcggccgattatcgtcgggcaacagtcatgttgtggattttgtggttctgcgtagtcttttcctattatggtatgtttttgtggctaccaagcgtcatgatgctgaaggggtttagtctgataaaaagtttccaatatgtactaatcatgacgctggctcagcttcccggttactttactgccgcatggatgattgaacgttacggacgtaaattcgttctggcgagctatctaatcggaacggctgtcagtgcttatttcttcggtacggctgatagtattacccagctgcttatctttggtattttgctgtcgtttttcaatcttggtgcctggggagcaatctacgcctacacgccagaacaatatccgacagcaattcgcgcaaccggtgctggcatggcagcatcagtcgggcggataggtggcatcattggccctttaatggtcggttatctggtagcgatgaattcttcgatctccctgattttttccctgttcggcttttcaattctggtggctgtaggtgctgtgatttggctggggaaagagactcgtcagatagaacttataccgtgataaaaataaaccctgtttaaagtaacagggtttatcaacaatatgctttcaggatatgatttctttaggaacaagaatcgcagaggcgctggcgatcaaattaaaccaaaattagcgctcaataccttttgtttcacttttagagataaggttaaacaattcacccaacacataaatcaatccaagaatgactgccatgacaacaggaaccatgaccagttcaaacgctatacttttaatcagttcaaacatgtatacctcatatcatgaatgactatcatcgaatcgaccaataagctgtgcctgattcagcttcatttccatcgggcaatgtgcgtccggtaatgaaacaaaacgctttactgcacagacaacaattacgctattctagacaataaaaaggtaacagtaaccgacgaaacgtgcgattcttacggttattctgtaaaaactttcaaatagttacctgaaatgaatcactatgcaagccgaaatattattaactcttaaattgcagcatcgggtttttgccgatcctcggcggattgaattgctgaagcagataaaaattacgggctctattagtcagggtgccagacaggctggcatcagttataaaagtgcctgggatgctattaatgagatgaaccatctggcagatgagctattggttaaaagagcgaccggcggcaaaggcggcggtggcgctcaactgactccttatggcgaacggctgatacagctttacggcctgctggaacaaattcagcaaaaggcattcgatgctctcaaacaggattcactgcctctggatagtctgctggcagccatttcgcgattttctttacagtccagcgccagaaatcaatttttcggtacagtcgttgaacgtgataatggaaatattcagcaaaatatttgtatcctgctggctgatggtaaaacatctatccgcgcttctgtaacagaacaaagtgctgaacgcttaggcctgataaaaggaaaagaggtgatcgctcttattaaagcaccgtggattaccttacgaaaaggagctaccgtttcctgcaacacgacttcttccggagacattgactctttcaaaaacgccgccgtttttgaaaatcagttatccggccaaatcagccagattgaggcaggagcacagtgcagcgaaattatcgtgaatctgagtagtggcgaatctctctgcgctactttatccaatcaggaaatagaaagtttaggccttcagccgagtgatactgtcaccgctctttttggtgctgataaagtgattattgcagcattaaattagatatataccctatggatttcgagttgcatcgcggcggcaaaggagcaacaaattcgtcgggaacgaatttagccagccaaaggctgcctccggtgaaaggcaggagcctttcattaatcccctgagcatagatagctatatgtttataaaaacggcgactggggtgagcgagtgcagccaacaaagagataacttaaaagacgacgggtatatttgccccgtcaggggcatccgaatgctcccctaacaattaatattcccccatcccgaaatataaatccataacgaataacagacgactactcattgacattgaacattattccgcttatttctgtgatcctttagttgatgttgcttaaataaggaagaaaaatgtctgaattgcaagtatcgcaaggtagtttccgtttaagtgacacccgtatcctgaagataccgtcactaaaaatcatctctggggagaactgggcatttgtcggttctaatggcagtgggaagtcttctctggcctgtgttttatcgaatgaattaacccaactgacgggtgaaatacaatgctcgtttcatactcctgtacgcctctctttcgagcaacttcagcaactggttgataaagaatggcaacgcaacaatacagacctgctcagtgaggatgaggacgatactggacacactgccgcagaaatcattcagctccaccataaagataatgaattgtgccttgagctctcagcatattttggcattaaggatctgctttcacgccgtttcaagtatctttctaccggtgaagtgcgaaaagtgttgctttgtcaggcattaatggcggatccagaccttcttatccttgatgaaccttttgacggattagatgcttatgcccgcactcagttatcccatctattagcaacactggccgaaaaaggtatcacactgattttcctgttaaacaggtttaaccagatccctgattttgttgagagaattggtgtactcgccgattgccagctgatgctatccggagaaaaaaagcacgttttggctgaatctctggttgcacaattagcgcacagtgaaaagctaaagcatattcggctgccggaaacagatgaataccgaattgatgaacagtttccctcagatcaaccgctggtatcaatgcatgatgttgttgttcaatacaatgataaaccaatattacatggactaaactggcaggttaatcccggtgaaaactggcagattattggcgagaatggggcaggaaaatccactcttctcagcctgattaccggcgatcatcctcagggttacagtaatcagctggttttatttggtcgccagcgaggcagtggagaaactatctgggatattaaacgccacattggttatgtcagtaatagtattcaccttgaatatcgtgtcagtaccagcgtccgtaatgttattctttccggtttcttcgactccatcgggctttatcaggccgtttctgatcgtcaacgacaattggcagatgagtggctggcattattgggtttatccgatacaactgcaaacagtccgtttcatagtctgtcatggggtcagcaacgccttgtattaattgcccgcgccttagtgaaacacccggttttgttaattcttgatgagccattgcaagggcttgattcactcaaccggcagttagtcctgcgtttcattgatatcatgattaaaaatggcgatacgcaacttctgtttgtctcacatcatcaggaagatgctccagaatgcatcactcatagactgaaatttgttcctgatggcaatatttatcgttatgaaactgaactgacttttagccctcttttgtgattttctaatactcttcatgtttcaggccacctctgaccggaggccggcctgaaatccataaaatatcaattcctgtctgagctgatgctgaaaagggataaaagtgtagcgtgttatataaacatttttttgataattcttattatttttttgaattttttgtctcttgctataaaatcccgccctatttttcagatcgtttacctatttttttaaaagaaccgagaattgtatgggctggactttacttgccgcttcgctggcactgttagatattcgccaaaaaatcgcatttttcattgcattcttagctatcgctgttgggatcagcactcatatactggcctaccccgcgatcatctcattattaatgataagtgtattgggtgtggcgcatgtctatttcaatagcaaaaggcatattatcggtaaaagcattaccgaagccatgttggttatcgttagtattttgttatttatacattttattcccggttttcataatctgaaatatctggacaaagtacaggttgggccactcagcgcacctttttccatgtacttcaattttgacaaggcactggttccttttcttttattgtgctgtatgccaagcctattacgctgtaacccagtggttaatgctcctgctcacggctgggcgtttttaatcgcagcgataccagcattattagggcttgctacaacgcttggcgggttggcagttgaactccacctgccaagctggtttcctgccttcgttgttgccaatattttatttgtatcactggcagaagaagccctattccgtggctatattcagcaaaagctcagtcagtggatgaatccctattttgcactgatcattacttctttgctatttggtgccgcccacttcgcaggcggtggactattaatggccttcgcaacactggcaggcctgatttatggtatagcgtggatgtggagtggccgtttatgggtagctgtcggattccattttacccttaatgtgttacatctgctgttttacacttatccgattaaagcgatcatcagctaatttccgttatcctatctatacacaatggatgtcaagttgcagccagtcaggctgcaactcctttcatatatgatttaagacagaagttcatcgactattgtttgctgtttccgtctatcgcgccatataatgcccgcagcgagcatttcattttgtattaaaaagtaatgataggagtttaagctatggctgtaactaagctggttcttgtaagacatggtgagagcgagtggaacaaagagaaccgttttacgggctggactgatgttgaactgtctgataaaggtcgcaatgaagcacaacaggctggtcaattgctgaaacaggaaggttttgcttttgatttcgcctacacatctgttttaaaacgcgccattcatactttgtggaatattctggatcaggtcgatcaacaatggctaccggttgaaaaaagctggaaactgaatgaacgccattatggtgccctgcaaggtctggataaagcagaaactgcggctaagtatggtgatgatcaggttaaattgtggcgtcgtggctttgccatcattcctcctgatctgaccaaagatgatgaacgttatcccggccatgaccctcgctatgcaaacctgaaaccagaagaacttcctgtcacagaaagcctggcaacgactatcgaacgtgttgttccttactgggaagaagtcattaaacctcgcgttgcaaacggtgaaaaagttatcatcgctgctcacggcaattctctgcgcgcactggtaaagtatctggataatatggacgaagacgaaattcttgagttaaatattccaactgctgtaccgctggtttatgagttcgacgagaatatgaagccaattaaacactattatctgggtaatgcggatgaaattgctgcaaaagcagctgctgtcgcaaaccagggtaaagcgaagtaattgagtaaaatataaaaagccggaaatcactccggcttttttcatacaaaatcatcctcggcgagttctgacagcctgagacaactgctgtaatagcgtttctgtatcatcccagccaatacaggcatctgttacacttttcccataaaccagcggctcatcatcatccaaactttggttgccttcaaccagatggctttcaaccatcacaccaataatcgcattctctccggcggagatctgaccacaaacatcagcccctacatccatctgccttttgaactgtttcgcactatttgcatggctgaaatcaatcattacctgcggtttcagccctgcttttaataagccttctttcaccgcgctgacatgttcagcactgtagtttggctcttttccgccacgcagaataatatggcaatcctgatttcccgtcgtattaacgatggcggaatgaccccatttagttactgacaggaagcagtgtgatgaaccggcagcattgatggcatcaatcgctacttttattgtaccgtcagtaccgtttttaaaacccaccggacaggacaaccctgatgccagctcacggtgaacctgagactcagttgtacgtgctcctattgctccccagctcataaggtcggctagatactgaggagtaatcatatcaaggaattcacctgctgccggcaacccaatatcattaatatcgagcagaagtttgcgtgctgtgcgtaatccatcattaatatcaaagctacaatccattttcgggtcattgattaaccctttccaaccgattgtagtacgcggtttttcaaaataaacccgcatcacgatttccagatctgctttcaattcgcggcgcaatttattcagacgctctgcatattccagtgcagcctttgggtcatgaattgaacatgggccaattattaccaatagacgatcatctgcaccagttaaaatgttatgaatggcttcgcgagcttcacgaacggtagtagcagtgtcttttgttgcagggaatttttcaagcaatgcaactggtggcaataattctgttatttttcttatctttacatcgtcattctggtaattcatcgacctttcacctaatgtgtttacagttgtttaaaataattttgtgatctcaatctaactgttagatgaagtgctgtaaataatctttgtgagtaaataagcagactttttataaaagggaaaattagaaagaggatatgtataaatggaatatcaacgaacaggccataaatcattatggcctgttccgggttagttattaatttgaattttcagtggaagtactcactgtagatgatgtttcatgattattcttagctacttttatccatagacgagcaccgttcaaagcaatccctgtcagaataatatactgcaacgacatcgctaatacgccttgcttgtagtaaatggcaacgctgatcacattaataatcacccatagcagccaattttctacatgcttacgggtcatgagaatcatagccactattgataatacagtcattaccgaatcccagaacgggaaagcatctggcagcaggtcaggcatggtgatcccaaagcccattccctgtaaagcaacaacagaaacttttgccatataaccaaatatttggtcaatattaaatgtcattatcaggataaaaaggagggaaacagtagccacactgaacatctgtttggggctaagccagcggatctttaattctttttgttgctgttcatcgactctgctccaggcataccaaccataaatgtttgcagcaaagaagaaaatttgtagcataagactggcataaagctggatttgaaaaaagatcactgcaaatagggaaacattaattaaaccaaataaatagttaataattttttcctgactcgcaagccagatacataataaacctgcaattgtaccaacagcctcgatatatgaaggttgataaccaaatatttctaccggaatgtggttatttatactgaaaaacctgctgagaaaatccatgcttttttatccttaccataattaatgtttagcatatcaataacaaaggtattaaatcaggttaaaaaccaaccttgtagccgatttttgttttatatactaaacaagataacgagtttttaagtaaaagtctttaagtattttagaaattttaatgtcaattaccagacgctgatatggtaaacataaaaaaaattattaataataaacaaataataacaatgtgaaaataattaggatgattataaaaaacgaatttattttaaatgtaacttaaataaaaacaacgtgataccaatatataaaaagtcagcttaaaatattaacagcaatagtaaaaagttatttataattttactttatgattaaatataaaaccatataattgtaattattttcttgacataataaagagtgctaactaacttttattatatattttggattaataattttattcggcattaaaaaatccatttacattagattataatgatatccattcctcatatattgctaagaaaacagagtatatgggcataaattcatgcttaacacattgaataatctagtccaatcatgattagatgattcatcagaaatacgattactccataaattcaaacacattacttatatatttagacacattattaatttcaaataattatttaaataacatctagctataatggtgaatattatttcacttttacaacaatcgccttaaaaaataaaatttaatcaaatattacacttatgggaacctctaaaaacttttcacagccacaaaattgagtaaaatgtaggcacagtacctctctgcaaggtagcgccatcatgataccgcctcgttctgctttaaaaaaagacaaacaggcatccgaatatcaccgtcgaaaaatcgatgaattaggtgatccgctgcttgttcttgataaatatgttgatttctcggcactggctgacaccctagaccgtatcgtcccgcg

SEQ ID NO: 2167 - DNA, 12128 bp, Xenorhabdus sp.; identical to SEQ ID NO: 2166
  CDS (8334)..(9086)

SEQ ID NO: 2168 - DNA, 12128 bp, Xenorhabdus sp.; identical to SEQ ID NO: 2166
  CDS (7318)..(8148)

SEQ ID NO: 2169 - DNA, 12128 bp, Xenorhabdus sp.; identical to SEQ ID NO: 2166
  CDS (5601)..(7085)

SEQ ID NO: 2170 - DNA, 12128 bp, Xenorhabdus sp.; identical to SEQ ID NO: 2166
  CDS (4389)..(5225)

SEQ ID NO: 2171 - DNA, 12128 bp, Xenorhabdus sp.; identical to SEQ ID NO: 2166
  CDS (2705)..(3907)

SEQ ID NO: 2172 - DNA, 11888 bp, Xenorhabdus sp.; identical to SEQ ID NO: 469
  CDS (21)..(1586)

SEQ ID NO: 2173 - DNA, 11888 bp, Xenorhabdus sp.; identical to SEQ ID NO: 469
  CDS (1600)..(2070)

SEQ ID NO: 2174 - DNA, 11888 bp, Xenorhabdus sp.; identical to SEQ ID NO: 469
  CDS (2226)..(3017)

SEQ ID NO: 2175 - DNA, 11888 bp, Xenorhabdus sp.; identical to SEQ ID NO: 469
  CDS (3122)..(3979)

SEQ ID NO: 2176 - DNA, 11888 bp, Xenorhabdus sp.; identical to SEQ ID NO: 469
  CDS (4252)..(5139)

SEQ ID NO: 2177 - DNA, 11888 bp, Xenorhabdus sp.; identical to SEQ ID NO: 469
  CDS (10713)..(11192)

SEQ ID NO: 2178 - DNA, 11888 bp, Xenorhabdus sp.; identical to SEQ ID NO: 469
  CDS (11535)..(11888)

SEQ ID NO: 2179 - DNA, 11888 bp, Xenorhabdus sp.
  CDS (5356)..(6528)
aaatacgatttctccacttggggaggtgatgtcacaggcgtggtccgggtgcatgtgtgtcagtaatattgctttaaccgattctggctgataaccagcggcacggatattatctacaatatttcccgcagtagggccaaagcaattgctgctacccgcatcaatcaataccaaaccttctttggtgttgacaaggtaggcagtgatcgcggtttgaacaccctctttattttcaatctggaacatccgtgtaatcagatttttgatactgttgatatcaagtcctttcaataaagaaggagaaagatcaacatacccatcataaacagcggtcaccattacatcaccgagcatatggtggtaataaccgggtgcctgatttacaggttgctcagcaggtttagccaatgcggtggggatagtaaatgttgtgatgatacctgttagtgctaatgtcatcgcgagatatgatttttttaaaatatttttcatattgtgctccgaagaaatttaacggaataaaatggtattaatttatgcaattttaaaattatttcaggaaaatagagtaggcagagaaaataaaattctgataattaattacagaggatgatataaaataaaaaaataaataacatgtgtttattgagtcaaaaatatatcttccattattaaaaaagataatttttcgataagttattttttacgtccgtcatattcttgttcaaacattcttgctcctgttcccgtttctcccagaatatcatttgggttgcgcaacgggcattctgtcagggaaagacatccacagccaatgcaactatccagatagtcgcgtagatgggtcaattttgttatacgctgttccaacgtatcacgccattgtgaggaaagtatgcgccattgttcggctgtcagtttactgttaggagggaattggctaaggactttctgtatttccttcaagggaatgccagtgctttgtgcgactttgataattgcgatgtaacgtagtacaacagcgggaaagcggcgttgatttcctgagttacgtgaactttttattaaccctttcgattcataaaaatgcagtgttgatattgccactccactacgttttgccacttctccaaccgttaatgccctattaatatcaatatgtttatttttttccatttctattgacctcaggttaactagaggttttatagtgacatttgatttttttgtcaaatttaaaaaggttgtattgttattccatattttgaaaagggttgtattttttattttcatttcatctgtgcttatcagcatcatttgttttttacttcaatatatgactgttattgaaaaataacggatataaacagaatatttatcgacaggagccattatggtcagctaaattctacctaagtcatcttcctttttcccagtgccttcaaccagtcttccattggcacttatttctcttaatgactggggattggttactgttaccggtatggatagccggaaatatcttcaggggcaactgactgccgatatcaatattctggctgaaaaccagcatgtactgacggctcactgtgatgccaaaggaaaaatgtggagtagtctgaggttatttcatcgtgatgaagggtatgcctatattgagcgtcgcagtgtaattgagatacaggttgctgaattaaagaaatatgcggtgttctctaaagttatggtggctgaggaaacgaaaagtctgatattgggggttgcgggtgaaaattgccgggctgcattggcagtatttttccctgttttgccagatgtgaataatacggttattcagcatggtgctactacgctactttatttttcatcgccgcaggagagatttttattaatcacagatactgtgatggccgcagagttaatggaaaaatttccggcacagctaagtaatagtgaacagtggctggcattagatatagaagccggttttccagtgattgaggctgctgtcagcgcacagctcgttcctcaggcagtgaatctccacaatattgaaggcggtattagttttgaaaaagggatgtacatggggctggcgactattgcccgtaccaaataccgtggtgttaacaagcgggccatgtattggctggccggtgattccagttatcttccggaggtcgggagtgaattagaatggcagttgggttcccgctggcgtaaaaccggaatgatcctctcttccctcagattggcagatggcaccgtttgggttcaggcagtactgggtaatgagatggaggctggcagtatattccgtttgccgggagatgacggttttttgcttacccttaaaaattagctaatttttaagggctttcgaatgtctcaaatttcaaaatcaagccaggtaggaatatttttattacctgcaacgacgctgtttttaattttatccagcgataaatcagggttacacaggagtatgaattcccagagatagtcacgttgtaactggccatgtttaactgccatccagaccgtgttgggggagaaaaggtgacgggccttgagtgtgactagatctggatcgagattatgctggctggcagtttcagcaactattccgattcccagccccagttttacgtaggttttgactacgtcagagtcctgcgcactgaggacgatatccgggttgagccgcgcatgatgaaatgctttatcaatctgagaacgcccggcaataccgtatcggtaagtgactaatgggtaagttgccagttgttccagtgtaatatcagggttccagaccagttcatgttccgcaggaaccagtaaagagtgatgccagtcaaaccaggggaatgcagtaatattgctattctgggtcagcatttctgatgcaataccaatatctgcctcaccgttaagtaacattttcatgatttctgtgggcgaaccctgattaagtaccagccggatccctgggtagatttcacggaatacttttatcacttggggaaggctataacaggcttgggtatgggtagtggcaatggtcagtactccctgatgctgcccggtaaagtgttcagctaatcgctgagccttgtcagcatcattaagtatgcggcgtgcgatggtcagcatctctttgcccggctctgtcagcccaaggaaccgcttaccatgacgaatgaataactcaacacctaattcttcttccaactcgcgaatatgacggctaatgcctgattgtgatgtatagagcacttttgccacttccgtcaggttaaaatggcagcgttctgcttcacggataattcttagctgttgaaagttcattgcaccaaggttgtcagaaaaatatttcgtcaatatagaaatatattctctggctagtaaatattttaattataaaagttattcttttaagtaataaataaattgtgaatcatgaaccaatcgtaatatacctggtcgcgcattacacgctgtgtgttgcgttctattgccactttttagatttacaaagtaaaaatatttatttctcttcatttgcttcgagatttaaaaatgaaataactgattctaatcctggctgcataagtggggtttctatgcgtattttctttttaggtggtaaccggacatcgttatttaagtctcgtttcctgccttggttgctaccgggattacttgttgtgtgctggcaagttgctggttatgaaggctggctatcggatcgtatactgcccccacctgaaaaggtactgcaagcaggatggacgttactgcaaaacggggaactctggagcaatctttatatcagtacctggcgtgctttgagtgggtttgccattggtggcacctgtggactcgcattgggggtgataacggggttgtcaaaaaccggggaacgcttgctggatagcacggttcagatgttgcgtaatgttccgcatttggcactgatcccactggttattttgtggtttggtattgatgagcgtgccaaaatatttttagtttctctggggactttcttccctatctaccttaatacctctcatgggatccgccatcttgatcggggattaattgagatggctcgtaactatgggcttaatggctggcgtttgttctggcaggttattttgccgggagcaatgccttcgatcctcgttggtgtccgtttttcactcggcttaatgtggctgaccctgattgttgctgaaactatttctgctgacgccggaataggttatctggcgatgaatgcccgtgagtttttgcagacagatatcgtggtattggcgattattctgtacgcgctgctgggtaaactggctgatatggtggcatacgggcttgaagtctggttattgcgttggcatccgtcatggcagacaggaggaagaaactcatgaagcatctgtcgttagttcagcaagggttaagcctcactctggagggtgtcagcaaacagtttggtgagcgtgaaatccttaaatccctcaatttatccatccaaaaaggccagtttgtggctattgtcggacgtagtggttgtggcaaaagcacgttactacgcttactggcggggctggaatctgtttccgcaggtagtctgagtgctgacggtgatcccctgagtgcatctgagagtgaagtacggatgatgtttcaggatgcgcgtctgcttccctggaaaaaagtgattgataacgttgggctgggtcttagcggtaactggaaaccggaagcactggcagtactggaagctgtgggtctggctgacagagcgaatgactggccttcggcattgtcgggaggacaaaagcagcgtgtggcattggctcgcgctctgattcaccgcccccgtttattattgcttgatgagccgtttggcgcactggatgctctgacccgtctggaaatgcagcagttgttaacgcgactctggcagcagtatggatttaccgtcattttagtgactcatgatgttcatgaagccgttctgatcgcagatcggatcttactgatagagcagggggagatcggtatggatctggaggtcccacttggacgtcccagaacaattacgatgccgacattatcagctttagaagcccaggttcttgaggcgattatggcaccgggtgagcaggggaagcatgatcgaaattctgattggctgcattccggtaaaatggataatcctgaaagtgctgccagataatcaggcatcgtaatcattacgagcaatcatctaaaagaaaaataaatacaaatctgtccgcgacactatctatcaaggaaaacacaatgacagtttatggcaatagtgacattaatctcttctggttcttacctacccacggtgaggggcgctatttaggtactgccaaaggtgggcgtgctgttgatcttccttacctgcaacaaattgctctggctgttgatagccttggttatcacggtgttctgatcccaaccggaagaggttgcgaagatccgtggctggtggcttctgctctggtacctgtcacccgtaatctgcgttttctggtcgcggtacgaccgggattacagccaccttcacttgctgcaaggatgacggccacgctggacaggctttctgaggggcgggttcttattaatgtcgtaaccggcggtgatccggtggaaaataaaggtgatggtattttccttagccatgctgaccgttatcagctgacccgtgagtttcttgatatttattcccgtatgctggcaggtgaaaaagtagattatcaggggaaacatttacaggtagaaggggcagaattattgtttccgcctatccagaaaaatggccctccgctctattttggtggttcttctgaagatgcgcttgatgtggcagcacagcaggttgatacctatctgacctggggagagccacctgaactggttgcgcagaaactacaacaggttcgtgagcgcgcagagaagcagggccggactctggaatatggtattcgtctgcatgttattgtccgtgagacagaagaggaagcatgggctgctgctgatcgcctgattgctcatttggatgatgagactattgctcaggctcagaaaatcttttcccggatggattctgccggacaggcacggatgaattcacttcatcaggggtcaagggataatttacagattgcgccgaacctatgggctggtgtgggtctggttcgtggtggtgccggaacggcattggtcggaaaccctggacaggtagctgaacgtatccgcgaatatcaggcattggggatcagtaattttattttctccggctatcctcacctcgaagaagcacatcggtttgccgaattggtcatgccattgctgaaaacagattcagcgcaggtaaacaaggcgaattcaacgatccgttctgccaaagcaggcgcttttggtgaaagcattggtggcgctgagcggccagtcacagaggaacctcagaaagagtatgctgaataaaagtgctcgctcgtggataagcaagattatcaagcatgaagactgaaagggataattcaggcatccgttgccgctccctgtgtagggagcattggcaaacgtaaaatgaggttatcaatcggtgtggttatggattcgtagcacgaatagtgatgatggctatatcggatctattagggttacttgtcagggatgacttcagaccccaatcagacggtcaattatggtgtattgaccggtatattatctaaagaccagcttgcactacggacatttatttttacaggcaataatctgagacgggtaaaggtatcagcaagaacctgttgctggttaaaaacagtcggtgtcatccgctcagccccataagtaaaacgtgcaagcgtccgttgccagatagctttatcaagtttcgtggcgttagcaagaatggtagctgcttcgtcaggatgctgatttgcccagtcactgagaacaactaattcctgaatgattttttccgctgtttgcggataagtatcaacaaatttacggctggcaagatagaacgtgtaatgaggcacaagcccttcaccattagttatctggcgtgctccggtattgatttcgacttcggacaggaaaggatcccaggtagcccaggcatcaatggctcctcgctggaaagctgcgcgggcatcggcagggggtaagtaaaccggctttatatccttatagctcaatccggctttttccagcgcagcggcaagcagatagtgcacatcagaacccttattcagcgcaacgcgcttacctttcagatcctgaatagttttaatggcagagtctttcggaaccacaatggcttcagttttcgggtgagcaggggcgtaggcgagataaactaaatctgctcttgccgcctgagcaaaaacagggggaacatcaccggttgatgccaaatcgatactgccaacattaagcccttccagcatttgtggcccggcaggaaattctacccaacgtaccttgataccttctttttctaatgcgttatccagagttcctcgggattttagcaacgtaaaaatattcgatttttgataaccaatagtaatttgctgaggttgtatagccagtgcattgccagaaagggcgagtaatagcagtaaactgccaaagcgtaatttgtgtgccatgcttgattttccttgttaaccggatgcattgataaagacggggataacggtatagaaagataacaaagctggtttatgaatattaaataataaaattgcgtttactagtgctgattttggataacgaccagtcagacagctattttcatatgaggatgtggatcgtgtcggggcgactgctgacacacatcctcgaagcaagatcaagcggttaaatcaacctgctgattatcaatcaagcgtgttttgcctaaccatgctgccatcaggatcactgcttttttactttgtggcgttaagggttccagattttctgcgtcacggataaacagttcatccggtacaaaaccttcttcacgtagatccgtggagactatctcgagcaggtgttcaatattccgctcgccacttttcagtttttcggcggcgcgctgcataatctggtttaattgcggcgctatttttttctcttctgtagagagaaggctgttgcgtgagcttaaggccagtccctttttatcacggacaataggcacagaaaccagagtgatatcataagccatgtcagtgatcattttgcggataatttgtaactgctgaaaatctttttcaccgaaataggccagatccggctgagtcaggttgaacagtttgctgacaaccgtggtgactccccggaaatgccccggacggctggcaccttcaagcatatgagaaagttcagggacttcaacaaaagtctggctgccattcaggccatgcggatatatttcgttagcattgggggcaaacactatatcgacatgacgacggctcagtttttcgcaatcttcctgtagggtacgcggataattgactaagtcatcttcgcgatcaaattgcatcggattaacaaaaatactcacaattaccacatcagcctgagccttggcggtatcaaccagagccatgtgaccatcatgcagattacccattgtagggacaaaggcaattcgttttcctgcctgacgccaacggcgaatttcacggcgtaaaatggggattgtttctatgatcagcattgctctactcctttaattagcagtcataattagcaatcatgctgggttatactcgttatttttctgaaaacttagtgtttttctggaaatctcgcgggtataaatcagttgaatgaatgagcttggtcagggtacgtgccattttctacctgttcgatgtacaggctgatggcatctcgtatgttgccggtctctttaaggaagtccttagcaaatttgggtggtttggcggtaatgcctaaagcatcatgcataacgaggatctgaccatctgtatggttccccgcaccaatgccaataaccggaatttccagcgcttcggtgattttccggcccaattctgttggtacacactccagcactaatagctgcatacctgctttttccaaagcaatggcatcgtcgagcagttgctgagctgtctcttcatcacgcccctgaactttgtaacctcccagcacattaacggcttgtggagtcaggcccagatgcccgcaaacaggcactgagcgctcagtcagcatttttactgtttcacacaaccagcttccgccttcaatcttgaccatattggcccccgaacgcattaattcagccgcattattacagctttgctccggtgtggcgtagctcatgaaaggcatatctgagatgagaaaagtctggggagcgccggtacggacacttttggtgtggtaggcaatatcttcaacagtaaccggtaaggtggaatcaaacccctgaacggtcatgccgagtgaatcaccaataagtatgactttgatgccctgtgcagcaaaaaggtgagcgaagctggcatcataggctgtaattgttgcgaacttacgtttctctttttttaactggctaagatgagccagagatgtgggtttcattgttatctcctgaatattcatacccgttgttgggtatagagccttgtccattcgggtatctaagctgatacccgctggaacaggttctgattatccagaaataggccatgattgtatgagatattgtgttacttttccttcataaaactgctgtgttacaaccaaaacgtcaggccattttctggaacatgttttaatcgttctgctaatgtttctttatcaggaaacacaaggtccggggctatttctgccagcggataaagcataaattcacgctgttttaaaccgtagtggggaatggtcaggcgttcagtattaataatgtgatcaccgaacagcataatatctaaatcaagcgttcttggcccccagcgttcgtctttacggacacgcccttgtgccagttctattgcctgagtgtgatcaagcaatatttccggttgtaagtttgtatctaatgcaacaaccagattgaggtaatcaggctgatcctgcggccccataggtttagtccgataaaatgaggaacggttaataaacgttgtatcagggatcgatttaagtgcagcaagtgcattattaacttgctgcaagggagaggccagattactgccaatggcgatataaacccaggtcatactagttgttgttcctgttatgacgaaggtggttgccacggcggtgacgggttctgcgacgaacaggctcgctgccaagctcggagatcatgccccgctgctgtgatgctgtagattgctggaattctgtccaccaatgtaccagttctttcagctcatggcgtggctcaatgctggcgcgtaattctaataaatcgtaggctgcccggaatttggggtgctccatcaatttatttgcccgtttaccctgacggcgcggcaggcgaagctgcaacagccagatatcacgcattgttgtggtatgacgcttcggaatggcgatagaacgacactgttcatcaagaatatcattcatggccagggcgaaagcatcgtaatactgtaagcccccttcctgagtcagcttctcggcatgttcaatcagtggataccacaatattgccgcaaataggaaagccggattgacccgtttgtcgttctggagacggtaatcggtattttttaatacctgttccagcagtttttccatcggcgaatcaccggactgggtgaaaccgcgctggattaacgggaatagtggctcaaacaactggtattcacacagtagtttatatgtgctgtaaccgtgccctgattgcagaagtttcagggactcctcgaacagacgtgctgatggaatatcccgtaacagaaatgccagacgtgggattggctcagccgtgttcttttcgatggtcatgttaagcttgctggcgaagcggactgcacgcaacatccgcactggatcttcccggtagcgggtttccggatcaccaatcaggcgtatgatccctttttccagatcagccatgccaccgacataatcccgtaatgcgaaatcttcaatcccgtaataaagactattaattgtaaaatcgcggcgtgcagcatcttcttccacagaaccaaagatattgtctcgcaatagcattccgctctgggctttatgagactgattacgatcattgctttcaacttgttcatgtggcccacggaatgtggcaacttcaataacatccggcccgaacataatgtgagcgagacggaagcgacgaccaacaagacggcaattgcggaataatttgcgaacctgttcaggggtagcattggtcgcgatatcaaaatctttgggttttttatgcaacagtaaatcacggacaccgccgccgactaaataagcctcaaaacccgatttattcaggcgatataaaaccttcaatgcattatcactgatatctttacgtgaaatagaatgctgttcccgtggaataacggtaattggggaatcagaaggttttgcctttccggatttattcttcattttgatgttttcagcatttgatgaagatatgcgattcactctgcggcgtttaggcagagtgctgctctttttatgagcaggatggtcagatatggtgactggcctttcactggctgcctgtgtttcgcgttttatcttggtttcacggatcagcaaattccggcagaaagttgctactcggttaaaaatggtacacctcgatagtgacggataaaattaaaactaaa

SEQ ID NO: 2180 - DNA, 11888 bp, Xenorhabdus sp.; identical to SEQ ID NO: 2179
  CDS (4454)..(5245)

SEQ ID NO: 2181 - DNA, 11888 bp, Xenorhabdus sp.; identical to SEQ ID NO: 2179
  CDS (3654)..(4433)

SEQ ID NO: 2182 - DNA, 11888 bp, Xenorhabdus sp.; identical to SEQ ID NO: 2179
  CDS (1433)..(2362)

SEQ ID NO: 2183 - DNA, 14112 bp, Xenorhabdus sp.; identical to SEQ ID NO: 404
  CDS (4678)..(5433)

SEQ ID NO: 2184 - DNA, 14112 bp, Xenorhabdus sp.; identical to SEQ ID NO: 404
  CDS (5437)..(6696)

SEQ ID NO: 2185 - DNA, 14112 bp, Xenorhabdus sp.; identical to SEQ ID NO: 404
  CDS (6696)..(7505)

SEQ ID NO: 2186 - DNA, 14112 bp, Xenorhabdus sp.; identical to SEQ ID NO: 404
  CDS (11040)..(11870)

SEQ ID NO: 2187 - DNA, 14112 bp, Xenorhabdus sp.; identical to SEQ ID NO: 220
  CDS (13517)..(14110)

SEQ ID NO: 2188 - DNA, 14112 bp, Xenorhabdus sp.; identical to SEQ ID NO: 220
  CDS (11068)..(12756)

SEQ ID NO: 2189 - DNA, 14112 bp, Xenorhabdus sp.; identical to SEQ ID NO: 220
  CDS (9677)..(10732)

SEQ ID NO: 2190 - DNA, 14112 bp, Xenorhabdus sp.; identical to SEQ ID NO: 220
  CDS (4673)..(4849)

SEQ ID NO: 2191 - DNA, 14112 bp, Xenorhabdus sp.; identical to SEQ ID NO: 220
  CDS (3464)..(4030)

SEQ ID NO: 2192 - DNA, 14112 bp, Xenorhabdus sp.; identical to SEQ ID NO: 220
  CDS (451)..(2169)

SEQ ID NO: 2193 - DNA, 14112 bp, Xenorhabdus sp.; identical to SEQ ID NO: 404
  CDS (7661)..(7930)

SEQ ID NO: 2194 - DNA, 11926 bp, Xenorhabdus sp.
  CDS (11762)..(11926)
cccaagcccgaatggtcgttccatgcccatttgaaggtgccgtcccagctaccataatagcggcgactatcgggatgataattggcgggcacacgaatgatgcgcatcttcggctcacaggtgatttgcggaatattgcgaaactgtttggcatcaaactgaacaaataacagggctgtttccgggtagcttaatttagcgtcgatcacttcagtaatggcttccactaccatggcatccgcgatccggttgctgttttgttttggcgtcaaccgccgaaggcgcacctgccagcccgaataagcagcgggtaaatctacccgatgggaacgttcatattgggtggtggttttgccatcaacagcggttttcaggatttccttgaaagcgccgccatcagtggcaaggtcaatggcatagtcaatgcgataacccacggtatctccgttctctttttgctgctgcaactggggccacgataaccgcaggcgaaccgctgacagttgggtattggtgaccgtcgtgacccacgagctgaccagttcagcactcaccgttcgggcattttcgaccgccggcataccggggatatacgcctgatggggcgtaccgggacgaaattcccatttgacgccttcaaaattaggcgagccatcggcaccgataagcggcgtgtcatccagaaagatacgccgaccatccagctcgccggcaaattcaccttcaccgagggcaaggaggatcttggtataggaagtcgattgcagcgagtccggcgcttccaccggcgtgcgcggctgctggcgtccgcctttattcccctgaatgggtggcttttccatacttcatcctcagcgcattattgttggtcttccgcatagatacccgctgaaataatagcgccaccaatgcggcgtctgccgtagccaataggtacgggattgccctgcgcaactgtattcaccggtcccccgaacgcataggagggcttgttatcgggatcttcgcgccgggccagcccgcccggcatcggcgagagcatctgcaccacgccacccaacatcatgcccaccccggacatgaccatcggcgcaccaaacggggttgcccacaagaacgcgccggccaccaccatgaccgcgcccagaatggtctgaaagacaccggcatttttgctgccgataatcattggcgcaatgcggatatcgtcctgcccggaaaacaccagttcttcccgactgatattgcgttttccgttaaacacagcaaaggtcagcccctgcgctttggcggtcagcaggaaacgttcaaatcctttaatcaatacggataatgcccggatcgcttcctgcggggtagagacagccagttgatgcactcggccgaactgagtccccagtacaccgtaaagccgcacggtgcgtaatgtgttcatgatgtgactctcctaaacaaaaaatccgccgaagcggatacgtgacgtaaggtgatggtggtgcgttcctgccagtagccatgatagggttcccgcttactgagctgcccgtacaggtggtgcaacatcaggccgtcacccagataaacaccggcatggttgggttcattcgcctgtacctgcataatgatcacatcccctgcctgcaattcaccgcgacaggcgacaaatccagcggcggcatactgtttcatatacagattttcgccccgagtccaccagccatcagtacggtcaaaatcagggagttcaagtgtgcgttccagtttgtaccaatcacgcacgatggcataacaatcccagaacccgtgcacgaacgggcgaccgattaagggcttaatgccggccagaggcatcagggtacggatatccccttccggccacgaaacaatcacccatggcgtttgtgacagatcacactgggcgatatccaacgggctcggctgtgtcgtcgcatcggggtgactgtgaacaatggcaataatctcgccctgatcttcggcagccgcgtaatcctccgggtgaatacagaactgttcagtgggtgatggggcagtattgcgacagggaagataatgctgtcggcggtgctgttgaataattaccccgcaacactcattcgggtaggctgcttgggcatgtgccatcatggcacgggtggtcgcttttctcagtatcgtcatggttagcgcctcagcaaggccgagccgggaaacccgccaaagggcaattgctctgtatctccaaaacgttttttacagtcactcattaaccctccacaggcatccgaggccggatcattggtcggtttgccccgttcagtaaaataacgggtgccggtatagccacacggtgactggcgatattgtccgcgaatgcaccatgtacacaggctgtgaatttgccgggtcggaattttaattccctgtaaatcggcaggagaagagagcgaaaactggatgctttcgttatcttcctgcgttttactgtcgatgtagaaaacatcgattttttcctgtttcggatcggcttgcgggttgccatcagggaaattacgcgcatccagataatgggcaaaggtcatgcggatcgtgacacgcgcctgcaccatgttttgatacgccagacacaatgcactgagcgtgccgtccagattggccacattgagagtaggcgttaccgcccttccatcactggtcacttccagcccttcgatactgacgggccacggtttatattctacaccctgccaccaaagcgatttcaccggtaagttcccgctattttccagctcagcctcggtatacgggataggatgatggtgaaagtacaagacaggtccgccaaataccgaaccatcgacagtcaataagacaattttacttcccggctcaagccgctgaagtgttgcattcagggtcatgatgagatctcttacggatgatagatacgggtgaaggtcacagagagcgtgaaataagcgccattagcctgaacagtgaattttccggcctgatacaatcccggttcagagagcggattacgccatttaaatgcgcgccagccctgatgctcacgcaaaaaagcgataatcggctcgatatcagacaacgtcccgacaaaagacaccggccaattttcgcgctgcgcgttgatcccattgccggaggtctgctgataaccatcaccgaattgaacagtacgtacaaccggctcaaactcgccactcgcgcccaccctgacaggaaaatcaaaggtttttatcattatcgtcctcctttaatcgccgcgctgagttcaccaccctgactcagacttttatgcagtaaaaatttgaagcgctgatcaacaaatttcgcaatatcctgacccgcagactcggcaccacgggatgttttcgtgtcatgcgttccctcggcatggatcacaatatgaacggaattaaaggtggagttgcccgtactgccggtggcctgaacccccagcttaccgtcagcaccgcgttttaagggcaagatcgcttccgggccggcttcccccatcactccgccccctttggcgaacgcaaacagcgtcggttgactgaccacctgcccgctgtactgatttaaatccgtcgattgataaacgccgcctttcgcattcataatgggactcttccagacatccggcgttatggtggtgccagagcccaccgaagacaggctaccccccgccgaagacaatgcgctggcccccatgctacccatcccacccccaaagaaaccggagagggctttggtgatcaatgcctgcattgcaatacggatcagatcctgaataatggattgcgccagtgaggccgacaacgcccgcatggatgctgaaaaggattttgtgcccgtcaacatgccggttaacgcactccccgtacgttgctcgaccacatccagcagatccatctgcattttctggaaatccccctgcgaggcgtataaatctttagcagcagccaattgcgcgccgttagaacgataagcggcagcagtcattaactgttcatgacgttccttgctgataaggccattgcggtaataactgtcatagagcgcttgttgctcagtcagctgattttgcagttgcacaacgggatcgacctcacccgtcatatccagatgtggggcggcaatttgctttgcctgttccgctaatttgtctttcaccgacgtttgatacagcgttttactggcggacagatactcctgttcggtcaataaccgttcgttatacagcgctttcagttctgcactggcgtctctttcctgccggatcaatgccgctaccggggaatatttttctgccagttcgaggcgttgtttttggtgattttcggcattgaggaggtttaagcgttgcagttcactgtccgaagcgatacccgatttgccaacttcatggattttatcccgcatcgctttctcgctgattcggatacgatccaggctggtggcgtgggtctgctcaatgtccttgcgtaactgctgataacggtgaagtgattgtttgccttgtttctctgctttaatgagatcctgacctgtccacggattacccgggccgttctcttcgggttttggcggctcagacggtggctgatcaaaaatccccgcgaccgaggttgtctgtaggtttttctttctggcggttttcttttctatccctttgaggatatcttctcgccgactgagtaagacccggccttgcttttcaactgctttcggatcttcataaaaaaaacttaagacccctttttgacgattttctaaatgctcgattcgggtttgagaataccgttccagttggctatcaatctgcctgagttctgctttcagattgttaagatcatcgtcagtcttatccagctcgaccgccaccttaattttggaaagccgttgcagttcagccaccgtttcaacggattcctcctttaagtgccgcaacccctctctggcttggacgctggcgttatataacccgtacagagcagaacctgccaacatcgctgcaccaaatggtccccccatcagagcaagcgcaccacgagccgcaccactcacagcagataaagcccgataggcataagacagccggcgattagccgcttctagctgcccggtggcctgtgtttgcaacttgagggcttccgtttcctgtcggatcagggtgcttttttctttcgcataattgacggagagtccatgcaaacggttggttctttccagatactgaatgtgcctgccctgagcttccgttgaacgtagcgtggcattggcctgttcaagagtacgttttgccgtttctgcctgctgtttggccatatcacgagccgctttttcggtggcccgccatgccgtcatattttcacgtaatcccgcggtcagctttgttgctatcacggggattagcgtatgcaatgctacgctagccaccagattaacattctcggacagcgcattaattgcgtgggttgccccctgtactccggtacgcaatgggccatcggcactctgcccgattttcaacgccatgccttcaaaggcactcgtcagcacctccagatcagcactcaggttattcgcgcgtgcactggcctgttcataggcgacctgtgttccggtcagagcttgggtcaatgcgtccagtttttcccgcccagtgactaagttggacgctgcgctgacattggcccggccaaataatttaaccgcctgcgccgttgacaggtttttgcccatcagggattctaatgccgacgataaacccactaccgacggtttcagatttttgtctgtcgaacgctccagcgccagtatcacattacgcagggcaatacctgcctcgccgcctttgataccccgctctgccagtatctgaatagccgccccgagttcttcaacgctgatcccggcctgagcggctagggtgccaccctgtttaatggcctgcgcggtttcgttaatttcggaagcaccgtatttcgccccggctgccagtacgttaataaaacggtcagcctgggcggcactggcaccgaactgattcagagataaagccagtgcacgagtggcatccggtagatcaatcccggacgcctgtgccagtatgactggcttctcagtggcttgggtgagttgctcagtgttcttgagcagctccggtttggctgaggccatgagtttcagagcctgcgcaatgccggtcgccccgaactcggtggtacgccccagccgttgggcgttttcatccagtttttttaactgttcacccgttgcaccggtaatggcagacaagtcagacaatgcctgcccgtattgacgggtatggaaaatcatcgtgttcagtgaaaaaccggtgccggccagtaatgccagttgcccggacaccgatttgatgtgcgatgccagtgaacggtaggttttttccagttttttggcatccgaacccgcctgatccgtaaagcgctcagactcccgcccggcatagcgataagcctccataatccgggatttaaacgcggtagcattgaccagcaagcccaccgtcaatgtcgataaattagccataacttaacccaataatttcatgacagcctcacactgtgcccggaccacagcgggcgaactgtctgccggttggcggtgtttcagtcggtagtacgcctgccattcgttgagcgtggacgccggcaaggacaggatacgatagggatcgatttcgccgagctgttccgctaacgtgaaggcaaaatgcagccacgacgagtcagttagtttttttcggcgtcttccagtgtaccgatggagtgacgcttcacggtctggatggcttcaatcaggatggcgttatcatggacgatcatcaattcctctgccgtgggcaggaagtcagcgggaaggggtttgcccttatcatctaccagacaatccagcaccatctggatattcaggcgggaggcttcgcgcccgtctcccgcttcactcagcttttccgctttttcttccagctccagcagttccagtgccgtcatccggcgcaggttaatttgcgtaccgaacaattccaccgctttaatctgcggacgcggagtgagtaaagccgctttcagtgctttcatgggttaactcctgttttgctgtctgcgataccccaaacgaggttgttttgtttgcctttgacggtgatctggatcacttcactcgccggcgcgttaatgtcattcatttcccagccggaaagcgccagcaccattgtggcagtccgtttattcggcagggcgatgtaaaactgcacggtttcgcgtttttcagccgcgttcaggaaagagacaaaatcctcgttcaccggatcatcgataaagccgagggatttttccgggccttccggcatatcggagataaactgcttattggtatccatcagggtggtgcagtcgacaaaactgccggtcagcccggttgcgcccaaggctttacagttgatgaggggtttcatctgtgccacgctatcgccgggtttgccgaacttaacgaccgtacctaccggcagaacagcgtattcgggggacgttgtcatgatgatgactcctgtcaggttatttgctataagacgataaagcggcgctgatttcccgcgccagcgcggttaaaacggcctgtttgttgtaatccagcgccggacggataaagggactcggcacctgtttgatcgtgcccatttcctgtgctaaggctttcatccggtgagctttggtggggccgacggtaatcatcaccccgcccgggtatttcttcgatttcgtggagcgagttttgatattgtcccgcagatgtggctctttactcttggagtcataccccgcatgagcctgcatgtcttcctgcacaatttccatcgccgttttaccggcttgacgcagaactttagtctgaagatcaacctccagttcctgcaatttgcgccctaatgcctcgaggccggacagccgccatgcgccgtaagacagcagagcgccgcctgccagcccgaccagcggggcagccatcattaataatttcatggaaaaacctcagagtgagcgaacaccgtgggagatcagatgatcggagagactgggtgcttcgtgcaaaatcgcccgccccatcgccatcatcagcgccaccgcaccatcaattttgctgtctttctgctctttaatcgggcgcacaatatcatcattaccgcccatcgttttcccgaccacattaccgatacaccatgacataatcgggtgaccgtcatgatggaaacgccctgactggatagccgcttccagcgctttcatcggatcgctcatatgcgtgaaattctgggtaacgatgatgggattaataccctcgtccgccagtgcatgagataagccggtggccccgaagggatcaatcggtgcctcattaaccggattccggtgacaagcgagtttggcttcttcaagaatgtaacggtaatccacttcagcgccttctgtgacagtcagcagacccatttccacccatttctgaaaacgctcagcactgcgcctattttcgttctgctccacacagtaaacagtgtcatacggcacccagaaccgtggggcaatactgtagaaatgctgtttgccgtcgatttcacgtgaaaaaagccgcgccatactgttcatatccagcttgcgggcaaggtcaaaggccagaaaacaaggctgaccctcgaattgcgccagtgtcagtgaggtgtcttcacactgtttccagctcaccatattgaagtaagcctcccgcgcagacacccagatattcaggtgcttggtcttgaatacgctggctaaacgcggattattcagggcacgttgttgctggctcagcagaaaatcaacatagactgagacccccatattcgggttggccttgcgtaatacgtccggtgaggtccagtcatccccctcgtctacggtatagatcacgccgaacagctcttcattgggcacattgccggacagcatttcgatcacctcgcgccgcttgtcataacacgggccttcaatgttataacctgccgtggtgatcgcccacatcaacggctgtcgccgtgcgcccatgcctgtgagcatagtggtatagagatcatcggtatcatgctcgtggtactcatccacaatcgcacaactgggtgactgcccatcgccgggattgccgatcagcggctcaaaccgggcaccgtctgccggacgattcatattggaagcattcacttcaatgccgaatgcctccatcagtaatggcgtgcgcttgcacatcaagcgggctggccggaatacttcccacgcctgtttctccgtggtcgcgccggaatagacttccgcgccgaattcgtcatcacaggtaaagcaatagagggcgacgccggctgaaatggcggatttgccatttttacggggaatttcggtatagacttcccgaaatcggcgtaaccggctgcctttatgtacccagccaaaggcagagcagataataaacagttgccatggctccagtgtgatcggcatccgtttaaacgcccattcacctttggtgtgtggcaggagctggataaatttcgcggcgcgttcggccaacgctttatcaaaccggtacttgaacgactgacttttttcctgattcagattatccagatgccgctgacaggcctctctgacgtagcgaccggcttcaattttgccgcgcaccacatcacgggcgtattggttcgccgcattaacattcaggtaagatttacggctcacgatgcaatcatcctcataaacggattgtccgttttagcctgacctgccgccccaatcagacgctgacgactgctcggatcgagtcccaacatcgagccggtggtatccatctcagcctgttgctcttttttggccgtcagctccgggtttttaatcggaccgccggttgcaccggtcacggtattaccctgccgggcgatattcatcacagcattgcgccagaactggtaagccacacaccagcgttcaagcaccgcgaggtcggtgatacacagtaacccctgtgcgcataactccttgctggtcagcgcccacattaccccggccagcgacatgtcactttcggtaaaccaatccggcggtgaaacgctcgtcaatggggtaaacgtcggttcatcccggttcagcctgcgtttacccggattaccggccagcgctttgcgtgccgtcggcttggggcgacgacctgacttgcccgccgttccggccatacaccacacctcccgtgcttaaaaacagtgaaaaacgcgtgatttaaatttcatttttcgcggggataaaaaaagacccacggtggcggtccttaggtgcgagaggggcagcgatttgatccgcccttccgctataacgatgacatgagcaatggttacactcagaaattaatctctcgtaatcgctccgtcgcagtcttctgtcgatgacaggcttcacataacaatttcaggttgcttaacgcctcggtaccaccgtgggctttgggttggatatggtcaacagtgatgcctgtgaccaccagcccctgccgtaagcagtgctggcacagaaagttatcccgttgtttgactcgcgtctttagcttatcccattgactgccataaccgcgttgatgtcggctcttgccctgttggtgagtttgccagcctgtgttgatatggtcagtgcagtagccactgcggtcggtggtggtcttggggcaacctgacttgcgacaagctcgggggatgcgaggtggcatgttctggtctccatatagcaaaaaaccacccgaaggtggtttggtttactttgataattcatttaattttaaacttattttatttttcagtttatctgtttccaatatgaagcatttatatatttcagatgaatcatctttaattttgagattttctaataccagactaatatcattttcgaactcagggaaataagttttagcaataaattcaaattctatgtagtcgaattcatgttttgttggtaattcatcaattgattcataccccagccgatgacttccccattgaacaaatgaatagagtaagataatgagcttttcgcctttttctattaaaagttttttactgtctttttctctttcatgtttgagttgcttattaaaacgacgttcattccaacaattcgtaaaccaagcaatgagtaaagaaaaaacactagctaaaaatgcgctgactactggtatccatattgcgttcatataatcactccaatgttgaacaaacatgcatagtatatttaatcagcacttagcattctttacattgtgtgttacatactctatttcatcatattaaactcgcctgtttgatataccccccacactttcaagtaccggagcagtatcaaaacagatgggaacctctaaaaacttttcacagccacaaaattgagtaaaatgtaggcacagtacctctctgcaaggtagcgccatcatgataccgcctcgttctgctttaaaaaaagacaaacaggcatccgaatatcaccgtcgaaaaatcgatgaattaggtgatccgctgcttgttcttgataaatatgttgatttctcggcactggctgacaccctagaccgtatcgtcccacgtattatttcccccaaagggggacgcccgccattcccgacggaggtgatggttcgcatcattatcctgaaacatttccataatctttccgatgaaaaaatggaatatcaattgcttgaccgaatgagctggcaacgtttttgtcgcttgaccgatgtcattaatattccagaccgtaacacgatttggtgtttcgaaaaacggattgggcag

SEQ ID NO: 2195 - DNA, 11926 bp, Xenorhabdus sp.; identical to SEQ ID NO: 221
  CDS (599)..(1036)

SEQ ID NO: 2196 - DNA, 11926 bp, Xenorhabdus sp.; identical to SEQ ID NO: 221
  CDS (1843)..(2100)

SEQ ID NO: 2197 - DNA, 11926 bp, Xenorhabdus sp.; identical to SEQ ID NO: 221
  CDS (2583)..(3827)

SEQ ID NO: 2198 - DNA, 11926 bp, Xenorhabdus sp.; identical to SEQ ID NO: 221
  CDS (3849)..(4301)

SEQ ID NO: 2199 - DNA, 11926 bp, Xenorhabdus sp.; identical to SEQ ID NO: 221
  CDS (4321)..(4782)

SEQ ID NO: 2200 - DNA, 11926 bp, Xenorhabdus sp.; identical to SEQ ID NO: 221
  CDS (4779)..(5126)

SEQ ID NO: 2201 - DNA, 11926 bp, Xenorhabdus sp.; identical to SEQ ID NO: 221
  CDS (1082)..(1426)

SEQ ID NO: 2202 - DNA, 9758 bp, Xenorhabdus sp.; identical to SEQ ID NO: 405
  CDS (2)..(157)

SEQ ID NO: 2203 - DNA, 9758 bp, Xenorhabdus sp.; identical to SEQ ID NO: 405
  CDS (282)..(557)

SEQ ID NO: 2204 - DNA, 9758 bp, Xenorhabdus sp.; identical to SEQ ID NO: 405
  CDS (1239)..(2180)

SEQ ID NO: 2205 - DNA, 9758 bp, Xenorhabdus sp.; identical to SEQ ID NO: 405
  CDS (2255)..(2956)

SEQ ID NO: 2206 - DNA, 9758 bp, Xenorhabdus sp.; identical to SEQ ID NO: 405
  CDS (3040)..(4773)

SEQ ID NO: 2207 - DNA, 9758 bp, Xenorhabdus sp.; identical to SEQ ID NO: 405
  CDS (5055)..(6086)

SEQ ID NO: 2208 - DNA, 9758 bp, Xenorhabdus sp.; identical to SEQ ID NO: 405
  CDS (6096)..(7610)

SEQ ID NO: 2209 - DNA, 9758 bp, Xenorhabdus sp.
  CDS (8627)..(9145)
gtgctctaaagaccctttcacactgccaaaaggccgaataagaaatagcgaaaactcgggcacgcgtagaacatatctttggctcactctctcagagggtgaaaaattattcggacgataggccagctgcgagccaattttgcgatgacgatgaaggcaacctgctatgatttgcaacgtttggtttatttcggaaaatcgggtattcatgctttttaatttcgagatgtgatgaaaaagtgatgcgtttgtttttttcccctgaacaagcaagaaaaagtcatacacaataaggtcagttattggtgagttcaaaattgatcttattttttgtattgagagtttttagaggttccctgatattgtcgatcattgcgatttctgttgaatcacccgtttcgatattattatcagcaccatttgaaagtcatttagctgatttttatatgggtcttgctggttctgttgttgcttatctattctggaacatggcaattactattcgtggcgcaggaaaaacagccatcttttttaattttgttcctatttttgcattagcgatacagacttttgtaggagatagccccggtctcattcaacttgccggtagcactctcactattattggagtgctgattgggcaaggtaccatcaaggtatctgagagaacttcacaataaaaatcactatgaagttcgtattatgcagggcacaacttcataaaaatgtggatatccggtgctaacgctattatggaaatatgtaacttatcactgaataccgggatccaatctctgcccagttaattttaattcaggcattgtgattgaacgaccggaaataaattatggggcgaataatgcaagaatatcctgaattatggattgaccttatgtactacctgagaaatgcctggccacagatatctggcgcattgctggctatcatgatctgttatggacggctgatttatgatggtgtggaacgcaaaaaccactgggctgaacctcttctctgtggagcactttcatggggattctccagcgggctagagctgattggtattcctgtcagcgtatcacctgctcttggcggcgcagtgggttttcttggtgtggagaaattacgcgaatttgtgatacgtgctattgagcaacgtctggaggaaaaggctcataaatagatagcccaaaatatatatacacaatggatttcaagatgcgtcgcggcggcaagggagataatccccaggagcatagataactatgtgactggggtgaacgagtgcagccaacaaagaggcaacttgaaagacgaagtgtataaagctctgcatatttgtagagctattaaatagcagatctgataataaacattatattcaaaaccctctaaaaacatttcatcaactcaacaaccaccgactaaagtcggtgggttagtgattaacggactgaaagtccggatacgcatcggctaaacgatgcgtcaattatccagcctgaagtgatcattcgggttcggttcaaaatgatgcgccagataggcctttatcatcttttccggtaactgacctaccgtcgcacaaaaatagcctctgccccaaaaatgctgaccccagtaacgctttttcaagtgagcaaactcttcaaacaacttacttgctgtccttccctttattcgcctcatgatttctgagggcgctaagctcggaggacaactcaccagtatatgtacatggtctttgctcacgaccccttctactatcctgatttcgaacgcttcacaggtctgacgaactaactctctcacccgtaaaccaacttcacctattagcactttgtgcctgtattttgttacccacacaaaatgatactcaatctgaaataccgtgtggctgccatatctgtaatccatattgcacctctcgtgcaacacagtatcgcagctaaagctgaccgactaaagtcggtggttttaaccttttatatggaaaaataaatatatacttcttaccgaatatcagcaactgcttatcaattcaaagcggttcaattttaattcgactacatcaatttatcttatagataaaaatacgccctgcacatttaactgagcagggcgtattataagttttaatcaaaatgattatttattcggacgcatagccgggaacaggatcacgtcacggatggtatggctgtcagtaaacagcatcaccatacggtcaataccgatgcccagtcctgctgttggtggcatgccgtgttccagtgcagtgacgtagtcatcatcgtagaacatcgcttcgtcatcaccttcgtctttctgacgaacttgctctgcaaaacgttcggcctgatcttctgcatcgttcagctcggagaaaccgttaccaatttcacgtccgccaatgaagaattcaaaacgatcagtaatgaatggattatcatcgttacgacgtgccaacggagaaacttctgccggatattcagtaatgaatgttggctggattaagtggctttcagcggtttcttcaaagatttcgcactgaatacggcccaatccccagcttttatcaacttcaataccaatagattcagcgatagccactgctttatccatatcatccagatccgccatgttggtttccgggcgatatttgcagattgcttctttcatggtcattttgacgaaaggtttgccaaaatcgaattcttgttcgccgtatttgaccaaagtcgttcccagcacatcctgagtcaaggtacggaacagttcttcagtcagaacgatcagatcctgataatccgcataagccatgtagagttccatcatggtgaactctgggttatgacgcggagaaataccttcgttacggaagttgcggttgatttcaaacacgcgttcaaaaccacccaccaccagacgtttcagataaagctctggtgcaatacgcagatacatgtcgatatccagcgcattgtggtgggtagtgaatggacgtgcactcgccccaccaggaatagcctgcatcattggcgtttcgacttccatgaagtctttactgaccatgaaattacgcagtgcagccataacgcgggagcggatctggaatgtcttgcgcgattcatcattggagatcagatccagataacgctgacgataacgcgtttcctgatccgccagaccgtggaatttatccggcaatgggcgcagtgctttagtcagcagacgcaactcactacagtggatagaaagctcacccgttttggttttaaacaacttaccgcgtgcacctaaaatgtcacccaaatcccattttttgaactgctcgttatagatgccttccggcagatcatcacgagaaacgtagatctgaatacgaccgcccatatcctgcaaggtcgcaaaagaagccttgcccatgatacggcgggtcatcatacgaccagcaacagtgacttcaacattcagtgcttccagctcttcctgcgtcttatcatcgtattttgcatgcagatcttcagaaatgttttcacgacgaaaatcattcggaaatgcgataccgttgctacgcagtgtaaccagtttctcacggcgtgttttcagttcgttatttaagtcaggagcctgctcagccccctgctgttgttgcgacattttagttcctcataggccagcttttaagcttgcttcaatgaatttgtccaaatcaccatccaacacagattgcgtattacgggtttcaacacctgtacgcaagtctttaatgcgggaatcatctaaaacataagagcgaatttggctaccccagccgatatccgatttgttctcttccattacctgtttatcagcatttttcttttgcatttccagctcatacagtttggctttcaactgtttcatcgcctgatctttgtttttatgctgagaacgatcattctgacactgagtgacaatgcctgtcggttcgtgggtaatacgcactgcagattcggtcttgttgacatgctgaccaccagcaccagaagcacgatatacatcaatacgcaaatcagcaggattgatttcaatatcaatgtcatcatcaacttcagggtaaataaaggcggagctgaatgatgtatggcgacgaccaccggaatcaaacgggcttttacgtaccaagcgatgtacgcctgtttcagtacgcagccagccgtaagcatactcaccgatgattttgatggtagcggatttcaaaccggctacatcaccatcagattcttcgataatttcagtcttgaagcccttggaatcggcccagcgcagatacatacgcatcagcatactggcccagtcctgtgcttctgtaccaccagagccagcctgtagatccagataacagttcgcactgtcatactcgcctgagaacatacggcggaattcaagctgacccagtttttcttccagttgttccaattcagcgattgcttcattgaaagtctcttcatcatcagcttcaacggccagctccagcaagccgctcacatcttccagtccctgttcaagctgatcaatcgtttcaacgatgccttccaatgatgaacgttctttgcctaacgcctgtgcccgctctggctcattccagacatcaggctgctctaattcagcattaacttcttctaaacgttctttcttggcatcatagtcaaagataccccctcagaactgctgtccgctcagacaggttctgaatctggttttttaccggattaatttcaaacatatttcgtgtcttatacgttgtggtttataaaaacgatggtttttatagaaagatgaccatagatattgtcgaaccgtgcattgtaacggatctgatgcagggtttatagcatttcaattgatttgccacataatcaaacctgattatgtggcaatggattcaggctttgtcttatcatttcggcgatgtaatccgagcaatcactctggcttatttaacagggccagatgtgctggatcaaaatctgaacatcacgattaccccgaaactcgttaatatcgagtttataagccaattctaccgttttaacactattatcaggccagtacttggtgtcaatgttaaaagcaataccatccagcattggccctccgtttaatggctcaatcatgactttcagatgcttttcaccaacaatccgctgttgcaacagcctgaactttccgtcaaataccggctcagaaaatgcctgcccccaagggccgccatcccgaagaacctctgcgatctccagtgagagttctcccagtgtcagctccccatcgctccagacaacaccttccagttgtgctatatccagccactcagcgaccaaggtagagaaatggcgctggaacaactcaaatttatcctgctccaacgataatccggcagccattgcatgaccaccaaatttcagcattaatccgggatataaagtatcaaggcgctcaagcgcatcgcgcatgtgcagcccattgatggaacggcccgagcctttcagtgtgccatcaccggcaggagcaaaagcaatcactggccgatgaaagcgttctttaatgcgagatgccagaatgccgactactccctgatgccattcaggatgataaatagccagtccataaggcaattcggtatgcgtgcgttcaatctggtcacaaatttgcaaagcttcctgctgcattccttgctcgatttcacgccgggtctggttcagcccatccagttcacaggcaatctgccgggcctgaactatatcgtcagttaataacagcgtgaccccaacggacatatcatccagccgtcctgcggcatttaaccgtggcccaagggaaaatcccaaatcactggctgataattttgctgcttcccgtttagaaatttccagcaatgcccggataccggcacaacaacgcccggcacggatccgattcaatccctgatacaccaaaatgcgattattggtatcaagcggaaccacatcagccactgttcccagagcaaccagatcaagcagttccgccagattgggcaaaggaataccctgttgctcaaaccaggctattttacgtaattcggccctaagagctgacatcagataaaaagcgacaccgacacctgccagcgcttttgaagggaaggagcaatccgtcagattcgggttaacaatggcatctgcggttggcaatgtttctcccggcaaatggtgatctgtgacgatcactttaagcccgtgctgatgtgcaaccatgacaccatcatgggaagagatcccattatccacggtgatgatcagatctgcgccttttttcacgacatcgtttacaacctgcacactcaagccatagccatcttcaaagcggttaggcacaaagtaatccagatcccgataccccattgcacgtaacgcccgaatgcttaatgcggtactggtcgcgccgtcagcatcaaaatcaccaacaataacaatgcgccaatgttgctgtaatgcttcaacaagcagagaaacagccctgtctataccactgagggactgataattgagtaaccctttagcaccgcgttctaactcatcagcctgacgtatgcctcgtgtgacataaagacggcgtaatagtgggtggatactatcaggaaggagactatcatccgccgctggacggcggcggagttgtgtttttctattcactggattaattcatcactggattttaatgattactgagtttaattcaccgcgtattatttgcttacagcaagatactctggtgattattcaccatgctgtgccaatgctttagctaaatcttttggcggtaaaaaaccactaatcagagtaccgtccttgagtacaattgccggcgttccattgatgccaaactgtaaacccagttcgtaatgcttggcgatatcctttttacagctctcaataggtgaaattttatcccctttgaaagcagcatccagtgccttgttagctttcgcactgcaccagattgattgcatatctttagctgactggtgttccagaccgtgacgcggaaatgccagataccggaccgtaattccttcgtcattatattccttcatgttttcatgcaacttacggcaataaccacaagtaatatctgtaaacaccgtgacgacatatttttctttcggtgctttataaataatcatctgacctttcagggcttccagtttttccaccagagatttattgacaatttgctttggaattttgctgctaatgtcgtaaagcgggccctgaaacatataatggccatcgttggatagataaatcgttccatgctgagttaaaacactacttacaccagcaatccctgatgggctaatactttctgctttgaggcccatatttgataatgactgattaatcatactattatcagcaaatgcattactggtaaaagcagtaagtattaaggaaagacaaaacgcaatctttttcattttttgttcctttttcatcctgcttcgcaatttctccaaaaatagtgttcgttgaaccgctatttataaatgagttatccgcgaggatgatgttgttggtgcagcaccttgagacgctcagttgccacatgagtataaatctgcgttgtggagagatcactgtgacccagtaacatctgcacaacccgtaagtcagcgccatgattaattaaatgtgttgcaaaagcatgacgtaaaacgtggggagataaacgttccgaatcaatgccagccaatactgcataatgcttgatccggtgccagaaggtctgacgagtcatctgtgtcccgcgtttactgggaaaaaatacatcggatactatgccattcagcagccacggacgtccatattcaagatattgttccagccagtacagtgcttcttcgcctaaaggaactaacctttctttgttccctttccccactattctgacaactccctgacgcaaactcacatctgataatgtcagcccgactaattcggatacccgtaaaccacaagcataaagcacttcaagcattgccttatcccgtaactctatcggttggtcactcgaaggcgtattcagtaaattttcaacctgtttttcgcttaaatctttcggcaagcgcttaggtaatttaggagcagataaaagtacagtaggatcatccgcccgaatgttttcacgataaagatactgaaataatctgcgcattgcacttaacaaacgcgctgaactactggctttataaccgccatctacccgctcagccaaaaatgattgtaattcaatggactgaacagaaagtaaatcatagcccccttgaactaaccagttattcagacactgtaaatccagccgataagaagcaagtgtattttctgccagatccttttccagccatatcgcatccaaaaattgctctatcagaggatcagataacgggctttgttccggcacatcattttttgataagtcatgtttttttggcacaagccctcctttgtatccgtgccttccggtcagctattatgcctgaaaaagcaattcttctgttacaatgcctcttctgatattaaaaattcactgataattaacgatgaaaattggtctattttacggttctaccacttgctacactgaaatggtagcagaaaaaatacgcgatattcttggtgaagatctgattgacctgcataacgtcaaagattgtgaccctcaattgatggaagagtattccgtcttaattctcggtatgcctacatgggatttcggtgaaatacaggaagactggctggctatttgggatcaacttccatcactggatttatcaggcaaaattgttgccatgtatggtatgggtgatcaaattgattacagtgaatggtttttggatgcgctgggaatgctgtatcaccatctgctgcctactggcgcacagtttattggtttctggccaactgaaggctatgaattcaccagtccaaaaccactgactgatgatggcaaacagtttgtcggccttgctctggatgatgtgaaccagttcgaagagactgacgaacgtctgagtcagtggtgtatgcagatattggcagagatggaagcgctattttaatatccgaagtacattggatataagaactgggtataaggttagttattctttattggttatgtatcggggtattgacgcatcagctggttgagatagcgccacatttgcggtggcatactgtctgatgccacccataaccgaacagcagacttatgacgaaaacctttcggttgctcaaacgcgcacagtgaaagcatcattccataacggctaagccacggcggctgagtcatttcccaccttacattttgccaatgtactttattgccctgcaacagtatcaattgcccctgacactgttgaatatttttctggcttcgtacccaactcaccataatcatggcaaggattgggataacaagcactgggaacccgaactcaacaaccaccgactaaagtcggtgggttagtgattaacggactgaaagtccggatacgcatcgactgaacgatgcgtcaattatccagcctgaagtgatcattcgggttcggttcaaaatgatgcgccagataggcctttatcatctcttccggtaactgacctaccgtcgcacaaaaatagcctctgccccaaaaatgctgaccccagtaacgctttttcaagtgagcaaac

SEQ ID NO: 2210 - DNA, 9758 bp, Xenorhabdus sp.; identical to SEQ ID NO: 2209
  CDS (860)..(1183)

SEQ ID NO: 2211 - DNA, 14696 bp, Xenorhabdus sp.; identical to SEQ ID NO: 83
  CDS (3)..(755)

SEQ ID NO: 2212 - DNA, 14696 bp, Xenorhabdus sp.; identical to SEQ ID NO: 83
  CDS (2408)..(3583)

SEQ ID NO: 2213 - DNA, 14696 bp, Xenorhabdus sp.; identical to SEQ ID NO: 83
  CDS (3753)..(5255)

SEQ ID NO: 2214 - DNA, 14696 bp, Xenorhabdus sp.; identical to SEQ ID NO: 83
  CDS (5430)..(6431)

SEQ ID NO: 2215 - DNA, 14696 bp, Xenorhabdus sp.; identical to SEQ ID NO: 83
  CDS (9261)..(9842)

SEQ ID NO: 2216 - DNA, 14696 bp, Xenorhabdus sp.; identical to SEQ ID NO: 83
  CDS (9932)..(10465)

SEQ ID NO: 2217 - DNA, 14696 bp, Xenorhabdus sp.; identical to SEQ ID NO: 83
  CDS (10497)..(12947)

SEQ ID NO: 2218 - DNA, 14696 bp, Xenorhabdus sp.; identical to SEQ ID NO: 83
  CDS (14050)..(14676)

SEQ ID NO: 2219 - DNA, 14696 bp, Xenorhabdus sp.
  CDS (12491)..(13885)
acgttcttggtttcactcatttatttggctccacatgtcggtaatgaagagagttgtgtcggaatagtttccatatagattgccgtgcgtttaacggcgttgaccacggcacgtggggtaatggttgctccggtaaactgatcaaattctccgccatcttttttcaccgcccagtgcggatcgctgggtgaggtaattttcttgccggcaaacgcataaatccaattggagatacgggtatcaattttatcccctaatcccggtgtttcatggtgttccgtcacacgaacaccaaacaccttgccggaaaagtcagccccgaccaacaattggattgcgccggaataaccatctggagcagtgctttccagtgctgccgcaacaggaattccatttttacgggcgagatagaggcgatgaggttgttggctgcccagagcatccgctgttaccagataacattcatttggcatatcgttatcatagagagcgggtggaacaacctgatccagtaatattttatgctgtaatgcagcctgatctgcaatcctgtcttttgttaaagaatagacaaccgcagttagccctgtcgtgcaggcggcaaaaatagcgagagtaataccgtgacgtcgcatagtttctaacatagtcactcccttatttatgaccataagcgcgaggctgagtgtaattgtcgatcagaggtacacagatgtttgccagtaaaacagcgaaagcgactgcatccgggtaaccaccataaactcggataatccaaatcagtaaaccaataatggcaccgtaaatcaggcggcctttcggtgttgttgaggcgctgaccggatcggttgcgataaaaaacgcacctaacatagttgctccggaaaagagctgtaataaaggcggtgagtaacgaccgggatcaatcagccagctaatcagggcacagcttcccagtaccagaatagatgcggttggaatatgccagctaatgattttgcggttcagcataattaatccgccaaacaggtaagccacattgatccactgccagccaatgcctgccagagtcccttgcaagatgggctgttgtaatacttcacttatatcatgtgtcagtcttccggttttgaagttgtccagcggcgtagcctgacttaatccatcaatgccctgtaaaagttgtaacaaagtcgagccgtcaggtgtatggcctgtgaaaatgaccatcagacactcccagggcgtcaaagtaacggcctgtaaggaagcggggggcatccagctggtcatttgtaccggaaatgagataagcagaaccacataaccaaccattgccggattaaatgggttttgtcccagaccgccataaagatgcttggcaatgataatggcggagaaagtacccagaatgatgagccaccacggcgccagtggtggcaggctgatcccaagcagcaatccggtgactaaggcagagttatctttcaggtagggaataaccagctgtttttttaatgtgatagcagtggattctgccaacagagcggtaataactgccaataagatctggattagtgttccataaccaaagaagtaagtttgtagtgcgataccgggtatagcagcaaaaaccacccataacataatttggctggtattttttttactgtgtgtaaaaggcgaactggcgacttttaacaggttattgtcagtgttgactggcctaaatttcatcgataaatgtcactattctgttagagtttcttgtttttcttgagcagctttcttcgctttgacacgagcaatggctgctgcgacagcggctttacgcgggtccgcttcttccgaaaccgcaggctgaacttctggtgtgggtgccgattcaggctgaacctgagcggcttttttcgctttggcacgggcaatggcggctgcgacagcggctttacgcggatccgcttcttccgaaaccaccggctgaacttctggcgcgggtgccgattcaggctgaacctgagcggcttttttcgctttggcacgggcaatggcggctgcgacagcggctttacgcggatccgcttcttccgaaaccaccggctgaacttctggcgcgggtgccgattcaggctgagcctgagtcgcttttttcgctttggcacgggcaattgcggctgcgacagcggctttacgtggatccgcttcttccgaaaccaccggctgaacttctggcacggttgtcagttcaggttgagcctgagcggctttttttgctttggcacgggcaatggcggttgcaacagcggctttacgcgggtccgcttcttccgaaaccaccgactgaacttctggtgtgggtgccgattcaggctgagtctgagcatcttccttcgctttggcacgggcaatggccgctgcgacagccgctttacgcggatccgcttcttccgaaaccaccggctgaacttctggcgcgggtgccgattcaggctgagcctgagcggcttttttcgctttagcacgggcaatggccgctgcgacagcggctttacgcggatcttcttcgtttgctacagagtctgcggttgctgtagctgcattcgctgtctgtttttcagcctggcgagcgcgtaattgttcttttcttgccttacgtgctgcaattgctgccgcattatcaggtaactgaccggcttgtacggtgatttcctctcccgcagaggattgtttttctttcacgcgagccagtgcggcctgtacagcacttgtatcctgattgcctacctgaacggcagcttttttatgacgttcttcacgcgccagtttttcccgctccatacgggcctgtttggcttcaaaccttagtttagcttcggcagcccggcgggtttcagcatcaatggcacgtatttcggctttttcctgtcggtagtattgaacaagcgggatattgctgggacagacataagcacaggccccacactcaatacagtcaaataagttatgatttttggctttttcgtgttcctggccccggctgaaccagtaaagctgttgaggcaataacccggcagggcaagcctcaacacataaaccacaacgaatacaggcttcttccgcggtttttggttccatttcctgtacagagggcgcaagtatacagttgctgattttgacgatggggacattcaagtcaggcagggtaaaacccattaaagggccgcccataacgaccatctgctctgactgaggaataaacccggcctgctgcaacagaaactgaaccggtgttcctaaacgtgcccagaaattgccgggtgaagtaacagcttctcctgtcagagtgaccacgcgctcaatcaatggttccccatcaataatagcccgtttgatagctaccacagtaccgacattctgcatcagggtaccaatatcagaagaacggccaccagatgggacttctttgcctgtcagtatcttggttagctgctttgcaccgccggaagggtattttgtcggaatgacacgcacggcaatcgatttatcaccttgcagggcaagattcagagcgctgatcgcctctggtttgttatcttcgataccaatcagaacctgcttcggattaagcagatgcatcagaatgcggatgccttcaatgatctcgctggcatgttcctgcatcagacgatcatctgctgtgatatagggttcacattcggctgcattgatgatcaatgtgttgatgtagttcccgccgcctttcaattttgccgctgtcggaaaccctgctccgccaagtccagcaatccccgatgcatgaatacgttgtagtaaagtatcagcatcaagggatgtgtaatctaaggttttaacttgttcgcaccattgatcttgaccatccggcagcaaacggacgcacaactctttcaggcccgatgggtgagctgtaacgcagggttcaatggcagtgattgtaccagaagttgaagcatgaacagggacggttctaccagaaccctgtgtcagtggctggcctttcaagaccttatctccggctttcaccaacaactctccctccgggccaatatgctgctggaggggaataattaattcttctggtaacggagcatagcgtaatggtgtccggctggattgcagcttcatttccggtggatggatgccaccatcaaaatcccatattttgtttttgttggtaagcaaattgaataggttaaacattggctttaacctcaacaggcttaacagatgacataaacaaagaatttggttcagcaggaatatttttgaccggaatggcattcaaatcccatttccagttggatgtggtagtggcaacagggatcatcgtgatgcaatcggtcgggcatggggcgacacataaatcacagccagtacagagatcttcaactacagtatgcattgcgcggtttgcaccgataattgcatcaacaggacaggcctgaatacactttgtacagcctatacagttgtcttcatcaataaaagcaacttttctggccggattttgtatgctttcatcgccatccagcggttgcggatcaacgccaagcaattcagacattttgagcatcacttgctctccgcccggagcgcatttgttgatcatctctccattgttgataaccgcctcggcataaggtcggcagcccggatagccacattgcccacactggctttgtggcaatagattatcaactttttcaactattgggtcttcttccactttaaaacggcgagcagcaaaacccagaattaatccgaaaattaacccgagtacactgagtacgccgacagcaatccataaagatatcatcagaatttcaccaaaccactaaagcccataaatgaaagggacattaaccccgcagtgacaagccctatcgatgaaccacgaaaaggggcaggtatactggcaacagccagacgttcacgaatggctgcaaatagcaccatgacaagcgaaaatccggccgcagcgccgaaaccatatacagcagactgtaaaaagttatgcgattgattgacattcagcagagctacgccgagtacagcacagtttgttgttatcagaggcaagaaaatgcctaataaacggtaaagtgaggggctggttttacggacggctaactcagtgaactgaacgacaacagcaattacaagaatgaaacttaatgtgcgtaaataaaccaaatctaatggaataagaatataagtatttaccagccatgaactgatagaagcaagcgtcaggacaaatgtggtcgccattcccataccaatagcggtttcaagtttttttgaaacacccataaacggacatagacccaaaaacttcactaaaacgaagttattgaccagaaccgtgccaataaataacagaaggtattcagtcattgctatacctgaaaataagattatttgatgaaaataatatagtcgtgaaagtgacagaaactccccacgttgcggtgaggcaagtggggcaatgataacaaccaattgtgggggatgttatcgatcttgtgtgaaagtcattttcacccgataagagcgcttaatataaggaacaaaaacagcagcagctaatagtgaccaaaataatgagctgactgcaagttcatctgaaatgggggagaatgcaaaagctttgacagcaataagtactgaaagtgtcagccagatgataaaaatacgcgggaaccgttttgaacgaataaaaagcaattttaatacccaaagcgtaaaacaccacataatagccgtggttaatacggatatataccattggactgcgaaatcgccacctattcgatgaattaacgtactttgataggaataggttattccatataacactaacattgtactggcagcaataaatgtcatgactaaataagcagcaggggctaatagccaaccattaatacggtaataatcattggattgatacatacaaaacattctctccatgatgggtattcaaatataaaaaagatagtaacacaggaagtaggattatttgctaatgagtcaccgcaggtgatattttcttatcctttttgtaaatgttgagaggtcattatgagtcatcttctgaaagttggtctggttggatatggttatgccagtaaaacgtttcatgcgccattgattgcgagaacgccgaatgtagaattagttgctatttccagcagtgatgcagagaaagtcaaaaaagactggccggacatgaatgttgcttcttctccagaagcattatttaacgatcctgacattgatcttattgtgatcccaacgcctaacgatacacatttcccattagcacaaaaagcgctggctgccggaaaacatgttgtggtcgataagcctttcacgattacggtggcagaagccgaagctctcaagaaacaggcagaagaggctaatttactattatcggtatttcataatcgtcgctgggattcgggttttctgacagttcagtcactactgaaagacaatgtgttgggggaattaaagtattatgaatctcattttgaccgttatcgcccggctgtacgtcaacgctggagagaagcggcaggtgcaggcagcgggatttggtatgatttaggccctcatttgttggatcaggcggtgcagctttttggcaaacctcaggccattacaaccgatttgggcataatacgtccaaatgctgaaactgctgattacttccatgctcagctaaaataccctacgctgaaagttgtattacatgcatcaatgcttgttgccgcagaatctcctatttataccttacatggtatgtctggcagttacgtaaaatatggtttagatacacaggaagattgtctgaaggccggggaaagcctgacacaagaagattggggatatgatccgcgtgatggtcatgtgacagtgtcacaaaatgataatctgattacacagactgttcctaatttaccgggtaattatggtgcgtattatgctgctgtccgtgatgctattttggcgggaaaaccgaatcctgtgacggcggaggaagctatcctgattatgaaactgattgaagcaggtgaaaaatcagcgaaagagcaacgcacagtcgttatcgattgactgatttagtgatggagtaatcctgaggcaagaggaagggtactgatgaattggttgcaaaaattaaaaatagatccttttctgttaacactgcttactgtggtcatgattgcatcgttttttccctgtgaaggggaagtgaaaacgtggttccagtacctgactacggcagccattgcactgttattttttatgcatggagccaaactttcgcgtgatgccattctggcgggaatagggcactggcgtttacatctggttatttttctgagtacgtttgttttgtttcctgtactgggtatggggttacatttcattgtgccggaatggatgtcaccgtctgtttacatgggttttctgtatctttgcgcattaccagccacggtgcagtcagctatcgcttttacctctgttgccaaaggcaatgttgccgcagcgatatgcagtgcttctgcttccagcttactgggaatatttctctcacctttacttgtcggctaccttatccagacgcatgatggtggaagtcatcctgatacatggcaggcgataaaagatattatcctgcaattgatggtaccttttattgttggtcatctgtcacgtccattgattgctaagtgggtcgaaaagcataaaaaactggttaatatcaccgatcgctcatctattttgctggtggtttatgttgcattcagtgaagccgttgtcgaaggaatctggcataagattgatgcttactcactgataatgatcggtattgtctgctgtgttctgcttgctgtggtattaaccatcaatgtatacagctcacgcttactggggttcagtaaagaagatgagattaccatcgttttttgtggttcgaagaaaagccttgccaatggtgtgccgatggcaaatgtgctatttccggccgcaatggtgggcattatgctgttgccactgatgatattccatcaaatccagttgatggtttgtgctgtactcgccaatcgatatgccagacgttcaaaaaaggtctaattgttcaaaaaaggcagagtaacttctgcctttataccctcatatcatcagcttgatataagcttaaaccgtctgttaacggttttcgactttcattcttaatgcctgtttctccgcttcgctgaggaatgcggtttccagcccattgatctgtgccagtcggatctgctctggtgacaagcctgcggcaggtgaagcaacatggtactcatgacgaatttcaatcccttcaacagccggatcatcagtattgatggatgccagaatgccatgttcaaggaactttttcagtggatgagcggataaagtgctgacagtgctagtttgcaggtttgatgtcaggcaggattcaataccaatacggtgctctgccaagtaatccatcagtgccggatcggtaatggctttaacaccatgaccaattcgggttgctcccagttcacgaatcgcgtgccagatactttctgcacctgctgcttctccggcgtgtacgctgatattccagcctgcatcacgggcctgaataaagtgtcgttcaaataaatgccctgggaaacccagctcatcacccgccaaatccattgcagtaatatgttgcttatgagcgagcagaccggctaactcctcagaacaggctttttctccgaacgttctgctcagaataccaatcagacggatttggatatcgtgctgcttgctggcggaatgaataccgtcaatgacggcttctacgactccctcaacaggaagctggtgtttcatcgccatataataaggagaaaaacgcagctcagcataatccagaccggcattaacggcatcttcgacgttttctacagcaacgcggcggcaggcatccaaatcagccagtacagcaacgccccagtcaagtttttgcaggaaactgacgagatctggctcactttcaatgatctgaacatgaggacgcagagcttccagctcataggcaggaagaatgatattgtgttgacgaccaagatcgagaattgtttcgggacgaatgttaccgtcaaggtggcggtgtaaatcggtcagcggaagctgtgtatcaatcattttttatcctttttgttttataaagttatcataaaaagtatacaaaaaagccagtcaacgcattgactggcaatgaaagtactatctatcggtttttttacgatgtttgcgctgtttaggcttctccagcctcagcatgtactttcttatagagaaccttgatagggttttgtgttactcagccgcaggaagattagcttcgccatcatgctgattttgctcatcggcaccatcataggagtcgatcaggttatgatcaagcaggaattgatgcaggtcgaactcttcaccgttaaatttgaccttgtcatcggcataattgagattcatgtcaatggagtcatcagtatgggtaaataagttaagtgccgtagcttgtgcttcaatcatttgcacaacactttttccggtagcatcggctgcttccctgttttcacccctgaccatcgcagacagagcgatggattctgtcagcattggttttgatagcttaatgtcaagtgagaattttttgatcagactacgaatgatttcttcttgattactattttgtagcttactgaaatcgtcaggaaggttattcagagtcgttgtgaagttagctgtactttcgcctttgctatttttgaagctaagcgtttcgagggtgaatgttggattatgtttcagcaacgcgggtaggttttccatcagcgcagcatctgtaatctgagaatatttttctatgtcaaaagaattaattgttttgaagagagcttcataagttgcccggtctaccttactgtaggcttgattatcaagatggtacatgcctaacacaaatttggctgaaccaaaatcctggtttttaactttgatgccatcaacggtaagagaatattttccatccagattgtttttttcaccttcagtaaaggtagaaaaagatttgataccgttaatggacatcatatcttcaccaaatccactcaggctcacttcgtctatgtttgatgaagtgtcaccgagatagataccagattgattttttttgctattaaatgaaaaacttaaatttttcattttaaattcggtgtcttgctgagcaggctgaacaaattttatttcatcgctttttcctgtggatgtaatttcactgaaatccttattagtatctatggttacatttgctcctgaaatgacccagtggaggcctttttcagtggtgtaatcaacaggaataatattgataccaaaagataaattcccatcatatgcgacactggtatctacattaagtaaggatttatttttggtgatttcgaatagttctttcagtaattcaccgtcttttagctcggaatggattaatgctaatttagggccaaatttaaatttagcaatatcggaaagagggaaaggcccatgctcaatattggatgtgataacaataccttctttcttatcaagtttgctagtaagagcaagttggacatccgtgctaaagatgccgcgtttcacatcttttttctgcaattctaatccaagatctggcattttttcggccagtttcgtatttgctttttggagtgctgcatccatacgcgcttcaacctgcttccctgtgtaccaggacgcgcctgtccatgctgcacctaaagcaacaataacacctacagctactagcgattttttcatgtgggaattccatccttttttgcgcatacggcattattgccatatgcgatatgtctttgtgtaaaaaatagttgttaattgtatagattaaatagagaacttttaatcacttttcaataaaagtgtgattaactactgatggataactttgtaactatatgaataacaattatttattagatactaaggcaaatttcccattaccataaatagttacatttttctctgccgcggctaagaagatggattcaccagcatatagtttcagttcctgctcagcagacttgactgtaatctgaccgccagaacaaaagagaaccgatgcggaatcattttccagcgttatcggctgccctgaaacagcataaatagaaaaatgaaaatcgttgactggaacagaataattcagagcttctttttcttgtgttgggatagttaacaaggtggctgcgggtttagagataaactccagatttgccatcaattcaggaacatcgatatgtttgctggttaagccggcgcgaaggacattatctgaatttgccataacttccaatgcaacgccttcaagataagcatgaggagtgcgggcatagagaaacatggcctgacccggttgtaattccacaatattgagcaggagaggagtaaacagaccattatcgtcgggataaaattctgtcatttttttaatcgtctcccatggctctccctgacggctattcaatgccgttttcaataccgcaagcgctaagcttttctgtttaccctgcatatttagtaactgagcaaaaaggaacgatagaccctgctcggtcgggtgttgaataaatggctgaatatcgggatgtgcgttcgagacatagctcagtagttcagttatttctgataaaggccggaaagcattcatcgctttgaatggagttagcgcatacactaattcaggcttatggttatcatctttataattacgctggggtgaatccagaggaatacccgcagcattttctctggcaaaacctttttctgctgataatttatccggatgcacctgaatagaaagtggctgagctgcgcacaagactttaaataaaaaaggtagccgcccgaactgcctggcgacttttttacccagatatttttctgggtcctgggcgataagctgattcagggcaataggctggcccgtttcaggatcaactacctgagaattgcatttgggatgtgcgcccatccatagctctgccataggctgattatccggattcgcgataccataaatatcggtcagtgcggttgtacttccccaatcataatgttggatttggttggtcattttcagcatggcgggtttcctataataaaaaaacttatttatacaacaactttatatgacaacaatacaataaacacgattaggtcgcattatcgataataaatttatggcattataaagagatgccgattaatttatctgcactgttgggtgagttaaaaacagttggatccggcgtattcaattattctgtgtgctaaggagatagtaatggcagccactcgcattgaaaaagactcaatgggacctatcgaagtacctgctgaccaattatggggagcgcaaactcagcgctcactggagcatttccgcatttctcaggaaaaaatgcctgttgcattgattcatgctcttgcgttaaccaagcaggccgcggccagtgttaatatggatctgggccttttacctaaggaacgcggtgatgcaattatcgctgcggcgaaagaggtgttgaaagataaacacccgacagaattccctctcgctatctggcaaacgggttctggcactcaaagtaacatgaacatgaatgaagtgctggcgaaccgtggtagcgagatccttggtggtcaaagaggtaatgaacgcctgatccaccctaatgatgatgttaataagagccaaagctctaatgacgtcttcccgacagcaatgcatgttgcggcagttatcgcattacgtgagcacctgttacctgagttggaagttctgcaaaaaacactggcagataaagcagaagcgtttagagatatcgtaaaaattggccgtactcacctgcaggatgcaacaccactgactttaggtcaggaaatttcaggttgggcagcaatgctggctcataacctgaaacacatcgaaaacagcatccctcatgtttgtgagctggcgctgggcgggacagcggttggtacaggtctgaatactcatcctgaatatgccgttcgtgttgcgaaaaaaatcgctaaattatccggtcagccttttatcatttcaccaaacaaatttgaagcattaggcacttgtgatgcactggttcattcccatggtgcactgaaaggtctggtttcatcattgatgaaaattgccaatgatgttcgctggttggcttccggccctcgctgtggtatcggtgaaatttctatccctgaaaatgaaccgggtagctccattatgccgggtaaagtaaacccgactcagtgtgaagctatgactatgttgtgtgcgcaggttatgggtaacgatgtggctgtcaatattggtggtgcgtccggtaactttgagctgaacgtattccgtccaatggtaattcataatttcttgcagtccgtccgtctgttggctgatggcatgcgtagcttcaatgagcattgtgctattggaattgagcctaatcgtgatcgcattactcaattgctgaatgaatcgctgatgctggtaactgctctgaatacccatattggttatgacaaagcagcagaaattgctaaaaaagcacataaagaaggtctgactctgaagcaatcagcaatgcagttgggttacctgactgaagctgaatttgacgcttgggtacgtccggaagatatggttggcagtatgaagtaactcttgcctattaatggctgatgtggaaccggaggtttttcctccggttttttgttttatatttcccgataaagatgtaaacgagggattatcagctcaagcggcttagctttgggtttgtggcggtatttgattgtattggcgttataatttggcagtgaacctactttgggggttacgccacgatcttttgtataaaaagcgatgatggggagagggcaggcatattgaacctgtttttgtatttctgaataccagacgcgtgcgataggctgtacttttactggtcgtttaattttcaaaactacatcatcaggcaatttcttaatatcggtgatttccaatgcgaccaacgcagtccactgatcgctggagtagggtgggactgcacgaccagaattataactcttttccagcctttccagaatttgttgctttgtcactttattaatgatgtttttattggcccagccaaagttgatagtatccggatctacgagtggggtaatcgttcgataggcatttaaggtaattaaaccgcgtaaatgatcatgaacgaattcaaaccgctgttctttgctgacgcctgactctttagttactatattttccagttctgtttttaactcgttaacatcatcaataatgctcatggccgctttatattgctgctggctgacagaaaaacataatgctcccggtaatcggcttgcggctttgctgctgatattgggatgattatgatgtatgaataacttctgataaaaccgtaaacctaagttaagggcatcttcatccttaggggagtttt

SEQ ID NO: 2220 - DNA, 14696 bp, Xenorhabdus sp.; identical to SEQ ID NO: 2219
  CDS (7234)..(8190)

SEQ ID NO: 2221 - DNA, 14696 bp, Xenorhabdus sp.; identical to SEQ ID NO: 2219
  CDS (6124)..(7164)

SEQ ID NO: 2222 - DNA, 14696 bp, Xenorhabdus sp.; identical to SEQ ID NO: 83
  CDS (8727)..(9128)

SEQ ID NO: 2223 - DNA, 13494 bp, Xenorhabdus sp.
  CDS (3692)..(5296)
ctaaagatggctttttactgttgggcgtttaatgctgaactggacaaattcaccctgttaccgtggaagccataaattaggtctatttccaatggctcatctaacgcctccaggcacccaagaataaaactttcagccaccagcatacgctttctaacttcgctttcaccaagcttaaacttacggcctatggctcttttcgacatgccgctaacgtagtggtgctcgataaaatcacactcctgagccataccaacgttgcgcagtttggcgacacagctatctatgatcatgccgtcctcgtcactgcacgacagcttattgctaccggaataagtcaccgcatttttaaacccggcggatactgacttccaaccaatgttaactctgccttgcactacccacccgccccaatgcaatagtattttctgcatatctctgtgcatgatcttttatccgcctttattgtactagataactagtacatattagcatcggttgggggtataggaaatagatagtccagatttggaccatgctgatttaaaagtacttttactctgatagctcagttctgagccatgatccaactttggttcatcataaaaatcaaagggctttttaattatcgtgaatcgcgagaattaagccttatcaatgggttgccggggaagttctcatctcgttggctaacgggcaagggtaataaccgcgtttttgcttcatgagtagaaacagagggttagttatcgtgccccaaatttggggtactaacgtaatcaaagggttatctatttgatattgttcgtaactcaagtttgctttacggataactgtttgattttaatcatgaggcgggttttggatcatggtcaatttcttgaccatctcaagaagataaaaaatatagccgcttggtatcgcctaagccttctccgctcgtctcattaccgtctttgcaaacaaaaaccaatgcgccattaaagcctaagttctggtgtgactctagaatatctacgccagtaacgagcggtgttcctaataccatcggctcgctattcgggtgcataatatctaatacccaacccgcaacgcccctgtactgtatacgcattctatacgctatgccgcctaactgaatatcaaatacttggtttcccgcgagcaatggtatctctacgacgttcatttcagcctcctgtgatctgctttccaagcctagacaacgcgccacctaaaaaatcatctaatgcctcatatcccgcatttaacaaagactgatttttatcgattgttattggcgtgacggttccccggtcaagtgttggctgagcctctagcggtgcagttcttgctacccgtggaacttttataccctcaactattgccgtatcgacgataatcacttcacgcagggtcaaagtgaccatcaggacgttttcagaggttttatccgttactacttcaattgcccggatcagcatgtttctataccggcgctttcctgtgagaacgtcaaacggctctttagaggcttttagtttaagcagttgttcataaatttctttggggcttctacccaatatttcttcggtattaaaatcaaatatcttagtaggcgtatcaaagccgtcaattaacgaaccaccaccagcaaaacccagctccattgtgacctctgacggcttatcataggcatgatcactaatagctgcgccgtattgcactggatgctcggtaatctctgccgaatcttgatgtttttccgatatcacgacactcggtattatcattccgatccttcgcgtattctgaaaaaacaacgtggataaaatatccattagctcaccttcgtttgtaggttgcgtaccaatatggcatttgtgcgctgtaccgtttctccggttaacgcggcggtttcaaggggcgatgatgttccacttacattgatgttatagactggtgcaatggttgtttgattctgtgccagtgaagatgctgctcgcaggtattctggcgtataactgctatgactcagcatattctggatattaggcatggcgttctcaaacatgctcagatcgaaatcaatccctttattaccgggtttaggtgctcttgccatgtggcctttaacacgaggcaggaagtttcgagtttccttcggtaagttattgatgcccttttcaagcacatacttgatcccccaattataccccgccagcgccttatccaagtttccattagtctgtttcaataggttgctgagcattctggctgcggcttcggcagatttatacggattgaaaacatcattccctattaacccatactgtttagccgtgccgggcataaattgaaacatacccagtgctatacctgatgctgtgggtttacctctcgcattaggatcgcctgacgattcagtcatagcaacaccgtgcagtagccccggaggtaagccatgcttcttctccaacatagcaaagtgccctgccattgattcgagcaatggctttccttttaacgcggttttgctatttgcttgcttatcaccacctgagaaaaaatctgaaaaccacccgccaacgtcaccccatgtaatgaacggttgttcattggcgcgtttttctttcagctttctatccaatacttttacgggatcttcgccagttttctctgcttcctgatgcacttcctgcattaattgctcccttccttgttcggcttgtgcggctagacttaaggctccgccaatcggcccaccaaacttacccattgcaggcaatttaatctttttagcagcatcagagaactcgcccagcgcacctaataccttcttcaaccatttaccagcaaagaataaagcaaatccccagaagatatggcctttatataaaagggggtaccggcttttagccaaaataccatctgatataagtaagtttctgtagataaaatataccagattacccagaataagcgcgcagagtttaggttaatgaaagttagatcaaaccctttagcatcaagccttacggtggtagtgattactaacaaacacctttaactacagataactacagaccaaaaaaacatcagtcagaatctggtattaaatcgtatggaatggtttatcgggataacttggcgggtggcatatttgcgttaaggctaaaagcacaaaacagggcttttttctaatgccttgccacaggtaagagggtgttcagatatttaatttctcggcgacagctacagatatatacagctttagaaaacatctgtatttcatcttctggctttcgctggctggttccgcttagctctaaagctacctgctgccctaccttcgctggttggttccgggcaagttgtagtaaaggtaattatagctcaggccgctttaacttctataaatctgtgaacaacaagtgaacatttgtgaataataatattcacataatttttctttttaaattaaatagttatattatttgtgaacaatgtgaacagttatatatataatagttttttgttttttgaataaatttttttaaagtaagtgcttttgtactaatctacccccctgcccgaaaattaaaagaagagtggcaaaaatatttgggggtacatatgggggtactatttaaataaattcaaaacaaattcaataaaaacatatctttatatggggatgagtatcatgcaatatgaaggtcaaccattaatcgaagcaaaaaaaatagcccatcaattttcgggtgaactcaaaccactattttccgatattgatattactttgcatacagggcaacacgcactgataggccgtaatggtattggtaaatcctggttagcatcaatactggcaaaacaaacttcaccatcggaaggaagtgtcaaacatttttgtgatgtgggttatctgtcacaaggcctgtctacttttacaggtagtgcagccaacatattcggactcactgatattatcaatgccaatgagcgtattcttgctggtattggtgaagccgcagattttgatgttatggaaggaaactgggattggcaatttcagatcgaatctttactggcagaaggtgaactgaccccagagatattaaaccagccctttaatttactcagcggaggagaacaaacccgacttcggctactgtctctcaaaaaacagggggccggctttatgattctggatgaaccgagtaaccatcttgatcgacagggacgcctctggttatcccaatggttggcaactttcaatggtggcattttactggttacacatgatcctaagctcttacagcatgtttccgttgtttatgagctgaacgggttaggattatcacgtagtattggtggctgggaaacatggctggacagtaaagaacagctaagactaggtatacagcgcgatgtagatcagaccagaaaaaacctcaaacaagccatacgggataaacaaagagatcgagaaaaatctgataaaagacagagccaggggaaacaacgtagggaaaatgctaatcaagctacaattctgctggatcgcgcattgaaccgctctgaatccacactgtcacggctggcaaaacagaatgaagaaaggctacagcgcagttcttccttagcgactgatgccagagcaaaactcgacattattgatccgctgtcaattgctgttgcaactcctcaggcagcaactcctccgttactttatctacaggatattattttaccctttgggtcagattcccctatcagcttgaccatcaataatggtgatcgcctcgctatcacaggaaaaaatggcagtggaaaatcgactttactgaaagtcatgactggctcactggtgccaaaactgggcgcttgtcgcatcacatcttcacatcgtttaatggaccagcatttctcattcctcgataaaacccagtcagctttgtataactttcaattacagtcaccaggctggacggaagatcgttatcgcactcggctagcgcaactgcgtatgcgaggtgaagaggctctaaaacctgtcggttatctaagtggaggagaacaactgaaagtcgcccttgcctgtttattttgtgggccttcagcaccggcactcctgctattggatgaaccggataatcatctggatattgaatctcgtgagttactccagaaagcactacatgattacactggtgctatggtattaatttctcatgatgatcaatttattgagagtataggcaatatgcaggaactcatactgggaggttaatctgactatgtgatttgatgaattgtaaattttatgaactactataaatatgctgaaataatttaaatatgaattgctagtgtaataattgtattccccgaaaattggggaatacaaaatgaagataagctatcccaaaaaccaaactattcatgctcgaggttttttcactaacttattcccatatagcgatatggccagtccaatcaaaataaaaacacatgcaattattttttcattactcatcacttcaccaaaaataactgcacttccaataaaaccaaaaaccggaaccaataaagacaacggagcaactttggaaacgggatattttttcaacaataaattccatatccaataccctattaaagttgtaagataggcttggaatagaatggaaaatatagcagtcacattcaaattttcaacaaaattagataataccgtagaaccattaatcgcataccccataagaaatagaggtaaaggggagaaaacacatgaccagactaaaaaaccaaatatatttttcccacctgatttttttacaataatattagcgacactccagttcacagcgccaaatagtattacaatcacacctaaataggtaattgaaccatcagttaaagccataataaatcctaaaccaataactgacagtataaaacctattatttgatgaaaatgaatgcgctctttgagaaagaaacaccccattgctatagtaataaatgaactaaattgtaacaatagagaggaaacacccgcagaaacccccattttgacacccagattcaccattccccataagccaacaccaaagattagcccgtataacccaacaattttcattggcacatcaggtcgacgaataaagaatacagctggtaaagcacataataagaaacgtaacccagctaataaaaatggatctagcgtatttagccctaacttaataacactaaaatttaatccccataccccggttactgctatggctagcagtaaatctgataatttcatatttatatccatgtattaaattagttataaaatcaatcacatttcaaaccatcaagtaataaatcaaaagcaggaatgattttttcaagtttagctttttgatctgtatcatcagcaatccacaaagcagcttcaactaagcttccatttattagacaagccaaagattcggcatcaacatcttttattttcttctcaagaatcattttttccagtagttttttcattgatgaaatacagtaagattgagattctctgaattgatcgccaagaataattttcgaatctcttaatacgatttgttggaattcccgattaagtgacattgttaaataagcccgacatctatcacgaaatccagtccatgaatcttgtgcgttatcagatatcgactggagatattgatccatctctgaatcgatttgttccactacagccattaataagccttttttatcaccgaaatgatgatataaagcaccacgtgtaagaccagccttagccgtaaaatcatccattgaagtattagcatagcctaaagagccaaaagcattgcgcgcagcagccaataatttgctacgtgtctcttctatcatttctgtacgggttcgccgggccatttatccttccgttaatatgcaatttacaactcattgacatacgctgcgtatgctggcatgttaattttacatacgtatcgtatgtttgttggcaacctaacttttatgcaaccaattatcacaatgagaagcaatatgagcaatccttatagtgagttattcaaagcatctggtgcagcaagattttctttggcgggttttatagctcgtatgccacttcctatgaccggaattggcatcatagtcatgttatcacagctaagtaatagctatggattagcgggatcagtatcagcaatttttgtattaacctatgcactgatatccccacaaatttctcgcttagcagatcatcgtgggcaatatattgtcttacccattgctacaactataagcgttttgggcatattagctcttttagcctgtgcgtactggcaggcacctatctggacattatttttatgttcttctctggctggttttatgcctagtatgtcggcaatggtgcgtgcccgctggacagctatctatcgtggtcaacctcaactacaaaccgcatattccctcgaaacagtatttgatgaaatatcattcattgttggcccaccgatatcaattggcctgagcgtagcctttttcccacaagccgggcctctatataccttttcagaatagtgagagtatcagcatgcggtgttccttaccccgcgtgtcacgcggggtaaggagtactcctaccattttgacaagctatttagtggccgctcttctgctagctataggtgtatgtttatttgtgatgtttcgcaggacagaacctcctattgaaattccaaaaaccaccaaagaaacaaacagttcaattattaaaatatctggtgtatgggttttatcattactgtttatttttatggggattattgccggaactgttgatatagcgagtgttgcttttgccaaagaattagggcgtccggttgcagccagtttagtgttatcagcttatgctgtaggctcttgccttgccggattgatatttggtgcagttaaactgaaaacgccactatacaaactatttcttataggcgggttaggcactgctttaactacccttccttttttaatggttaacagcatttccggcttagctttcactgttttcatggcgggtttattctttgcaccaacaatgatcatctcgatggcattaattgaaaaaatagttccggagaaacgattaacggaagggttcacctggttactttccggtctcaatactggtgccgctttaggtgcaactgctacaggacagtttgtcgatatatatggctctcatggtggatttatagtgtctttgattgccggaatagggattattatagccacatattatggtcattttacactgactaattcaaaagaaagcatttaataaaagcacatgctcttataaataataaaaggtgctcgctgtaaagcgagcaatattagaatagaaaatttacagagacaggttatgagttttccctcatttctataatctcaatagacctgtcaaagcgtaaatgttcatcaagagccattggaattagccagcgtaaattgtagataacattatcaggtaatgattgtgcttcataaatattaacaatttctttttcaacagattttgcagaataaactctgtcatcatgcgcatagagaaaattcacctgataagcatcagggcgggtcagaacagtaaataacttccattcttcaggctgagtattaattcctgcttcctcagcgaattcccttgccattgcctgttgaggcgtttcacctgtttctatttttccgccaataccattgagttgccctttctgccagctgggttgtaatttagaaataagagcaacattcttcttatcttcagaaaacataaaaccagtcacatagtgaatcattatcttcctttcctcattactgcactattaatgtttgttctctatcaggcccatgtgaaatatatttaattgggactccagcataatcctgaataaaattgagaaaatcaattagttcagcaggcaattctgtaaagtgagcatacgatgcgtttagctctccccagcctttaaaaactttataaacaggtttaactttctcaagctgcaataaggctttatcacagcaaacctgttcattatcaatttcatatgcaatagctacctttatttcttccaaccctgctaaaacatcagtattagttattgccagttctgttaccccgttaagttttaccgcatgcttgatcaagcatagatccagccagccacaacgccttggtcttttggaaacagtaccatactcgtttccacgttcccggatataatcagcctgctcagcctgtaattctgtcgggaacgggccattaccgacccggatcatataggccttcatcacaccgacaatatgcattttctgtgctggtataccaatcatggcaaaacaggtttgaaccagagtctgatacgctacagtataagggtacgtaccaaaactgttatccaaaaaagtggcttgtgatgtttcaagtaagatatcttctccggcactcaataagtcacggatggcttcattagtaaatgtgaaataaggctcgatcttttttccatattgatgcgttatttctaacatctcctcaaaatctaaagtcgaattatcattaaaaacgtggttgatttgtttttccctgatgtcccaaagaaattctaatttgcttctgagtttttctttatccagagtatcaataagccgaatgccatgccggttcgatttatcttcaacacaggcaccaacacccactcctacagatcctattttattcttacctttatatttttcagatgctttatttagttctgcatgtaatggcaatacaatatggcatcggggatcaattgagatgctggagttaatattttctctttttataaaatcaatttctttcacaagtaccggaagactaattaatgcaccctgacaaatatagagattctttttattaagtgatgccggtaattgagaaaaagaccctctcacatttccatattgtacacaatggcctgcattggctcccccattaaatctggcaatgttgtttacaccaccagataagtaatcaacaaatttaccctttccttcatctccaaattgaagcccaaccacagatattaacatacgtgtgcatctcccatttataaatagttttttaaatggtgttttcttttatattttaataaaaatacaactttaatgatttatattattccgctatttacacaaaaggcattaacagcattatttaaaaacataataaagaatacgtcatttaaaatgatagtgatgataaaaataatttatttcagtggattaatattttcttatttactgactaagtaatcagccattaataaagcctcatttaatgtatcaacaacaggtacacctgcagcttcaaggcttaaacgactatgcgttccgccagtgtaaagaatggcatgagtacctgcggctaatgctgcaatggcatcatcggttgcgtcaccaatcacaacgctcttttcaggagcgatattgatctttttaatatggttagctaattgttccgactttccggtagtcaatagcggcgtatttctgccatcaacgtgggtaaaaaatttagttataccgtggttattaatcatcggaactaattcttcatgctgcatcagtgaacatagtgattgggtcgcacctgactgatagcgggtagcaagcagatcactcactcctgctgctaaatttgctttttgtataccgggccgatagtgagtattaaatgtttttcctatgattgaccattcagcagaggatggttcgcgtccaataacctgtttatagaaaatctgcaccggcacacaataatattcccgatattgttccagcgtcagtggttcaataccaatttctgcaagtgctaaatttgttgcgctgactgaaacactaacatcattcagtagtgtgccattccagtcccagataatatgtgctgttgccataatcaattaacttccttagctgtatttgcctgttccgaacgatttgctccaaactcacggttacgggataaacattcagggcattgctgcgcaatatctctaaatgcatcaatgggttggttacaatccattttttggcgagataccagagtcgataaaaaacccagtaattcaggtgcccaggttgaatcttccagagtgtcatacaaaaccgataataaactgtatgaatagctgacccaatccgctgtagttgtataagaatgagttgtatgggaatgaaccgtatgggcatgtttaccttcatcaattgagagctggttaactaagtgattcagtactttatgatgtctgaaacaccaaggggtcaatacatccaaaaattcagggctgaatacacgatcagaatatccgtacacacgggtacgcaagagtttttcccaatgtaattcagtcgcccgtaactttggtcttattcctgtctgagttataaccagatccctgacctgtcgtaaggtatccccggttccacaattatcatcaataatcgaaatagaatgcccggatgggatgttacgtccccatatatgatgactattgctacatgcatcatcatagcgggaaactttcactaaattgagttcactattccatgctgcggcagtgactgccgctgtcgctgcaccgcctaacatcaccccgatgacggaagagttaggacattcatctatttgcgcggcagccagtgttatcaggtgattatctccctcgatatatgttcttggtacctgatgccccgtacccgccggaagtttcaagttttgcagtaatgaaggagagaagcaggattttcttcccgtcagtgttgagcagacaatttcagcacacgcctttaccccatcaataaaaggtacaatgtcttcatcagtaatctgtggaacacctaataagctgtcgataatacgtaacagtttcaccagacaatgatcagccaatatatattttgaaggtactgcgcattgtttatctgtgcactgcaatttaatgatgatgtctgcataatattttactgttgccaataactcatcacaggttttgggttcgtaataagcaaaacctcgggaactgataaaattctgtttattcgcgacgactcccggaagctccataacttctttcatcaagtgacttgttccggagacaccgcgtaaatcacctaataaaccaacggcacgcaggtctaaaattgatggaacaactgaagaaggtgaaagaaactcagccatatttaacctctctgagcttgcgcttttggtgttcgggttgccgcaattgcttcctcaagtggcactttaccgatatgtagcgcctgaccaagaatggcaccttcaacaccctgatcatacatatcggctaaaacacgcaggtcatctatgcttgagactccaccaccagcaatgaccggcgatgaggttttcgcgcatacttcactcaatagggtaaaattaggggaactcatcatgccgccccgttcaacatcagtgacgacataacgctggcatccctgtctttccagctcttcaagaatatcccaaagcttgccgttgttgacattccacccatgagtcgcaagctgataaccttccggcgtgctccttacatccaacgcaatagcaatcttatcgccatattcaccaatagctctggcacaccagtccggattttctaatacagcggttcctaaattgacccgctggcatccggttgccaatacccggctcaagatctcttcatttctgataccgccacagacttgtacattaatatcgaccgcttcgataacatcagcaatcaaatgactgtttgaacctcggcctgacgcagcatcaagatcaactacatgtatccattttgctccggcattttgccaggctaatgcaacttctgccggagtccctaaaggccgccgtaatgttgagctttcaccacgagttagacgaattgcagaatttgatgtcatcgctattccatcaacaatatcaacagaagggaatacctcgaacgttttcgtacctatcatttacccacctgatttattacaaatatatttccggagcttaataacaaaaatcattaatgtgattactactcattgttgagtaaacaacgctcatcctgaataatcaatgaaattcacattagtttatattaataatttcggttaaccatttcaaaaaatcataataagaaaaagaaatgacttttcaataaaattattttgttacgcatttttatttttttatagcaaacaaataaaataaagacagaaataaaaaccgacacacaaaaataaacactcactctatccagtcattatcttgttatcagaataaaattcttaacatggcatattcaatggattccagaatacgttgaacgggaaaaaaacgaatccattcagcat

SEQ ID NO: 2224 - DNA, 13494 bp, Xenorhabdus sp.; identical to SEQ ID NO: 2223
  CDS (7153)..(7617)

SEQ ID NO: 2225 - DNA, 13494 bp, Xenorhabdus sp.; identical to SEQ ID NO: 2223
  CDS (8144)..(8374)

SEQ ID NO: 2226 - DNA, 13494 bp, Xenorhabdus sp.; identical to SEQ ID NO: 227
  CDS (12447)..(12605)

SEQ ID NO: 2227 - DNA, 13494 bp, Xenorhabdus sp.; identical to SEQ ID NO: 227
  CDS (12011)..(12304)

SEQ ID NO: 2228 - DNA, 13494 bp, Xenorhabdus sp.; identical to SEQ ID NO: 227
  CDS (6577)..(7140)

SEQ ID NO: 2229 - DNA, 13494 bp, Xenorhabdus sp.; identical to SEQ ID NO: 227
  CDS (4616)..(5038)

SEQ ID NO: 2230 - DNA, 13494 bp, Xenorhabdus sp.; identical to SEQ ID NO: 227
  CDS (3334)..(4587)

SEQ ID NO: 2231 - DNA, 13494 bp, Xenorhabdus sp.; identical to SEQ ID NO: 227
  CDS (2480)..(3124)

SEQ ID NO: 2232 - DNA, 13494 bp, Xenorhabdus sp.; identical to SEQ ID NO: 227
  CDS (1488)..(2462)

SEQ ID NO: 2233 - DNA, 13494 bp, Xenorhabdus sp.; identical to SEQ ID NO: 227
  CDS (385)..(1176)

SEQ ID NO: 2234 - DNA, 13494 bp, Xenorhabdus sp.; identical to SEQ ID NO: 227
  CDS (7194)..(8024)

SEQ ID NO: 2235 - DNA, 699 bp, Xenorhabdus sp.
  CDS (2)..(601)
ggcaatccgccataaaaggtccatcggtattccgataaatattttattcaactgcaagtgcattgctttattatcccagtggttggtaacggataataaaaaaatcagtttacttaatttcctaacaccagaatcaatggcaatggataaactatttatgattcatcccgctaatggcggtagcgaatcctatgctcctctggcaaatatattagcggatagctacaactgtattggtatcgataattacaatctcagtacagataaccaaatagattcattacaagaattagctaatatttatatgcagttaattctggctgaaatctctattaaccaacctatccggatcttaggctggtcattaggtggacagttagcgatggaaattgcctatcaattagaacagattggcgtacaaaaaatccagttgttcttattagatacggtaattaacaacgctgagactaaaatacttagaaataacatcgacatatcaaactcgaatttattactcgctgataaactacaggaaatgggtgccagtgaaacctatatcagtaaagtattgaaggctgcaccatttgaatacagaaagtgattgtgacttaagtggaatatttaaatctttcaaacttttcactttttcaaggcggcggaatcaattactaatttaagggagtctggaaaaaaaatcta

SEQ ID NO: 2236 - DNA, 9574 bp, Xenorhabdus sp.
  CDS (476)..(880)
tattttgataatacataatacactgtttatatgctacttaaaacatcatgcttcatagaataaaagtgaggcatgatataaattaaaaccaaaactaataaataaattatcatactcccaccagcaaaaataaaatccaaaatcaaactttacctttattaatccctgctatacttaaaatgaaaaagcatatatctatctgtttattttaaaaattacaattttgttggtgggtttttgtcaccatattaataaccgcccagaaagtgtgattttcaaataagacacagataataaaaaggtaataaaaatgaaatcattaaaaaaatatatctcatatattctatatttaagcataatgcttattgcaggctgttcattaaccaaagacaatacatttttacatactcacaaaaaagtgatgggaaagcacactggtaaaccatctgtatattctgcatattataacatgtacatgttaaatgccagtaagactgctgtagttaaaattaaacgtgatcaatatgaatgtatgtatggtgccgggccagaagatgagtttactttatctcattatgaggaaaaacatttcaatttagaagatgatgataatatatttcataattgcaatgcatcagctaaatgggtgacatggaatattgaatatgatgcaccaaacggagaacaaaaatattgtaatgtaaaattgctgactgactatatcgatatggaagatggatggagaacttatttttatccaacaccagggacaaactgtcaggttccggttaactttgtttgtgatgatagtgagtcaaattgctataatgggtatatcagtcatgattcgtctgtaaacgctctggttataaccgaataatttatatatgaattaagatgatttatatataattgagtcagcacattctatatatctaaactcgacgatgataaacacaaaacgatgatggcacagcctgaaaacctgtgccatacttattccgattacctattcgtcggagtatcttgctatgtgttatgcaaaatatttaacctgtcttggtatcagttgtctggttttctcttctaccatacaagccgaatcccccacatttcaattatctcagagtcagcaaaaataccttcaacaacaaattgataaacaagttatcgataaatcagttctaaaagatataaataagtggtcagatgctaaaaaaatcgctgaatttatttgccgtccttttgctttacccattattcaacagcatcacaaagatgccgataaagttttccttggtgatgtatcaccagatagcatcaaattaatgagttcctcagaattagtcggagctgggatgtatcggaccgataatggctggaaaaatattcagttctcctgcaaactcgatgcaaccggtaaaccacaatccttcaattatgaagatgccaaagtacccaaattaccaatggggccggggcctgccgttcctccggataaggaaaaataatgcggtatatgctgtttttattattcctgctgtcgccactcagcctcgcagccagctttgattgtgcaaaagccaaagcccctgatgaaaaggcaatttgtgccagccagaaactgaatgatttggatgtagagatgagtgtgaagtatcacttcctacacggattatttgcaatgggtgtatcaggagagatgtataatagccagcaggcatggctgaaacagcgtcagcaatgtggatctaatatatcctgcctgattaatagttatcgccaacgaattaaccaattggatacgctttataactcaatagagaaacctatctaaaatcagatttattatttaataactttttattaagccagcatttgaatttgctggctttttatttcccctgccacttaatttattctgtcatttaattttattttttattcttataacatcacttcgcagatcactgatataaaaagagcattattattcaaagaaaaatgcggcttttaaatttaactcacgatatcttatccccgtctttcaacaacaactccttgggacatcggtattacccaattacactaatactaataaggtactcattatgactaatccattattagatttttctggactaccaaaattcgcttctattaaagcagaacatgttgtgcccgcggtgaaagaaatactggctaaatatcgtcaggtcattgagaaagtggtgaacgaaaatagtcaatttacctgggataatttatgtcagccaatctctgaggcaaggaatcagtttgagcgcgtctggtctcctgtatctcacctcaattccgtcaaaaatacaccggaattccgggtggcttatgaacaatgcctgccaatgaattctgagttctcgacctggatgggtcaacacaaagggctatatcaggcttataagtcactgaaagaaagtcctgagtttgaaaaactgtctcaaccgcagcgtaaagctgtagaagataagctgcttgatttcactctatccggcattgcattaccggaagagaaacaaaaacgctacggtgaaatcacagctcgcttgtctgagctgagcgcccgcttcggcaacaatgtgctggatgccacaatgggttggacaaagctcgtcaccgatgtctgcgatctgtctggtttacctgaaaacataaaaagttcagccaaagctgccgctaaagcgaaagatttaaaaggctggttactgacgctggatccgccagtctacagtgcagtgatgagctatgcagatgactgtgagctgcgtgaagaagtctataccgcttatatgacccgtgcttctgatcagggtatgaatgcctgtaagtgggacaataacccgattatggaagaaattctcgcgctacgtcatgaacttgctctgctgttaggttttaaaaactacgctgaaaattctctcgcaaccaaaatggcgaagacaactaaggaagtgctcgatttcttaaacggtctggttgaccgcgcccatggacagggggaaagggagatggaagaactttgcgagtttgcccaatcccactactgtgttgatgagctggaaagctgggatgtaaggtattacagcgaaaaacaaaaacagcacgatttctcttttgatgaagagcagctgcgtgcttacttcccggaaaaacgcgccattgaagggctgttcgaagttgttcgccgcatttatggcatcaccgccaaagagcgtaacgatgtagatacctggaattctgatgtccgtttctttgagctttataatgataaagaggaactgcttggtagtttctatatggatctctatgcccgcgcaggtaaaaatggcggagcatggcaaagcagttatgttgacagaatgcgccttgcttccggcgagttgcagaaacccgttgctttcattaactgcaacttcagtgggcctgcaggcggtaaacccgcgctgtttacacattctgaggtttcaacgctgttccacgaatttggacacggtctgcaaacactgctgactacgattgaaactctggatgttgccggtactaacggcgtaccgtgggataccgtagaatgtccgagccagattatggagaactggtgttgggaagcggaagcactggaatttatctcaggtcattacgagacaaatgcacctctgccaaaagaaatgctggataatatgctggaagcgaaaaattatcaggcggccatgaagatgctgcgtcagttggagtttggcctgtttgatttccgtctgcatgttgaatatgacccggaagaaggcgctcagatcctgccgatactggagtcagtgaaagaacatgtttccgtcgttccgtcatcagactgggaacgcttcccgaactctttcagccatatctttaacggtggctatgcagcgggctattacagctatatgtgggctgatgtgctggcagcagatgcttattcacgcttctctgaagaaggtattttcaaccgcacaaccggtcagtcattccttgatgattatctgggacgcggtggttcagaagaccctctgacactgtttatccgcttccgtggtcgcgaaccaaaactggatgcattactgaaaaggctaggcattaccggatagttctttgtttaatcaataataaggcgctgatagcagtgccttatttcagttatgaataaatatgatccacaccatatattcagatcactattatcaatgagccagcacagtcatctgctggctttttttatgatgactattttacctgtgttgtaaccaaaaacaggtcgaattgacttcatcaataaaatgttactattgtgacaaaaagtacgaaataatccatatttttgctacaatagtagcaaaaatagcaatagaggtattcgtatgttttctctctacaccgcctatgatgtgcaacatgaattaaaagattttatcaagcggcaacggaaacaacaaaaatcatctgttgaagagttagccagccgttccggcgtaccttatagcactatcagaaaatttgagcgtaccggtaatatttcattacgacaattcctcatgttattggaagcagtggacggactgcatcccctgcatgaactcaccaaagaacgtccgcgtgaaccaaccaccattgctgaggtactgaaaatgcagtagccataacatcaggcattgaactcacgctattttatccccatctatcctcaataccccataatgggatatcaggctgagaacagcttatacccctatacaaagataaggcgctcattatgactaacccgttactgacatcttcagtattgcctaagttcgctgacattaaacctgaacatgtcgtacctgccgtaaaagaaacgctggcaaactaccgtcaggtcattgagaaaattttaactgagaactccgcttttacctgggatagtctgtgccagccgctttctgaagagcaagataaactttcccgtatgtggtcgccagtcgggcacctgaattctgtcaaaaatagcccagagcttcgtgaagcctatgaacaaagcctgcctctgctctccgaattcagcacctggcttgggcagcataaagggctatatcaggcttataagtcactaaaagagagtgaggtttttaattctctgtcccagccacaacgtaagtctatcgaagatactctgcgcgattttgagttatccggcattggcttaccggaagaaaaacagaaacgctacggtgaaattgcagcccgtatgtcagagctaggctcccagttcggcaataacgtactggatgccacgatgggctggtctaagctcatcaccgacgaaaacgatctggctggcttacctgaaagtgccaaagctgctgctaaagccgccgccgaagccaaagagcaagaaggctggttgctgacgctgaatatgccaagctatcttcctgtcatggcgtatgctgataaccgtgaactgcgtcaggaaatgtatcacgcctacacaactcgtgcatccgatcaaggacctgatgccgggaaatgggacaataacgcgattatggcggaaatgctggctttacgtcatgaactcgctcaattactgggtttcgcaagctatgctgaaaaatcccttgccaccaaaatggcgaaaaatcctcagcaggtactcgatttcctgaatgatctggctaaccgtgcgcatggtcagggcaagaaagagctggaagagctgacagactttgcccgttcacattacggtgttgataagctggaagcctgggatgtgacctactacagcgaaaaacagaaacagcatcatttctccattgatgatgagcaactgcgcccttatttccctgaacaacgtgccgttgaagggttgtttgaagttgttcgccgcatttatggcatcaccgccaaagagcgtaacgatgtagaaacctggcattctgatgttcgtttcttcgaactgtatgatgaaaaaggggaactgcgcggtagcttctatctggatctctatgcccgtgagcataagcgtggcggggcatggatggatgactgtgctggcagaatgcgttttgcttccggcgaattgcaaaaacctgttgcttacctgacctgtaatttcaataaaccagtgggtgataaacctgctctgtttactcacgatgaagtgataacgctgttccatgaatttggtcacggcctgcaccatatgctgaccgaaatcgaaacactggatgttgccggcattaacggtgttccgtgggatgcggtagaacagccaagtcagtttatggaaaactggtgctgggagccggaagcactggcgtttatctccggtcattacgaaacgaatgaacctctgccacaggaaatgctggataacatgctggcagcgaagaattatcagtccgcgatgtttatcctgcgtcagctggagtttggtctgttcgatttccgcctgcatgctgaatatgatccggcaaaaggcgctcaaatcctgccaacgctgtactccgtgaaagaacaggtttctgttgtgccatcaccagagtggaaccgtttccctaactctttcagccatatttttaatggtggctatgccgcaggctattatagctatttgtgggctgatgtactggcagcagattcctactcccgcttctccgaggagggtattttcaaccgtacaaccggtcagtcattcctcgacaatatcctgtcccgtggcggttctgaagatccaatgacgctgttcatccgcttccgtggccgcgaaccaaaattggatgccatgctgaaaagtgctgggatcacgggataatttgtgtggaaactcgcgtgaaaatttgtttaatttgcgaacagggcgctgatagcagcgccttatcttatttggctgaacgctggggtctggtacacgatgaagattccgttatggccctggtactgactcccgaacggctggaattgcgtaaacgcgatgagccgaagctgggcggaatttatgttgatttcgtaaccggaacaatggcgcatcgccgccgctttgggggcggacgtggtgaagccgttgcgaaagctgtcggcattaagaaagattatttacctacagtcgttgatgccacagcagggctaggaagggatgcttttgttctggcctcaattggttgccatgtcagaatgctggaacgcaatccggtcgttgcagcattgctggatgacgggctacagcgcggttatcaggatgaagaaatcggcggatggctgaaggaacgcatgaccttaatccacgcttcaagtattaccgccttgacagatatcactccgcaaccggatgtggtttatcttgacccgatgtatccgcatcgacaaaaaagtgctctggtcaaaaaagaaatgcgtgtattccagtctctcgtgggtgctgatgaagatgctgatgcactgttagaaccagcccgcgctctggcaaagcgccgtgttgtagtgaaacggcctgattacgccgaaccaatggccggaattaaagcatccgcagctatcactaccaaaaatcatcgatttgatatttatccttgttgatgacacacggccctcattaaatatatttatttttcaggtattcatacctgaaaaataaatacgtaacagtgatatttaaaacaagtaacaaaactgtatatcaatcgttatgactgttgtttagcattcgtataaataactaactctatactccggaagtcatcactcgtttagatatgacatctcatttgaaaaataaggagataccatgagcaaattacaacgtgaaatagcagaaaataaatctcaaataatcaattcagataaaaataaaactcagcgaaaagaactcgttgatagtctgttagatacagtttccggtggctgggtgaatgcctttggaaattggagtaagtctctgtaataagcataaaaataaataggggggaggcatttatctctcctattttattcatggagatgtgacgatggtgctaataaaaaatgagaagattaaacatcttgaaataattctaaaagtcagtgaacgatgcaatattaattgcacttactgctatgtatttaatatgggaaatacattggctgctgacagtgctccaattatatctcttgataatatagcggcactgagaggattctttgaacgttctgtaatagaaaaccatattgaggtgattcaggtcgattttcacggtggcgaaccactgatgatgaaaaaagaacgtttcaatcaaatgtgtgagattcttcgcgagggtaactatggtaactctcagctagttttggcattacaaaccaatggtattctgattgatgatgaatggattgctctttttgaaaaacaccaggttcatgcaagtatatctatagacggaccaaaacatatcaatgataggcatcgattagatcgaaaaggcaaaagcacttacgaaggaacagttaatggtttacgtatgctgcaaaatgcgtgggcgcaaggacgtattccggcagaaccaggaattctctctgtggcaaatgctaacgcgaatggaggagaaatttatcatcacttctcaaaagaactcaaatgccagcgtttcgatttcctcatacctgatgatcagcatgctgatagcactgacgccgagggaattggccgatttctcaatgaggcgcttgacgcttggtttgctgacggtcaaccaaatatttttgtcaggatctttaacacatatctggggacaatgcttaatagccagtttcaccgtgttataggtataagtgccaatgttgaatcggtttatgctttcactgtgacttctgatggtctgctccgtattgatgacaccctgcgatcaacctcagataaaatatttaatcccattggtcatgtcagagaattaactctctcaagcgtgctcgaatcaactaatgctaaagaatattcttcactgaatggcgaattacctgaagattgcaatgactgtatatggagtaaaatctgtcatggtggtcgtctggttaaccgtttttcaccaaccaatcgctttcataataaaaccgttttctgtccatccatgcgggtttttctcagtcgcgctgcatcacacctgattgaggctggtgtgagtgaagaaacaataataaaaaatatccaacaataaaaatagcgaattccaacaatgataagatttaattattggttatctgttctgtcatttttttccttagccattttatcaaagaattccgtcgctaataattctattgataatttagaaaaacctataactctaaagctgagctttgataaatattctgttccctattcaacatttattattgatggacagacagtatatgcaatgattgacacaggcttttatatggggttttatctttacgaatttcagataaagaaaattaaaggactcaaaaaagaaagtatttatcacagtaccgaattaaccgggtaaaatccgaaaaatattaaattttcactcaaatccct

SEQ ID NO: 2237 - DNA, 9574 bp, Xenorhabdus sp.; identical to SEQ ID NO: 2236
  CDS (1329)..(1511)

SEQ ID NO: 2238 - DNA, 9574 bp, Xenorhabdus sp.; identical to SEQ ID NO: 2236
  CDS (1520)..(1837)

SEQ ID NO: 2239 - DNA, 9574 bp, Xenorhabdus sp.; identical to SEQ ID NO: 2236
  CDS (2187)..(4154)

SEQ ID NO: 2240 - DNA, 9574 bp, Xenorhabdus sp.; identical to SEQ ID NO: 2236
  CDS (4425)..(4700)

SEQ ID NO: 2241 - DNA, 9574 bp, Xenorhabdus sp.; identical to SEQ ID NO: 2236
  CDS (4817)..(6859)

SEQ ID NO: 2242 - DNA, 9574 bp, Xenorhabdus sp.; identical to SEQ ID NO: 2236
  CDS (7219)..(7620)

SEQ ID NO: 2243 - DNA, 9574 bp, Xenorhabdus sp.; identical to SEQ ID NO: 2236
  CDS (8076)..(9227)

SEQ ID NO: 2244 - DNA, 12710 bp, Xenorhabdus sp.; identical to SEQ ID NO: 330
  CDS (2)..(2134)
  unsure (1)..(12710): unsure at all n locations

SEQ ID NO: 2245 - DNA, 12710 bp, Xenorhabdus sp.; identical to SEQ ID NO: 330
  CDS (2262)..(4535)
  unsure (1)..(12710): unsure at all n locations

SEQ ID NO: 2246 - DNA, 12710 bp, Xenorhabdus sp.; identical to SEQ ID NO: 330
  CDS (4825)..(5046)
  unsure (1)..(12710): unsure at all n locations

SEQ ID NO: 2247 - DNA, 12710 bp, Xenorhabdus sp.; identical to SEQ ID NO: 330
  CDS (6269)..(7414)
  unsure (1)..(12710): unsure at all n locations

SEQ ID NO: 2248 - DNA, 12710 bp, Xenorhabdus sp.; identical to SEQ ID NO: 330
  CDS (7486)..(7929)
  unsure (1)..(12710): unsure at all n locations

SEQ ID NO: 2249 - DNA, 12710 bp, Xenorhabdus sp.; identical to SEQ ID NO: 330
  CDS (8073)..(9143)
  unsure (1)..(12710): unsure at all n locations

SEQ ID NO: 2250 - DNA, 12710 bp, Xenorhabdus sp.; identical to SEQ ID NO: 330
  CDS (9293)..(10414)
  unsure (1)..(12710): unsure at all n locations

SEQ ID NO: 2251 - DNA, 12710 bp, Xenorhabdus sp.; identical to SEQ ID NO: 330
  CDS (10531)..(11808)
  unsure (1)..(12710): unsure at all n locations

SEQ ID NO: 2252 - DNA, 12710 bp, Xenorhabdus sp.; identical to SEQ ID NO: 330
  CDS (11820)..(12440)
  unsure (1)..(12710): unsure at all n locations

SEQ ID NO: 2253 - DNA, 11061 bp, Xenorhabdus sp.
  CDS (563)..(1411)
ccatgtgctctaaaggatggataagtattggcgttcattaaacatgacgatgaagaatcatcaatcaaataagataacgaaattgtctgtgagaaatatccaatttcaaacgggtttaaccgagcgggattttgatattgctgcgttgaagagaacgagatagtacccggaggtacaaacaatgcggtcaataataaggacgaagaggtgcattatttcacagctggtcagtgcgttgaccatgttcgtttgttggaatatatctgccggaaaactggatgtctctgtcggatgggaacagcgggttttctttgagaagggcttatccaataaacaggaaagggaaagccattcctttcaggcaggaggtaaatactttacggagtgggatagtgataagcagcacatcgttatggatgctctgtatcgaaaagactccagtagcaataacagagaaccttttgagccacgagatttatattggggatatatccataattcatgggaactttatgcgggtttcaggaaagtattttggggtgtgacagagtttagtcacccggtggatattattaatcagtcagatttggtcgatgatccttttggaaacgaaaagcttggtcagccaatgattaatttaaccaaagtacatgactggggtatttttgatctgtttctgcttactggatttagggagagaacattccccggacatacagcaaggttacgtgctgaattaaatattgatacgcgaaatgccgtttatcagcatgcgaataaaagatcaaagctggattttgctgtgcgcagccatcatacattaggtaatgttgatttagggttatcttactttaatggtactgaacgtacaccggaattttttttaaatagcgaccatcaactggttccctattatgggcagattcagcaaattggtttggaataccaatggaacattaataattggattattaaatgggaaggtgcttatagggaaaaagaccgtaacttttcgaaaagccctaaaacctcatttttagtttattcgggtggtttggaatatacccaatacggcgttttaggaagcggtgctaatttaatattttttctggaatatatgaaagacacccgtaatagattttcagatacaccttttgggaatgatgtttttgctggtattcaattttctgcaaatgatgaacaggactcagttttgtttttaggtgtgactcaggacatgcactatggttccagagcatggtcagttaatggtagtcgccgactgggagataatttcaaattatcattgaatggggccatttttgaaaatttaaatgccgaagatcttttatatggcttccgtaatgaaagttatattggaatgaaattcatctatttttttggtatttagagtttattaaaaggttaaaaatggataaagataacttgaatatacctgagggttttcaacaggaaatattatcggaattacttggtttaagttctgcaaggaatgattctgaggttctggatgagatattaatcaagcatgatttagataatgtttcattggtttcatggtttgaatcagttgttgaacactatgataaaaaaacagcattaatattaaatcaggagagaatgagttatggtgaactgaatagaagagcaaatgcagttgcacattatttacttgaaaaagcaccggaaagcaaatgcataggtatctttttagaaccctcattcgaaatggtgatcagtatcataggaatattaaaagcaggttatgcctatttgccattggatattaataatgcgagtgagagagtaagatctattcttaatgatgcaaaaccagatattgtcatcacaaatggcttatacctgaaagtattatctgactttgtggttgagactttttgttttgatcgtgattattcgccacttttaccttcatgggaagccaatccggaaaaagaagtgaagggtaaacaatgggcttatattatttatacctctggttcaacgggagagcctaagggcgtaacaatcgcacattataatgtcattcatctattccgtgcagccgaaaaacggtttaatttttcggataaggatgtctggacttgttttcattcgatagcatttgatttctccgtttgggaaatttggggtgcgcttttgaaaggaggaatgttggtattggtgccttataatatcagtaggaatccacccaaattttatgaattattggtacgtgaaaaagtcacggtattaaatcaaacaccaacagcatttaggttactgatgcaaaccgatgattatatgtcagacaaaacagaatctctcagcctgcgttacgttatctttggtggagaaatgttgaatgtatcgggtctccgtcaatggatagataagtacgggtatgaacaacctgcattaataaatatgtatggtattaccgaaaccacagtacatgtgacctttcatcaggttaaacccgatgatttggactgtaatataagccctattggattacctttgcccggtgtgaccatccatttattaaatgaagccggggagccagtaaaagaaaatcagactggggagatgtatattgcaggtttaggtgttgctaatggctatttaaatcgtccggagttaagtcgtcagaaattcgtccctgatacctttgaaagatcagcttcaaatttatatcgtaccggggatcttgctcgatatagagaaaatggagaattatattatttggggcgtatcgataatcagattcaaatcagaggttttcgggttgaattgggtgaaattgagtccgcaatgcgaaaattaagttttgttaaggatgctatcgccacaatctatcgacaggaacctaatgaattaaaaattgttgtcgtatatcaatctaataaagctgataagattcagcataaagaaatcagacagttattaaaagaatatcttcctgattatatgctacccgattttacaaaacgcgttgtggaatttccgatgaataaaaacggaaagttggacttgaatcagattggatggggtaaagatgaaataaatgacaataagtaatttaaacttacagtgattataatggccggatattaaattaagcttttctttgttctgtttttatcatcaagttatagaatggagtaattaattgcggtttttgctttcctccaataaaatcaattttgatttttgtaaaaaatagaacatgggagagtaaaaatgattggttatattacattaggcacgaatgatttttcccgtgcagcgacattttacgatgagctgcttgtcgagcttaatgctaaacgtgttatggaaacaccgacttttattgcctggggcccggattttaatgtgacgaatttgtgcattattaaaccatttgatggtaatccggctacggtgagcaatggtggaatgatcgcgctcaatgttgatagtcaggagaaagttaatgcagtgtataacaaagcgattgctctgggagcaatagatgaaggaaaaccgggacttcgtggcgatcatggtttttatgctgcctattttagagatcttgatggtaataaattaaatgtcttctgtatgttacagggataatctctattattaacatgtacacaggcaactataataaagttgcctgaaataattaaattaatttaattaggaggggctaaaaaataggagaaaggtatatagataaatattgtaatcgctaacagttatctaatcatattttaaaatttaattaattttaaatgacgggatgatattgttttttagtgttgattgattcttggggtttttatttaaaaatgaaaatttaataatttaaatttcaaactttgattggcttttatatgaaatacatcaccactattcctagtggaggttatttgtatgttttttatatattccattcaataatggtttttgtgtgaactaatggttttgatgcctttattacatttaacattaaatggaatttattagtatgaatgaaaaaaacaatatactcattgactcattggtcaatgagggaacatccgctgtgggttcttcagctgaagagattttattgaagttgctatatcagctaatcatcatatttatagttacacgaatatttgtttggattagccgttcttttttagggcaaacgacagttgcaggagagatattagccggtctggctttagggccaagcgtggcaggtgcattatttccggaattgatgggaggtattttcccaaaagaaagctcaactatttttatcggaattgcccagattggacttattttattaatgtttgaaataggacttgaatttgaatttggagagaagctaaagaaaagtcgattttcggttgctgtaataagtatggcgggtatttttttgccctttacggtcggttttttttctgctgaatggatatggaactcaattataacacctcgtccagataaaatagcgttccaattattttttgctttagcactatcgattacggctattcctgtattgggaagaatttttatggaactggggctggctcatacgcgaacagcagccttaataatcggtgctgctgcaattgatgatataatcggctggatattgttgggtgctatattgacactctttatttccgattatcagtttgatcaattcatgtttaacatgtttggcatagttatttatatcatattggtatttttaattgtcaggccacttctgcgtagttggctttcttcgaggttaaaaaaagaaaagcggctcagccatcctgttatggcgtacataattattgttctgtttttatcggctttagtaacgagttatctgggagtcttcgccctaatcggtagttttgctattggtattgtgttacatgacaacagagagtttgttgtacgctggaaagaaagcattggcagtctggtacatgtattttttctcccgatattttttacgtacacagggcttcgtacagacataggtagtttgagtggctccgacgaatggatgatatgtctattcatctgtttagtagcatttgtgacaaagtttgggggaacctatattgcaagtaggctattaggtgaaaatcgtcgtattgctgcaactattggtatttcaatgaacacaagagccctaatggaacttattgttctaaatattggttatgatttaggtatcttgccacctaatatttttactatgctagtaattatggcgattttaagtacttttattacaacacctttgatccgctggttaatgagtagcaaaaagttacctagttctgaaatacgttgacatttattaacacctgatgatgtatttcatcaggcgtttttatttatggctttagccagtttaagtcgcgttagcgtcttaaacataaaaccacccgctttgcgggtggagttcaaaggttataccaagaaaaacacctttccgttacgatatagatgttcaagctaatattcgtaactcaaataaggaaaggtgtttatgggcattaaagcacaaagctcagcgcatacaaagtggctgtgtaaataccatatcgtcttttcgccgaaatatagacggaaagtgatttttaataatattcgttcaagtgtgggagagatcctcagagacctttgtaagtataaaggtgtggaaataatcgaaggtcatctcatgccagatcatgttcatatgttggtgagtattccaccaaagctaagcgtttcaagctttatgggatatttgaagggtaaaagttcgttgatgatctttgatagacacgccaatttaaaatataaatttggcaacagaaagttttgggcggaagggttctatgtcagtacggtagggctaaatgaagcgacaattcaaaaatatatcagagagcaagaaaagtcggatttaatctcggataaattgagtagtaaagagcatgtagaccccttcaaggggtaggccaaagcagcaaagacacttagcttgaacgaagagaaagcagcgtcatttaggcgcagtcggtaacaagcccttatagggcaagagcaaaccacccgttatacgggtggttatgattaaaaatacgcttccccctttcatcaggaatgggtagactgcgcggaaatagctaacacatgtaagctgaaaattaggcagttttcttgctgaatgtgatgaaccaaagatttagaacaggaatatattgtggtaacaaattctctccactcctatcacttgatcacgcgattacaacagcaagtcagcaaataccctgaaaagattgcatttcgccaatggtcagcatcagaacagcttgaaatgagctggcaggatgttgatagtaaaacgaaatccattgcaagatccctgctgtcacttgaggtgggaattcaggagaaaatcggtatttttgccgataactcaatggcatggtcattatcggatttggctattttgcagttacgtgctgtcacagtaccgctttatgcgacaagtagccgtgatcaggctgcatttattctcaatgatgcaggagtacggatattatttgtgggagggcaggagcagtacgatatcgcgttgatattgttagccctttgcccgcagcttaatcatctggttgttctggatgaatctgtcgatttgaaagaatgtccacaagcattgtatttatcggcatttattgctgatgacagaccactgtatcaggctgaacttgatagccgcattgccgggttggatttgcatgatctttttacgctgatttatacctccggtacaacaggcgaaccaaaaggtgtcatgctggattaccagaatatcgccgcccagctttatctgcatgatcagcgcttaacgctgactgaacaggatatttccctcagttttctgccgttatcccatatttttgagcgtgcatggagttattacgtcatgcatacaggtgccttaaatgtctatctgaccgacaccaattttgttcgggaggcgatgcttgatgtgcgtccgaccgtgatgtgttctgttcctcgtctgtatgaaaaaatacatagtgcaattcttgagaaagtgtcccgcgctccattctggcgcagaataattttccagtgggcgatcaaacggggtgaacgccgttggtcacgtcaattaaacgataaaaagagctgtccgttttctctatgcggagaaaaactggctgatcgtttggtactgaacaaacttcgccagctattaggtgggcggatccgttttctgccggtagccggagcacgacttgaagactccattatgcgtttcttcctgtcagttggtctcaatatcaaatacggttatggaatgacggaaacctgtgccacggtttcctgttgggaagagaaaaattatctgttgggttcaattggtacaccattgcccggagtggatgttcgtatcagcacagcgggtgaaattcaggtacgtggcccaatcgtaatgaaagggtattacaatcggccggaagatacggttcatgcctttactgaagatggctggctgcgaacaggggatgccggagggctggatgaaaccgggaatttgttcattacagaacgcctgaaagatttaatgaaaacgtcaacgggaaaatatattgctccgcaattaattgaaggaacactggggcaagatcgttttattgaacatattgctgtgattgctgatgcccgccagtttgtttcagcgttaattgttcccagctatgaagcgctggaggattacgcaaaatcgataaatcttcattaccagaatcgtctggaattgctgcgtaatcatcaggttatcgggttatttgaacaacgcctgaaagaattgcagaaaaatatcgccaaattccatcaggtaaaacgctttacgctgctgccggagtccttttcgatggaaaaaggcgaattgactccgacactgaaattacggcgtaaggtgatttctcaacgttatcagagtgaaattgagtccatgtatcgggattgaatcagctctggataataacgctcctgctttggtttaactgagagcaacgaaatcatttcattaaaaaaatgttttcaatatgtgaattgttgtttgataaccttgagatctgacgttatgttaatggcttagtgtattaatgaaatgcgtgtcattacgaatgctaatctaataaacactatgaataaatagaatgggataaataaggtcactttcatgatgaccttatgaagtcctgacattaacttgcaaacagagcctggaggcaaactcaatggagatgttgtcaggagccgaaatggtcgtcagatcgttaatcgatcagggcgttgagcatgtattcggttatccgggaggggctgtcctggatatttatgatgccttgcatacgattggcggaatagaacatattctggtccgtcacgaacagggtgctgttcatatggcggatggttatacgcgttcaacggggcaaacgggggttgttctggtcacttcagggccgggagcaaccaacgccataaccggaattgcaacggcgtatatggattctattccgatggtggtgttgtctggtcaggtggccagctctttgatcggtaacgatgcttttcaggaatgtgacatggtggggatctcccgccctatcgtcaaacatagctttctggtgaagaaagcggaagatattccaaatataatcaaaaaagccttttatttagctgcaagtggccgtccgggacctgttgttattgatttccctaaagataccgttaatcctgcgctgaaatttccctatatttatccagaaaaaatcaatatgcgctcctacaatccaacgattcaggggcataagggacagattaagcgagcactgaaagcgttacaggaagcgaaaaaaccggtgctttatgtaggaggcggtgcgattaattcggattgttcagcggaattgctgaaactggcggaatcccttcgtcttcctgtgacaagctcattgatgggactcggtgcttttcctgctactcatcagcagagtctgggtatgctggggatgcatggcacgtttgaagccaataaagcgatgcacaatgccgacattattcttgctgtaggggtgcgttttgatgatcgcacgaccaataacttagcaaaatattgcccgcaagcggcggtgttacatattgatattgatccaacatccatttctaaaacggtgacggctgatattccgattgttggcgatgcgaaacaggtactcggtcagatggtggagctgttggacgcaacggaaagctctcaggatcctgatgcaataaaagactggtggctatccgttgaacagtggcgtaatcgcaagtgtcttgattatgatcgcgccagcccgaaaataaaaccacaggcagtgattgaagcgctgtatcgcttgaccaaaggggatgcgtatattgcatccgatgttggtcagcatcagatgtttgccgcactgcattatccatttgataagccaaggcgctggattaattctggtggtctgggaacgatgggctttggtctgcctgcggctctgggtgttaagctggcaaatccggaagcaacggtcatatgtgtgaccggcgatggcagtattcagatgaatattcaggagctgtccactgcattacagtacggcttaccggttctggtgcttaacttaaacaaccgtttcttgggcatggtgaaacagatacaggatatcatttacgcaggtcgccattctcagtcctacatggagtcattgcccgattttgtcaggctggcagaagcttacgggcatattggtgtttccatccagagttatgatgagctggaaagcaaactggctcaggctttgcgtgaagtgacagaaaaccagcgtctggtttttgttgatgttaccgttgatgaaacagaacacgtttatccaatgcagatccgtggaggagcaatggatgagatgtggttaagcaaaacagagaggacctgatcatgcgccggattttgtctgtattacttgaaaacgaatcgggagcattgtctcgcgtagtgggtctgttttcccaacggggttacaatattgaaagtctgacggtggcaccaacggaagatccgactttgtcacgcatgaccattcagactaaaggtgatgctaaagtattggagcagatagaaaaacagctgcataagctagtggatgttctgcgggttaatgagttaacggctggtgctcacgttgagcgtgaaatcatgctggtaaaattgcaggccagtggatacgggcgcgaagaaattaaacgcagcaccgatatttttcgtgggcagatcgttgatgtgacttcgtcattgtatactgttcagttggtgggaacgagcgaaaaactggatgcctttcttgatgcggtgcgggaagttgcagagatcgtggaagtggcacgatcaggcattgtaggtgttgcgcgcggagaaaaaattatgcgatgaaaattcgcaatctgcgggttaatatacagatatttactgggccctactgtaacgtggggctttttctatcatattactgaggggttaatgtgaaactggatgagatcgcccgcttagcaggtgtttcacgtactacggccagttatgttatcaatggtaaagctaaacagtatcgggtcagcgataaaacagtagaaaaagtgatggcggtagtcagagaacataactaccatcctaatgctgttgctgccggcctacgggcaggacgtacccgttccattggtttagtgataccggatttggagaatacgagctatacccgtattgctaactaccttgaacgtcaggcacggcagcgcggatatcagttattgatagcctgctctgaagaccagccagataacgaaatgcgttgtgttgagcatcttttgcaacggcaagttgatgcaattattgtttccactgctctgcctcctgagcatccattttaccagcgc

SEQ ID NO: 2254 - DNA, 11061 bp, Xenorhabdus sp.; identical to SEQ ID NO: 2253
  CDS (1582)..(3102)

SEQ ID NO: 2255 - DNA, 11061 bp, Xenorhabdus sp.; identical to SEQ ID NO: 2253
  CDS (3265)..(3642)

SEQ ID NO: 2256 - DNA, 11061 bp, Xenorhabdus sp.; identical to SEQ ID NO: 2253
  CDS (5714)..(6019)

SEQ ID NO: 2257 - DNA, 11061 bp, Xenorhabdus sp.; identical to SEQ ID NO: 2253
  CDS (6293)..(8068)

SEQ ID NO: 2258 - DNA, 11061 bp, Xenorhabdus sp.; identical to SEQ ID NO: 2253
  CDS (8340)..(10070)

SEQ ID NO: 2259 - DNA, 11061 bp, Xenorhabdus sp.; identical to SEQ ID NO: 2253
  CDS (10073)..(10564)

SEQ ID NO: 2260 - DNA, 11061 bp, Xenorhabdus sp.; identical to SEQ ID NO: 2253
  CDS (10654)..(11061)

SEQ ID NO: 2261 - DNA, 15501 bp, Xenorhabdus sp.
  CDS (16)..(720)
agtttgctctaaagtgtttcattgcctggccgtcgtatggaaaatggcggattacatccagtcactcgtacgattgaacgaattgaaactttctttggtgagctaggcttttctgttaaagctggtccagaaattgaagacgactaccataactttgacgcgctgaatatccctgcagatcacccggctcgtgctgatcacgacacattctggtttgatgcaaaacgtttgctacgtacgcaaacgtcaggtgttcagatccgcacaatgaaagaaggtcagccacctatccgcatcattgcaccaggtcgggtataccggaatgattacgatcagacgcataccccaatgttccatcagatagaagggttgattgttgataagaatatcagcttcaccaatctgaagggcacgttgcatgattttttgaataacttctttgaagaagatatgcaggttcgtttccgcccatcctattttccgtttactgaaccatccgcagaagttgatgtgatgggtaaaaatggcaaatggctggaagtattaggctgtggcatggttcacccgaacgtattgcgtaatgttggcattgatcctgaagtttactctggttttgcctttggtatgggaatggaacgcttgacgatgctgcgttatggcgtcaccgatctacgtgctttcttcgaaaatgatttgcgtttcctcaaacagtttaaataaggcgggaatatttcatgaaattcagtgaactctggttacgcgaatgggcgaatcctgccattagtagcgaagaactgtctgatcaaatcaccatggcgggcttggaagttgatggcgttgaaaaagtagcgggtcaatttaatggtgttttcgtcggtgaagttgttgaatgcgctcaacatccgaacgcagacaaattgcgcgtcacaaaagttaatgttggtggtgatcgcctcctcgatatcgtctgtggtgcacccaattgccgtcagggcctgcgtgtagcagttgctaccgttggtgctgtcttgccgggtgattttaaaattaaagcggccaaattacgtggtgagccgtcagaaggcatgctttgctcgctttctgagctgggaattagcaatgatcacgatggcattattgaattaccagctgatgcgccaattggtgccgatttgcgcgattacatgaaattggatgatagtgcgattgaaatcagcattacacctaaccgcgcagactgccttagcattcagggcgttgcccgcgatgttgccgttatcaataaattgtccatgaatgagccggaaatcgagcctgttaaacccgctacagatgcgacattctctattcgtgttgacgcgccagaagcttgtccgcgttatttagggcgagttatcaataacgtcaatgtcgaagcagaaacgccactgtggatgcgcgaaaaactgcgtcgtggtggagttcgttctatcgatcctgttgttgatgtcactaattacgtattgcttgagctgggccagccattacacgcgttcgatttagagcgtttagacagttctattattgttcgtctggcagaacagggtgaaaaattaaccctgctggatggaaatgaagtggaactttctgctgatacgcttgtgattgctgatgaaaagcaaccacttgcaatggcaggaatttttggcggcgaatattctggtgttagtacaaaaacacaacatattctgctggagtgtgctttttttgcaccattggcaattactggccgtgcccgtcgttatggtttgcatacagatgcctctcatcgtttcgaacgtggcgttgatccgcagttgcaatttaaagcaatggaatacgcaacacagttactggttgctatttgtggtggggaagctggtgagattattgatgttaccagtgagtctcatttaccaaagccagcgactattacactgactcgtaataaattggatcgtttgattggtcatcatattgctgatgagcaggtaacggacatcctgagccgtctgggctgtcaggtaacagttcagaatggtaattgggaagcagtagctccgagctggcgcttcgacatgcagattgaagaagatctggttgaagaagttgcccgtatttatggctacaacaatattcctgatgtacctgtacgcgccgatttggtcatgacttcacaccgtgaagctgatttatctcttaagcgcgtcaaaactatgttggtggacaaaggttatcaggaagttatcacctatagctttgttgatccgaaactccagcagcaattacatccgcaacaggaagcattaattctgccaaatccgatttcggctgatatgtcagcaatgcgcttgtctttgctaaccggattactgacgacagttgcttataatcagaaccgtcagcaacaccgagtgcgattatttgaatcaggtctacgttttgtgcctgatgaaagcgcagaatatggtattcgtcaggaattgatgcttggtggagtaatcgccggaaatcgtttcgatgagcattggtcgattgaaaaacaagcagttgacttcttcgatttgaaaggtgatttagaatccgttttagaactgacgggtaaactatccgagatttcctttaaagcagaagaacatcctgccttgcatcccggacaaagtgctgggatttatctgggaaataaatacattggttacatcggggtcgttcatccagagctggaacgtaaacttgacttgaatggccgcaccgtggtattcgaattgttgtgggacaaacttgcggaccgcataattcctgaaatgaaggaagtttctcgcttcccatccaatcgccgtgatatcgcgatagttgtgccggaaaatgtagctgcagaagatattctggttgaatgtaagaaagttggcgtaaatcatatagttggcataaacttatttgacgtgtattgtggtaaaggtgtcgcggaaggctataaaagccttgctattagcttaatcttgcaggatacctcgcgtacactggaagaagaagaaattgctgcgaccgttagcaaatgcgttgctgcattagaacagcgattccaagcatccttgagggactgaacttatggcgcttactaaagctgaaatgtcagaaaatctgtttgaaaaactgggtattagcaaacgtgacgctaaagatctagtggaaatgttctttgaagaagtgcgtcgttctttggagaatggggagcaggttaagttatctggatttggtaactttgatttgagagataaaaatcaacgtccaggtcgtaatccgaaaactggcgaggatatacctattactgctcgtcgtgtcgtcacctttcgccctgggcaaaagttgaagagtcgggtagaaaaagcgttaccaaaagaataaaatatgaaaaggccgcgattagcggtctttttcttgctctttatcctgaatattttcatttctcatgttatcgaaacatcgtttaccgatttattctgtttctgaactcctcactcgtcagaaaaaacgtgactaccgagtgatagctctcctgcttattttatctgttggattatttattttatcgctgtctgccggtgaaatatggttctggccaactcaatggttgtctgattccgcccagttgtttatttggcagttgagattgcccagagcattggcagtatttgtcgttggtgccagtctagcggtgtcaggtgcagttatgcaggcgttatttgagaatccgctggctgaacccggattattgggtgtcagtaatggggcaggggtagtggttgtttttttgatcctcatttttcatggtatcgctccattatggctattaagtgctggtgcagttttaggggcactttttatgacagcaattctgctgggatttgctaaaaagcaccaaatgactaatgcacgtttattattaatcggggttgctttcggagtagtatttggtgccgtaattacatggatggtttatttcagtaccagtctcgacttacgccaattgatgtattggatgatgggcagtttcagtggcattgactggcgccaaatatggctggtgattgcattgtgcccgttgatcctttggttaagtagaaccggaaaaacacttaattatctttctctgggtgaattacaggcacagcaattagggatctcgcatcataattggcgtaatttatttgtaaccgcagtgggattactggttggtttgagtgtagcgcttgccggagcgattagttttatcgggttagtcattccccatattttaaggctgattggcttgacggatcataaaacattattacctgcctgcacattagccggtggtagttgtttattactggcagatttattctctcgtttatctttatcccatgcggaaataccaataggggttgttacagcaactctgggagcgcctgtgtttatctggttattattgaaagcgccacggatataaagagctttaaaaaatgaggggaagtaccaaaaaacgagaatagggaagatagtatgattcagctaccacttttagtattggataatattactgtcaacaacagactgaattcgctgtctgcctccgtcaaggctggagagaaagttcatttggtagggctgaatggctctggaaaaagtactttgcttgcggctattgccggtattttacctcatgatggcacgattcaccttaacggcaaaaaattgagtgattatcggcagagggaactggcacagtatcgggcatggttttctcagtcggtatcagctcccgccatgcctgtttttcaatatctggatatgtatcgtcctgagtcggcttccctgtctgaaggtgaacaggtattacatgaaatttgtcagcaactgaaactgactgcgttactggcttcaacaattgggcaactatctggaggcgagtggcagcgggtgagattagcgggcacttttttgcaggtatggcctgaacttaatccggtaggaaaattactgttgcttgatgagccgactaataatcttgatatcacacagcaagctattttagataaattaattaaccaattttgtgtattgggagggacagttttattgagtagccatgatcttaatcacacttatgaacaggccgacaatgtatggttgctcgctcgtggtgagttgattatgtctggtcgaccacataatgtgatgaatgaaagaaatttatccgaaatttttgaaataaatattagacatatccaaaatactggctataaattatggagggtagatcatctctaatcttcaaaggtagaaatcaccttggttgattgttttttctctctttttcgttgattgccctcagtttgtttgcttgttgttattttgtctatgaagtgttcgtcagaatgtcttccaattataaaatgagtcaggctacgcaaggcgattatgaacaattttttaccattctcccgtccatcgattgtgcgtgaagaggttgaggcagtagaacaggttttactttcaggttggatcactacggggccacaaaaccagcagctagaacaggattttgcccgaatgtttggttgcagacatgctattgctctgtattcggctacggccgggatgcatttggcattattagcattgaaaataggccccggcgatgaagttatcactccttcccaaacttgggtttccaccattaatatgatttgcctgtcaggcgctgaaccggtcatggtcgatgttgatcgtgatacattgatggtcagtgcggaaacggtcaggcaggcgattaccccgaaaactaaagcaattattccagtccactatgctggtgctccctgtgatcttgatgctttacgcgtggttgcggaagaggcgggtattcccttaattgaagatgcggctcatgcagtaggaacccgttataaaaatgaatgggtaggtgagcgaggaaccgccattttttctttccacgctatcaaaaacatgacatgcgctgaaggtggcatgtttgttacagataatgatgagctggcgcaaaaaatccgcagtctgaaattccacggtctggctgttgatgcgtttgatcggcagcttcagggccggaagccacaggctgaggttattgaaccgggcttcaaatacaacctgtcagatattcatgcggcgatagcagttgttcagttagggaaactggcctccatgaatgcccgccgtcgggagctggtggcccgttataccgctgctcttcacgattctcctctaaaaatgctgagcgttcctgaatatgaacaccagcattctcatcatttattcatggtacgagtagatcaaaaagtttgtggtattgaccgtgacactttcatgactcgtttgaaagaacgcaatattggcacagggttacatttcagagcggtacatacacaaaaatattatcgggaacgctatccaactctgtctttgcctgaatctgaatggaattcagtgacactttgttcgttacccctttttccagatatgagtaatgacgatgtggatcgggttgttaacgcggtattggaaattattgcggagtaaaaacagtgggatttgaagaaattagaaaagtttcggtggttattcctgtttataacgaagaagaaagcttacctcaattattaaaaagaactatctctgcctgccagcaactcaatcaggaatatgaattaattctggtggatgatggtagccgagacagctctgcggagattttaacccaggcagctgacgatcccgaaagttatgtcattgcaattttgctgaaccgtaattatgggcagcattctgcaattatggcggggttccatcaggcaagcggtgatcttgttatcacacttgatgcagatttgcagaacccaccagaagagatcccccgtttagtgaaggttgctgaagaaggatatgatgttgtcggtacacgccgtgccaaccgacaggattcatggttccgtaaaacggcctctaaaatgatcaacgccatgataacgaaagtgacggggcgctctatgggcgactacggctgtatgttgcgtgcatatcgccgccatattgtgcgagcgatgttgcaatgccatgaacgcagtacatttattcctattcttgccaatacattcgctcgccgaacaactgaaattgatgtaacccatgcagaacgcgaattcggtgattccaaatacagttttatgaagttgataaatctgatgtatgacctgctgacctgcctgacgaccgcgccgttacggttattgagtgtagtgggaagtattattgccgtgacgggttttttgttggctgtattactgatcgctttgcgcctgatttttggtgctatatgggctgctgaaggcgtctttaccctatttgccattctttttatgtttattggcgctcaattcgtcgcaatggggttactcggagaatatatcggtcgcatatataacgatgttcgtgcccgcccacgttactttattcaaaaagtggtcggggataaaaagaccaacgataatcaggaagaaaaagaatgaaagcagtgatttttgcctaccatgatattggttgtgccggacttaatgcattagtgaaagcaggtttcgatatccgggttatttttacacatgttgatgatccaaatgaaaataattttttctcttctgtggctcgtgcaggtgcggatttaggtttatccgtatttgcgccggaaaatgtgaatcacccgctctgggttgaacatattcgtgaaatgcagccggatattatcttttcattttattatcgcgatatgctcagccaggatattttatcactggcaaaaaaaggcgcgtttaatctgcatggctctttgctaccaaaatatcgtggtcgtgctccggttaactgggctatcttaaatggcgagacagaaacaggtgtgacattacataaaatgtcagcgaaggccgatgccggagatgttgttgcacaacaggcagtacagattgagaaaactgatacttcattgatagtacatgggaaaatccgtgaagcagcaactgaattactgaatgatattctgcctcgctttaaagcagataattacctttcaatcccacaggatgaaagtcaggccacttattttggccgcagaaccgctgaagatggtgaaattttctggcataaatcggctgaagagatcaataaccttgtccgggcagtgacagaaccttatcccggtgcatttacttttcttggtgagcgaaaaatcacgatctggcgctcagttccactgaatacaacacacgataaacaggctggaacagtgctctccatcgacccgctggttgttgcgtgtggaattggcgctctggaaattgttagtgggcagagcgaatcaggcatctacgttcagggtagccggcttgctcaggagatgggtatagttaccggtattcaggttgggcagaaagccaccgcacagatcccccgccgcaagcgagttttgattctgggagtaaatggatttatcggtaatcatttaacagaacgtctgctgaatgatggtagctatgatgtttacggtatggatattggctcttctgcgatagagcgctttattggtaaccctcattttcactttattgaaggtgacgtcagcattcacactgagtggatcgaatatcacatcaaaaaatgtgatgtcattctaccgttagtcgctatcgctacgcctatcgaatatacccgtaatccactgcgtgtttttgagttggattttgaagaaaatctgaaaattgttcgttattgtgtgaaatacaacaagcggattattttcccgtccacttccgaagtttatggcatgtgtgatgataaagaattcgatgaagacacgtcacgccttatcgtggggccaattaataaacagcgctggatctattctgtctctaaacaattacttgatcgtgttatctgggcatacggcgaaaaagaaggtttgaaatttaccctgttccgtccatttaactggatgggaccacggttagataatttaaactcagcgcgtattggcagttccagagcaattactcagttaatcttaaatctggtcgaaggctccccgataaaattagttgatggcggagagcaaaaacgctgttttactgatattcatgatgggattgaggcgctgttcagaattattgaaaacaaaaatggcttatgtgatgggcggattatcaatatcggtaacccgacgaatgaagccagtattcgtcaattagctgaaatattgctaaatagttttgaaaaacacgaattacgcgggaattttcctcctttcgccggttttaaaaagatcgaaagcagcagttattacggtcagggttatcaggatgttgagcatcgtaagcccagtattaaaaatgcggaacgcctgttggggtggaaacccactatcggtatggaacagacgatcgatgagacactggatttcttcttgcgtgatgccgtgcaggaattgaaaaggaaaaagcaacatacagggtaaatatgatgcaaaaagtgggcttaagaattgacgtagacacttatcagggcaccaaggaaggtgtaccgcgtttgcttaaaattttacagcgtcattatattcaggccagtttttttttcagtgtcggcccggataatatggggcgtcatttatggcggctgctgaaacctaaatttttgtggaagatgttgagatcaaacgctgtttctctgtacggcccggatattctgttagccggtactgcttggccgggaaagaaaattgcaaaagatttaggttatttgatgaaacagacgatagaagaaggtcatgaagtgggtttgcatgcatgggatcatcaaagctggcaggcgaaagtaggtcgttggtcaggaccagaattagcagaacagatacggcttggtgttgatgcgttaaaaaaggagacagggcaggctgtatcatgctcggcggttgctggctggcgcgcaaatgagcgggtgctggtggctaaacagcaatttggttttgattacaacagtgattgccgtggaacacatccattcaggccacttttgcctgatggaagtctaggaaccgttcaaattccggtgacattgccaacttatgatgaagttatcggtacgcaggtcagtgacatcaattttaaccattttattctggatgccattcaaaatgcccacggtgttcctgtttataccattcacgcagaagttgaaggaatgtctaaatcatcacagtttgaggcactattggatatgctgcaccagcaagatattcagttttgtaaattaggtcatttactacctgaaaacccggaaacattgccagttgggagaattgttcgttccgattttcctggtcgtgaaggctggttaggttgtcaacaagaggtataaaaaaatatgtcgaatgttcgaatgagtagagctggagccgttttaatggctcttttttttatctttacttacttgatccctttgaatggacgtcttttatggcaaccagatgaaactcgatatgctgaaatcagccgggatatgttacagcgtggcgattggatcgtgccttattttcttgatatccgttattttgaaaaaccagtggcaggatattggataaatagcatcagtcagtggattttcggcgatagcaatttcgcagtgcgttttggctcagtattcagcattatgctcagcgcatttcttctttatcgattagccatgatgatgtggcagtgtcgtcagacagcatctatctcctgcctgatttacatctccatgtttattgttttttctgtcgggacttatagtgttctcgatcccatgttttcattgtgggtcacggctggaattgtcagctgctattgggcactgaaagccagcagtacccgagagcgggtttttgcctggtttgtgctgggtataacctgtggcatggcttttatgacaaaaggctttctggcactggttctgccggtgatctcgatgatacccgtcacgatataccagaaacgctttctggagatgctccgttttggtccgattgccattatcggcgctgttttgattagtctgccgtgggtgattgcggttgctgttcgggagcctgattattggcattattttttctggatagaacatatccagcgttttgcttccgagaatgcacaacatgcatcaccattctggttttatctgccgatagtgattttgggtgtcattccgtggttaggattattacccggtgcattatttactggctggaaagcgaagaaaaatcatcctgaaatgttttttctcttatgctggttctgtattcctttgatatttttcagtatatcgagagggaaattactgacctatatcttgccgtgtatggggcctttagcattgatgatggcaaaatacgccgttgatagtatgagaaatggcaaaataaaggcattgaagcttaatggattagtcaatgttttcattggactgattgcaatactggcactggtatttttggagatattctccaaaaatcctctttatcagtctaatgaattacataaatgggtattaggaattttgacatttgctgtctggggtatcgtgggatatttctgtttcagacataacggtaagcactggcaatgggccgcagcctgttcaattatgcttagcctatcaataggcagtgcactgcctgataaaacgattaattctaaacttccacaagatttcatccgacaaaacgaaaaagaattagcagaaagtaaatatatcttatcggtatccgttggggtaggggcggcactggcgtgggaattaaaacgcaatgatatctatttattccaaaacaagggtgaactggcgtatggactggattatccggatagccaaaatcgatatataacactagagcaatttcccgcttggctaaccagcgcacggaaagagggtcaggttgccgttgtttttttattatcgtcaaaagggaaactgcctgagttacccaaaccggatcttgtacagcgaaaatcccgttttgttcttgtcatttataagaagcaaccatgatgaacaacagtgcaggattattgatacttgttagtttattaacctgtgcaggacagatttgtcagaaacaagcggttatctgctggggaaaaaagactccctataaaacatcactcgtggtggtatggctagtggctgctatgcttcttttgggggccggaatggtattctggctgcgattactgcaatttttaccactcagcatcgcctatccgatgctgagcattaattttgtggtaataacattgatcgggcaatttttgtataaggagaaagtggggttaaaacactggattggtgttttagccattatgttggggatcctgttaatgagcctgaatcaatgaaggggtatttttggggagtagcgaatgttttactggtcacggtcgcgcaactatttttgaagtggggaatggctcggttacctgaactatccttattgctacattggttcagtatagactggttgtggctgaattttaatcctttgctggtggtgatggcagggcttaccagttacgcattatctatgttctgctggttttttactttgaaatatctgccattgaataaagcgtatccactattaagcctgagttacatttttgtttatttaatggcagtattattaccttggtttaatgaaaatacctcaccattaaagacgataggcatcttgctaattctatttggtgtttggtttattagcaggccagaaagcaggagggctgattgatgtcaataaaaatcaggcatttatgtctgctactgagcctgttacttattggttgttctaaccatattccgcaatcgcagctaccaccatcgcgagcagctctgtctgatccgattatggttatcgcaaaattaaaagagcaacttgaacaatggcagggaacaccttaccgctatggaggtatggatcggcggggtgtggattgctcaggttttgtttatcgtacatttcatgatcgctttaatatcctccttccacggacaacaaatcagcaaactcaactgggaacccggatcagcaaaaaggatttgatgccgggtgatctggtatttttcaaaaccggcagtggtgctaacggattacatgttgggatttatgatatcaataatgaatttattcatgtctctaccagcaatggtgttatgcgttcctctcttgataatgtttattggcagcgagttttttggcaagcccgcagaatatgatcacgacctgaatcaccaatttaatctgagcgttatgatatcctaaggcattgtttttctttgtctggagacaagtaatgtctagattacgattgctgctgtctgattcttatgatccctggtttaatctcgctgttgaagaatgtatttttcggcaaatgtcaccagagcagagtgttttgttcctatggcgcaatgccaatacagttgtcatagggcgtgcgcaaaatccgtggaaggaatgtaatacgcggagcatggaacaggatggtgtaaagctagcccggcgcagtagtggcggtggtgccgtttttcatgatttggggaatacctgttttacctttatggccggtaagccagcctataacaaagaggtttctactcagattattctggatggactaaaaaaatctggtattcatgcaatggtttctggtcgtaatgatctggttttatcatctccggaaggagagcgtaaaatttcaggctctgcatatcgagaaactaaagatcgcggatttcatcatggtacattgctaattaatgccgatttgaaccgccttgctgattatctcaaccctgatcctaaaaaattacaggctaaaggcattacttctgttcgttccagagtggcaaacctgtcagatttgttgccagacatcacacatgaaaaaatatgtgcagggatcaccgatgcgttttttgagtattttggtgaagtggtagagccggaaattatttcaccgcaggcgttaccagatttacccggctttgttgatgtttttaagaagcaaagtagctgggaatggaacttcgggcaggcccccgcattcagtcatacactggatatccggttttcttggggaggtattgagttacatgttgatattgagcatggaattatcagtcgttgtcaaattttcactgacagtctcgaacccgcaccatttgaagtactggcagaaaaactgacaggtgtgctatatcagccagaagctgttgagcagataattctagctatcagagaacaataccccttactggatgcagagttgcagcaattttcatattggttggtaaatgaactgaaatagaaaataattgacaaaggttagacctaaaagaaggtcaacaacagggaagttgaccataaagaatgataattactatgagttactcttcgcaaaataagaatgtctttaactcaggtaatttgccattttctcggaatttagcgggcgtggtattaaagtgctttttaaagatccgtgtaaatgtagcctgagaactgaaaccatattgcagggcaatatccagaatcggcaagtcatcctcgtgtaacgacttggcggcttcatgaaggcggcgccgacgtacatactgacccaatgtacagcctttcaattccttaaaaatgcgttgtaaatgccattttgaataaccacttttatgggcaatggcatctattttaataccttcagtcagttgaagctggttttctaaccatttaacaatatcgttgataacactttctaacatatatacctcccactaatgtgggcttgtgctaaaaaagagtgatatacaaatgataattaatattattggaatggctcattttaataatatattttatagcgtatacgcaaaatgtgcgatcttaaattaataaggattgattatatttaatcgctggttataccaccggatacttttttcttcagttttcacataacactatttttcatattggacaaaatagagacgaatactttatctgatactgtctgaaaggaatttaagggcatggaaagtataaaatatatttccaaaccagataaaatcagcttctgcactcattactgggtgcttttttgttgtatatacttcgtttttcaggttgcctctttgttggctgtgctcgttcaccccagccaccgtttttataggcataggttatctattatgctcccggggattactgagaggttggctcctgcctctcctttgtcgtcacgatgcatcttgaaatccattgcatataagggtatgtgatttttgtgcggctttgaatttgttggttttcttggggggtatttagcatgtttatct

SEQ ID NO: 2262 - DNA, 15501 bp, Xenorhabdus sp.; identical to SEQ ID NO: 2261
  CDS (735)..(3122)

SEQ ID NO: 2263 - DNA, 15501 bp, Xenorhabdus sp.; identical to SEQ ID NO: 2261
  CDS (3127)..(3423)

SEQ ID NO: 2264 - DNA, 15501 bp, Xenorhabdus sp.; identical to SEQ ID NO: 2261
  CDS (3617)..(4507)

SEQ ID NO: 2265 - DNA, 15501 bp, Xenorhabdus sp.; identical to SEQ ID NO: 2261
  CDS (4576)..(5328)

SEQ ID NO: 2266 - DNA, 15501 bp, Xenorhabdus sp.; identical to SEQ ID NO: 2261
  CDS (5479)..(6618)

SEQ ID NO: 2267 - DNA, 15501 bp, Xenorhabdus sp.; identical to SEQ ID NO: 2261
  CDS (6639)..(7604)

SEQ ID NO: 2268 - DNA, 15501 bp, Xenorhabdus sp.; identical to SEQ ID NO: 2261
  CDS (7610)..(9598)

SEQ ID NO: 2269 - DNA, 15501 bp, Xenorhabdus sp.; identical to SEQ ID NO: 2261
  CDS (9601)..(10497)

SEQ ID NO: 2270 - DNA, 15501 bp, Xenorhabdus sp.; identical to SEQ ID NO: 2261
  CDS (10552)..(12165)

SEQ ID NO: 2271 - DNA, 15501 bp, Xenorhabdus sp.; identical to SEQ ID NO: 2261
  CDS (12955)..(13389)

SEQ ID NO: 2272 - DNA, 15501 bp, Xenorhabdus sp.; identical to SEQ ID NO: 2261
  CDS (13494)..(14483)

SEQ ID NO: 2273 - DNA, 15501 bp, Xenorhabdus sp.
  CDS (574)..(939)
agataaacatgctaaataccccccaagaaaaccaacaaattcaaagccgcacaaaaatcacatacccttatatgcaatggatttcaagatgcatcgtgacgacaaaggagaggcaggagccaacctctcagtaatccccgggagcataatagataacctatgcctataaaaacggtggctggggtgaacgagcacagccaacaaagaggcaacctgaaaaacgaagtatatacaacaaaaaagcacccagtaatgagtgcagaagctgattttatctggtttggaaatatattttatactttccatgcccttaaattcctttcagacagtatcagataaagtattcgtctctattttgtccaatatgaaaaatagtgttatgtgaaaactgaagaaaaaagtatccggtggtataaccagcgattaaatataatcaatccttattaatttaagatcgcacattttgcgtatacgctataaaatatattattaaaatgagccattccaataatattaattatcatttgtatatcactcttttttagcacaagcccacattagtgggaggtatatatgttagaaagtgttatcaacgatattgttaaatggttagaaaaccagcttcaactgactgaaggtattaaaatagatgccattgcccataaaagtggttattcaaaatggcatttacaacgcatttttaaggaattgaaaggctgtacattgggtcagtatgtacgtcggcgccgccttcatgaagccgccaagtcgttacacgaggatgacttgccgattctggatattgccctgcaatatggtttcagttctcaggctacatttacacggatctttaaaaagcactttaataccacgcccgctaaattccgagaaaatggcaaattacctgagttaaagacattcttattttgcgaagagtaactcatagtaattatcattctttatggtcaacttccctgttgttgaccttcttttaggtctaacctttgtcaattattttctatttcagttcatttaccaaccaatatgaaaattgctgcaactctgcatccagtaaggggtattgttctctgatagctagaattatctgctcaacagcttctggctgatatagcacacctgtcagtttttctgccagtacttcaaatggtgcgggttcgagactgtcagtgaaaatttgacaacgactgataattccatgctcaatatcaacatgtaactcaatacctccccaagaaaaccggatatccagtgtatgactgaatgcgggggcctgcccgaagttccattcccagctactttgcttcttaaaaacatcaacaaagccgggtaaatctggtaacgcctgcggtgaaataatttccggctctaccacttcaccaaaatactcaaaaaacgcatcggtgatccctgcacatattttttcatgtgtgatgtctggcaacaaatctgacaggtttgccactctggaacgaacagaagtaatgcctttagcctgtaattttttaggatcagggttgagataatcagcaaggcggttcaaatcggcattaattagcaatgtaccatgatgaaatccgcgatctttagtttctcgatatgcagagcctgaaattttacgctctccttccggagatgataaaaccagatcattacgaccagaaaccattgcatgaataccagatttttttagtccatccagaataatctgagtagaaacctctttgttataggctggcttaccggccataaaggtaaaacaggtattccccaaatcatgaaaaacggcaccaccgccactactgcgccgggctagctttacaccatcctgttccatgctccgcgtattacattccttccacggattttgcgcacgccctatgacaactgtattggcattgcgccataggaacaaaacactctgctctggtgacatttgccgaaaaatacattcttcaacagcgagattaaaccagggatcataagaatcagacagcagcaatcgtaatctagacattacttgtctccagacaaagaaaaacaatgccttaggatatcataacgctcagattaaattggtgattcaggtcgtgatcatattctgcgggcttgccaaaaaactcgctgccaataaacattatcaagagaggaacgcataacaccattgctggtagagacatgaataaattcattattgatatcataaatcccaacatgtaatccgttagcaccactgccggttttgaaaaataccagatcacccggcatcaaatcctttttgctgatccgggttcccagttgagtttgctgatttgttgtccgtggaaggaggatattaaagcgatcatgaaatgtacgataaacaaaacctgagcaatccacaccccgccgatccatacctccatagcggtaaggtgttccctgccattgttcaagttgctcttttaattttgcgataaccataatcggatcagacagagctgctcgcgatggtggtagctgcgattgcggaatatggttagaacaaccaataagtaacaggctcagtagcagacataaatgcctgatttttattgacatcaatcagccctcctgctttctggcctgctaataaaccaaacaccaaatagaattagcaagatgcctatcgtctttaatggtgaggtattttcattaaaccaaggtaataatactgccattaaataaacaaaaatgtaactcaggcttaatagtggatacgctttattcaatggcagatatttcaaagtaaaaaaccagcagaacatagataatgcgtaactggtaagccctgccatcaccaccagcaaaggattaaaattcagccacaaccagtctatactgaaccaatgtagcaataaggatagttcaggtaaccgagccattccccacttcaaaaatagttgcgcgaccgtgaccagtaaaacattcgctactccccaaaaataccccttcattgattcaggctcattaacaggatccccaacataatggctaaaacaccaatccagtgttttaaccccactttctccttatacaaaaattgcccgatcaatgttattaccacaaaattaatgctcagcatcggataggcgatgctgagtggtaaaaattgcagtaatcgcagccagaataccattccggcccccaaaagaagcatagcagccactagccataccaccacgagtgatgttttatagggagtcttttttccccagcagataaccgcttgtttctgacaaatctgtcctgcacaggttaataaactaacaagtatcaataatcctgcactgttgttcatcatggttgcttcttataaatgacaagaacaaaacgggattttcgctgtacaagatccggtttgggtaactcaggcagtttcccttttgacgataataaaaaaacaacggcaacctgaccctctttccgtgcgctggttagccaagcgggaaattgctctagtgttatatatcgattttggctatccggataatccagtccatacgccagttcacccttgttttggaataaatagatatcattgcgttttaattcccacgccagtgccgcccctaccccaacggataccgataagatatatttactttctgctaattctttttcgttttgtcggatgaaatcttgtggaagtttagaattaatcgttttatcaggcagtgcactgcctattgataggctaagcataattgaacaggctgcggcccattgccagtgcttaccgttatgtctgaaacagaaatatcccacgataccccagacagcaaatgtcaaaattcctaatacccatttatgtaattcattagactgataaagaggatttttggagaatatctccaaaaataccagtgccagtattgcaatcagtccaatgaaaacattgactaatccattaagcttcaatgcctttattttgccatttctcatactatcaacggcgtattttgccatcatcaatgctaaaggccccatacacggcaagatataggtcagtaatttccctctcgatatactgaaaaatatcaaaggaatacagaaccagcataagagaaaaaacatttcaggatgatttttcttcgctttccagccagtaaataatgcaccgggtaataatcctaaccacggaatgacacccaaaatcactatcggcagataaaaccagaatggtgatgcatgttgtgcattctcggaagcaaaacgctggatatgttctatccagaaaaaataatgccaataatcaggctcccgaacagcaaccgcaatcacccacggcagactaatcaaaacagcgccgataatggcaatcggaccaaaacggagcatctccagaaagcgtttctggtatatcgtgacgggtatcatcgagatcaccggcagaaccagtgccagaaagccttttgtcataaaagccatgccacaggttatacccagcacaaaccaggcaaaaacccgctctcgggtactgctggctttcagtgcccaatagcagctgacaattccagccgtgacccacaatgaaaacatgggatcgagaacactataagtcccgacagaaaaaacaataaacatggagatgtaaatcaggcaggagatagatgctgtctgacgacactgccacatcatcatggctaatcgataaagaagaaatgcgctgagcataatgctgaatactgagccaaaacgcactgcgaaattgctatcgccgaaaatccactgactgatgctatttatccaatatcctgccactggtttttcaaaataacggatatcaagaaaataaggcacgatccaatcgccacgctgtaacatatcccggctgatttcagcatatcgagtttcatctggttgccataaaagacgtccattcaaagggatcaagtaagtaaagataaaaaaaagagccattaaaacggctccagctctactcattcgaacattcgacatatttttttatacctcttgttgacaacctaaccagccttcacgaccaggaaaatcggaacgaacaattctcccaactggcaatgtttccgggttttcaggtagtaaatgacctaatttacaaaactgaatatcttgctggtgcagcatatccaatagtgcctcaaactgtgatgatttagacattccttcaacttctgcgtgaatggtataaacaggaacaccgtgggcattttgaatggcatccagaataaaatggttaaaattgatgtcactgacctgcgtaccgataacttcatcataagttggcaatgtcaccggaatttgaacggttcctagacttccatcaggcaaaagtggcctgaatggatgtgttccacggcaatcactgttgtaatcaaaaccaaattgctgtttagccaccagcacccgctcatttgcgcgccagccagcaaccgccgagcatgatacagcctgccctgtctccttttttaacgcatcaacaccaagccgtatctgttctgctaattctggtcctgaccaacgacctactttcgcctgccagctttgatgatcccatgcatgcaaacccacttcatgaccttcttctatcgtctgtttcatcaaataacctaaatcttttgcaattttctttcccggccaagcagtaccggctaacagaatatccgggccgtacagagaaacagcgtttgatctcaacatcttccacaaaaatttaggtttcagcagccgccataaatgacgccccatattatccgggccgacactgaaaaaaaaactggcctgaatataatgacgctgtaaaattttaagcaaacgcggtacaccttccttggtgccctgataagtgtctacgtcaattcttaagcccactttttgcatcatatttaccctgtatgttgctttttccttttcaattcctgcacggcatcacgcaagaagaaatccagtgtctcatcgatcgtctgttccataccgatagtgggtttccaccccaacaggcgttccgcatttttaatactgggcttacgatgctcaacatcctgataaccctgaccgtaataactgctgctttcgatctttttaaaaccggcgaaaggaggaaaattcccgcgtaattcgtgtttttcaaaactatttagcaatatttcagctaattgacgaatactggcttcattcgtcgggttaccgatattgataatccgcccatcacataagccatttttgttttcaataattctgaacagcgcctcaatcccatcatgaatatcagtaaaacagcgtttttgctctccgccatcaactaattttatcggggagccttcgaccagatttaagattaactgagtaattgctctggaactgccaatacgcgctgagtttaaattatctaaccgtggtcccatccagttaaatggacggaacagggtaaatttcaaaccttctttttcgccgtatgcccagataacacgatcaagtaattgtttagagacagaatagatccagcgctgtttattaattggccccacgataaggcgtgacgtgtcttcatcgaattctttatcatcacacatgccataaacttcggaagtggacgggaaaataatccgcttgttgtatttcacacaataacgaacaattttcagattttcttcaaaatccaactcaaaaacacgcagtggattacgggtatattcgataggcgtagcgatagcgactaacggtagaatgacatcacattttttgatgtgatattcgatccactcagtgtgaatgctgacgtcaccttcaataaagtgaaaatgagggttaccaataaagcgctctatcgcagaagagccaatatccataccgtaaacatcatagctaccatcattcagcagacgttctgttaaatgattaccgataaatccatttactcccagaatcaaaactcgcttgcggcgggggatctgtgcggtggctttctgcccaacctgaataccggtaactatacccatctcctgagcaagccggctaccctgaacgtagatgcctgattcgctctgcccactaacaatttccagagcgccaattccacacgcaacaaccagcgggtcgatggagagcactgttccagcctgtttatcgtgtgttgtattcagtggaactgagcgccagatcgtgatttttcgctcaccaagaaaagtaaatgcaccgggataaggttctgtcactgcccggacaaggttattgatctcttcagccgatttatgccagaaaatttcaccatcttcagcggttctgcggccaaaataagtggcctgactttcatcctgtgggattgaaaggtaattatctgctttaaagcgaggcagaatatcattcagtaattcagttgctgcttcacggattttcccatgtactatcaatgaagtatcagttttctcaatctgtactgcctgttgtgcaacaacatctccggcatcggccttcgctgacattttatgtaatgtcacacctgtttctgtctcgccatttaagatagcccagttaaccggagcacgaccacgatattttggtagcaaagagccatgcagattaaacgcgcctttttttgccagtgataaaatatcctggctgagcatatcgcgataataaaatgaaaagataatatccggctgcatttcacgaatatgttcaacccagagcgggtgattcacattttccggcgcaaatacggataaacctaaatccgcacctgcacgagccacagaagagaaaaaattattttcatttggatcatcaacatgtgtaaaaataacccggatatcgaaacctgctttcactaatgcattaagtccggcacaaccaatatcatggtaggcaaaaatcactgctttcattctttttcttcctgattatcgttggtctttttatccccgaccactttttgaataaagtaacgtgggcgggcacgaacatcgttatatatgcgaccgatatattctccgagtaaccccattgcgacgaattgagcgccaataaacataaaaagaatggcaaatagggtaaagacgccttcagcagcccatatagcaccaaaaatcaggcgcaaagcgatcagtaatacagccaacaaaaaacccgtcacggcaataatacttcccactacactcaataaccgtaacggcgcggtcgtcaggcaggtcagcaggtcatacatcagatttatcaacttcataaaactgtatttggaatcaccgaattcgcgttctgcatgggttacatcaatttcagttgttcggcgagcgaatgtattggcaagaataggaataaatgtactgcgttcatggcattgcaacatcgctcgcacaatatggcggcgatatgcacgcaacatacagccgtagtcgcccatagagcgccccgtcactttcgttatcatggcgttgatcattttagaggccgttttacggaaccatgaatcctgtcggttggcacggcgtgtaccgacaacatcatatccttcttcagcaaccttcactaaacgggggatctcttctggtgggttctgcaaatctgcatcaagtgtgataacaagatcaccgcttgcctgatggaaccccgccataattgcagaatgctgcccataattacggttcagcaaaattgcaatgacataactttcgggatcgtcagctgcctgggttaaaatctccgcagagctgtctcggctaccatcatccaccagaattaattcatattcctgattgagttgctggcaggcagagatagttctttttaataattgaggtaagctttcttcttcgttataaacaggaataaccaccgaaacttttctaatttcttcaaatcccactgtttttactccgcaataatttccaataccgcgttaacaacccgatccacatcgtcattactcatatctggaaaaaggggtaacgaacaaagtgtcactgaattccattcagattcaggcaaagacagagttggatagcgttcccgataatatttttgtgtatgtaccgctctgaaatgtaaccctgtgccaatattgcgttctttcaaacgagtcatgaaagtgtcacggtcaataccacaaactttttgatctactcgtaccatgaataaatgatgagaatgctggtgttcatattcaggaacgctcagcatttttagaggagaatcgtgaagagcagcggtataacgggccaccagctcccgacggcgggcattcatggaggccagtttccctaactgaacaactgctatcgccgcatgaatatctgacaggttgtatttgaagcccggttcaataacctcagcctgtggcttccggccctgaagctgccgatcaaacgcatcaacagccagaccgtggaatttcagactgcggattttttgcgccagctcatcattatctgtaacaaacatgccaccttcagcgcatgtcatgtttttgatagcgtggaaagaaaaaatggcggttcctcgctcacctacccattcatttttataacgggttcctactgcatgagccgcatcttcaattaagggaatacccgcctcttccgcaaccacgcgtaaagcatcaagatcacagggagcaccagcatagtggactggaataattgctttagttttcggggtaatcgcctgcctgaccgtttccgcactgaccatcaatgtatcacgatcaacatcgaccatgaccggttcagcgcctgacaggcaaatcatattaatggtggaaacccaagtttgggaaggagtgataacttcatcgccggggcctattttcaatgctaataatgccaaatgcatcccggccgtagccgaatacagagcaatagcatgtctgcaaccaaacattcgggcaaaatcctgttctagctgctggttttgtggccccgtagtgatccaacctgaaagtaaaacctgttctactgcctcaacctcttcacgcacaatcgatggacgggagaatggtaaaaaattgttcataatcgccttgcgtagcctgactcattttataattggaagacattctgacgaacacttcatagacaaaataacaacaagcaaacaaactgagggcaatcaacgaaaaagagagaaaaaacaatcaaccaaggtgatttctacctttgaagattagagatgatctaccctccataatttatagccagtattttggatatgtctaatatttatttcaaaaatttcggataaatttctttcattcatcacattatgtggtcgaccagacataatcaactcaccacgagcgagcaaccatacattgtcggcctgttcataagtgtgattaagatcatggctactcaataaaactgtccctcccaatacacaaaattggttaattaatttatctaaaatagcttgctgtgtgatatcaagattattagtcggctcatcaagcaacagtaattttcctaccggattaagttcaggccatacctgcaaaaaagtgcccgctaatctcacccgctgccactcgcctccagatagttgcccaattgttgaagccagtaacgcagtcagtttcagttgctgacaaatttcatgtaatacctgttcaccttcagacagggaagccgactcaggacgatacatatccagatattgaaaaacaggcatggcgggagctgataccgactgagaaaaccatgcccgatactgtgccagttccctctgccgataatcactcaattttttgccgttaaggtgaatcgtgccatcatgaggtaaaataccggcaatagccgcaagcaaagtactttttccagagccattcagccctaccaaatgaactttctctccagccttgacggaggcagacagcgaattcagtctgttgttgacagtaatattatccaatactaaaagtggtagctgaatcatactatcttccctattctcgttttttggtacttcccctcattttttaaagctctttatatccgtggcgctttcaataataaccagataaacacaggcgctcccagagttgctgtaacaacccctattggtatttccgcatgggataaagataaacgagagaataaatctgccagtaataaacaactaccaccggctaatgtgcaggcaggtaataatgttttatgatccgtcaagccaatcagccttaaaatatggggaatgactaacccgataaaactaatcgctccggcaagcgctacactcaaaccaaccagtaatcccactgcggttacaaataaattacgccaattatgatgcgagatccctaattgctgtgcctgtaattcacccagagaaagataattaagtgtttttccggttctacttaaccaaaggatcaacgggcacaatgcaatcaccagccatatttggcgccagtcaatgccactgaaactgcccatcatccaatacatcaattggcgtaagtcgagactggtactgaaataaaccatccatgtaattacggcaccaaatactactccgaaagcaaccccgattaataataaacgtgcattagtcatttggtgctttttagcaaatcccagcagaattgctgtcataaaaagtgcccctaaaactgcaccagcacttaatagccataatggagcgataccatgaaaaatgaggatcaaaaaaacaaccactacccctgccccattactgacacccaataatccgggttcagccagcggattctcaaataacgcctgcataactgcacctgacaccgctagactggcaccaacgacaaatactgccaatgctctgggcaatctcaactgccaaataaacaactgggcggaatcagacaaccattgagttggccagaaccatatttcaccggcagacagcgataaaataaataatccaacagataaaataagcaggagagctatcactcggtagtcacgttttttctgacgagtgaggagttcagaaacagaataaatcggtaaacgatgtttcgataacatgagaaatgaaaatattcaggataaagagcaagaaaaagaccgctaatcgcggccttttcatattttattcttttggtaacgctttttctacccgactcttcaacttttgcccagggcgaaaggtgacgacacgacgagcagtaataggtatatcctcgccagttttcggattacgacctggacgttgatttttatctctcaaatcaaagttaccaaatccagataacttaacctgctccccattctccaaagaacgacgcacttcttcaaagaacatttccactagatctttagcgtcacgtttgctaatacccagtttttcaaacagattttctgacatttcagctttagtaagcgccataagttcagtccctcaaggatgcttggaatcgctgttctaatgcagcaacgcatttgctaacggtcgcagcaatttcttcttcttccagtgtacgcgaggtatcctgcaagattaagctaatagcaaggcttttatagccttccgcgacacctttaccacaatacacgtcaaataagtttatgccaactatatgatttacgccaactttcttacattcaaccagaatatcttctgcagctacattttccggcacaactatcgcgatatcacggcgattggatgggaagcgagaaacttccttcatttcaggaattatgcggtccgcaagtttgtcccacaacaattcgaataccacggtgcggccattcaagtcaagtttacgttccagctctggatgaacgaccccgatgtaaccaatgtatttatttcccagataaatcccagcactttgtccgggatgcaaggcaggatgttcttctgctttaaaggaaatctcggatagtttacccgtcagttctaaaacggattctaaatcacctttcaaatcgaagaagtcaactgcttgtttttcaatcgaccaatgctcatcgaaacgatttccggcgattactccaccaagcatcaattcctgacgaataccatattctgcgctttcatcaggcacaaaacgtagacctgattcaaataatcgcactcggtgttgctgacggttctgattataagcaactgtcgtcagtaatccggttagcaaagacaagcgcattgctgacatatcagccgaaatcggatttggcagaattaatgcttcctgttgcggatgtaattgctgctggagtttcggatcaacaaagctataggtgataacttcctgataacctttgtccaccaacatagttttgacgcgcttaagagataaatcagcttcacggtgtgaagtcatgaccaaatcggcgcgtacaggtacatcaggaatattgttgtagccataaatacgggcaacttcttcaaccagatcttcttcaatctgcatgtcgaagcgccagctcggagctactgcttcccaattaccattctgaactgttacctgacagcccagacggctcaggatgtccgttacctgctcatcagcaatatgatgaccaatcaaacgatccaatttattacgagtcagtgtaatagtcgctggctttggtaaatgagactcactggtaacatcaataatctcaccagcttccccaccacaaatagcaaccagtaactgtgttgcgtattccattgctttaaattgcaactgcggatcaacgccacgttcgaaacgatgagaggcatctgtatgcaaaccataacgacgggcacggccagtaattgccaatggtgcaaaaaaagcacactccagcagaatatgttgtgtttttgtactaacaccagaatattcgccgccaaaaattcctgccattgcaagtggttgcttttcatcagcaatcacaagcgtatcagcagaaagttccacttcatttccatccagcagggttaatttttcaccctgttctgccagacgaacaataatagaactgtctaaacgctctaaatcgaacgcgtgtaatggctggcccagctcaagcaatacgtaattagtgacatcaacaacaggatcgatagaacgaactccaccacgacgcagtttttcgcgcatccacagtggcgtttctgcttcgacattgacgttattgataactcgccctaaataacgcggacaagcttctggcgcgtcaacacgaatagagaatgtcgcatctgtagcgggtttaacaggctcgatttccggctcattcatggacaatttattgataacggcaacatcgcgggcaacgccctgaatgctaaggcagtctgcgcggttaggtgtaatgctgatttcaatcgcactatcatccaatttcatgtaatcgcgcaaatcggcaccaattggcgcatcagctggtaattcaataatgccatcgtgatcattgctaattcccagctcagaaagcgagcaaagcatgccttctgacggctcaccacgtaatttggccgctttaattttaaaatcacccggcaagacagcaccaacggtagcaactgctacacgcaggccctgacggcaattgggtgcaccacagacgatatcgaggaggcgatcaccaccaacattaacttttgtgacgcgcaatttgtctgcgttcggatgttgagcgcattcaacaacttcaccgacgaaaacaccattaaattgacccgctactttttcaacgccatcaacttccaagcccgccatggtgatttgatcagacagttcttcgctactaatggcaggattcgcccattcgcgtaaccagagttcactgaatttcatgaaatattcccgccttatttaaactgtttgaggaaacgcaaatcattttcgaagaaagcacgtagatcggtgacgccataacgcagcatcgtcaagcgttccattcccataccaaaggcaaaaccagagtaaacttcaggatcaatgccaacattacgcaatacgttcgggtgaaccatgccacagcctaatacttccagccatttgccatttttacccatcacatcaacttctgcggatggttcagtaaacggaaaataggatgggcggaaacgaacctgcatatcttcttcaaagaagttattcaaaaaatcatgcaacgtgcccttcagattggtgaagctgatattcttatcaacaatcaacccttctatctgatggaacattggggtatgcgtctgatcgtaatcattccggtatacccgacctggtgcaatgatgcggataggtggctgaccttctttcattgtgcggatctgaacacctgacgtttgcgtacgtagcaaacgttttgcatcaaaccagaatgtgtcgtgatcagcacgagccgggtgatctgcagggatattcagcgcgtcaaagttatggtagtcgtcttcaatttctggaccagctttaacagaaaagcctagctcaccaaagaaagtttcaattcgttcaatcgtacgagtgactggatgtaatccgccattttccatacgacggccaggcaatgaaacactttagagcaaact

SEQ ID NO: 2274 - DNA, 12775 bp, Xenorhabdus sp.; identical to SEQ ID NO: 84
  CDS (285)..(2744)

SEQ ID NO: 2275 - DNA, 12775 bp, Xenorhabdus sp.; identical to SEQ ID NO: 84
  CDS (2747)..(3691)

SEQ ID NO: 2276 - DNA, 12775 bp, Xenorhabdus sp.; identical to SEQ ID NO: 84
  CDS (6034)..(6987)

SEQ ID NO: 2277 - DNA, 12775 bp, Xenorhabdus sp.; identical to SEQ ID NO: 84
  CDS (7216)..(7791)

SEQ ID NO: 2278 - DNA, 12775 bp, Xenorhabdus sp.; identical to SEQ ID NO: 84
  CDS (11457)..(12104)

SEQ ID NO: 2279 - DNA, 12775 bp, Xenorhabdus sp.
  CDS (6941)..(7717)
taaaactttacggatctcaatatgtaattaaggaaactacatattgaaaaacagcaggtatactgatgattctatcagactctaataaagctaaaaacaaatctaatttaatattaaaaggtatttaatctgtagtttttataaggtggggtaacattataatattatagatgttaatcttcggttttaggtaaaagacaagtcatcagacaaaattacatttttatcttacaggctgtgcgctctattttttcttttcatttcaacttgatgtgggagtaaatcgctaatcattgcttcataataattcttgaaaatattaacagcctgattgattatccgatgatgtaaaacaccctttatgcaataaatatctaattctattgaaatagcagaaagacattaccatctatgaaatagatctcctttaatttttatctgattcaatcacattgatccataaacatagtattgaatatatgaatctacacactgcttcctataaaagaaaacaatatatgagatttacgataggcattatctatttctaataatatgatttattttattattctgattttgcacacagcgcagaactgttatcgtgccattgcgctgtgttttgagaatagaaaaccataagagataggcctttacagacctataataacctaagagatactttcaacatccatcccggcatctttccagccggaaaacccttttttaaagtggcgggcacgaatgcctttggcgcgtaataattcaagggcattggcagaaagaacgcagtaggggccgcggcagtaagcgataagatttgagttggaagtcagttcatctaatctgctctccagttcatcaatcgggatattgacggcattcggtaaatgcccctgattgaactcttctttcggcctgacatccaataatatggtgctcttttccttgattcgatccaacaattcatcccatgaaatagcttcctgattgtccatatcatcaatcaatctgcgcatttctgcccgattaaactcagcatatttctggatagcggtaatgatatccatcaccggaccatcccccagacgataaaacacatgtttaccgactttacgggattgcaggatccctgaacgttttaaatgttgcagatgctgggatgtgttcgcaatagacagaccggaaagctctgacaggcattcgacggattgctcagaactcatcaggcactcaagtaatgtcaggcgatggacatttcccagtactttggctatttcggcaatctcaacaagaatttgtttatcaaacattgacatctggttcccaatatcatgatattcaatgaatctattgaatatcatgatatcaaagtttttccgatggttcgagcactaggcaaagtgatgactaatcaggcttatataattcgtctttcaagttgcctctttgttggctggctcactcaccccagtcactggttttataaatatatggctatctatgttccgaggaggagttctccgtaatatcgcgatcatcgtcacatttttatgacgagaaatttgagtgatttacaaaagaaactaagctttaaaattgaattatcactattttaaacatttacgcagatgtacttgttgttctttaagttgaagttattgtcagttgcttcacttaaagatctttagggtataagtcctgacaatgatttcctgaattgctgtgtcggaaaggttgtcaggttttttttcgcctgaataaagcgcaccactttgtattccattcaatatacccatagtctttcaagttgtccttttgtgggctgcattctactcattctggttatcgtttcataagtatagtttatctatacttatggtgtgctaaaaggactctgcctttgaccgagcagttgctgccacggtacatcttgaaatccatggggtatagaaaaataacacgctatggaagaatggggaaaaaatagtatgaaataccagctattagctcaggaaattattgcggatgttggtggtcaggggaacattatcagccttatccattgtgcaacccggctacgatttaaattacggaatagtgctctggctaacattgataagttaaaagcccagtcaggtattatcacggttatcgaaagcggaggccagtttcaggtagttatcgggaatcaggttggtgatgtttatcaggctgttcagcaagaactgacttctgctgagcaaacatcagataccgctgagcttccgaactccgctaacaataaaaaagacagcctttttaatcagtttattgatgttgtatccggtattttcaccccatttttaggtgttatggcagcggcgggtattttgaaggggctgcttgcggttgctgttactctgaaatggatgtctcttgatagcgggacttatcacgtctggtatgctgccagcgactctttgttctacttttttcctctattgctcggttatacagccggtaagaaattcggcggcaatccttttattacgatggccatcgggggagcattggttcatccgatgattatctccgcctttaaggcatcaacaagtgcgggaagcactaccgagtatttcatagggatcccgctctcattcctgaactacagtgcatcggtaatccccattatttttgcttcctgggttagctgtaaagtggagagaaagctgaatgatcacatccctgccacgattaagggattcgtcactcctcttatttgtctcatattgattgttccactggtgtttctggttatcgggccaatggctacatggctgagtcaattgctggctggtggttatcaggcggtatatggggtagctcctgcactggctggggcgattatgggcgcagtctggcaggtttttgtgattttcggccttcattggggattcgttcctcttgctatcaataatttggcggttctcgggcacgatacattaacacctctgttgctgcccgcagtgatagggcaaacaggggcggcctttggggtatttttgcgtacgcgggatgcgaaattaaaaatgctggcgggttctgctgcgacttccggtatgttcggtattactgaacctgcggtttatggtgtgactttgccttaccgacggccatttatttttggctgtgtcgcgggggcaattggtggttcggtggtggggtattaccaaggcgcaatttattcagcggggctggtgaatatttttaccttcactcagatgatcccaccaacaggcatcaataacacggtgtggggagcgatgattggcacagcgctggcctttatcatttccactgtactgacatggctgttcgggcttccgatctcttctaattctttgctcaggccttctacaaaagaaagttaacagtgaaaagtatcattaaaaccctattgatcaattagtttgtaacccgagaggatatttgtatgaaacagtttccgacacattttctgtggggaggggctattgctgccaatcaggttgaaggcgcttatttagctgacggaaagggcctttctacttcggatgtccagccacagggaattatggggccggtcattgagcgagagtctgagagtacacaataccttaaagatatcgctatcgatttttaccatcgttatcccggagatatcgctctgtttgcagaaatgggattcacttgtttgcggacttccatcgcatggagccggatttttcctcagggcgatgaaatgcaggccaatgaagcaggtctggcattttatgacaggttatttgatgaaatggcgaaatacgggattcagccagtcattacgttatcccattatgaaatgccgtgggcgttggttaaaaaacacggtggatggggaaatcgtaaattaattgatttctttgagcgttatgcgcgcacagtttttactcgttatcagaaaaaagtgaaattgtggctgacattcaatgaaatcaatatgtcactgcatgagccactaactggcgtcgggttaccgaaaaacagcacacagtcagaaatctatcaggccattcatcatcaattggttgccagtgcccgcgcggtaaaactttgccatgaaattatccctgatgcccgtatcggcaatatgttactgggtgggctgatgtacccactgacttgtaaaccggatgatgtgctggctactctccggcaaaatcagaaatggctgttttttggtgatgttcaggttcgtggggcatatccgggttatatgctgcgttatttccgggaacatggtattgaagtcacgataactgaacaggataagcttgagatgcaaaacacggtggattttatctcattcagttattacatgagtgggtgtacttccgggaatgaagcggactatcagaaaaagcagggcaatattctgaatatgatcccgaatccccatctggccagttcagaatggggatggcagatagatcctgtcggattgcgaacgttactgaatttattatgggatcgttaccagaagccgctgtttattgttgagaatggtctgggagccaaagataccgtagaagccgatggcacaattcaggatgattaccggattagctatcttaatgaccatcttgtgcaggttagggaagccattgaagatggagtggatgtcatgggttacaccagctggggagccattgatttggttagtgcctcaaaaggggagatttccaagcgttacgggtatatctatgttgatcaaaatgagcagggaaccggaacgctggaacgccgtcgtaagaaaagtttctattggtataaacaggttattgaaacgggcggtggcagcctgatttgagccagctcagcttctcaaaggttctgatgtattcagaaccttttcaaaatataatttctgctggttgagcaataataagttgagtaataacaacagtcagccagcattaagatcttaacggcgggcacttttaggcctgaaggctgagacaatgctttcattagtttcgatataggggccatctaacaactgaatgcaataaggtacactggcaaaaattccgggtactaagacttttccgctatcatctttcagcccttccagcgtttctgctatagctttaggctgcccgggtaagttaagaattaatgcctgattgcggatcacgcctacctgacgggataaaattgcggtgggtacaaattgaaggctgatttggcgcatctgctcaccaaatccgggcatttcacgatcagcaactgccagagttgcatccggggtaacatcacgacgagcaggacctgttccacctgttgtcagaactaaatggcagcccaattcatcaactaattcgcacagagtttgttcaatcaggatttgctcatcagggatcaggcgggcttctatactgaaaggcgtcgttaccgtttttcccaaccattcttctaatgcaggtagacctttgtcctgataaataccattggaagcacgatcagaaacagacacgaggccaatgcgtaatacattcatgcgaacctcaattaacagcaaatgataaaaatagtgaaagtgaaaaaggcgacacggttgttatgtcgcctttaaagaataaaaaatatacacttcgtctttcaagttgcctctttgttggctacgctcgttcaccccagtcacatagttctctatgttcccggggattctctcccttgccgccgcgatgcaactcgaaatccaatgggtatagtgtgccgctcaggactacagcaagtcagcgatcatgctctcaagtttaccctgatcgatagcaaacttacggataccttccgccagtttttcggttgccatcgcatcctgatgatgttcccaatagaattcagcttcagtcattgccgcaggacgtggcttgatttcaccttcatagctgagtttatgctcaacttcgcctgctgtttcagacagctctttcagcaatgcaggagagatagtcagacggtcacaaccagccagttccagaatttcaccggagttacggaaacttgcacccataacaacggtgttatagccgtgttctttgtagtactggtaaatttcagaaacagaaatcacacccggatcttcgtttggtgcgaattctttcttatcactgtttgctttgtaccagtccagaatacggccaacgaatggagaaatcaggaaaacacctgcttccgcacaagcacgagcctgagcaaaagagaacagcagagtcaggttacagttgataccttctttttccagttgctccgcagcgcggataccctgccatgtggaagccagtttgatcagaatacggtcattgctgatgcccgcttcgttgtacagtttgatcaggcgttttgcttttgcgacactggcttcggtgtcataagagaggcgggcatcaacttcagtggaaatacgaccggggatcagtttcagaatttccagaccgatgttaaccgccaatttatcgccggcatcaatgatctgttgttcacgggaatcgctctgagcacgtgcccattcaatggcgtcatcaatcagttggcgatatttcgggatctgggcagcgttcaaaatcagagaagggttagttgttgcatcttgcggctgatacagtttcattgccgcgatatccccggtatctgctacaactgttgtcagtttacgcagggaagtcagtttatcggtcatgtttaatatctcatcgttatacgtaaaatctttggcattgttgcctcgccatcctgtgataataacatggtcaggctcggctcgtaagctaggaaaatcctatcgttgttattcccctttttccggttatttttgctaaattggagaggaaaagcctcgattattgagaataaccattcaaaaattcggaacaaaatcatgcttattactatttcaccggccaaaacacttgattatgaaagtccgcttgctacaaaaaagtatagccaacctgcattactggaggagtcaaaacagttaattgatgtctgccgtacgttaacgccggcacaaatcagcagtttgatggggatcagtgacaaactggcggggctgaatgccgcacgttttggtgaatggcagccggattttacaccggaaaatgcccgtcaggcgatcttggcttttaaaggtgatgtttataccgggatgcaggcagaaacgttctcagatgctgattttgattttgcccagactcatttaagaatgttatccggattatatggggttttgcgtccgcttgacctgatgcagccttaccgtctggaaatgggaatcaaactggaaaatccccgtggtaaggatttgtataaattctggggggatcgcatcacggaaaacctgaatgcagcactggaacaacagggggatgatgttctgatcaatctgtcatctgacgagtatttcaaatccgtcaatacgaaaaagctggcagcccggattattaagccggtctttctggatgaaaagaatggcaaatacaaagttatcagcttctatgcgaaaaaagcccgcggcctgatgagccggtttatcattcagaaccaattaactgatcctgcacggctggtggagtttaatctggaaggatacgcgtttgatgaatctctatctaaagagaatgagctggtgtttaaacgctccgagcagcattgataatcagtagcattgataaatagtgtcactccacaataatgagtggagtgacaaatgctaggttatttcgaggcttttgccatcagaaattcgcgtaatgtagcgaaatcagcaggcaggaggtgggataacaattccatatctgctcgttctgctaattcttgtggcaatggtaatgtctggccgagtgtctcttcgacactttccttgaattttgccggatgcgcagttcccaggaataaaccatattcaccatcctgtaactgatcacgcagaacgcgataagcaaccgcagcatgtggttcagaaatatagccttttgctgcaagctctcgcatggtgtcctgcgtggatttgtcatcgacaacgccattgcccagttcgctgagtgcccagcctttacggttgaacagttcttcaatgcgtggccagttattaggctggctgacatccattgcgttggaaagggtggcaatggtttgattcagcagccattttccttctgccagatagcggggaacggtgtcgttaacgttagtcgctgcgataaaacgcttcaccggtaatcccattgattttgccagcaggcccgcggtcaggttgccgaaattgccacttggaactgaaattaccaattggtcacgttttcctgccggaatttgtgcgacggcttcaaagtaatagcaaatctgcgccaaaagacggctgatattaatcgagtttgcagagttgagatgcagtgcctgtttcagttcttcatcatcaaatgactgtttaaccaatgcctgacaggcgtcaaagtcactttgaatcgcgacagatggatgttgccacctaatgtgcagaacagtttttcctgtagcgggctgatttttccttctggatagaggatcacaacctgcacgttattcagaccataaaaggcatgagcaaccgctgccccggtatcaccggaagttgcggttagaatagtgaccggttgctcacctgcaatctgagtcaggatctgggccataaaacgtccgccaaagtctttaaaagccagtgtcgggccatgataaagctcaagtgaagcgatgtcatcttccacagtcgatacaggggctgggaaggggaacgcattcttaacacgggcagctagctggtcagccgggatttcgtcaccaataaaagctgaaagtatccgctggctacggctgacaaaatccagttttaataattcatcaatttcggcacgactgaattccggtaaatcctgtgggaaaaataacccctgctgttttcctaacccttgtttaacggcctgtgaaaagctgacctgctcgtgattgtcttttaaattatataatttcattattatctacctgttaccctatctgtcgtgcgcctgcgagatccagacggcaaatatgaacaaaaccttcatcattttgtacgtaatgttgttgcagccattgagcgacttcttcagctattgccatttcattgcaaattgcaaacagtgtcgggccagagccggaaatactgcatgccagcgcaccccgtttttttactccttcacgagcgttagcaaaaccgggtaaaagctgtgtgcgataaggttcgccgacaatatctttcattaagttggcggctaaacgggattgccgggtatggcaggcatgaataaatccggcaaaataacggccatgattaatgatatcactgcgcgaatagtgggcaggcaaaatggcgcgggcttctgatgtagaaactttgatgccggggtaggccatcacccacaaccagtcctcaaaagcgggaatggattggcaaaccgcatctccctgcggcatgacttcctgtgccataataagttgcaggccgccaagataacagggagcgacattgtcatagtgtacgccgccggaaattcggccttccagttctcccatcatctccagtaactggtcgcgaccaaaaggatggccggcatattcatttaaggcgaccagtgcagcaacaaccgaacaggcactggaacctagcccggagcctatcggcatatttttttccagcgtcatggcgacgggcagttctttacccaaacgctggcaaaagagttgccaacattggtaaacaatattgtgtttggggtttccgggcagtttgctgacaaatttcccttcattacttaacgtaaacttctctgcggctttgactgaaacacaatcgccaagtagtgagccatcaaccggagaaaccgccgcaccgagcacatcaaacccaaccccaacgtttccgatagaggcaggtgcataaaccctgaccatcattaaactcccaatttccatgacaaagtgcgtaatatatcagcaaaaacacccgctgccgtgacatcatttccggcgccgtaaccgcgcagtaccagcgggataggttgataataacgggtatagaaagccagtgcgttttcaccatttttaactttatacagcggatcattaccatcaacagcagcgattttaaccatacagcggccctgttcaataataccgacatagcgcagcacttttccttgctctgcggcatctgcaacccggcggataaattcctgatccaactgtggcagacgttgcagaaagtcagtgacatcaccattggaatcaaacgaagcaggtaaaaccggctcaacgtgaatatcctccaattccagttcataaccggattcacgggccagaattaagagcttacgcgcaacatccatgccagagagatcgtcacgaggatcaggttcagtgaagcctttttcttttgccagcagggttgcttgcgaaagtgtcataccttcatccagcataccgaagatataagacagagagcctgacaggatcccgttgaactgaaccagttcatcaccggcattcagcaaattctgtagattttcgataaccggtaagcctgcgcctacgttggtgtcatacaggaatttacgttttgagttttcagccgcacgacggatctcacgatagtaggccatggaaagcgtgttggcttttttgttcggcgtaacaacgttgaagccatcactcaggaagctggaatactgctcagcgatagactgattagatgtacaatcaacaataaccggattcaggaggtggtactctttttcgagccggattaaacggctcaggctgaaaggttcgctggcttctgacaaagcctgctgccagttatccagactgatgccctgcatatcggttaacatcgcccgtgagttggcaattccgcatacgcgcagatcaatgtgtttttgcttaagccatgactgctggcggcggatttgttcgattaaggcatttccgacaccgcctacgccaacaacaaagacttcaaccacctgagcggtattgaacaacatttgatgacagagccgcactgcggttgttgcgttatcattgtcaatcactgcggagatggaacgctctgatgagccttgcgcgagagcaatgatattgatattggcgcgggtcagtgccgagaagaaacgggcagagatgccacgctgtgtacgcattccgtcacccacgacagaaataatggcgagattatcgataacatcaataggatcaagcgcaccatcttttaactccagataaaactcttcggtcagtgctttctgtgctctgttcagctctttttgcggtacacagaaactgatgctgtattctgatgaagactgagtgatcaggacaacggaaatgcctgaacgggacatcacagcaaagactcttgctgccatacctaccatgcctttcatgccgggacctgaaacgttaatcatcgccatatgattcaggttagtgatccctttaataagcatgctgtcatctttttgcccgttcccgataaatgtgcccggcgcatcaggattgacagtatttttaatcaggcaggggatctggaactgggcgataggggcaatagtccggggatgaagcaccttcgctccgaaataggaaagttccattgcttcctgatatgacaggcttttcagcagacgggcatcggcaacagatcgtggatcacaggtataaacgccatctacgtcagtccagatttcacagcaatcggctcgcaaacaggcggccagcactgcggctgagtaatcagaaccattacgtccgagaacgacgagctcactattatcattacctgccgtaaaaccggccatcagaataatatggtcagaaggaatattcagggctgcaatacgtttggaggattcgtgaatatcaactgtggattcgaggtaatgcccatgagcaagcaagttttgaaccggatcgatcacagaaactttatgcccgcgggcttgtagtacggcagccataatcgcaatggataatttttcaccgcagcaaatcagggaggcattaatgctatccgggcactgtttcaacagagaaataccgtgcagtgtttgtttcaggtgagcaaactcacgttccatgagcgttttgaggttttcataatcgaaatttggctgatgctcttttaacccagacagtaaatcagtaaatatttggatagtatcgctgatgttggaaacaatatcctgccctgcaaccgtcttagcgaccattgccactaagtggttcgtgatttttgcgggggcagaaaggactagagcaacctgcccaaggggtagctcactttcagcgatatctgccacactcagtacgcgctggtagtttgcgactgaagtgcctccaaatttaagtacacgcattggtatttctctcctgacttactgttaaaaaagggtcaaaaaaaagcccgtatcttgttggatacgggctttttactattttattttatgcgtcagcccgcaccgtaactagtagttccggtggtaatcgtggtggttgtgtttgcagtgattacttttgaggtaattgtatttttcgggctgatgtctcgcatagtttcctgtctgtctttttattctgttcgacccctattggttaaaggaaactgtggtcgaagtcaaataatttttataactttagagca

SEQ ID NO: 2280 - DNA, 12775 bp, Xenorhabdus sp.; identical to SEQ ID NO: 2279
  CDS (3476)..(4870)

SEQ ID NO: 2281 - DNA, 12775 bp, Xenorhabdus sp.; identical to SEQ ID NO: 2279
  CDS (1992)..(3413)

SEQ ID NO: 2282 - DNA, 11434 bp, Xenorhabdus sp.; identical to SEQ ID NO: 406
  CDS (70)..(282)

SEQ ID NO: 2283 - DNA, 11434 bp, Xenorhabdus sp.; identical to SEQ ID NO: 406
  CDS (4589)..(5116)

SEQ ID NO: 2284 - DNA, 11434 bp, Xenorhabdus sp.; identical to SEQ ID NO: 406
  CDS (5126)..(6145)

SEQ ID NO: 2285 - DNA, 11434 bp, Xenorhabdus sp.
  CDS (9952)..(10647)
ttttgtacgccgactatcgcccaaatttgcgcgagaaaaagtttcatcagcccattgttctgcgtgagtttggaacattttaccgtacctcaatgaaatcgttattactcagatcggtaaagtggaaaaagattcaaaaaatcccccgattttttatcgggggatttgtgtatgaaagacaggcgtgttggcgggagttttattgtgcttcatggcggcggcattgatatcaaaggcatagctattaatctgaattccggtggtagtcccggtgatttactggcacccgctaaccccgccattctacttgcagcggcaagtgaaggttcaatgttcgtcgcccactgcccaatgaaagataaggagaatcaagaatgagccaagaaaccctttacgctattattgacggtgcagcagaacccgacttatttttgatgcttgaacattatgatcccccctccacctgcctctatggtgaacctcttcagccagaattagttaaaattgcgccttatctggttcaggtcaatgaaaaagttaaaatttggctggagtgccgcagaacaccgtggggaatcttcgttcacagcgaagcaaacatgaaaaccgttcgacaacatttacgtaaatacctgcaagtattgcttcctcagcaggataaacctgtatttttccgtttttacgatccgcgtaatatctgggatttttttgatgtactgagtgactgggaaattcattgttttttaggacctattcaaaaagtagcgacagattaccaaagtgaatataaagaagataatttcctaaaaattagagaaaaataccctgataatgccaaaggaagatataagattttcaaaatcagcgaagaacagtatgagttaataggaataaagcaaaaagaaaaatatttacaaaaactttattcgattttgctatctgaattggcagagctgagaaaaagcataagtatcgtcaattccatgccatttttagcttttttctatgatcacctgctttccgagaaaatcactgacacaggctctatagaaggaattcttaataaagtgatcagagaagatagttttgacattgataattttgataaatcaatcttatccagtcttgttgatgatggtactcccggctagtatagggctaataaatttattaataacatttaactgaatgtcactacttccttgggaacttgcaaatatgtttccattttctaatatccatggagaaaaacaatatgggaaatgcagtcaaaatcggtgatattggcacaaaacatggtgattgtccggcaacacccgttattgctggtgccagtagcgtcaaagttgatggtgtttatctcgctcggcagggagatgctctgcaatcacattcatcccattctcggacgatagcaagcggatcgggatcagtttttattgaggggaaaccggctgccagaacgggtgatacggttgattgtggtggtgttgttatcggtggaggcagcataaatattggttgaggatatttaataaatcagctagtctgaaccaaattaccgaccatcacagatggtcacatagctgtaatggcaaaaaaactcccgtagcctgaaagggagagcaaaactgcggtacatctgcacacctttggaagcagatattgtcagacataaaccccttgtctggtgatgaaggttttttaaactaaaaatacaccccaaaaggtgtttttatattgccaccgaatcgaagtgtgttggatattgattaatgcactgacgtttcaaatcaacataacccctattttcatttatcttcaatgaacaacaggatggtttccgtccgtccagttcatatttctcactatttctgtttgaaatattcagcaaacaatttttccacgcccaaacaattaactcattgcacccgtttgacaccaaaccttgcggcgttttgtcgtacctgtgggcatttcaacgcttgtacgacttttgctgaccgttagcggaactcaaggcgtcactttttgccggtttaccgctgaaagtgacgccgcagccaaagaacaatcgaatcctgacaggctcacgcctgcttcaccacgcagtgaatctgacactgcatttttagattgaaaaaggagaacttgacgatatcgaggctggcttttttgccggtggggatgacctgcttatgcaggcggcagtaccgtgtactcaaccgataccccgcaatacctcaacctgcgttcactctggcgcacagatatcgatcaagggcaaggcagttattttctgttttgccagaatggtcgcgcgccagagatcgcatgttgtcaaacatccgcaaggggaagccaatgagtcgattgattaaagaattaaagttttttgcccgacaaggcggcggtagtcataaaacctgtcatgatcgcattcggatcgccgggcgtttgggtgcgttgttattgagcctgaatattcaggtgaaaagccttaagaatttgaaagccaaacatgtagagcagtacgttgatactcgtttatctcaggggattgccaaacgaacagtacaaaatgaaatatccgcactgcgtaatatcttccgcatggcaggccgggaaaaactggaaacctcgccgcgtttgagcaatcaggcattgggattaagcggaaccagccgcgccggaacaaaacaagcaatccctgatgctacatttcaggttgtttatcagaaggctcttgagcgtgatattgggtttgccgtcacactggaacttgcccgtttgctggggctacgttctcaggaagcggtgcaatgcagtgcttcactgaaaagttggcgcaaacaattaaatcaaccagaaccaaaacttcaaattattttcggcacaaaaggcggccgggcaaggcaaacccgcgtactggatattgcagcggtgaaaaaggctgtcgaacaggcgattgttattgcagaacaacgtggcggcaggttgattgataaacccgatctccggcaggccatgaactactggcgggcacataccacaaagattggtttaatcggctgccattctccccatagtttgcgctatgcgtgggcgcaggatgcgcttaatttttaccaacaaaatggttttagtcatcaggaagcaagagcgctggtttcaatggatatgggtcatggtgatggtcgtgggcgttacgttgaacgggtttatagtcgttcaacttagccattcggttattgagttagataaaacaatcagttaaagtattcccgccattagcaaaatctagtggtgaggtttcgcagcctcgaaatatggtgtcccactggtaggatgtttctaccagtgcgtctgctatcaccctttcaatggtgattcaggcaggggaggcttcggcctcgccggttggacaccaccggtactgcgaaccctgtctgaatcgccaccaccaatattaattaatggaaggggtagcaggaatgaataacaacattagaactgactggcatcaggccgatatcatcgcagcattacgtaaacgtggaacaaccttagcggctgtttctcgtgaagcgggacttagttcatctacactggcaaatgcattcagtaggccttggcctaaaggtgaatggataattgctaactatctgggaatccacccttctgaaatctggccgagtcggtattttgatagttatggtcgattagttgagcgtaaggcccgcaataaaacacaggaataatccgcttcaatttgtgttcgatttagtgaaaatgatgatttttaatattaagccctgagtgtgaaatggtagacgaattgaccatttttaaatctcacggcttttttattttaacttgatgataaaataaatctaattttgataaagcttttgtagtgtattgggcgggaaatctatctatattctatcagtgcctgcaatatcagaagctcgggtagcaacggatgctgcgaccaatatgcgtgtatattctctggaaaataagcactatttcagggaccattttaagttcaccggtaatctactattgcgccgacaggttattgagtttcaggagcatacacaaatcagcgacaagtggatgacatggctgtgacgttgcatttttttagtgctgcgtaataatcaccttatgctaaaaaagatattgagatctataccttggggttgctacagtgatgcaattgataattgcagccctgtgtattgctgcggtgtttcacggttcgataacaggaatatcagtgctgaaattatttactttttaagttactaccttgctgcactagcggccatacaactcatttccacagaaccttggcattttgtcagacaacacggattactaacaaaaaatagtctttgactgtagctgatagctatggagggattgaaattcaatcacatataggcgttttgattatgaatttagagggatcagatggcagttaaccaaacaaaaatttttgatacacttgaagaaattgtattttcgcttaatcaggatgaattcatatatagcttcctttctgcctacaatttacccaaatcgactattactcagttacagcaaggtggaagcagaaatattgcgaaagaaaatagtcatatcgggttaaaaaacaagatctactttgagccagcacattctgatgatgatcttgatgagaaactatctttgcgccttaccgaccagcttattacaaaaactcaacaaccaccgactaaagtcggtgggttagtgattaacggactgaaagtccggatacgcatcgactgaacgatgcgtcaattatccagcctgaagtgatcattcgggttcggttcaaaatgatgcgccagataggcctttatcatctcttccgttaactgacctaccgtcgcacaaaaatagcctctgccccaaaaatgctgaccccagtaacgctttttcaagtgagcaaactcttcaaacaacttacttgctgtccttccctttattcgcctcatgatttctgagggcgctaagctcggaggacaactcaccagtatatgcacatggtctttgctcacgaccccttctactatcctgatttcaaacgcttcacaggtctgacgaactagctctctcacccgtaagccaacttcacctgtgagcactttgtgtctgtattttgttacccacacaaaatgatactcaatctgaaataccgtgtggctgccatatctgtaatccatattgcacctctcgtgcaacacagtatcgcagctaaagctgaccgactaaagtcggtggttttaacctttcatatggaaaaataaaacgctctggccactggctattgccagtaaaatcatcgtccagatgaaagagcaaccgctgcccgagcgctcgtaaatcagaagccctttcccgcatataggcatcctgaagattggcaaattgttccgcatatttctccacaacactttttaccgcccactctgcaataaaaccattatcaaccgagtgaaacagatcctgtttaagtttcgggtcattcagtaagtgggaatagagatcaaaaatagcggcactttctttctgcgagctggcggtaaagcgtttacttatccggcgacactctgctgttgcctgctcaagcgcacgggtcaggcgggaacgttctgcctgatagtcgagtgttaacgcttcagatacctgctcaagtgatggctgggaacaatcctgccagccctgagccatagcaatcccctgagagaccgccagtgctttgatgtgggtctgacaatactgacttgttaatccacgaacctgggcctgagcaaggatcgcggccaattgcatggcaagagtcaccataaaggactcttcactttcatcaaacgatcgccgctcattttgctgaacgaccagaatcccctgcaattggcggcggtagatgatcggaacacctaaaaaggcccggagattttcttcttttacctgaggaatatatttgaagctggggtgatcacgtacatcagcaaggttgattaactctgacaagcgcccgacttcacccacaacaccttcgtcaaaggagaggctgaccgtgcgctttcccggtttcttcaacccccgggttgccatcaggtaataacgctggcgctgatgatcggccagataaatagaacaaacatccgtgttcattgctaagcaggtttcattaactaacagctcaagcgcttccgataaattcgttgccatcgcaaccttttcaacaatttcccgtaagcgcatgagcataacaattacctaacttcttctacgacgataataggctgagtagggttgtggcgctgattcctgtactggcatcacgatggaggaaaactctttcatcacacggcgatacacatcccgtttaaaggaaacaacctgcctgacagggtaccaataactcacccaccgccaaccatcaaattctggtgtactactgcgctgcacattaatctctttttcactgcaaagcagctgcaataaaaaccagcgttgcttttgccctatacaaacgggctttgtatcccaacgcaccaaacgtttgggtaatttgtaacgcaaccagctacgggtggaggctaaaacccgtacatctttgcgacttaaaccaacttcttcgaacaactcacgatacatcgcttgctctggcgattctcccggattgatacctccctgggggaactgccatgaatgctgtccataacggcgggcccacagaacctgcccctgacgattacaaattacaattcctacattcgggcggtagccatcatcatcgatcaccagactacctctcgataaaacgaatttgaaaagatagctaattgtttcacactcccctcaagcggtaaacctctatacccaatggatttagaattgcatcccggcggtcaggaaacacccctttggaacgcggatccccacctatttataaaacgatagcaggaatgtgagcacagccaataaatcagaaaaaatagtcagaaagatgacagatatattaatgaggctttgcagtcactgctttagcctctacaatacggtcatctcaacggggtgcgagtgttgtcggacaacatcgctgagagcaaacccgtagaacctgatccggttggtaccggcgtagggatttgagccactattcattgatatataacagtcattgatatatagcagtcattttatcagacactttctcaaatcctttaccaatctgctggtcacttatttaattatgagtgctaataacgattattaataaccactattaacaattactattaataacgacaggagagcaaagtgtttaagcgtttattttcccggtttatcgcaatcagtgcattatcggtttcagcatgtgcctttgctcaggcagcacaggctaagcctacactgactgtttatacttatgattcgtttgcctccgagtggggagcaggcccggctattaaaaaagcttttgaatccgagtgtgactgtgaattaaaactcgttgcgctggaagatggtgtttctttactgaaccgtataagaatggaaggtaagaaaactcaggctgatatcgtgctgggtttagataataacctgattcagtctgcccaacagacagggttattcacccctgtcagcattgataccacaaaattaaaactgcctttcacatggaataacagtacttttattccctacgattacggttattttgcttttatttacaataaaaacaccctgcctaatcccccaaaaaacatggctgaactcattaacagccagcagaactggaagattatttatcaggatccgcgcaccagtacccccggcttaggctttttactctggatacaggaactctatggtgataaggccgcacaagagtggcagaacattgccaaaaaaacgctgacggtaactaaaggctggagtgaggcttacgggttattcctgaaaggagaaggcgatatggtgctcagttataccacctcaccgggctatcacatcatgtctgagaaaaaggataattacgccgcagccatattcgatgaggggcactatttacaggttgaagttgctgcacagctggcttcaagcaagcagcctgaactggctcagaaattcatgcaattcatgctctccccagcattccagcaagttcttccgaccacgcagtggatgtatcctgttactgatattcctctgccagaagtgttcaaacaactgcctgtgccagagaaatcactgcaattcaacgcagatgaagtagcaaaacaccgtacacaatggatccgtacatggcaaagtgctgtaagccgttaatcgcgggttggttattgccgggggtgattgcctccggcctgttgctcctcattgcgctttccgcttttggcgctctgtggttttatgcgcctgaaagtcactggcaggtctttctgaatgacagctatttatggcatgtgattcgttttactttctggcaggcatttttatccgccttattctcggtgatacccgccatatttctggccagagcgctctatcgtcgccgctttccgggcaaaacgcttttcctacgcctgtgtgccatgacactggttctgccggttttagtcgctctgtttggcatactgactgtttacggacgtgttggctggctggccagtctttgccagtggataggaattgaataccatttcacgccttacggtcttcagggtattttactggctcatattttcttcaatatgccgatggctacacgcttattactccagtcactggaaaatattgcaatagaacaacggcagcttgcagctcagcttggtatgaatgagtggcaacattttcgttttgtcgaatggccttacctgcgccgccagattttgccaacaggcgcactgattttcatgctgtgcttcgccagctttgccactgtattaacattaggcggcggcccttctgcaactacgattgagctctctatttatcaggctatcaagtatgactacgatctgggtcaggccgctctgctcgcacttatccagctcttttgctgtcttggtctggtgttactgagccaaaagcttaaaggcatactttcggtcggttatgggcatcagcaacaatggcgtaacccacaggattcctggccgaaaaagttatgtgatggattgcttatcactctcgcattactgcttctgctcccgccattactggcggtcatcatggatgggctgaacagcgcagtgttagatgttctcagtaaacccgaattatggcaggcgttcacaacttccattgttattgcactgggagcggggttattgtgtatcttcctgacgatgatgctgttatggagcagccgcgaattatacctgcgtcatttatcgcgctggggacaggctctggaaagcagtggcttactgattctggcgatgccgggtattgtgcttgcaactggctttttcattttactgaataataccatcgggttacccgattctccttacgggctggttatcctgaccaatgccttaatagcaattccttatgcgttaaaagtactggataacccaatgcgcgatctggcagtgcgctacaacccgttatgccactcgctgaatattaagggattcaatcgcctgcgctggattgaacttaaagccctgaaaatcccgctggcgcaggcattagcttttgccagtgtgctgtcaatcggggattttggcattgtggcgttatttggtgacgaaaatttccgtaccctgcctttctatctctatcagcaaatcggagcataccgcagtcaggatggcgcagtaactgctttcctgcttttgttcctctgttttattttgttcagcgtgcttgaacgcttaccgggccgacgccatgattaaacttgaaaatgtgacttatacctatgaacaaatttccatgcatttcaacgtcagtattgaggcgggcgagcgcattgctatcctcggcccgagtggggcgggtaaaagtacattattaagtttaatcgccggttttcagttcgcagaacgcggtgatatccggctgaatggggaaaatcataccaatacatccccttccaatcgcccggtatccatgctgtttcaggaaaataatctgttttcccatttaaccattgagcaaaatatcggtctgggtttacaccccggacttaaattaagtgttcaacagcagcaaacactgcaacaaattgcatcgcaggtatcactgacggaatatctgaaccgcctgcctgcccagctttctggtgggcaacgccagcgggcggcactggcgcgctgtttagtgcgtcagcagcctattttattgctggatgaacctttttctgcgcttgatcctgcgttacgtaatgagatgctggaattgctggatcaggtatgcagagatcggaaactgactttactgatggtgtcccataatcttgatgatgccgctaaaatcgccccgcgttctctgctaattgtggatggtgaaatttattatgatggtgctacggagaagttagtgaaaggagaagtaactgaggccggggttttgggaattatataattgataatgtgtattagttcagatgagacgtactctgattttgatattccgtatagtcgtattctaaaaataatgtcctttatagctatagcgtttttgcaacgtagaaatcatgaggaacatttacattataatacaatgtagttaagaaactatccttacacggtactacaatgcaatatcgtgtaatacagttgacaaaaagaagttcagcccgatcttttttgttttgatgttaccattacaactgcttttaatgtgttaaattaacgtctactggattggtgttcaaaccaacattatttgaatagaaactaggacggtaattttatgtcatatatgatatatctaacattgaatggtaagaaacaggggttaatatcagcagggtgttcaacacttgattctataggaaatcgataccaaagaggacacgaagaccaaatacaagtattaagtttagatcactctatgactcagggcgggattccactttgtctttaatttaatcaaagataagctgactgcggaattccccagaccatgtggctcttcggcgtttagccgcttgactatcctttatactggtattctgtttaatcacatttaacgcaattcggttaaaaagcgccatttgcgcagccccatcagggtctttgagtgagatgttatcttcccgaaaggccacatctaatacccaatgcagctcattttccaccgcccaatgtcttcttattgccttagctgcggtttctgcatctgacgggagagagctactttagagcac

SEQ ID NO: 2286 - DNA, 11434 bp, Xenorhabdus sp.; identical to SEQ ID NO: 2285
  CDS (8646)..(9959)

SEQ ID NO: 2287 - DNA, 11434 bp, Xenorhabdus sp.; identical to SEQ ID NO: 2285
  CDS (7450)..(8379)

SEQ ID NO: 2288 - DNA, 11434 bp, Xenorhabdus sp.; identical to SEQ ID NO: 2285
  CDS (4483)..(4821)

SEQ ID NO: 2289 - DNA, 11434 bp, Xenorhabdus sp.; identical to SEQ ID NO: 2285
  CDS (3495)..(3761)

SEQ ID NO: 2290 - DNA, 11434 bp, Xenorhabdus sp.; identical to SEQ ID NO: 2285
  CDS (2614)..(3240)

SEQ ID NO: 2291 - DNA, 11434 bp, Xenorhabdus sp.; identical to SEQ ID NO: 2285
  CDS (205)..(378)

SEQ ID NO: 2292 - DNA, 10611 bp, Xenorhabdus sp.
  CDS (1)..(5718)
cccggacgggatctgagctatgccccgctgtttcatgtcatgttagcctttgatagctcagactctgccggatggcagctagacgggatcaaaaccacgccattcacggttgcgggggattacgccaaattcgatctgacgctctcgatggaaaaagtcttacaggcagacggcagagaacaattgcagggcacatttgaatacagtactgacctgtttgatgaagcaacgattaaacagattgaggctaatttctgctttttgttgcaggaaatagcccggaatgcccatgctgcgctgactgagtatcaatgtatcaatgaagcggaaaaacagtggctactgcaagaatggccgcgcagtctgaacactcatccggtgacacaaaccttacatcaggcatttgagcaacaggtcatacgtcgtccgcaggccattgccctgagcactgacaatggcaagacgctcacttatgaacagcttaatcagcgggccaatcaactggcacactatatgctgaaaatcaggcagcaaacggagggaacgacagcattgacgccattgatcggcctttgtctggaacgtgacgaggagatgctggttgctattctggcagtattaaaagcagggctggcttatgtccctatcgatggcagtcatgcaccggaacgggttcgtttctacgttgaagatgcaggtattcagctggttatcggcactcctgtataccgcactctgtttgaccacgaaaaagtggattatctctgcatcgatagcgaaaaaacctttattcagactatgccactggataaccctgatatggcctgtcagcccgatgcactggcttatgtgatttatacctccggttctaccggagtaccgaaaggcgtggaaatcccgcacgccaatgtcatgcggttattcagtgccagtcaacgtcattttacctttagcgaaaatgatgtctggacactctttcactcctgcgcgtttgatttctcggtatgggaaatatggggggcattactgcacggcggacgtctgagcattgtgccttattggaccagccggacaccgggccatttttatcagtgggtacaacaggaaaaagttaccgtgctgaatcagacgccttctgctttccagctatttatggcggctgatgaacaattgaataaagaggataaaaacggcatcaattcatccctgtcattgcgttatgtgattctgggaggcgaagcactggagccggctaatctgttgggctggtttaaaaagcatggcgatgagctgcctgaaatcatcaatatgtatggcatcactgaaacgacagtgcatgtgacctatcgcaggatcaggcaggcggatgctttgcagggcggaaaaagtccgattggggaagcgctggacgatctggagatttttttactggatggacagggcaggttgtccccgctgggagccgtaggagagatatacgttggtggtgctggtgtggctcggggctatttgaatcgccctgaactgacggcccagcgttttgtcgataaacggcagtttttcccgcaggcagaagcaggacaacggttataccggagcggggatttagcacgtttgcggcgggatggagcactggaatatctcggacgtgctgaccatcaggtgaaaatccggggttttcgcattgaactgggtgagattgaaacagccctgaaacgtattgatgaaatagaacaggtggtcgtgatggcttaccagaacgaaggtgagcatacttcgcatctggtggcgtatattgtgccgacaggaacaggctcggatgaagcattgtctgtcgatatgctcagggctgagctgaaacgtactttgccggattacatgctgccatctgcctttattttccttgatgccctgccactgaccagtaatggaaaaattgatcgcaaagccctgcccgcaccacaacaggtacgcccgcaactcgccagtgaatatcgggaagcgcgcaatgaaaccgaacgtgaattactgaagttatggcgggaaacattgccggtatcgcggattggtatccatgataatttctttgcgctggggggggattccctgcgtggtgtccagctgacgggcaaagcacaggagcaaggctggctgctgacgctggcggatctgttccagcatcagacagtggcagaactggcaaccctgattgatgaacgtcgcaaagagcatcaattgtcagcgcagagtattgcaccattcagcctgatatcagagaaagatcgcttgcatttacaggcgcaggcacagacacaggaaagaacgcaaaaaatcgttgatgcctatccgctcagccggatgcaggcgggtatgttctaccatatgaatatgtcgccggatgccaacgtatatcattgtaccggaacatctcatctgcgtattaacggggcgtttaatgagcaggcattcagggaagcaaccgctcagaccgtggcagcccatgatgtactacgcacggcgtttgatatggaaaattacagtgagccgttgcaactggtctatgactttgctgaattaccgattgttgtagaagacttgcgtcatttgtcggaacaagagcaggatgtgcgggcaaaagcattactggaagcagaacgggtgaatccgtttgatctgctgaatccgaccctgctgcgtttcttcattcagctgcgcactgataactccttccagtttacgatgaccgaatgtcacccggtctttgatggctggagttataacaccatgattgtggaagtcttcaaccgttatgccacgctgacaggacagacaagctggcaggcaccggataaaaaatcgctggaatatcgtgattttattgcactggaacgggctgccattgccgatgaacaacaaaaaaattactgggcacagaaactggatgactgcaccatccttgaattgccacgtaaacagcatacggagggtattcagagtgctaatccccccgcaaccagcccgaaactgaaatctgtttccctgacgctggatagtactgtttatcaggggttacgtcatttgatgctgcaacttggcgttccgctgaaaagcgtcctgctggccgggcacatcaaggtcatcagtattttcagcggagagaatgacattcttaccgggatcagcgcaaacggacggccggaagcgcagggaggagagcatctgtatggtctgttcctgaatattctcccattccgtcaaatcctgacctccgtatcatggaacgagttaatccggcaggtctttgctaacgaaattgaagccattccgcaccgtcgttatccattggcagaaattcagcgccagttcggtcagcagccattactggatgaggtgctgtttaactatattgatttccatgtttacggccagatggcagcggaagtggggctggaagtggtggacaggctgcatacgcaggacgtttacgaaggcacccattttacactggatgtccattttcagcatctcacgctctcttcggcgctggccagtgatcaaatttccatccaacttgattacgacgaaaataaaatcagccgtggattggtgtcaacgatggcggaatgctatagcgcggtatttgcggcgatggtggcagatccgcaggcattgcactgcgccgatcatttcctgccaatggtgcaacaacagaaactggaaaatttcagtcagggagacgcaggctatcagggaccagaaacactggctggattatttgctgaacaggtagcccaaacaccatctgtgctcgcggttgaatttggtgagcggcggctgagttacttggagttacatcaacagtccaaccagttagcacatctgctggcagaaaaaggggtgaaacaaggacagtatgtggcgctattgctggggcgcagtgttgaattaatcgtttcgatgctggcactggtaaaactcggcgcggtttatctgccactcaataccgacgacccggatatccggcttatcgaacagatagaagatgctcagtgtgatttgttaatcatagataggcgggtaacagacaggcagttgcctgacactatgtcagatcttccgcctgttttatggctggatgaagaacagtcggctctggcacaaatgccggtgacggatctgccggattgcctgaactctcatccagaacatcagggtggtctgcctgcttatatcatgtacacctctggttctaccggtaaaccgaaaggggtgttgatcgggcaaaaaggcattattcgtctggttaaaaatgtcagctatgttgatttccgcgcctttaagcgttatctgcaactggcttccgtcagttttgatgcatcaacatgggaaatctgggggccgttactgaatggcagctcaatagtgatcttcccgcaaggtgtggtttctgttcttctgctggaaaagatcattaaggaatcgcagatagaaagcctgttcctgacggcatccttgcttaacctgattgttgatgagcgtccgcagatattgcaaccggtaaaacaattgatttccggtggtgaggcgatgtcatcatggcacgcagcccgcattaaggagcgttatcctgaactgatcctgatcaacggttatggcccaacggaaaataccacgtttaccaccagctatcgttaccggggaaccgaaggccatagtgtgccaatcggcagaccgaatgagggcaatcaggtttatatccttgatagcttcctccatcctgttcctgttggtactgcgggtgagctgtacgttggcggtgagggtctggcgatggcttatctgaatcaggaaagcatctaccaaaccctgtttattgaaaatccatttgataaatccctctcagcccggctgtataaaaccggtgatcgcgggcgttttctgcctgacggtaacattgaataccttgggcgtattgatgaccaaaacaagatcagaggttatcgggtggaaacaggcgaaattgaagccgttctgtgcaaacacccggatgtggaacgtgcagcggttcgggtgattgaggaaaaccggggtaaacggatcgcggcttatattgttctgcatgtcggacaggctctgaatacgatggagctgcgcaattatctggcggaaaggctgccacgttacatgatcccggcctattttcaggctctctcttctctgccactgaatgcaaacggcaaacttgatattgcccgattgccacaggatatcccacaacaggctgcttatcatgaactgagtaacgtttccccattagcggaggcggttcctgctgtcgctgaggaaaaaaccaatgtactgaccgatcctgtcgtgcttgccattcagcaggtctgggccgaagtactggatatggaatctcccggttgtaatcaaaacttcttcgatctggggggagattcactgttgctggcccgtgttcatctgaaactgcatgcgctgggtcatacccgactctccattattgatttgctgaattattccaccattcaccagcttgcccgctttatcaacggagggcatggacagagtgaaaacgcaggaacatcagcggtcatgcagaggacacagggggctaaagaaaccagtctgaacaacatcactgatggccgtcagcgtctggcagaaatgcagaaaaaaatgcagcagaaaaggtagccggaagatgaatagcgggaatgaggaataacggatcatgaataacaccgatggtaataacgttcagagggaacaggcagtggaatcagtatctgatttggaaatgcacggttttgaaatcgccattatcggtatggcgggacagttttccggcgcgagtgatgttgaacaattctggcaaaatatcgcggcgggtgttgagtctgtcaggccattgactgatgccgaactggatgcagaaggaatatcaatggaggcccgttcgcgggccgattttatccgcaatgtttccgtactggagcatcctgaagattttgatgctgaattttttggttattctccgcgggaagctcaggcaatagatccacagcagcgcttgtttctggaaacgtcatggctggcgctggaaaatgccggttatacagcggaaaagtttcagggaccaattggcgtgtatgccagtagctccagcagcagctattttatgaattatctattgaatcatcacactgccgaagggccgtatttaccggacatgctgctatttggcaataataacgatctgctttcgacacgggtatcctacaagctcaatctgcgggggccgagcttcactatcgggtcggcctgctccagttcaatggtggcgctacactatgcctgccagtctctattagccggagaatgtgatattgcactgggcggaggtgttcacgttggttttccctcccacagtggctatcacttcgagggtagtggcattctttcccatgacgggcattgtcgtactttcgatgctgaggcatccggtactctgagcggtgatggcgttggtgttgtggtgctgaaacggttacaggatgctctggacagtggcgaccatatttatgcgattattaaaggttctgcggtaaataacgacggggcagagaaaatcggtttcactgcgccttcggtagccggtcaggctgcggttcttcagcgcgcattgctggtggcagatgtgacaccagagagtatcagttatgtcgaggctcatggcacagccactcatcttggcgacccgatggaaatgaaagccctgctcagtgcttatgagcagccggaaacagagcagccgcgctgtgcggtggcttctgtcaaagcgaatctggggcatgtagactcggcggcaggtgtgacgggagtcatgaaagttgcacagatgatgatgcaccgttatctgccaccggcggtcaactttacccgccttaatcctgaaattaatctgaccggttccagattctatataccgacaaaaggtgaagcgtggcagtgtcagggggtacgtcgggcgggagtcagttcctttggtattggaggaaccaatgcccatatgattttgcaggaaacacccgatacttccccgtcaggcccgtctcacccgcaacagttgctctctttttcagccaaaacaccgcaagcattacaggcaaagttacttaatttccgtgattggctggaaaaatctccccgactgccattagctgatatcgcttataccctgcatgtcggccgtcatgaaatggattaccggcatagtctggtatgccatgatcacatcagcgcaatagcggcgctggataattatttatcccggacagcacaggaaaatacgttacgtacagttgcttcgtcggtcatttttatgttcagcgggcagggagcacaatatcccggcatgatgaaggggtactatgaacaggagccaatattcagggccgcagtggataaatgcgcggagatgatgctgcctttgctggggcgcgatatccgtccgttaatcttcgatacgactgaagcgaataaaaccccggcattgtatcagacacattatacccagccagctctgtttgttgtcgaatatgcgctgagtcagttgctaatagaatgggggatacgtcctacggcttgcatcggtcacagcatcggagaatatgttgccgcttgtattgcgggtgtatttactcttgaagatgcagtgaagattgtgatcaggcgggctaacttaatgaatcagatgcctgccggaaaaatgctggcggtagaacttaatgaaagaacattacagggctatctcactgaaggcgttacactggctgcttataatgcgcctgagctttgtgtggtatccggcgaaacagaagccatattgatgcttgaagcgcgtctggcggaggataatatcgaatccggcacgctgcacacttcccacgcttttcacagtgcgatgatggatgggtgtctagagccgttcagacaggcatttgatggcataacactatcagcgccagaattaccctttatttcctgcgtaacgggaacatggatcactgctgaacaggcgatgtcgccggattactgggtacgccaattacgtgagccggttgcattcagtcagggagtggcgtgcttattatctcaacaggaagtcacttcaggttctcatttaccacaaactcatatacagcaatctcactcacaaaaagcctctccttcaaaagcgccagttttactggaaatcgggccgggcagtgctctgaccggactggcaaaaatacagttcacaggttcagcggcacatcagcgggtgttcaacagtacccgaagtatcaaacaaactatcccggacaggcagcatttgctgaatctattggggcagttatggcaacagggggtatctgtcgactggtctgcattttatcagctacagaaacgccaccgccttcctttgcccggatatacattccagcgtcagcgttacagtctggactcatgggttagtgatacctcacgtaacatgccttctcacaccagacagacggcttcagataacgggcggttgccactggagcagtggagtcaccagatccgctggaaacaaatgaccataccggtggcagattatgcccggttaaatgggcaggttttcctgatttttatggacggttcaggagtaggcaaacagctaacggctgaactgacacaattaggtggtgaagtctggcaggtgatacagggcggacgttttaaagcagatacaaacacacgtcaggtcatcatcaatccgcagaatagcgaagactatcaggcattggcggatttatttaacagccggaaagtgaaggtgactaacatcattcatgcatggtcaataacgcgttcagcttccattgcactgaatactgcctttacccattatgaatccctgttacatatcgcccggcaatttgcggtagaccgtttagcaacagatggaatgggatcagcaaatcaactgaaaacggttgcactaaaaatagacatcctctccaaccgactgcattcgattacagaacaggacagaaacgatccggccaaagccctgctgatggggccatgtcgtgtcattccaaaagagtttgagcaggtgcagtgcaggagtattgatattgccctgcctgttcgctggtcactgcctttacttaatcctaagccatctgatgccgtaatatcagcattactgacagagatcctcagacagccggaagaacaggagagtcaggataatatcgtcgcgcttcgcggaagacatcgttatgtaccgctgactgaaaccgcagtcttacctgctacggcgtccccgctattaagacatgggggaaactacctgattacgggcggatttggcggtattggagccacaatagcactctatctggcgaagcattatcaatcccatttgattttcatcagccgcagtgaattaccgcccagtaatgaatggtcagactggctggaaactcatgatgctgataataaacgttcacgccatatccgtctgttacaacagctcaagcagatgggagcttctgtttcagtcatttctgccgatctggcggatgcttcaagagtcaacaaagcgctgactgatgttgttctccagtatgggcagatccacgggatctttcattgtgctggtattgccgatggcgggctgatccagaatcgcaaattcgaagattcacttcaggtatttcagtcaaaagtactgggaacacaggttctggataactggtttaaacgccgtccactggattttttcgttttaagttcatcactggcatcccacataggcacaatcgggcaggtcgcttattgtgccgccaatgcttttgaagatgcttacgctttatcacgccatcaacatgttttggatgagaaacatttcaataaatcacattcaggcacgaaaaaatctacccgctatcttgctattggctgggatgcatggcgtgaggtaggaatggctgtggatagcctgcgtcagtggtatcaggataatgaagaacaagaaagtatcaggcacggtattctgccggaagagggttgccagttgctggaactattactgtcacatggggacagtgtttatgctgtttctacccgcggcttaccgttaccggatactgaccacacggtggaaaacaatatcccagcggaacaggaccaaaatacggtgaacacgggcgagcagaatctgtatccccgcccggtattaagtgtcgcttatcaggctccccgcaatcagacagaagaaattattgctgatatctggcaggaaaaaatgggtataggcccattgggggtgtttgatgatttcttcgaactgaatggccattcactgatggcagtgcagatcatcgcaaaaattaaacagcggctacaggtggtatttcctgtcgggtttatttacgagcactccacgattgaacaattggctgagcaggtcaatctgggtaacaaagtgcagccggacaacctgacaggcaacccggaagaaaggcgatgatagccaaaatgccaagaggcaat

SEQ ID NO: 2293 - DNA, 10611 bp, Xenorhabdus sp.; identical to SEQ ID NO: 2292
  CDS (5756)..(10588)

SEQ ID NO: 2294 - DNA, 11057 bp, Xenorhabdus sp.
  CDS (1763)..(2128)
aaagctttagcagttcagcttacgcagacgtcccacaggagtattcaaagtccctgtcactgcagccggtgttaattcacgcattgttagttcacgatcattcggaataacgcgaacccactcattatgggaggccagcagcgtctcaatttcgtggatcgggatatctcgtttcagtttcagggtaaatgactgactatggcagcgcaatgcgccaacgcgaacacacagaccatcaaccgtaataatattgttacccgtgttcaggatcttgttggtttccgcctgccctttccattcttcgcggctctggccattttccagctgcttatcaatccacgggatcaaacttcccgccagcggaacaccaaattgatctgtcggcaacgtgccactgcgggtaaagtctgtgacacgcttttcaatatccaaaatagcagaagccggattttgcagttcatccgcaacctgattgtgcagcatgcccatttgcgtcaatagttcgcgcatatgacgagcaccaccgccggaagcagcctgataagttgaaactgatgcccactcaatcaagttattagcaaacagaccacccaatgacatcaacatcaggctgacggtacagttaccaccaacaaacgttttaatgccattattcagactgtcctgaatgtgctgatggttaacaggatcaaggataatgactgcatcatcattcatacgcagtgcagaagctgcatcaatccaatacccttgccagcccgttgctctcagtttagggtaaatgttattggtataatctcccccctgacagctgataataatatccagtgctttgagtgcttcaatatcaaaagcatcctgcaatacacctgatttacctgtaaattccggcgctgcttgcccgtgttgggaagtggtaaagaagacggggttaatctcattaaaatccccttcctcgatcatcctctgcatcaatactgaaccaaccatgccacgccaaccgataaaacctacatttttcatcatctttaccctgtcttaaaaaagtcgttgtcagcacccctgacactactaaagctgacaaaatatgtgaaaaggtgcaagtaaatttatgcactacagagctaacagctttgtggtatcagcgccccattttttcagctcatcttagtcttttttcagctaatataattagcgatagaaaaacaattaattaacttataatttatattatgaattatatcaaataatattccgctctgaatttatatcttaaatacccttacacttatttttatttccatacagaataacaaccaatcaagaaaataaattattttatccttcattataaaaacataaataaataaataacaattttcaattattgtattaggattcaaaaaaaccatctcttcctctattcagttattttgaaaactgatttaattgagtattattaaaaattattatcatccagagatagcattccaatggagctttttttacaaaactgcttagctttcccggtggttattttcagcgggctactacttattgtttattttattggatttgtgctgcgtttggcttattagacattgatattcttaatatcgatgtcgatggtttcgatgcctctgatgcttctgttctggctggatggttaacaaaacttggcctgagcggaattcccgtcaccattattatcactctgattactctgatcggctggccgctgggctatttcagcgaacatttaatgttgcgtttcattgaaactgatttaatccgttacttacttggtacagtggtgctatttgtcgttggttttattgccctattactgacaaccatgctcctgcgcccgttacagccgaaactcgccaaacttaatcgttccaacagtattgataatttaatcgggaaaatcgctgaagtccgctctcccattgtcaccgaacaacggggcgaagcactgatgaataacaatggtgccagccttatcttgcagattcgtgcaccagaaagtgatggcattgcccgcggggatcatgtcgtccttattagctacgacgccacaacgaacagctataccgtcgtcagtgaaaatgaattcagattgtgacaacgttcttgttactcaatccagtaccgtaaattttgctatctgacatgccccactctacattccggtcatggatgaatagcagcttaaactccggggaattacgttaaccccgaacaggtttgctcgacaatgtttgccctaaaacaaaatggagaaacacatacacatgtcagatattaacttggctgatttcatgcctttcctgataattattgcgacaattattatcgtcattctgggtttctttgggcttttcaaagcgttttatatcaaagtcccacagggaaccgccctgatcgttaacgatatgtcagctcagcccaaagtgcatttcaccggtgctctggtctatcccgttatttataagaaagaatttatgcgcatctccctgctgacgctggaagtggatcgccggggtaaagatggcctgatctgtaaagataacctgcgggcagacatcacggttgctttctatctgcgcgtcaatgaaacgacggaagatgttctgaaagtggcaaaatccatcggtgttgagcgcgcctctgaccataacgcagtcaacgccctgtttagtgcaaaattctcagaagccctgaaaaccgttggtaaacaattcgaactatcaaaactgtttgaagaccgccagaatttccgcgaccgcatcgttgatgtgattggcaaagatttaaatggttatgctctggaagacgttgccatcgattatctggaacaaacgccgaaaaactcactggatccgaacaatattttcgatgccgaaggtatccgtaagatcactgaaatcacggcaattcataatatagaaaccaaccagaaagagcgggatcaggaattggctatccagaagaaaaacgtggaaacccgcgaagccagccttgctttagagcgccaacaggctgatgctgaagcccgccagaaacgtgaaattgaaagcattcgtgcccgtgaaaccgccgaaacgctgaaagtcaaagaagaagaacgcctgaaagcagaacaggcccgcattcagacccaacaggaaattgaaattcgcgaagagaaccgcctgcgtgaagtggaggtggcgcaacaaaaccgtgaacgggccgtgatcattgagatggaaaaggtcactcgtgcgcaagagctggaaattgtctcccgcgagcgtgaagtcgaactccagcgcatcgaaaaagagaaagcactggaagaagagcgcaaaaatatctccaacgtcattcgtgaacgtgtcgcagtagaaaaaaccgttgcgcaggaagaagagcgtattaaagaagtgcgcatgatttctgaggctgatcgcaagaaacaaatcaccattattgatgctcaggccaaagcagagcaggagctggttcggcaggtgaaacaggccgaagctgatgagaacagtgcaaaatacaaagcactggaaatcagcaccatggcacaggcagagctcgaagccgccgctaaacagtctgaagcgaaaaaacggatggctgaaggtattgaagcggaagaagccgccttaggtctggctgaagcccgtattcgtcaggctaaagccgaagcagaagagaaagaaggtctggttcaggccaatatcattgccgagaaattactggcagaagctcgtggtacacaggaaaaaggtctggctgaagcgcgtgtcatggaagctcaggctgatgcctctgaaaaacaagggctggcagaagctaaagttctggaagagaaactgtcagctcaggcccgtggtgacgagcagcaagctcacgccaaagaaaaactgggtctggtggatgccaaagtactggaagaaaaactgacagcacaggctcgcggtgaaggtcagctcggtacagcacaagcagaagttattcgccagcgcctgaaagcagaagctgatggtctgaccgataaattcactgccatgggcaaccttaacgatactgcccgtgatcacgaagagttccgtatgcgtcttgagaaagactttgagcaggccatgtctgccattgccgccaataaggagatcgccaaagagcaggcagaagttctggcggcggcgctcagcaaaaccaacattgatatcgtgggtggcgacggtagtttcttcaataccttctccaaagcgctcactgtcggcaaagccattaatggcgtggtggacaaaagcccattagtcaaatcagccgtcgataagctgctgactggtaaaggcgataagggcattgtagaaaaatttatggaaaaagaagtcggtgagaaaaaactggacttcaactccctgctgcaaaacccggaagtccagtctctggtcaatatgttcagtggcagtcaaaaagaccagacgccaaaaagcccgaataaagataattccgaagagtaatcaatacccaccgccacggcaaccgtgccggtgggcaattcacatgccctgaaacctgaattaatctcataaagcaaggaaacacttacgccatgtcagatagccaactgaatgataatcaagtaaacacccgcgaacaggaattgttgaataacgccgtcgctgaaggtggagcctatgatatcttacgcaatcgtctgtctgaacagggccagcagctccacgaaaaagtcagcctgctgaataaccgtcgtctggcagaatttggcaaaaaccagacagatattattggccgtatccgtatccgcacagaaaataactgcgttgcccgggacattgtccgcgtcggtgactggctgctgcttggctataatgttttccttggcctgaaaaaagaaacgcgggtcgaagatgttttctccctgtacaaactgaaaaaagaaaatgatgaatatgatgttgaatccgtcccgctgacaggaacgtttcttaatatcaccagctttgtgcaggatttccacgaactctatacctactataaaaacacgcaattactggaactggttgaacgggatggcaaactccttgccagttttcagattggtgagcggatcaccgatatccgcgtattccgttgggcaatctccagcgataaaaccgaaatcaggtacatcgataatcgcggtgaacgagatatcgccctgcctccggcctatgattttgaatggcagcgaacaacacgggaaaataccgttcatggtcgctatccacatatgaacattctcgatacggtgtttgtggaaacgattggtggcgaactgaccatcaaatgtgaaaataataccgaagatgggctgggtatttatcgtgaagcggtgttggataaaacccaatcgctggatgatgcgcagatcgaatatgctcagaccggcagtctggtcttactgaaaattctgccttatcgcgaggatacatggcgttatctggtttacaacacgctgactcagacggtacaacgcattgatgccattgggctggcttgtattcagttaccggaagatcacggcattattttccccggcggctattatctgcaaaacggcgagtacaaaaccttcgatcagcccatggacggaatgcgtttcaggcgggttcgccgctccccgaatggcgaagatgttatgtatatcttctatgagccaaaattcggtcggctggcactgttcaattacaacctgatcgaacgtaaactgcaaaacccactgttcgggcacggttatgccatgctggaagatggtcagatggtactgttcgaaggccagtcagatgagccaacacgcatccatccgatgcaaatctggcaaacccctttctattctgacgaatatgccgcccgccaaccggcaaaaaacagctttctggggcgtatcggcaatgctgaactggtgcggggaatttccgatctttaccatatcgctaaggaaattgaacaacagcagatctcttctcagctttatgaaaaactctgtcaggatacccgccgtctggtggatatctactattggttgagtgacgaaaagtggcagagtgacgaacaaagcctgcatattgccgcacttctcaaagagatcgccaataccggcgaacgcgtattggatgaatacgaaaaagtcgaaagtattcgtcgtcaatccgtccgggcgatgaatgaggccacatcacatcaaaaagaactgctgactgccatgctgccggaaagctggacagaaactcagcaatatattgatgccttaaacaagctgagtatccagcgtggccacttaattaccctgcgtgaccaccgttatattgacctcgtccgccttgatgaaatggaagcacaactggctgacagtcaacaacgtatttcactggcaaccgcagatttcctcgccagcgacaaagcattacagcctttcactcaacagttacaaatactggataagcaaatacaagaagcggccaacagcgcccaattgacagaacccttggcgggcatggagaaaatgtcagccgatctggatatgctgtcaaacctgatggcctcactgaaatttgaagatacaacccagcaaacgcatattattgaatccatctctgaaatttatgccctgctgaatcaggccaaagccagactacaacagcgccgcaaagaaaaaggcgcggttgaatccgtcgcacaatttagtgcgcaatttaaattgttcagtcaggggatcaccaacgccctgactctttccactgatcccgaacgctgtgaggaacaactctcacgcctgttagttcagttggaagaacttgaaagccagttcagtgaccacgatgaattcctgaatgacattctggataaacgcgaagagttgctggaaacatttgaaacgcataaacaatcgctgctggacgagcgccagcgtaagactcagaatttacaggttgcggcagaacgcttactggatagcatcaatcgcaggacaaccaaattttcttctcttgatgaacttaacgccttctttgctgctgataccctgtcgctgaaggcccgtgaaattatcgggcgcctgcgtgaactgaaagacagtgttaaagcggatgatattgatgccaaattcagggccgcacgcgatcaggcgatccgcagtctgcgggataaaaaggatatctacgaagatggcggcaatattatcaaacttgggccccgtcaccgtttcagtgttaatacacaggaactggatctgaccatcctgccacggggcgacaaattatatctgcatttaacaggcacagattatcaggagccgataaacagcccggaacttgagtctttgaaaccctactgggcgatttctctggaatctgaatcaccctcagtctatcgggcagaataccttgcttattcacttatctacgcagccagcaaagagcaggccggattaacactggatgggctaaaatccctgattagccagccggatatgctggaaaaaaccgtgcgtgattttgccgctccccgttataaagaagggtatgaaaaagggattcatgatcatgatgccattgccattctgcgcaaactcattcctgtcggggaaagtgccgatcttctgcgtttcaacccccatgccagagcaattgcctttctgttctgggatcaagttcagcaagaagaacaaccatctttatggccggaacgcgcacgcacctgcaccaatatttatcagctattccgtaatgatgctggcttacaggatctggaagctgaaatagaagcagaaataagcctattccttgaacgcaacccaatcaggtgtgaaccctatcagcaaacacaggccgctgaatatctgtgtcttgcgctgagtcgcatgacagtagaatttactttcagtaaatatgcccgagccttgctggaaggtctgcaatctgcgctggaaaaagcgcatatgtggggtgatttcattcactcacagcagaatctcggccagcgctttgctcaacgctggacgctggtggagaactggctgaacgggctttgctccttagccgaatttgctccactaaaagattatatttcggaagctgtcgccctgaccgtactggataaatcacttaacgcccgcttcagtgaagttgatctgcactttactgtcaccaatttaattggcgaacatccttccatcattaaccagacgctgacgctcagccttgatgactatttctgccgcatgagaaaacagcgcaagatatttatccccgcttatcatcattatcaggaattacgtcagagtgtcctgaatcagcagcgccaatccctaaagctgcatgaattcaaggctcgaccactgagttcatttgtccgcaacaaactgatcaacgatgtttatctgccattaatcggcgataatcttgccaaacaaatgggtgctgtcggagaaggtaaaagaacagacctgatgggaatgttgttgatgatctccccgccgggctacggtaaaaccaccttaatggaatacatcgccaaccgtcttggcctgatcttcatgaagattaacgcccctgcattggggcatgatgtactgtcactcgatccggctcaggctccgaatgcaacagcccgtcaggagctggaaaagctgaatctggcactggaaatgggcaataacgtgatgctgtatattgatgatattcagcacaccaaccctgaatttctgcaaaagtttatttctctgtgtgacggaacacggcgtatagaaggtgtctggaaaggcaaaaccaaaacttacgatatgcgcggtaaaaaattctgcgtcgttatgtccggtaacccctataccgaatccggtgagctattcaaaatccctgatatgctggcaaaccgtgccgatatttataacctcggtgaagtgctgggaggtatggaagaggccttcacgctgagctatatcgaaaacagcctgacttcaaacccggtattggctccgctggcattgcgcgatatgaacgatctttacctgtttatcgataaagcaatgggcaagcccttctccggcaatgccttaagttacccatatagtgatgctgaaattaccgaaatcgttgcaatccttgaacggctgttaatcatgagaagtgtcgttttcaaagttaaccagcaatatattgccagtgccgcccagtcagacaaataccggacagaaccaccgttcaaactacagggcagttaccgcaatatgaataaactcagtgaaaaagtttctgcggtcatgaatgaagccgaaatacagcgcattctggatgatcactatttgggagaagcacaactactgaccagtggagcagaagagaacctacttaaactggcagaacttcgtggcaccctgacaccagaacaagagctgcgctggcagcagataaagcgtgattttattcgcaataaagcattgggtggcgataacgccgatgtaggcgatcgggttgtagcgcagcttgctgatttggttgagagtgttcaggcattagggaattgatctataaatcaaaacatagaggcacaaaaattaggaatgagacacgaatgagatattattaaaacaagatttggttaaaacgaccaaaatactgtctaactacaaagacactatctgaattataaaaacgaattatttgagtaggtgatactttttcttaactcaaaagtcatctgtatcaaatactaaaatttgattcagttaataagattgaggaaacagcatagtgaaactatggttacaaaaacggttttatatcctgatagggctaacctcactgcttatcctcctccaattacttaataccttaaccgatggagcattaagtaattttggtattatcccccgatacattcaggggttgattggcattcctctgtctccgtttctgcatggtagctggtcacatctgttcagtaacctgcctgctttattaatcctgagtgcattactgatggctcactccatccgatattacattctggccagtctgttcattatttttacggcagggatgttagtctggctattcgggcgtagtgccattcatgttggtgccagcggctggatttttggtttatggggtttattgctggctaatgccttttttctcaaacgagccaaagatttctttttcgcgattgttgtctttatctactatggcggaatcgcaattaatctgttcccctggcatgcctacgtttcaacagaaagtcatttttttggtgctatatccgggatcaccttctcctggctttcgaaaaaacagttaattaaaaagcacaaagataacctgattacccgcagatgacagtccgttacgataacggactgttgataattaacctgaattctggataagaaattgacgagaggcctgttccaggagcaaagttttggtgaaagcctaaaactactccggggaggaacaggccatggtagggcaaacgggtctaaattgaacagttagttcagtgatgtgccttcagtacataaaggtaggaacattgatgatcgtttgtgatttacaatccgttttctgtcaatgataaccgtagaaaccgtcatgaaagcaaccaccctcagcaatacctttggacacctcactgatccccggcttaatcgtacgaaacagcatttgttgatcgacattctcaccatctcgatttgtgcggttatctgcggttgtgagagtttcaatgcgattgaagaatacggaaaatccaaggaggactggttcagacaatttctggaactccccaatgggatccccagccatgatacctttaacgatgtgataaaccggctgaatccccaacaattcggtgaggcttttatcggatgggtgaataagttagccaaaatctccaccgacattatcgcattggatggcaaaacaatgagaggtacacttgacaaagccaacggctctccggatatccatttagtcagagcttgggcggtg

SEQ ID NO: 2295 - DNA, 11057 bp, Xenorhabdus sp.; identical to SEQ ID NO: 2294
  CDS (2298)..(4529)

SEQ ID NO: 2296 - DNA, 11057 bp, Xenorhabdus sp.; identical to SEQ ID NO: 2294
  CDS (4622)..(9592)

SEQ ID NO: 2297 - DNA, 11057 bp, Xenorhabdus sp.; identical to SEQ ID NO: 2294
  CDS (9909)..(10403)

SEQ ID NO: 2298 - DNA, 11057 bp, Xenorhabdus sp.; identical to SEQ ID NO: 2294
  CDS (10686)..(11057)

SEQ ID NO: 2299 - DNA, 11057 bp, Xenorhabdus sp.
  CDS (10032)..(11051)
caccgcccaagctctgactaaatggatatccggagagccgttggctttgtcaagtgtacctctcattgttttgccatccaatgcgataatgtcggtggagattttggctaacttattcacccatccgataaaagcctcaccgaattgttggggattcagccggtttatcacatcgttaaaggtatcatggctggggatcccattggggagttccagaaattgtctgaaccagtcctccttggattttccgtattcttcaatcgcattgaaactctcacaaccgcagataaccgcacaaatcgagatggtgagaatgtcgatcaacaaatgctgtttcgtacgattaagccggggatcagtgaggtgtccaaaggtattgctgagggtggttgctttcatgacggtttctacggttatcattgacagaaaacggattgtaaatcacaaacgatcatcaatgttcctacctttatgtactgaaggcacatcactgaactaactgttcaatttagacccgtttgccctaccatggcctgttcctccccggagtagttttaggctttcaccaaaactttgctcctggaacaggcctctcgtcaatttcttatccagaattcaggttaattatcaacagtccgttatcgtaacggactgtcatctgcgggtaatcaggttatctttgtgctttttaattaactgttttttcgaaagccaggagaaggtgatcccggatatagcaccaaaaaaatgactttctgttgaaacgtaggcatgccaggggaacagattaattgcgattccgccatagtagataaagacaacaatcgcgaaaaagaaatctttggctcgtttgagaaaaaaggcattagccagcaataaaccccataaaccaaaaatccagccgctggcaccaacatgaatggcactacgcccgaatagccagactaacatccctgccgtaaaaataatgaacagactggccagaatgtaatatcggatggagtgagccatcagtaatgcactcaggattaataaagcaggcaggttactgaacagatgtgaccagctaccatgcagaaacggagacagaggaatgccaatcaacccctgaatgtatcgggggataataccaaaattacttaatgctccatcggttaaggtattaagtaattggaggaggataagcagtgaggttagccctatcaggatataaaaccgtttttgtaaccatagtttcactatgctgtttcctcaatcttattaactgaatcaaattttagtatttgatacagatgacttttgagttaagaaaaagtatcacctactcaaataattcgtttttataattcagatagtgtctttgtagttagacagtattttggtcgttttaaccaaatcttgttttaataatatctcattcgtgtctcattcctaatttttgtgcctctatgttttgatttatagatcaattccctaatgcctgaacactctcaaccaaatcagcaagctgcgctacaacccgatcgcctacatcggcgttatcgccacccaatgctttattgcgaataaaatcacgctttatctgctgccagcgcagctcttgttctggtgtcagggtgccacgaagttctgccagtttaagtaggttctcttctgctccactggtcagtagttgtgcttctcccaaatagtgatcatccagaatgcgctgtatttcggcttcattcatgaccgcagaaactttttcactgagtttattcatattgcggtaactgccctgtagtttgaacggtggttctgtccggtatttgtctgactgggcggcactggcaatatattgctggttaactttgaaaacgacacttctcatgattaacagccgttcaaggattgcaacgatttcggtaatttcagcatcactatatgggtaacttaaggcattgccggagaagggcttgcccattgctttatcgataaacaggtaaagatcgttcatatcgcgcaatgccagcggagccaataccgggtttgaagtcaggctgttttcgatatagctcagcgtgaaggcctcttccatacctcccagcacttcaccgaggttataaatatcggcacggtttgccagcatatcagggattttgaatagctcaccggattcggtataggggttaccggacataacgacgcagaattttttaccgcgcatatcgtaagttttggttttgcctttccagacaccttctatacgccgtgttccgtcacacagagaaataaacttttgcagaaattcagggttggtgtgctgaatatcatcaatatacagcatcacgttattgcccatttccagtgccagattcagcttttccagctcctgacgggctgttgcattcggagcctgagccggatcgagtgacagtacatcatgccccaatgcaggggcgttaatcttcatgaagatcaggccaagacggttggcgatgtattccattaaggtggttttaccgtagcccggcggggagatcatcaacaacattcccatcaggtctgttcttttaccttctccgacagcacccatttgtttggcaagattatcgccgattaatggcagataaacatcgttgatcagtttgttgcggacaaatgaactcagtggtcgagccttgaattcatgcagctttagggattggcgctgctgattcaggacactctgacgtaattcctgataatgatgataagcggggataaatatcttgcgctgttttctcatgcggcagaaatagtcatcaaggctgagcgtcagcgtctggttaatgatggaaggatgttcgccaattaaattggtgacagtaaagtgcagatcaacttcactgaagcgggcgttaagtgatttatccagtacggtcagggcgacagcttccgaaatataatcttttagtggagcaaattcggctaaggagcaaagcccgttcagccagttctccaccagcgtccagcgttgagcaaagcgctggccgagattctgctgtgagtgaatgaaatcaccccacatatgcgctttttccagcgcagattgcagaccttccagcaaggctcgggcatatttactgaaagtaaattctactgtcatgcgactcagcgcaagacacagatattcagcggcctgtgtttgctgatagggttcacacctgattgggttgcgttcaaggaataggcttatttctgcttctatttcagcttccagatcctgtaagccagcatcattacggaatagctgataaatattggtgcaggtgcgtgcgcgttccggccataaagatggttgttcttcttgctgaacttgatcccagaacagaaaggcaattgctctggcatgggggttgaaacgcagaagatcggcactttccccgacaggaatgagtttgcgcagaatggcaatggcatcatgatcatgaatccctttttcatacccttctttataacggggagcggcaaaatcacgcacggttttttccagcatatccggctggctaatcagggattttagcccatccagtgttaatccggcctgctctttgctggctgcgtagataagtgaataagcaaggtattctgcccgatagactgagggtgattcagattccagagaaatcgcccagtagggtttcaaagactcaagttccgggctgtttatcggctcctgataatctgtgcctgttaaatgcagatataatttgtcgccccgtggcaggatggtcagatccagttcctgtgtattaacactgaaacggtgacggggcccaagtttgataatattgccgccatcttcgtagatatcctttttatcccgcagactgcggatcgcctgatcgcgtgcggccctgaatttggcatcaatatcatccgctttaacactgtctttcagttcacgcaggcgcccgataatttcacgggccttcagcgacagggtatcagcagcaaagaaggcgttaagttcatcaagagaagaaaatttggttgtcctgcgattgatgctatccagtaagcgttctgccgcaacctgtaaattctgagtcttacgctggcgctcgtccagcagcgattgtttatgcgtttcaaatgtttccagcaactcttcgcgtttatccagaatgtcattcaggaattcatcgtggtcactgaactggctttcaagttcttccaactgaactaacaggcgtgagagttgttcctcacagcgttcgggatcagtggaaagagtcagggcgttggtgatcccctgactgaacaatttaaattgcgcactaaattgtgcgacggattcaaccgcgcctttttctttgcggcgctgttgtagtctggctttggcctgattcagcagggcataaatttcagagatggattcaataatatgcgtttgctgggttgtatcttcaaatttcagtgaggccatcaggtttgacagcatatccagatcggctgacattttctccatgcccgccaagggttctgtcaattgggcgctgttggccgcttcttgtatttgcttatccagtatttgtaactgttgagtgaaaggctgtaatgctttgtcgctggcgaggaaatctgcggttgccagtgaaatacgttgttgactgtcagccagttgtgcttccatttcatcaaggcggacgaggtcaatataacggtggtcacgcagggtaattaagtggccacgctggatactcagcttgtttaaggcatcaatatattgctgagtttctgtccagctttccggcagcatggcagtcagcagttctttttgatgtgatgtggcctcattcatcgcccggacggattgacgacgaatactttcgactttttcgtattcatccaatacgcgttcgccggtattggcgatctctttgagaagtgcggcaatatgcaggctttgttcgtcactctgccacttttcgtcactcaaccaatagtagatatccaccagacggcgggtatcctgacagagtttttcataaagctgagaagagatctgctgttgttcaatttccttagcgatatggtaaagatcggaaattccccgcaccagttcagcattgccgatacgccccagaaagctgttttttgccggttggcgggcggcatattcgtcagaatagaaaggggtttgccagatttgcatcggatggatgcgtgttggctcatctgactggccttcgaacagtaccatctgaccatcttccagcatggcataaccgtgcccgaacagtgggttttgcagtttacgttcgatcaggttgtaattgaacagtgccagccgaccgaattttggctcatagaagatatacataacatcttcgccattcggggagcggcgaacccgcctgaaacgcattccgtccatgggctgatcgaaggttttgtactcgccgttttgcagataatagccgccggggaaaataatgccgtgatcttccggtaactgaatacaagccagcccaatggcatcaatgcgttgtaccgtctgagtcagcgtgttgtaaaccagataacgccatgtatcctcgcgataaggcagaattttcagtaagaccagactgccggtctgagcatattcgatctgcgcatcatccagcgattgggttttatccaacaccgcttcacgataaatacccagcccatcttcggtattattttcacatttgatggtcagttcgccaccaatcgtttccacaaacaccgtatcgagaatgttcatatgtggatagcgaccatgaacggtattttcccgtgttgttcgctgccattcaaaatcataggccggaggcagggcgatatctcgttcaccgcgattatcgatgtacctgatttcggttttatcgctggagattgcccaacggaatacgcggatatcggtgatccgctcaccaatctgaaaactggcaaggagtttgccatcccgttcaaccagttccagtaattgcgtgtttttatagtaggtatagagttcgtggaaatcctgcacaaagctggtgatattaagaaacgttcctgtcagcgggacggattcaacatcatattcatcattttcttttttcagtttgtacagggagaaaacatcttcgacccgcgtttcttttttcaggccaaggaaaacattatagccaagcagcagccagtcaccgacgcggacaatgtcccgggcaacgcagttattttctgtgcggatacggatacggccaataatatctgtctggtttttgccaaattctgccagacgacggttattcagcaggctgactttttcgtggagctgctggccctgttcagacagacgattgcgtaagatatcataggctccaccttcagcgacggcgttattcaacaattcctgttcgcgggtgtttacttgattatcattcagttggctatctgacatggcgtaagtgtttccttgctttatgagattaattcaggtttcagggcatgtgaattgcccaccggcacggttgccgtggcggtgggtattgattactcttcggaattatctttattcgggctttttggcgtctggtctttttgactgccactgaacatattgaccagagactggacttccgggttttgcagcagggagttgaagtccagttttttctcaccgacttctttttccataaatttttctacaatgcccttatcgcctttaccagtcagcagcttatcgacggctgatttgactaatgggcttttgtccaccacgccattaatggctttgccgacagtgagcgctttggagaaggtattgaagaaactaccgtcgccacccacgatatcaatgttggttttgctgagcgccgccgccagaacttctgcctgctctttggcgatctccttattggcggcaatggcagacatggcctgctcaaagtctttctcaagacgcatacggaactcttcgtgatcacgggcagtatcgttaaggttgcccatggcagtgaatttatcggtcagaccatcagcttctgctttcaggcgctggcgaataacttctgcttgtgctgtaccgagctgaccttcaccgcgagcctgtgctgtcagtttttcttccagtactttggcatccaccagacccagtttttctttggcgtgagcttgctgctcgtcaccacgggcctgagctgacagtttctcttccagaactttagcttctgccagcccttgtttttcagaggcatcagcctgagcttccatgacacgcgcttcagccagacctttttcctgtgtaccacgagcttctgccagtaatttctcggcaatgatattggcctgaaccagaccttctttctcttctgcttcggctttagcctgacgaatacgggcttcagccagacctaaggcggcttcttccgcttcaataccttcagccatccgttttttcgcttcagactgtttagcggcggcttcgagctctgcctgtgccatggtgctgatttccagtgctttgtattttgcactgttctcatcagcttcggcctgtttcacctgccgaaccagctcctgctctgctttggcctgagcatcaataatggtgatttgtttcttgcgatcagcctcagaaatcatgcgcacttctttaatacgctcttcttcctgcgcaacggttttttctactgcgacacgttcacgaatgacgttggagatatttttgcgctcttcttccagtgctttctctttttcgatgcgctggagttcgacttcacgctcgcgggagacaatttccagctcttgcgcacgagtgaccttttccatctcaatgatcacggcccgttcacggttttgttgcgccacctccacttcacgcaggcggttctcttcgcgaatttcaatttcctgttgggtctgaatgcgggcctgttctgctttcaggcgttcttcttctttgactttcagcgtttcggcggtttcacgggcacgaatgctttcaatttcacgtttctggcgggcttcagcatcagcctgttggcgctctaaagcaaggctggcttcgcgggtttccacgtttttcttctggatagccaattcctgatcccgctctttctggttggtttctatattatgaattgccgtgatttcagtgatcttacggataccttcggcatcgaaaatattgttcggatccagtgagtttttcggcgtttgttccagataatcgatggcaacgtcttccagagcataaccatttaaatctttgccaatcacatcaacgatgcggtcgcggaaattctggcggtcttcaaacagttttgatagttcgaattgtttaccaacggttttcagggcttctgagaattttgcactaaacagggcgttgactgcgttatggtcagaggcgcgctcaacaccgatggattttgccactttcagaacatcttccgtcgtttcattgacgcgcagatagaaagcaaccgtgatgtctgcccgcaggttatctttacagatcaggccatctttaccccggcgatccacttccagcgtcagcagggagatgcgcataaattctttcttataaataacgggatagaccagagcaccggtgaaatgcactttgggctgagctgacatatcgttaacgatcagggcggttccctgtgggactttgatataaaacgctttgaaaagcccaaagaaacccagaatgacgataataattgtcgcaataattatcaggaaaggcatgaaatcagccaagttaatatctgacatgtgtatgtgtttctccattttgttttagggcaaacattgtcgagcaaacctgttcggggttaacgtaattccccggagtttaagctgctattcatccatgaccggaatgtagagtggggcatgtcagatagcaaaatttacggtactggattgagtaacaagaacgttgtcacaatctgaattcattttcactgacgacggtatagctgttcgttgtggcgtcgtagctaataaggacgacatgatccccgcgggcaatgccatcactttctggtgcacgaatctgcaagataaggctggcaccattgttattcatcagtgcttcgccccgttgttcggtgacaatgggagagcggacttcagcgattttcccgattaaattatcaatactgttggaacgattaagtttggcgagtttcggctgtaacgggcgcaggagcatggttgtcagtaatagggcaataaaaccaacgacaaatagcaccactgtaccaagtaagtaacggattaaatcagtttcaatgaaacgcaacattaaatgttcgctgaaatagcccagcggccagccgatcagagtaatcagagtgataataatggtgacgggaattccgctcaggccaagttttgttaaccatccagccagaacagaagcatcagaggcatcgaaaccatcgacatcgatattaagaatatcaatgtctaataagccaaacgcagcacaaatccaataaaataaacaataagtagtagcccgctgaaaataaccaccgggaaagctaagcagttttgtaaaaaaagctccattggaatgctatctctggatgataataatttttaataatactcaattaaatcagttttcaaaataactgaatagaggaagagatggtttttttgaatcctaatacaataattgaaaattgttatttatttatttatgtttttataatgaaggataaaataatttattttcttgattggttgttattctgtatggaaataaaaataagtgtaagggtatttaagatataaattcagagcggaatattatttgatataattcataatataaattataagttaattaattgtttttctatcgctaattatattagctgaaaaaagactaagatgagctgaaaaaatggggcgctgataccacaaagctgttagctctgtagtgcataaatttacttgcaccttttcacatattttgtcagctttagtagtgtcaggggtgctgacaacgacttttttaagacagggtaaagatgatgaaaaatgtaggttttatcggttggcgtggcatggttggttcagtattgatgcagaggatgatcgaggaaggggattttaatgagattaaccccgtcttctttaccacttcccaacacgggcaagcagcgccggaatttacaggtaaatcaggtgtattgcaggatgcttttgatattgaagcactcaaagcactggatattattatcagctgtcaggggggagattataccaataacatttaccctaaactgagagcaacgggctggcaagggtattggattgatgcagcttctgcactgcgtatgaatgatgatgcagtcattatccttgatcctgttaaccatcagcacattcaggacagtctgaataatggcattaaaacgtttgttggtggtaactgtaccgtcagcctgatgttgatgtcattgggtggtctgtttgctaataacttgattgagtgggcatcagtttcaacttatcaggctgcttccggcggtggtgctcgtcatatgcgcgaactattgacgcaaatgggcatgctgcacaatcaggttgcggatgaactgcaaaatccggcttctgctattttggatattgaaaagcgtgtcacagactttacccgcagtggcacgttgccgacagatcaatttggtgttccgctggcgggaagtttgatcccgtggattgataagcagctggaaaatggccagagccgcgaagaatggaaagggcaggcggaaaccaacaagatcctgaacacgggtaacaatattattacggttgatggtctgtgtgttcgcgttggcgcattgcgctgccatagtcagtcatttaccctgaaactgaaacgagatatcccgatccacgaaattgagacgctgctggcctcccataatgagtgggttcgcgttattccgaatgatcgtgaactaacaatgcgtgaattaacaccggctgcagtgacagggactttgaatactcctgtgggacgtctgcgtaagctgaactgctaaagcttt

SEQ ID NO: 2300 - DNA, 9859 bp, Xenorhabdus sp.
  CDS (1740)..(2291)
ggtcaattttcattttgtggcaataattgtgatttatattgtaatgaatttttttggtatgatggttctatatgataattcgaaataatttgaaagtggcgtcctcagaaatgattgcttacgccactttttaaggtaagttagctgtgctttttcggggtaaacaatgcaattatggcagcgcttaacaatagtaatgcgcctgatatggttaaaacggacaggaatgcgctatcaaaggcctgttttgctgcctgaagcaatgatgaagccatatcgccctttagcccttctgcgacgataatcgcttcatcaatactattctgtaatgcattactgactgattctgatacagcgatatcagctggcagagtaaatgctgccgtataaattgccaccaacaggctaccgagtacagcaactccaatcaggcctccaagttcataggcaatttcttcaattgaggctgctgtacctgcgctatgctctggggcgctgaacatgatggaggtagaagctgctgtcatcgcagcaccgacaccgaatccaatcatagagaatgtcgtgatttgtactaacatcccagctcggaagccgatgagatagccaaaaatacctaatcccgccagaaaaagagaaagccacataattcttcctgaacccaatttgggtatggcaagacccgctaatggcccggcaacgaaagaagctagtgggataggtaagataattaatcctgcctgtaaaggcgataaaccagcaacaagttgcagtcgctgactgactattaattcaactcccatcagggctgcggtgctaacaaaagcggtcgcgacaccggtagaaaaaccataggattttaataaagtaaagtctatgatcggtgcagatgaacgacgttgccgagaaacgaacatcatcgtgaatatcatcccgattgcgctggctataatggcaattcccattgatggggcttgtttgctgatttctttgatagcaaaagtaatgccaatcagcccgatcataatttggagagaggccagcaggtcgaatgtgcgttgtgggttactctggcttttagtaatagtgaatagggcgaatatcaacgcaataatgacgataggcacgtttatcaggaaaacggaaccccaccagaaatattctagcagtattccaccgatgacgggaccaagtgctgcgcccccggcagcaacagcggaccagataccgatggcaagagcacgttctccgggttcttcgaaagcctgacggattattgcgagtgtggccggcatcatcattgcggcaccgatggcaagtatcactcgtgcgctgatcaacatactggtattcggagaaaatgctgccatcattgaggcaataccgaacacggctaatccggcagtaaacaatttcttggcaccaaagcgatcactcagggcaccactcccgggaagcaggccagcaatggttaatgaataagcattcatgatccataacttctcagtggaagatgctcgtaaatcgtatgttaaacgaggtaaagctgtatagaggactgtcatgtcgatgacaatcagcaaaagtgcactggaaataacagccagcacaagccagcgagtatttgatttcatgaaagaactcatcagtgtggtttagggatcctgtatcgccaacccttgacggtacaaattgcgtacattataaatacatacgtattgaattaaaagagagtaataatgggacgacgtaaaacaattgaccggaacattctgctggatgcagcagaacaaattgtcaccacacatggggcagcggcccttaccattgatgcggtagcaaaagctgtcgggatcactaagggtggggttcagtacagttttaatacgaaagatgcacttattgaggcgatgtttgagcgttgggggcttggctacgaggaacaattctacaaaatagccggagaagcgcccgatccactgaccgcaatacgtgcgcacattgaagcaagtaaatgttcagatgaagtgtcatcggcgaaagcggccggactgatggcatcgttattgcaaacaccggaacatctggaatcaacccgtgactggtatcgtgagcgcatcgctaatctggatataacaacagcagaaggtcgtcgggcccgtttagcttttttggcgacagaaggtgtatttattttacgcttcttcggcttgatggatattggtaaggatgaatgggcggatattttcagcgatattctggagatggcaccttctgaaaatagtgaataaaaacagcgtccattagtgcagttcgttaataatcactttgtgatataacttattgattgtactcatggcaatcgttttcttttttgatcttttaggataacgatttattttgatttcctgtaggatgaatcgaaaacttcatctgtttaggaataaaacattaatgagtacactcaattcaggctctgcaaatagtcagggcttacttcagcgcgtgtttaaactggaagagcatggtacaacagttcgcaccgagatgattgcggggctgacgacctttctgacgatggtttatatcgtctttgtgaacccacaaattctgtctgttgccggaatggatattaaagccgtatttgtcacaacctgcttaattgccgcacttggcagcattatgatgggaatagtggctaatttacctgttgcggttgcgcctgctatgggtctgaatgcattttttgccttcgttgttgttggtgctatgggtgtttcgtggcaggttgcgatgggcgcaattttctggggtgctgtagggctgctgatcctgacgattttccgcatccgttactggatgatagcgaatatccccgtgggattacgggtcggtatcaccagcggtatcgggctttttattgccatgatggggctgaaaaatgccggcattattgtaccgaatccagatacgatcgtttctattggtaactttactgctcataacgtcctgctgggcgctttgggcttttttatcattgctattttagccgcacgtaatttccatgccgcagtattgctttccatcgtaataacgacggggatcgggtttatgctggggtatgtggaatatcagggtatttttgatttgccacccagtgtcatgagtgttgtcgggcatgttgatgtgaaaggtgcgctggatatcgcattagtcggggttattttttcttttatgctggtgaacctgtttgattcatccggtacgctgattggtgtgaccgataaagcaggccttgctgacagtaacggcaaattcccgcagatgaagcaggctctgtatgttgacagcatcagctcagtagcaggttcttacatcggcacttcttcggtaaccgcttttgtagaaagttcttctggcgtctccgttggtggccgtactggattaaccgctgtagtcgttggtattttgttcctgctggtgatgtttatttctccactggccagtatggttccggcttatgctacggcgggtgcgctggtttatgtcggcgttttgatgacatccagcctgacacgggtgaaatgggatgatctgacggaatccgttccggcatttatcaccgctgttatgatgccattcagtttctcaattactgaaggtattgcactgggctttatggcttattgcgtgatgaaactgggaacaggaaaatggcgggagataggcccgtgcgttattgttgtcacgttgctgtttgtgctgaaaatagtatttgtcgatgcctgataatcataatcttggctaaactgagtaccgagcaatataaaaaagcctgatgcatcaggctttttttatggaaattatacggaatatttttctaaaaaaagatcaatggcgattttctggtgcaataaaaccgatgcaaactacttctgattccgcgtccggctgcgcctgaaaagtgaaatcttccttatggctaagaattaattcaggccatgtcgccaatgtggactgaaaatgctcctgtgagcagttcttccctcttttccccaccagtaatgccccatatttgacgatatcactctcttttatatggcgattataaatattgggcggcgcaccgttaccggttttccacggctgtatggtttgggggtgatagtgactgtagaacgtcagccattgatgcaggtattcacctccaacataatgcagtggtgttgaatacaattcatcccagcgctgatccggctggctggaaaagatttttatccctgcaaatttttctcccgcaccacggacatttgtcagcataatactggcatagccaatgagaacgaggacagcaaacacagccagacctcgcagtgtccccgttaaggatttatggggacgtacggttatcgagccgactagcagcgctggcgctactgccatgaaaggctggagccattcggtcatgcgcccgccttcattgaaggaaaaccagccataaataatcagcagaggcagcagaatgacaatattagccaattgattcgattgctgttttggccagccaatttttccgcctaatagataaataatggcactgacgataatgagaggatagaagactgaaaacagagagcgtgtggtgtgcagattaaatccttgcttgatttgcgagcctacccatttgaaggcagaaaaatcgttatttgccagccaccaaatattgggtaataccagtataagccatagcgcaagcgccagataaaacagaggctcccgataatgtcgccgtactttgggaacaaacagggaaagtaaaaagactgagccaataatcgagagtgacgagtatttacccattgttgccagccctgtagctaacgcgaacgccagccaccatttgggatgatcatcgatggccttcaggaagaacaatagtgaccacgaccacaacattaccagcagataattgtcattatacggaatgatatcgaaattgatgatgccagacagattgagagacagcatagccagccatgccagttcaattctgcctgttaagcgcaaagccagttgccagacacccatcatacctacagcaatggcagcaaagtggatgaaataccaataaaaactgagagaaatatggctgatatgaatggctggtaacatcacaacacccaccagccatgggtttttcggggaaccccattcaccgtttatgccccagttcagggcttctacggcatcatagggaacagtcggatcaaggtaataacttactaacatccataagacagcataaccaatacaccaaagatacaatgaagttctataagaaatatcaaagaaacgcatagttgctaaggcttatattatttgagttaaggtaactcaaaatagtagctgaacttgaaagaataagtgaatgacattggatgttatatgtggattctgttagattccgccgaaaatatcttgataacacgagttgagtcacacgctatgaatcagttaaagaaaaaatcccctgcaagagcctctgcgggtaaacacaaaagaaaaagccgtgaagaattaaacgcagaagggcgcgaacgtaagcgccagaaaaaacatcgcggtaatccatccggtaatcgccatcaggaaagtaaccagaaaaaacagactggtgctaaacaagagaaggatcctcgtatcgggagtaaagtcgcggttccgttgattgttggtgaaaaagcagccgttaagccagtcgtaaaacagcctaaagcgcccgaaaaacctcgcttgtcagcgcgggaagagctagaaatgctggaaaatgatgaacgtctggatgatttgctggcacgtcttgagcagggtgaaaacctttccgaagaagataatgtttatgtcgataaaatgctcgatcgtattgatgttctgatggaagagctgggtatcgatctggaagaggatgacagcgaagaagaaaaacaagacgacattatgcagttgctgaaaggtaaataactcctgaaagttgacggctctgaatggctagccattcatgcataaattatcttgatcatcaaaggcggtatacacttcgtttttcaggttgcctctttgttggctgcgctcgctcaccccggtcacatagttacctatgatctatgtgaccggggacttactctctgccgccgcggcgcattttgaaatccattgtgtatatagccatacttttaatatggtatttgctgtgctgattgggtagactatagcagcccatttgataggccagaacagcggaagagataagcatgtcagagcaagccattgtatgggatctgcctttgatccaaaaatataattattcagggcctcgttatacttcatacccaaccgcgctggaatttaaccagcagtatgataatgcggcgttcatacaggccgccgcgcgttaccctgatcgtcctctttccctctatattcatatcccattttgccacaagctttgttatttctgcggctgcaataagctggttacgcggcagaaacataaagcagatgattatctggctgttctggaacaagagatcacaacaagggcaaagttatttactcataggaaagtcagtcagatgcactggggcggaggaacgccgacatacctcgataaaatgcagattagccgattgatgtcgatgttgcgtagccacttctgttttctgcccgatgctgaaatttccattgaaattgatccgcgtgaaattgagctgaatgtcattgatcatctgcgcaatgagggttttaaccgactgagtatgggagtgcaggattttaataaggaagttcagtgtctggtcaatcgtgaacaggacgaggattttatcttcgaattggtcaatcgtgcccgcgagactggttttacatcaaccagtattgatttgatttatggtctacccaagcagacaccggaaagttttgctttcacattgcagcgtgtactggcgttatctccggatcgtctgagtgtgtttaattatgctcacatgccgaatctgtttgcggcacaacgtaaaattaaagagagtgatttaccgagtgcggcacagaaactggatattttgcagcaaactaccgcgactttaacaggtaacggctatcagtttattggcatggatcacttcgctcgccctgatgatgaattagcgattgcccaaagagaaggtgtactgcatcgcaattttcagggatacaccacccaagatgactgtgacttattgggcatcggtgtttcggctatcagtatgttgggcgactgttatgtacagaaccaaaaagatctcaaaacctactatgctgaggtaaacgcgcaggggcatgcgttatggcggggtttagcgctgacgcaagatgattgcatccgtcgtgatgtgattaaggcactgatttgtaacttccggttaaattttgctgatattgagtgtgcttatagcgtgagtttcacagattatttcgccgaagatctgcaattattggcaccgttggcgcaagatgggctggttgaagtgagtgaaaagcagattcgggtttcactaaaagggcgtttattaatccgcaatatttgcatgtgttttgatcattatctgcgtaatcaaatgcgccagcggcagttttcacgggtgatatgaatttgttgagtattcaagttaacttttaatcaatagttggttaaaattaatgcacgccttcaattttaaggaaggatttatgagtacagaaatgaaactcaatattgcagagttacctgaagaattaagagctgtcatcaggcaaggtcaggcagttgttatcagagatggtggtaaagaaatagttgaggtaaaggcttaccgtcgttctcgtggaagacatgtcccgaatatagtgacaaaacttgcaaagcttagggtgaagagaccgataggggggcttgctaatcctgaaaagcaattaaggccgattggtgtcttaactggaaagatttctgtgccgacagaggaagagtttgccagatatgatcgtgaaattctttctatgtttgaagggaaagagtaatgcgttatttattagatactcatattttgctctggtatctggctgaacctgcaaagctgaaaaaagaaattaatgaattattgagagatactgataatgaagtctatttcagtgctgtcagtattcaggaaatagcgataaagaggaggttgggcaggagtgattattcttttgagccagcaactatcactgatgttgcacagaatgaggtgggttttctgccattgatggtaacaatagagcattctcttagctattatgaattaccgatagtaaagcaccgggatccttttgatcttatgctagtggctcaagccaaatacgaaggaataatattagtaacaaatgatgaagcgatattaacccagtttactgacttttctgaatatctactcagcaatagatagctgatatatcactccaaccccaattccttcaatttccgcgtgatggtattccttccccagccaagtaaacgggctgcttcttgcttatgtccattagtatgcgttaatgcgcagttaagtaaggtacgctccaataatggtaacgcgtcagaaagaagatccgccttgccggcttgtaaggcattctctgcccatgtcgctaattgttgtggccactcttctgatgatgaaaaaccggaaacaggaacattatctgttggctcaacgggctgactttcaattaaatcagttggtagatcctgtaccagaatttctttactgactgccatcaccgtcagccagcggcagacattttccagctgacggacattcccggaccatgataggttcatcagggctttttcagtatcgggatgcagtactttagcctcaattcccagctctttggcggtctgttggaggaaatgttgggcgatgcggggaatatcttccacacgatcccgtaatggggggagctgcaagcgaatgacattcaggcgatgataaagatcttctctgaacttaccttcttcgacccgttgttcaaggttctggtgagtggcggcaataatacggacatcaacttttaccggtgcatagccgccaacccgataaaactgcccttctgccagaacccgtaacaggcgtgtctggatatccagtggcatatcgccgatttcgtccagaaacagagaacctccattggcctgttcgaagcgcccttgacgaacctgattagctccggtgaaagcccctttttcatggccgaataactctgattcaattaaatcttttgggatcgccgccatattcagggcaataaaaggcgcggcggctcttgggctatggcgatgcagggcatgagctaccagctcttttcctgttcctgattcaccattgattaacacgctgatggaagagcgggaaaggcgcccgataatccggtatacctcctgcatggcaggagcttctccgattatttcagaaaccgatgaggctattttcgggcggcgggaagtttgttgttgttcacgtgaatggcttaatgcccgttcaaccagtgcgactgtttcatcaatatcaaatggttttggcagataatcgaatgctccgtgctgataggcgctgacggctgcatctaaatcagaatgggcggtcataatgatgaccggaagctgggggtgattctgcctgatctgattgagtaaacttaacccatcgagacccggcatacggatgtctgacagcaatacttcagggctgttctgtgataatgcagccaatacggaatctgcattttcaaaactgacacaatccatacc

SEQ ID NO: 2301 - DNA, 9859 bp, Xenorhabdus sp.; identical to SEQ ID NO: 2300
  CDS (2455)..(3789)

SEQ ID NO: 2302 - DNA, 9859 bp, Xenorhabdus sp.; identical to SEQ ID NO: 2300
  CDS (5425)..(6021)

SEQ ID NO: 2303 - DNA, 9859 bp, Xenorhabdus sp.; identical to SEQ ID NO: 2300
  CDS (6306)..(7685)

SEQ ID NO: 2304 - DNA, 9859 bp, Xenorhabdus sp.; identical to SEQ ID NO: 2300
  CDS (7765)..(8091)

SEQ ID NO: 2305 - DNA, 9859 bp, Xenorhabdus sp.; identical to SEQ ID NO: 2300
  CDS (8301)..(8498)

SEQ ID NO: 2306 - DNA, 9859 bp, Xenorhabdus sp.
  CDS (8208)..(9719)
ggtatggattgtgtcagttttgaaaatgcagattccgtattggctgcattatcacagaacagccctgaagtattgctgtcagacatccgtatgccgggtctcgatgggttaagtttactcaatcagatcaggcagaatcacccccagcttccggtcatcattatgaccgcccattctgatttagatgcagccgtcagcgcctatcagcacggagcattcgattatctgccaaaaccatttgatattgatgaaacagtcgcactggttgaacgggcattaagccattcacgtgaacaacaacaaacttcccgccgcccgaaaatagcctcatcggtttctgaaataatcggagaagctcctgccatgcaggaggtataccggattatcgggcgcctttcccgctcttccatcagcgtgttaatcaatggtgaatcaggaacaggaaaagagctggtagctcatgccctgcatcgccatagcccaagagccgccgcgccttttattgccctgaatatggcggcgatcccaaaagatttaattgaatcagagttattcggccatgaaaaaggggctttcaccggagctaatcaggttcgtcaagggcgcttcgaacaggccaatggaggttctctgtttctggacgaaatcggcgatatgccactggatatccagacacgcctgttacgggttctggcagaagggcagttttatcgggttggcggctatgcaccggtaaaagttgatgtccgtattattgccgccactcaccagaaccttgaacaacgggtcgaagaaggtaagttcagagaagatctttatcatcgcctgaatgtcattcgcttgcagctccccccattacgggatcgtgtggaagatattccccgcatcgcccaacatttcctccaacagaccgccaaagagctgggaattgaggctaaagtactgcatcccgatactgaaaaagccctgatgaacctatcatggtccgggaatgtccgtcagctggaaaatgtctgccgctggctgacggtgatggcagtcagtaaagaaattctggtacaggatctaccaactgatttaattgaaagtcagcccgttgagccaacagataatgttcctgtttccggtttttcatcatcagaagagtggccacaacaattagcgacatgggcagagaatgccttacaagccggcaaggcggatcttctttctgacgcgttaccattattggagcgtaccttacttaactgcgcattaacgcatactaatggacataagcaagaagcagcccgtttacttggctggggaaggaataccatcacgcggaaattgaaggaattggggttggagtgatatatcagctatctattgctgagtagatattcagaaaagtcagtaaactgggttaatatcgcttcatcatttgttactaatattattccttcgtatttggcttgagccactagcataagatcaaaaggatcccggtgctttactatcggtaattcataatagctaagagaatgctctattgttaccatcaatggcagaaaacccacctcattctgtgcaacatcagtgatagttgctggctcaaaagaataatcactcctgcccaacctcctctttatcgctatttcctgaatactgacagcactgaaatagacttcattatcagtatctctcaataattcattaatttcttttttcagctttgcaggttcagccagataccagagcaaaatatgagtatctaataaataacgcattactctttcccttcaaacatagaaagaatttcacgatcatatctggcaaactcttcctctgtcggcacagaaatctttccagttaagacaccaatcggccttaattgcttttcaggattagcaagcccccctatcggtctcttcaccctaagctttgcaagttttgtcactatattcgggacatgtcttccacgagaacgacggtaagcctttacctcaactatttctttaccaccatctctgataacaactgcctgaccttgcctgatgacagctcttaattcttcaggtaactctgcaatattgagtttcatttctgtactcataaatccttccttaaaattgaaggcgtgcattaattttaaccaactattgattaaaagttaacttgaatactcaacaaattcatatcacccgtgaaaactgccgctggcgcatttgattacgcagataatgatcaaaacacatgcaaatattgcggattaataaacgcccttttagtgaaacccgaatctgcttttcactcacttcaaccagcccatcttgcgccaacggtgccaataattgcagatcttcggcgaaataatctgtgaaactcacgctataagcacactcaatatcagcaaaatttaaccggaagttacaaatcagtgccttaatcacatcacgacggatgcaatcatcttgcgtcagcgctaaaccccgccataacgcatgcccctgcgcgtttacctcagcatagtaggttttgagatctttttggttctgtacataacagtcgcccaacatactgatagccgaaacaccgatgcccaataagtcacagtcatcttgggtggtgtatccctgaaaattgcgatgcagtacaccttctctttgggcaatcgctaattcatcatcagggcgagcgaagtgatccatgccaataaactgatagccgttacctgttaaagtcgcggtagtttgctgcaaaatatccagtttctgtgccgcactcggtaaatcactctctttaattttacgttgtgccgcaaacagattcggcatgtgagcataattaaacacactcagacgatccggagataacgccagtacacgctgcaatgtgaaagcaaaactttccggtgtctgcttgggtagaccataaatcaaatcaatactggttgatgtaaaaccagtctcgcgggcacgattgaccaattcgaagataaaatcctcgtcctgttcacgattgaccagacactgaacttccttattaaaatcctgcactcccatactcagtcggttaaaaccctcattgcgcagatgatcaatgacattcagctcaatttcacgcggatcaatttcaatggaaatttcagcatcgggcagaaaacagaagtggctacgcaacatcgacatcaatcggctaatctgcattttatcgaggtatgtcggcgttcctccgccccagtgcatctgactgactttcctatgagtaaataactttgcccttgttgtgatctcttgttccagaacagccagataatcatctgctttatgtttctgccgcgtaaccagcttattgcagccgcagaaataacaaagcttgtggcaaaatgggatatgaatatagagggaaagaggacgatcagggtaacgcgcggcggcctgtatgaacgccgcattatcatactgctggttaaattccagcgcggttgggtatgaagtataacgaggccctgaataattatatttttggatcaaaggcagatcccatacaatggcttgctctgacatgcttatctcttccgctgttctggcctatcaaatgggctgctatagtctacccaatcagcacagcaaataccatattaaaagtatggctatatacacaatggatttcaaaatgcgccgcggcggcagagagtaagtccccggtcacatagatcataggtaactatgtgaccggggtgagcgagcgcagccaacaaagaggcaacctgaaaaacgaagtgtataccgcctttgatgatcaagataatttatgcatgaatggctagccattcagagccgtcaactttcaggagttatttacctttcagcaactgcataatgtcgtcttgtttttcttcttcgctgtcatcctcttccagatcgatacccagctcttccatcagaacatcaatacgatcgagcattttatcgacataaacattatcttcttcggaaaggttttcaccctgctcaagacgtgccagcaaatcatccagacgttcatcattttccagcatttctagctcttcccgcgctgacaagcgaggtttttcgggcgctttaggctgttttacgactggcttaacggctgctttttcaccaacaatcaacggaaccgcgactttactcccgatacgaggatccttctcttgtttagcaccagtctgttttttctggttactttcctgatggcgattaccggatggattaccgcgatgttttttctggcgcttacgttcgcgcccttctgcgtttaattcttcacggctttttcttttgtgtttacccgcagaggctcttgcaggggattttttctttaactgattcatagcgtgtgactcaactcgtgttatcaagatattttcggcggaatctaacagaatccacatataacatccaatgtcattcacttattctttcaagttcagctactattttgagttaccttaactcaaataatataagccttagcaactatgcgtttctttgatatttcttatagaacttcattgtatctttggtgtattggttatgctgtcttatggatgttagtaagttattaccttgatccgactgttccctatgatgccgtagaagccctgaactggggcataaacggtgaatggggttccccgaaaaacccatggctggtgggtgttgtgatgttaccagccattcatatcagccatatttctctcagtttttattggtatttcatccactttgctgccattgctgtaggtatgatgggtgtctggcaactggctttgcgcttaacaggcagaattgaactggcatggctggctatgctgtctctcaatctgtctggcatcatcaatttcgatatcattccgtataatgacaattatctgctggtaatgttgtggtcgtggtcactattgttcttcctgaaggccatcgatgatcatcccaaatggtggctggcgttcgcgttagctacagggctggcaacaatgggtaaatactcgtcactctcgattattggctcagtctttttactttccctgtttgttcccaaagtacggcgacattatcgggagcctctgttttatctggcgcttgcgctatggcttatactggtattacccaatatttggtggctggcaaataacgatttttctgccttcaaatgggtaggctcgcaaatcaagcaaggatttaatctgcacaccacacgctctctgttttcagtcttctatcctctcattatcgtcagtgccattatttatctattaggcggaaaaattggctggccaaaacagcaatcgaatcaattggctaatattgtcattctgctgcctctgctgattatttatggctggttttccttcaatgaaggcgggcgcatgaccgaatggctccagcctttcatggcagtagcgccagcgctgctagtcggctcgataaccgtacgtccccataaatccttaacggggacactgcgaggtctggctgtgtttgctgtcctcgttctcattggctatgccagtattatgctgacaaatgtccgtggtgcgggagaaaaatttgcagggataaaaatcttttccagccagccggatcagcgctgggatgaattgtattcaacaccactgcattatgttggaggtgaatacctgcatcaatggctgacgttctacagtcactatcacccccaaaccatacagccgtggaaaaccggtaacggtgcgccgcccaatatttataatcgccatataaaagagagtgatatcgtcaaatatggggcattactggtggggaaaagagggaagaactgctcacaggagcattttcagtccacattggcgacatggcctgaattaattcttagccataaggaagatttcacttttcaggcgcagccggacgcggaatcagaagtagtttgcatcggttttattgcaccagaaaatcgccattgatctttttttagaaaaatattccgtataatttccataaaaaaagcctgatgcatcaggcttttttatattgctcggtactcagtttagccaagattatgattatcaggcatcgacaaatactattttcagcacaaacagcaacgtgacaacaataacgcacgggcctatctcccgccattttcctgttcccagtttcatcacgcaataagccataaagcccagtgcaataccttcagtaattgagaaactgaatggcatcataacagcggtgataaatgccggaacggattccgtcagatcatcccatttcacccgtgtcaggctggatgtcatcaaaacgccgacataaaccagcgcacccgccgtagcataagccggaaccatactggccagtggagaaataaacatcaccagcaggaacaaaataccaacgactacagcggttaatccagtacggccaccaacggagacgccagaagaactttctacaaaagcggttaccgaagaagtgccgatgtaagaacctgctactgagctgatgctgtcaacatacagagcctgcttcatctgcgggaatttgccgttactgtcagcaaggcctgctttatcggtcacaccaatcagcgtaccggatgaatcaaacaggttcaccagcataaaagaaaaaataaccccgactaatgcgatatccagcgcacctttcacatcaacatgcccgacaacactcatgacactgggtggcaaatcaaaaataccctgatattccacataccccagcataaacccgatccccgtcgttattacgatggaaagcaatactgcggcatggaaattacgtgcggctaaaatagcaatgataaaaaagcccaaagcgcccagcaggacgttatgagcagtaaagttaccaatagaaacgatcgtatctggattcggtacaataatgccggcatttttcagccccatcatggcaataaaaagcccgataccgctggtgataccgacccgtaatcccacggggatattcgctatcatccagtaacggatgcggaaaatcgtcaggatcagcagccctacagcaccccagaaaattgcgcccatcgcaacctgccacgaaacacccatagcaccaacaacaacgaaggcaaaaaatgcattcagacccatagcaggcgcaaccgcaacaggtaaattagccactattcccatcataatgctgccaagtgcggcaattaagcaggttgtgacaaatacggctttaatatccattccggcaacagacagaatttgtgggttcacaaagacgatataaaccatcgtcagaaaggtcgtcagccccgcaatcatctcggtgcgaactgttgtaccatgctcttccagtttaaacacgcgctgaagtaagccctgactatttgcagagcctgaattgagtgtactcattaatgttttattcctaaacagatgaagttttcgattcatcctacaggaaatcaaaataaatcgttatcctaaaagatcaaaaaagaaaacgattgccatgagtacaatcaataagttatatcacaaagtgattattaacgaactgcactaatggacgctgtttttattcactattttcagaaggtgccatctccagaatatcgctgaaaatatccgcccattcatccttaccaatatccatcaagccgaagaagcgtaaaataaatacaccttctgtcgccaaaaaagctaaacgggcccgacgaccttctgctgttgttatatccagattagcgatgcgctcacgataccagtcacgggttgattccagatgttccggtgtttgcaataacgatgccatcagtccggccgctttcgccgatgacacttcatctgaacatttacttgcttcaatgtgcgcacgtattgcggtcagtggatcgggcgcttctccggctattttgtagaattgttcctcgtagccaagcccccaacgctcaaacatcgcctcaataagtgcatctttcgtattaaaactgtactgaaccccacccttagtgatcccgacagcttttgctaccgcatcaatggtaagggccgctgccccatgtgtggtgacaatttgttctgctgcatccagcagaatgttccggtcaattgttttacgtcgtcccattattactctcttttaattcaatacgtatgtatttataatgtacgcaatttgtaccgtcaagggttggcgatacaggatccctaaaccacactgatgagttctttcatgaaatcaaatactcgctggcttgtgctggctgttatttccagtgcacttttgctgattgtcatcgacatgacagtcctctatacagctttacctcgtttaacatacgatttacgagcatcttccactgagaagttatggatcatgaatgcttattcattaaccattgctggcctgcttcccgggagtggtgccctgagtgatcgctttggtgccaagaaattgtttactgccggattagccgtgttcggtattgcctcaatgatggcagcattttctccgaataccagtatgttgatcagcgcacgagtgatacttgccatcggtgccgcaatgatgatgccggccacactcgcaataatccgtcaggctttcgaagaacccggagaacgtgctcttgccatcggtatctggtccgctgttgctgccgggggcgcagcacttggtcccgtcatcggtggaatactgctagaatatttctggtggggttccgttttcctgataaacgtgcctatcgtcattattgcgttgatattcgccctattcactattactaaaagccagagtaacccacaacgcacattcgacctgctggcctctctccaaattatgatcgggctgattggcattacttttgctatcaaagaaatcagcaaacaagccccatcaatgggaattgccattatagccagcgcaatcgggatgatattcacgatgatgttcgtttctcggcaacgtcgttcatctgcaccgatcatagactttactttattaaaatcctatggtttttctaccggtgtcgcgaccgcttttgttagcaccgcagccctgatgggagttgaattaatagtcagtcagcgactgcaacttgttgctggtttatcgcctttacaggcaggattaattatcttacctatcccactagcttctttcgttgccgggccattagcgggtcttgccatacccaaattgggttcaggaagaattatgtggctttctctttttctggcgggattaggtatttttggctatctcatcggcttccgagctgggatgttagtacaaatcacgacattctctatgattggattcggtgtcggtgctgcgatgacagcagcttctacctccatcatgttcagcgccccagagcatagcgcaggtacagcagcctcaattgaagaaattgcctatgaacttggaggcctgattggagttgctgtactcggtagcctgttggtggcaatttatacggcagcatttactctgccagctgatatcgctgtatcagaatcagtcagtaatgcattacagaatagtattgatgaagcgattatcgtcgcagaagggctaaagggcgatatggcttcatcattgcttcaggcagcaaaacaggcctttgatagcgcattcctgtccgttttaaccatatcaggcgcattactattgttaagcgctgccataattgcattgtttaccccgaaaaagcacagctaacttaccttaaaaagtggcgtaagcaatcatttctgaggacgccactttcaaattatttcgaattatcatatagaaccatcataccaaaaaaattcattacaatataaatcacaattattgccacaaaatgaaaattgacc

SEQ ID NO: 2307 - DNA, 9859 bp, Xenorhabdus sp.; identical to SEQ ID NO: 2306
  CDS (4772)..(5968)

SEQ ID NO: 2308 - DNA, 9859 bp, Xenorhabdus sp.; identical to SEQ ID NO: 2306
  CDS (1)..(1353)

SEQ ID NO: 2309 - DNA, 14229 bp, Xenorhabdus sp.
  CDS (12852)..(14225)
tcctcccactctttgtgtgaaatgaaggtactgatgtaccaaccactgatggggatttcaatagccaaataaagtaaaaataaaaaaatacgaggtaaagccagtgacctgcctattaaaacacattgcttatcattaatacttttgagcatggaaaaagcttttaattctcgtttattctttggtttcgttggtaattttagtaatttctcttcttgttcaatgagtaaggaggggtctggacgccatgtttctggagcatgaatattttttcttgtcgctgaaagagtttctaatgcggctagaatacgagttatctgctcatcaaagtcggcaggtttttcatcttcatggcatttgcggggagctggagtacgtaggatatcgccttcaaaaacaggggatttaccatatagaagataatttacaataaaaacataaggtaatataaacctcttttgttgttctgaagaggagtttctttcacgatacatatggattgaaaatatacgattggtgagtgaattatttctatccaaagtgtatagtatcaaccccctagtttctgatgagtgtaactgtactcgtaattgagaaaatccaacctgtgaataatgggcagcataaacttttcctttacgccaactaaaaaataattggcgttttctatcaataaataatggtgggggatttttataaaaacgacgaatataaatgggtaaaaagatagtcaatgatattaatgttccaaatatgagaaaatccaacaggataaggaaaatattattatctgaaccgttataacgataatatagatatctatcgaaggttatttctttcgaataattaacatatctgacaatttccattttttttgagtagtgtggttggagataaaaatctttttctccatatttttggcgagctaaattaacttgctcccatatttcagggagatgttcttttttttgctctgtaaataatactacagcaatagtccaaaataggaataataatattggcccaaataatgataatgaggaatggaaatctctatccgtcgttttcatcgcacataaatcgccatcaatgctttcgacacatatagataggggcatttttcctagtttgttacttagtaatggagtagcaagtaactctttttggtgctcaataaagggtgttggcgttattttactcagagctttggctggtatgttgtaccactttacatcattcatgattttccgatccatttttaactgtttttattttctaatttttaattaatatcaaccagatggatacattctggttgatataaagtagaggtgtcataaatgcagtaacataatttatctgactatttatgtattttcctgactgttatctctgatatcttgtttgtctagttccgccaaaatatgctcaagctgttcattaaaatctgcgggctttttatccttgaataagaacaaagcaggaaaacgtttataatcagtagctgcaacagcatctttgccttgtataaggtatttaacgataaaggcgtgtgcttcatcttgccgtagttttgtattgaatcctaatatagaaccataagagagacacatctggaaagcacgacgagctagtgtattgttttcatccagtgtatacatggctaaccccatcagatggataattttcatgggatcggtttgattggatacacctacttgagaatagcgagcagcatagactttgcctttataccaactgaaaaacaattgccgttctcgatcaataaatatgggtgcttgcagtttccagaaaaagcatctgtgtatcaaatagagagaatatgcaagcaaaaatccaaagagaagaagatccttaattaaaattcgtgtactggcgtgatagtagttgtagcgatagtaaagatatttccaaaaagaaatacttttatcattaccaaccaaacgggcatcttccatatgtgtagggagatctttacgtaggtaaaattcatcaccatattcttcgcgtacgagatctacccattctaagagattagtttcccctctttctctttgttcaataaaatcagtaatgcagtactgaaaaataaaaaacatacagataaggaggggaaacagtattaatgtccgtgcaagtttttgcgcattacgtagtgtgcattggttattattaatgctgttgagaggaaggtaattttgcagtgcttcgtaactttttttctccattggcatagccagcagtttttcctgttggtctatgagtaatgtaggggtgacattatgaagggttgcagaaattttatttgtattattcatttatcgaaactccgtgcctttaaatccgataatagattttttacttatatcttgctcttcctgtttatgagctaagtaacgtaatggaacagcggcatcttcaaatggaatataatgccagaatagttcagctgtttcttcattagggtagggatatctatcttcaacagtgattataagctcaagattaccattaatgtattttgcttcagctgtttttaaagattcccggaatcttgctgtgagttctttatcatatacatagagttttccatcaatctcttctgcttgatacttcagtttttcatagcgctcttgttcttctttgagtgatttcatatgtttttgtataagttcactgggagctgcgttgcctgatagccatgtatttaccggcttttgaggtagaagttggtagaacgcatattgaaggtcagatgttccctgttggaatgcaggcaatttaaaggtataaacactgctgaatttgttgtatacctgcttacgtgtaatggttaattcaggcataaaaaatagatttaagaattcctgactctcaattttgaaggctttttgggtcttactactcatttttttggctatgtctagttgcctgttaaaagatgggcgtttgtcttcattccaaaatggatacatatccccatttccccaaaagctgttacgaaacaaattttgtgtatcagagctgttaaaaattatcagactaatagtaccaccaataactaagacccatcccataaaagccataccagccatcaatgtagtacctattgctactgactcaataccagcagccaaaccaatactcacagtacctaatgctgcacttcccagccctatggcatagttgctgtatgctgcgcctctattaccgatggcttcagcttctcttccatcaataaaggacacataagctcccataatattcactaagccaaggcctgatttaacccatttagcattcagtttatttgataagtagtcggaagtgccttttaagttatttaacaacactggagaggcgtttggcataaatttatgagcatgtttggtgactttggatgtaattagtgtcaaatccgctgttaatgaaataagtgctgctgaaaacttaacaacatcataagacctgctgagctcatcctggtccagcggattgttgctactgaattgagactgtataaccacagaagttgctgtttgaacattgaaaaacaggctgaaccccggcgctattttctccagtaaaattgctgtcttatgtgtaccgacttttaaaaaatcaaaagaagtattaaatccttctttgatagtaattttcgcaagcttaattccgataccggtttgatccgatacttctattacttgcttggaaacggtatttcctatttttattcctgttttcttagcatactcacctgtttgtcttactgtattttcaaattgttgttctgcttggctaggagcgcttatttcttgtaatttttcatagaaaagagactgtgaattttttagttttttaaatgtttcattatgcttaggcatcctcgaccctttattgccggaataactctttttatttgcaattttttctaaacggccttggattttattgaactcttcaggagtaatatgaagtccttcacgataatcaataacaataccgaaaggttgcattaaaacaggtacaaatttgttaacaatcaattgaatggcagtatcacttaaatgggtcaaagggccttttattgctattgctcccgcttccattattgcaaacgctttcccaacaatctttccaaacagctcaaggaatttttctgagacgtagactgatatctttataatttgatcatttagaaattttttagattgttgtatcggcttgttaggatcattaatattttctagtgttttattaatagcatttttagtgctctgatgaattgtcttggcaatctctttactttcgccatgagttagtattttcaccatacccgttgccgcgatttcccaggcattggtgctgtattgaggtgtatagtttttctctgccgctgtaatagcatcccttttggcttttgcttctttatttgggtcgtataagccataggggaggatacccagcgttgtatcagcgaaatcttttaatgtggttggttttcctgctgctaatgaaatcaattcttccagcattttttccgatgtgacggacatttgcagtccatgaaaaatatcaaaaacaagttcaacaaaagtgtagatttcctgaatatcactctcatttgatatttcttttttctcatgaatagagaagaaatgctggaaatagttatcaaggctgccaactttcccagtaaccgctggtgcactggcaaatgctttgaataagctaatgaaaatctcttgtcgtttttcgaataccagatgtgaatctcttattttgggccaatattttctcacagcctttcggcttaagacttcgctattggctcgttttgctatgggatcatttttattaaataccttaatataatcatctatatacaatccaatggtcatcggatagaggttgtgttcagcattatattgttgtagcagatcaagaatattatgcgcctccaaaatctctttctgccgcccaaccggatcatgcaatattacaatccgtgccttctcttgataacacagctttttgcgaatctccgctgcaatattctctgcatccatttcataggatttttctgttgttagctcatcaatcctgagatcattgatatctaattcttcaaatttattggcatcaatttttgctttgactgccgagaactgctccttgcgggttttgtaatcttcaattaatttcgtgaaattggattcggttgcttcaatcgcatattgttgattatccgcatccagattaatgaactgcatggtcttttcacgcagctttttatcgcggttcatacgggcaatgacatcgggatgccagaggtgttcgctgtaagcaatactgatatttgaaacatcttttgctacaaataggaaaggatacccttcaccctgtaaaccaagttctggcatcacgccatcgcgggcatcttttttattccggtacatatacttccgaaaacgctcaattctcggtgcatcatcgttatctgagcttttttctacttcatatttgaagatatggaaataagctgtgcggctggggcggtgttccatgctgtcttcttcccggatataaatccagccagaacgcatcaaacgagccgcatatcccttactctgtttcagcgttgtcgcagacatcagtgtgtgaatatccggtggagattcaggttgttccatttcttcgccgaagaaatttacataagcataacggacagggtagagaggtttgatatttccatcacacgggtattttgcacttcccatatcgagtctggatacggattcgttcgcgtttgcactaatatttgagattacagaagtcatgactggctccatgttgtcgggttaaggcattccttgagaagtttgtaagctctggcttcctgattggaaggttcagataaaacagttgctagtatgtgctgccagaaatcttcatttttcaccgtcattgatcgcgccataatgtaataaagcccggtcagttcaagtgtaaaaccgtgcagataggcataattggcatgtttggtaatgaaagaaaggagctgttcttccggcacctggcattgttgctgaatattatctttaatgaatgctttgaccttatggaagtatctctgctgcacatagagttcaaaattatggttcatcctgtcattgatcgtcacggtttctggtttggtttctctgaggctctccgtaacgctgattttcatcatgctgttttcattagttaaaccgtaaatggccccgatattacgcataaaggaggccagagcgccgcgagataggcttttgagcatcaaatctactgtcagtgaataatagaagcggaagaaaacccattcccggctgctttcctgttgcagataggagaatttgcgcaggtggttatacagttcatcaaatttactgtcggtatggataaaaattccgatatccggtgtatggtgggtgatgaatatatcccgcagaaattggttattttcagaacctgtcagttcgaccagatagggggcagagtcttcaagagtaatttgtgttttacctttaaacagacagcgataagtcaagccagaaaccataagggaaggcacgataaagtggctcgtatttttatgataaactccggcgtcaatgatcagataactatgggaatattggattttgttctgttgctgtcggtaaagcagcgtatataggtcgtcactgatccagtgccgattaaaagagttatcaccgataaaaggaacacagggatattgggtgattgacagctctccggtatcaatcggcaatcgttcactaatatccagtgattccaataccagaattgattgttctatatttattttatctagattcaggatcaggcgtttttcaagctgagcactgttgttcagatattggagaaaaggcaatattttctcatactcgccctctgtcgcttttaatgaattcaacatatggtttgataattgaatcaaagcctgatgttggctgttggcataaattaatgcctgagcgcgatagcgtcgttgtttctgttgttctgaaccacgatagccatatgaaaactctgcaacccagatattttcatatcgttggtagtcattctcttgcctgtgcatgatgtaatatcgtcaactttttatttaggataaattatttagaaaataacgttacaaaattaatttgtttaaatggacgataatagcttaattctatggagggctaaaacaagaaaaatgattttaaattagtgcttattttaatttaacaaatttaattataacgtattgttatacttttaggatggtaattaattagtgataagtaatattaaatcaattataagtaagtttattttttgtaaatgggatttcttgatgaaatgatgttaaagaattttttgggataatcatcttatgactaaggtgtaatttccttagccataagatttgtcactgcttatttatgttagatgattattacttgataacaacattttcattcaataccagtgataacaacgcctgacgagcataaattccattacccgcttgctggaaataatacgcgtaaggcgttttatccacatcaacagtaatttcatcaatacgtggcagaggatggagtactttcaggttctctttgacactcaccaaatctgccgcacgcagcacaaactgggctttgatattggcgtattcagaagggtcaaggcgttctttctgaacgcgggtcatatacagaatatccagctcaggcagcacatcttcaaaattgttgtgaatgctgtagctcacctgtttttcatccagcatgtgcagaatatagttgggcatagaaagtgcgtccggcgcgataaagcagaaatggttgccctcaaatttcgccagtgcctgagttaatgaatggacagtacgaccatatttcaggtcaccaaccatcgcgatttttaggttatccagcttgccctgagtttcctgaatagtaaacagatctaacagagtctgggttgggtgttgatttgcaccatcaccggcattaatgatcgggatatgaccggaaaattcagaagcaaggcgggcggcaccttcctgtggatgacgcatgacaatcgcatcagcatactggctgataatagaaatagtgtcagctagcgtttcaccttttttgcccaatgatgtgttgctgctgtctgcaaagccaacaacagaggctccaagccgctgaatagccgtttcaaaaaaaaggcgggtgcgtgtagaggcttcgaaaaagcagctggcgatgactttgtgtttcagtacatcagtctgtggattggctttcagggctgctgccgtctgcaataccaattcaagatctgtgcggctcaaatcattaattgaaatgatatgcttgcgatataacgggttagccatgtttacattcctcttttatgacttttagccttggactgggcagacgaaaaaaagcccctcaattgaggggcttttaaatgttcggttagtaatggggaaaacaatacgcccatgctgccagttggcagtgcttcattggattggcgttttgcaatgcagtatttcatgttttctcccggcaaatcgtcgcgcattatactcgcgattgtattcactgcaagatttgttgagagaaatttttgtttcaagcagtgactcgtaaacgaaagtgttgcagactattatcctcttcataatgagataaaactatttttttcagtcgcttttatgaccgtttaaaaaataactttctgtttaataatacgggctataatacgttgtcttttattttttcattaaataaagagggtaatatatgccgttttcaccaccttttagaaatgagttttttgagggtgatcttatatatggtttaactaatgaaagagagcgttatatcagtaggttagataattttaaaattgttaaaaatagactacctaaatcaacttccgggcaagagttttttaaaccgacaatgatgaattattatttgattccagttgaagaaagagaaatgaagagttttttagatagctttcagaattcactcagaaataatcgaagagcacctaatgcatggttaagtgagagagctaataaatacaaaggttatcttaatgttgttggttttcatgaatatgaagaatataaagaaagtttatattcttatcttgagaaacatgataagtatcatactgttcttgaagaaggtataactaatgaccatgtcactataggaagaaaatgcaaaggaggaatatcatgggtcactatgagtgattgccagctgactgaggatatgcatatacattttatactcgatgagataaatatggcagaagttgtaaataaatcagatggattaaatagcacaagaaaatctataactgcaaaagaattaagatgggtttataggaacagaaataataaaaaagtcgcgagtaagattcaattctggatggataaaaagcctgtttttcctccttggatttcaaataaagctctatggggagagtatcatcagcggaacatacttaatcttgatatatctgaagaattttctaaattatttaatatcagttagtttaatccgtcagaggttaacttcccgccgaatacggcgggattgttaatttaataattttgcttttataaatgaaatataagtgaaatattattcagatgagtttttcagttaacctatttttttgataaaaactatttaactacaaatgccgcaaaatcctcagccaaatcagtattcggaaatatttcccgacattctgccagtaaacgtggacaatcttctttaccataacgtccgctgatatgcgttgcgataaagtgttttaccttggcatcacgagctagtgttgcagcctgtttagtggtggaatgaccgcgttcattggctttttcggcaaacgaatgttccagagtgatttcatgtaccatgacatcaacatcagccgccagtttcagcgcttccggtgtgggttcggtatccccgaaaattgctaatgatttaccacggattggggctccaagataatctttaccggaaattgtccgtccatcttccaatgtgaccgtacccccttgttttagggtttgcatccacgggccacggggaattccatcctgatccagcttttgggcatccagcgtaccgggcctgtcatgttcttcaatccgatagccataacattccacacggtgatccagggcataagcggtgactttcattgctccatcatcaaacagtaatccgggctgtacttcaataatttccagtggataggtcagaaaggagccgcttaactgcaatgaagtttccacaaactggcggatcccttttggcccgtatagtgttaatggatcggtggagccgcccattgatcgactgcatagtaagccgggcagaccaaagatatgatctccatgcaaatgagtgataaagatcttctccagtttggagattttaatcggagagtgaaggatttggtgctgtgttccttcaccgcagtcaaacatccacagtgagctgcggatctcctgtaaatcgagaataaggctggtgacattgcgttctttagtcggaatacctgcgctggtacccagaaattttaattccatatcgtcttcacctaatcttgctgaatgctttcccagtctaagccgaatcgggcgagatacttacgtaatctatcggcatcattgggttgtttcttttgttggcgggaaacagcgaagagcttgcgaccggcctccgataaactggctgatccccgacagacgctgataacggtttctaactgctggcgatcaaacaaatcaatttctgctaaatgatccggtagcagggcggaactattttctcctcgccagtgttgtctgaggcggatgatttcttcttctgccaaatgctgattgatgcggccattttcagcaaacgttgccatacgggcgactgatgcacttaattcacggaaatttccccgccacttggcctgttctgagcaggcaaaacgcaggtaaatctgccgggcttctttatcaaaacgaacctgcgtctgttgcatttgtgcatagcgggccagttcatagtcgatatttggttcaatatcttcacggcgctgagccagtccgggtaactgataagtccacatattgatacgggcatataaatcttcacggaatttcccctgagcaacccgatcccgcagatcccggtgagtgccggcaattaactgaaagtcactgtaaacttcccgatcagaaccgtacggcaggaagtttttttcttcaatcgccttcagtaacatcgcttgttcatcaagacctaactcggctacttcatccaagaataaaataccaccatcggcttcgcgtaataggccggttcgcggctggattgcccctgtaaatgcccctttgacgtgtccaaacagtgtagacatggcattatcaccgcgcaatgtcgcacagtttacttcgacaaaacgccctttaagcagatggcgtgactggcggagttgatagatacggcgggccagaaaggatttacctgccccggttggcccggtcagcaggatcggtgctgatgagcgcagcgcaacgcgctcaatctggtctatcaggtggttgaaactggcattgcgcgtagcgatgccggatttcaggaacgccacttgctcctgctgttcacgcagaaagcggctggttagcgtggtataacgactgagatctaaatcgataacagtgtagactccttcaggatggctatcgcgatcgccatttttgggagaagtctggatcagctgggctggcagataacgcgcttcagtcagcaaaaaccagcaaatctgggcaacgtgcgtgcctgtagtgatatgtaccagatactcttcattttcaatatcgaaaggatagcgcaccgcaaaatcaagcagggcagtatagacttcctcaaaatcccacgggtcatcaatctgaatttcttgcagaacaacacgggtctgtggggaggtttcttcaatatcttctttaactctttgcgccagactgtagttatctgcctgatagagtaattccagcctgtcaattggcagctcaggctgctggcatagcccaatagtaggacgccattttgtccagcgattcgcctttttcccacgtctgtctaatgttgttcccaaaactccaatagcaactctgcgtttcatccttgcctctgttattggttatctaaatttataaaaaacgatataaaaagataagaaaatcaaatagcaaaaacaatcgccgaaaataggtaaaaataaaaaatcgttaattttcattatgataataaatatttttgccttttttcaaagttggcacgggattagcaataactataaaagccaacacgctggaattgcatgggttcagaacccagccggtacataagtcatggcataaggccattttactgcatgtattccgccagtgagggacgtttagcgaataacacagggttacgttgggttcgagtcccaatttcgcaccatataagggatatggtcttttactctccaagtaaaacacaaaagaaaatatagaagtgaaaacccgtatgactgccaattgagagtcatcgctttgaaaacccggtagatgatgctgggttaagggcagaatactgagctgctgctgtctgagtaccgatgtatttcccccttggcttcgtcctgatgcccggttttcagagtgcagggaataaaaaggaaaaataacaatgatgaagaaaataaaaatattgcagggacaaattggtttgctggcaaaagagggtgagtacttacaggttttaaccgcaggtgaatatcgtttcagcgattggtttaacaaactgcaattgacgacttttaaccttagtggtggcgcaatagaagcaaaactggcagagcatttacgccagtatcatgctgattgggttgaacagtattgtgatgacatccagctggctgaagatgagatgggactattgtatgagtatgatttactgaatgaaattataccatctgcaactcgccgcctatattggaaaaatagtgggttacgccgatgtgaaatccgtaaaacgacggaacaggaaatttcacctgaattagtttctctgttgcacgctgcgaaaacccataaacgtactgtgaaaggattggataatatcctgattgctcagatcccggtatggcaggtcggtattctgaaaattgatggcactgtgcaggagttgctacagccaggtctgtatggatattggcgtgttggctatgacatctctgtggaaattgtcgatacccgttcacaaactaaggttgaagacaatctggcagagcatctacgtcagcagcatagcgactgggtagacgaattttgtgatggtattgaaattgccgatgatgaaatggggttgctatacgagcatgctgtgttggtcgaaattctgcctccggcaacccgcagtttgcactggaagaatggaaatccccgccgtatagaggtattgaaatcctctgagctggaagctgatgctgaattggtttcactgttaatgtctgctatggcgcgaaaacgcagtgtgaaaggggcagatagtgtactgattactcaaatcccggcttggcatatagggattctgaaggttgatggaattgcacaggaattattacagccgggattaaaaggttattggcgtgtcgggcatgatgtgctcgttgaaattgttgatacccggttacaggtgctggaaatcagcggtcaggagatactgacccgtgacaaggtaaatctgcgtattaacttatctgctaactggcgttatcaggatgttctgatggcatatgaacaactcagtgatccagtttcatatctgtaccgcgagttgcaatttgctttgcgtgaaatagtaggaacgcgctcactggatgaattgttggagaataagcaggttattgatgatctggttggtgaaaagatccagcaaattgccctgcgttttggtttggaagtggcatcacttggtgtgaaagacattattttgcccggcgatatgaagaccattctgtcgcaggttgtggaagcagaaaagtctgcacaggataatctttagagca

SEQ ID NO: 2310 - DNA, 14229 bp, Xenorhabdus sp.; identical to SEQ ID NO: 229
  CDS (11981)..(12862)

SEQ ID NO: 2311 - DNA, 14229 bp, Xenorhabdus sp.; identical to SEQ ID NO: 229
  CDS (8516)..(11890)

SEQ ID NO: 2312 - DNA, 14229 bp, Xenorhabdus sp.; identical to SEQ ID NO: 229
  CDS (7608)..(8372)

SEQ ID NO: 2313 - DNA, 14229 bp, Xenorhabdus sp.; identical to SEQ ID NO: 229
  CDS (3525)..(4442)

SEQ ID NO: 2314 - DNA, 951 bp, Xenorhabdus sp.
  CDS (2)..(433)
gttcactgctactcgtggtcagggtgcacagctgaatggttatcgcttgcgtggtgctaatgcccgtgatctggatggcactatcattgctaccggtttcccattcaaagctaaacaacacgctatcccttacatgaacgtactgggtaaattatttgaacgttgtgcagattttcgtcgcaccggctctgcggcgctggatatggcttatgttgcagccggccgtgttgatggttatttcgaaatcggcctgaaaccatgggatttcatgggtggtgaactgctggtacgtgaatccggctgtatcgtgactgactttgttggtggtcacaactacatcagttccggtaatatcgttgcaggcagcccacgtattgttaaagatatgctgtctgaaatgcgtgaagaattaactgaagcactgaaacgttaatttaactgagcaatgttatttacagggcaccaaaacgataggtgccctttttactgagttcttattaatttattgtttcttatttataatttaatttcacaccgaatgaatttgaccttcagctttaggccgtaagaaaatcgccggtaatgcgaccagcgccattacccagtagattccgcctcccatatgttcatacaggaaaccacctactgcactcataacagcgataccgccacccattgctaacgcagagtagactgactgtaggcgaataacttcattttcttttctggcaccgataaaacgcatagccgcttaatggcaaacagtgaaagtcccacattgcagggtttgaataataatcagcacaggtagctccgtgaatgctcccattaattccccgcggatcaccccacaaatagccggaaagtagcagaaagctgcgaacactttagcgactgaattattgtttgtgaaagtgaaaattacaatttttgtattacacccatgaccaa

SEQ ID NO: 2315 - DNA, 13480 bp, Xenorhabdus sp.; identical to SEQ ID NO: 85
  CDS (2083)..(3288)

SEQ ID NO: 2316 - DNA, 13480 bp, Xenorhabdus sp.; identical to SEQ ID NO: 85
  CDS (12085)..(13479)

SEQ ID NO: 2317 - DNA, 13480 bp, Xenorhabdus sp.
  CDS (12735)..(13457)
tttccagtgataaattacggtgatcgagcccttcagcttgttttaactcactttctgcccgacgaggccagcctcgatccagccagattccgcccaaatcgagacgcaatttttggttggagggggctgtacgggctaaatgcgtaaaacgtttttctgcctcaggtaaatcttcattaagttgtgctgattccgccagaaattgttgcccttgcagccagccgtcattaggaacccggattggagaaccgtatacattcaccatataaacattacgttgtttgatattggcagcgagtttttgagcttcatttaggtgctcgctttccacatcggaataaaaaagaacgctgtcatcttccagagtgatatgggaagtcggagtttctttatcagggtatttcccgttcgggtaactcagcgggcgcagaatgtttcttgctttatccggctggcgaagattcagataggctgccgcagcccatttgtgggcataatccggtatttctgtgttttcttctgttgatgaaggctgttgcaggagtaaatattcttcaataagctcctgtgtccggaaacgggcgagtagtgccccaagacgatcaattcgggcacgtcggtaatcctgctgggcatctggctgttcacgccactcatttagcatctgctcataacggacaagtgctctgtcagcaatatcaaaccgctctgtttcactgcgattagggactatggcaagacgaactaattcagccgctgcatcggcttccagcctgcgttgttggcccggcgataactgcaatttcgaggcatattgttgttctaaaagccatgccgggctattgacacggttgtttttcagactgaacagataatcgtgagtggtatttttatcattggggaaacgctcatgggcggtggagagcatttgcatggcatcccatgtacgcccggctgcttcatcaacataggccattaagcggtaattagcggcattgggatgttgtgccagtaacctttttgccagccgccgagcctcactgtctcgcttggcatctgccagcgtcataatcaggcctgcttttagatcgtggttttgctcttcaaggacagaagccagatgccataattggacggactgtgtccactggcgctgattgcgataagaccgcgccacggcagcaatacccctggcgggtaattccatggaatgatagcgttgccaaagttcaatcacttcattatctcgcccggcccagcctgcaatttgtaaccagtcagcaacttgagaagacgaaagtttccgccgcttttcttcttgacgaatatattcaagcatggggatggtattgccatttctggcttgcaggattaactcgtcataatccgcttttgcggcttctgacgttattagacaacttagtgatatgaataacgataatagtttataccgatatctatgaaagcctatcggcttaaaataaagatatagcacgacatccccttttatactgcttatttagaaaacagcagaatcagacgaagtaaaattgaatttagattaagagaaaatttttgttttttcatttttgaagaggcgaaataatacgtattgtgtgactttatatcaatgggtaattcatgaaaagtaataaataaaatataattacacttagaataagtaatatcgtattgttacatttattggtaataattaaattaatattaaaatcaatgcgttgttattttaagatttttcttatggtgttttttaattaaatatattcattaaattaagagctgataaaatatatttattaacagtattgatattctttattgatgattcgttttactgtttttagtaaatcgtgactgtatttttcctacttttatcttcatcaatttcctgaatgtggtctatattattttatgacggttattttataaaaaatatccgtttttataattaaatgtggcgtttaggctttgtgttgtttatttttaaaataaaaaatctttttatcttcgagggatgatgcattatcgatggttttatccatttgaatgaatgatattgtgtgcgatttttttgaacaaaaaacacagagaatcggtaaagaatagcgaatttaacattaaataccttccctcgaaattaacctcagcagcaaccatacaaacaataagtgctttaataattccggctggttcgtataatcctgccttttattatgttgttagtgaggaaagttgtggatcagattgccagtatcatcgctaatgtatgcgaaactctcggtgccaaaaatattagcgaagtgggtattcaatcgttcagttttcctctttctgtaaccgatgatactgactggctggaatggttggctgctcagccgcattaccctcaattttactggcaacatcgtgatggacaagaagaagttgttgcctgtgggcaaatccgcctcttcagggatgccactcaggcagaaaatttcttaaatcaacatgctcaatttcctcaaatgcgtatttggggcttgaacgcgtgggaaaaggaagaaaatacagataatgaagaaagttatctgttcttgccaagaatagaaatacgtcgctgtcataaggccacttatttatatctgaatattgatgggcaggctgacatcgataatatttacgcgtttctccgaaaaattgcaccccaccagccatttcaatcatcacgagtaacgattttaaataccacgcatcggcctgaaagtgagcagtggaatacactgctggagcaggcgctggatgccattacccgcaaaaaaatggaaaaagtggtaatggcccgcaaaacagaactcatgctggatatgcctttgcaggcaggacaatttatggcggccagccgtgaggtgaatcatcactgttatcacttcatgctggctttcagtgatacgcaggcctttcttgcttccacgcctgagcggctctattaccgtcaccagttacagttatttactgaagctctggcgggaacaacaataaattctgacgatgatcaaaaagcaaaagagctagggcaatggttattaaaggataaaaagaaccagcatgaaaatttgattgtggtggatgatatctgccagcgtttacagggcggtgtgaccgcaattgatgttgctccgcctgatgttattcgtttacgtaaagtacaacacctgcgcagacatattaatggttttttaaatcaggtctcggacagtgattgcctgagtcgtttacaaccaaccgctgctgttgccggtctgccacgagaagccgcccggcagtttttggctgagaatgaaccttttcgccggggttggtatgcaggttctgccgggtatttggggcttgagcagagtgaatttgccgtttcgctgcggtgcgcatatatagatggcgctttattgtcattgtatgccggggcagggattgtttccggctcagaccccgaacaggaatggatagaaattgagaataaggcagcagggttacgctcattgctcagtaatttatctatggaatagctgcatgaaatgatgcatggagtattgtcaataaaatgatatttctttgaactatcacaaggaaagtgtttttaagggaatgagaatggcgaatatcttatataattcatttcattaaataatgagttttctttttaaataagtcttgaacatcctatgtcaaacagcgcactgaaccgtcgttgggcggaacttttactggaagcactgacccgccacggtttgcgtcatgtgtgtattgctcccggatcccgttctactccactgacactttccgttgtaaagaaagctgctgcccagaatggtaagctgatctgccatactcactttgatgagagagggttaggccatctggcgctggggctggcaaaagcgagcggggagcccgttgctgtcatcgtgacatcaggaaccgcagttgccaatctctatccttccctgattgaagcaggtttaaccggagaacggctggtatttctcactgcagacagacctccggagctgattgactgtggtgcaagtcaggctattcgccagcagggtatttttgcctcacatccgtcacaaacactcactttgccgcgcccaaccaccgatatttcagccagctggctggtctctgttattgataatgcgatgtctaatctcaggcagggagggttgcatattaactgcccttttgcagagcctttgtatggtaatgatgataaataccagtcatggttacagacgctgggagactggtggcagggagatcagccgtggcttcggcaatcgatggtgacagtgacaaccaaagtgactgactgggattattggcggcaaaaacggggtgttgttctggcaggaagaatgagtgctgaagaggggcagcttgttgcacagtgggcaagaggcatgggatggccattaattggtgatgtcttgtctcagacaggccagcctttgccttgtgctgatttgtggctgaatcattatcgtacacaggaaattctggcaaaaggtgagctggttattcagtttggctccagcctgacaggaaagagattattgcagtggcaggcggaatgtcagccagaggaatactgggttatcgattctattgcgggaaggcttgatcctgccaatcatcagggacgcaaattgacctgtgatatcgcggcgtggttacaagcgcactctgcacatgcggatcaccctaatgctttttgggcgaatgaactgaaaatatggtcagaaaagacatcggaatgcgtggctgaaaaactgtcgggtaaattcagtgaggctgcggttgcccatcagttgtatcagttattaccggaagaggggcaactatttgtcggcaatagtctggttgtccgtctgattgatgcgctggggcaactccctgtcggttatccggtttacagtaatcgcggagccagtggcattgacgggttaattgcaacttcagcgggagtgcaacgggcaaccggtaagcccacgctggcaattatcggcgatatttcggcactttatgatctgaacagtctggctttattgcgggaagtttcatcaccgatggtactgattatcgtcaataataatggcggtcagattttttcattactgcctacaccacaggaagcacgccagcagttttactgtatgccgcaaaatatccgttttaaccatgccgctgctatgtttggcctgcattatagcgctccacaaagttggcctgagttaaaacagtccgttgaacaggcatggctgcaaaatgctgcaacggtcgtagaattaaatgtgacagataatgaaggtgcgatgtgcctgcaaacgttactgaaacaagtggcggaattatgaagctggcctgtcagacattcaatacggacaaacaaggcccatggctggtttggttgcatggtctgctgggatgtggctatgaatggcagcccattatcagtgcctgcaaccagtatccttctttggtcattgatttgcccggtcatggccattctgccgatatgccgcttgtggatgtttttgcgaaagatggccttgcagagatgaatgcgctactgagcaaaaccttacttgcgtatcagatccatgattattggttaattggttactcactgggtggccggattgccatgtatcacgcaactcaaactcaggcagtgcagggtttaagggggattctggtagaaggtggaaacccggggctgttatctcaggaggaacgtgaagccagattattacatgacaaaaactgggcacagcgcttccgttcagaacctatagcggcagttttagcggattggtatcaacagcctgtatttgcagatttacctgcggcgcaacgtctcaggctcattcatcttcgtagccagaacaggggcaacagtattgcagatatgctggaaaatacctcacttgggcaccagccgtatctgatcccggaattacaaaaactggcagtgccttttctttatttatgcggtgaacatgatcagaaatttaagggcatagcacagcagtttgcattgccattaaaaataatttctcagtccggacataatgtccacagtagtaatcctgcgggtttttcagccgcagtgaaccactttttatcactttttggctaaggacgtttaataatgctctacccatgcgaagaaaaattatatgcgccgattgactggcaagactgttctaatggatttgaagatattctttatcataaatctaccgatggtatcgctaaaatcacaatcaatcgcccacaagtgcgtaatgcctttcgtcctctgacagtaaaagagatgattcaggcgctggcagatgcacgctatgacgatagcatcggtacaattattctgaccggaatgggagaaaaagccttctgtgccggcggcgatcagaagatccgtggtgattacggcggttatcaggatgatatgggaacacatcatctgaatgtactggatttccagcgtcagattcgtacctgcccaaaaccggttgttgctatggtcgccggatattctattggtggcggacatgtcctgcatctgatgtgcgacctgactattgctgcagataatgcgatttttggacaaaccggccctaaagtcggctcttttgatggtggttggggtgcatcttatatggcccggatagtcggacagaaaaaagcccgcgaaatctggttcctgtgccgtcagtacaatgctcaggaagcgcttgatatggggttggttaatactgttgttccttatgctgagctggagaaagaaaccgtgctctggtgccgtgaaatgctggaaaacagcccgatggcgctgcgttgcctgaaagctgccctgaatgcagattgtgatggacaggcgggtttgcaggagttggccgggaatgccaccatgctgttttatatgactgaagaagggcaggaagggcgtaacgcattcaatgaaaaacgtcaccctgatttcagtaaattcaaacgtaacccatgatgcgtaaagcaattctttatcactacagcttgccgatggaggcaggtgttattctgcgctatcagcgcctgaaaacccgcgatggttttctggttcatatacaggagaatgaggaacacggctggggagaaattactccgttaccggaattcagtcatgaaacacttgagcaggcagagcaagccgcagtagcgtggttaacgcgctggtgtcaggcagaaaaaggcgcagagaaagaaccggaacagagtgaattaccttctgttgcatttggtatcagttgtgcgctggctgaattgcggggtgaattgccggaagaagctgactatcgcaaagtaccattatgcaccggtgatcctgatgatgtgatcctgcgtctgggagaaatgaccggacagaaaattgcgaaggtgaaagtagggttatacgaggctgtacgggatggcatggtagcgaatgttttgttggaggctgtgcctgaactccggttaagactggatgcgaatcgcagttggacacgcactaaagcggatggatttgccaagtatgtcaatccggattatcgccagcgtattgctttcattgaagagccttgtaaaacccgtgaggagtcactggattttgctcgcgaaacaggtattgctatcgcatgggatgaaagtgttcgggaagacggtttcacggtaaaagctgaaaccggtgttgctgctattatcatcaagccaactttggttggcagtattgaccgttgctgtcaattaattactgaagctcatcaggcaggattggaagcggttataagctcaagcattgaaaccagttttggtctgacgcaactggcccgtctagcacactggttaacgccggatacactcccgggattagatactctgaatctgatccagtcacaacttattcgttgctggccagacagtgacatcccttgccttgaatcagacaaactggaaataacatggagccatgaatgtcattagcgtcgtttaaccaatggccgtggcatcactgggctgtctgtgctccggaaaaacaggctgccttgttgtatggaaaaaacctgacatggcagcagctagcgacaaaaattaatactattgcagattgtttccggcaacagggggtatcagaaggtagtggggtgatcctgagagggaaaaatagtaccgatttattgctctgttaccttgcgactctacaatgtggggcaagagtactgccactgaaccctcaacttcccgaatcattgctggtggaattacttccccggctgaatatggcatttgtggctgattttaccgattttccttcatcggctattcaggcaataaaactcaactggaaaactaagtttacagttacgtcaggaaaatgtgttacatgggacttaattttatgggataagcatcgcccggctagtatgatcctgacttcaggatcttccgggctacctaaggccgttgtgcattctatggaaggtcactttgccagtgcaaagggggttctttcctgtatagatttcagttcacacgatcgctggttattgtcactgcccttataccatgtttcaggtcagggaatactctggcgctggttgctgaaaggcgcagaacttgtattagaaaacatgcattctctggatagggctttatccggttgtactcatgcctcattagtgccaacgcaattgtggcgctggctgtctcagccacatgaatataaacaaactttaaaagatgtgttactgggcggggcaatgataccgcaggagcttgttcaacaagccggaaaactgggcattcgatgctggtgtggttatggcctgactgaaatggcttcaacagtctgtgcaaagcgtgcagatggtttaccgggagtggggataccattgccgggaaaagagatccgtttgcaggatgaagagatacagattagggcagacagcatggcgatgggatattggtctgatggaaagttacagcctctgattaacgaaaatggctggttttccacccgtgatcggggcgtctttgagcgggatgaactacgtattctcgggcgtctcgacaatcagtttttcagcggtggagaaggtatccagccggaagatatcgagcgaatcattaaccagcatcctgaaattcagcaaagttttgttgttcctgtacctgatcctgaatttgggcatcggcctgtcatggtaatcgaaacaaacttacctaaacttacaacaacacttgctagctggctttcggataaacttgccccatttcagcagcctgtagcctgttacttactgcctgagcagctaaagaatgatggaataaaaattccacggcagcaggttaaacagtgggtgctgcaaaaatacgttacctgcatatcttgattaatctagataatttattaattttatagtttatgacgtttactgaattccagtaaaatggcttgcaacaagtagtggcaattaccaattagagaagaaggaaacgatatgaaaggttttattgctgtcagtgctgctagtctgctctttatgactggtacagcaaatgcaatttctgtaaatgttgaggcaggaaagcactataccagtacatctgcgggaattggtgataaaaatgcggggttctcccttaacggaaactgggcccgcagtgatcataatggtcagttgggtagcctgggactggcctttgctctgcctgttggtccgctgaccgccagtgttggcggtaaggctctctatctgtcgccaaaagtcggaaaagatggcgctgcattagctgctggtgttggcctcagcgtagcggtaacaccatcactgtccttatatggtgaagcgtatggtgctccatcaggttttacttcaggtattgactcttatacagaagctaacggtggtgtccgttatctcctcttcagaccactgagtgttgaagcgggttatcgcgtaattgatctaaaaggaaaaggcggaaatcgcagtaataaagtgtcagatggtttttacattggcgcaggcgtgaatttctgatatttccactaaaattatccgcatctgtaaagatgcggatatgcctttctcagtggagtaatggattagccaagctcgggcagtatgcctgtaacaatgccaacctgaatagcaataacagaaataccgcataagaaaataaggacgagtgccgggttaccacctttcacacgatatcctccctgattttctttgcggcagcgccaaaccagcaggcagggaagtaacagagccagaattgacagcgcaacggcagcgaaggtcagcgccatcacaaagttagggtagaacagggcacaaagcatgggaggcacaaaagttatcaggccggtttgcaaacgctctttggcataattgcggcgttttaacaggtcagcaagatagtcaaacagacccagagaaacacccagaaacgatgtcgccagtgcgagatcagcaaacagatgaactgcaagttcaacttttggtgacgcaacaacttctcggacagcctgcaataatccattcagtcctgactgttgtgccagaatcccgacaaaggtattggaagaaatagcaccaagagtcactaactgccacaggatataagcacttagcggaatagcactgccgataaggaatatcttccggagcttatttgtatcccctcccatataggcaacgatacttggcacactgccatgaaacccgaacgaagtaaaaatcaccggaatggctgacagaacaagccctttttctattggcatggatatcaggttgattttatcaacatgaggcatcatcacaccaagaacgagcaccagaaaaatgactttagcagtaaatagcagacgattaattaaatcaacagatcgggtactaatgcagacgacacttccggcgaccagtgtgaatataatgatcccgatagaaacagaaatatctttctctaaccaggcagataaactggcagccagcaactccccggcaccactgatataggcggttgtcagagcatacatcagaaatagcatgctgaaccctgttaacacctgtccaccgacacccaagtagcgttttgcgatagttcccagcccggtattggctttattatattgataaacttctaccagcaggagtgcggtataactcatcaatgcccataggccaactaacatgaccagtgttgtactaaaacctacacctgccgcagccagaggcatggcgagcattcctgccccaatcgtcgttccggcgacgataaaaatactgccagtagtgcgattcttcacgcgatcctcgtctctgaatatattgataaaatagtaataagactggcagggtaaagtattgatgtatagctgtcaaattcacgatacatatatcgtaaagaaataattacactatgtgctaaaactgagaagtaggttaaaaaagtaaattgaataaatgaatctaattttgaattgctgtacctgtggaaacccgtcgaaaagaaaaagaattctagcaatagcctttatattgcagattacggctgttatttgtttagctttattagcgccttagttatcgccatctgaactgagaataacgtatggtagtatgcctgaaagtagaaaagataaaacccgctatcctgagataacgggttttttcttatacagggtctgtgatgtgaattaagcggatgacttactgattactgttcttacctagcgaattacttttcggttaataacgcccagacgcatcacaaaaagtaaccagctaattaacagtaataatccaccacctactactgttagcctgatccctgatgttcaatattcgagttaatgctggaacacctccagctttcttgatcattacttccaatgcactcatatggattctcctttttcgttaatagttataaaaaaacacaataactactttaaaaagtaacgccttatttactatgaaaataaaagcctcgcttgtatatttgagacatgaaaacgatgcatgaaagaatcaagcgagactcgcaaaaaagatataggtcaagtatcgtccgaaggagagtggtcaaacattgcgccgtgggatagtaaacgttattagatggcgatgaaatagaagtcccgttcttaaaagatattgagttagcctgcggcaatggaaggtgtattggcgtggaccataatggttttaagttgagatttattaaagctacattaagaaaaattggcgcaccgagtgatgtctccacaattatttgctttccggcaaagggtgacagcatggaaccagttattccggacgtaaccgtaataggaatcgatatctccaacaagatagttattgatggtaaattgtatataatttaacaagatggcctgaaacgacttaagtgtctttataggcgaccaggcggaaaaatactcataagaagttataactgcgatgagtacgaagatgaggttgctgatgaaaaccaagtgaacattattggtaaaatgttttggtattccgttttagatttctgaagttttaacttactgaggttatggaatggataattttaagataaaaataaaacatcatgttgaccacgttaaaaacgttggacaacactgcaccaccgaagaaacaactaagcaagcattgatattgccttttttagatattcttgggtttagtccgtatgatccgcaaaaagttaaagcggagtacggagctgacttcccgggagttaaggcaaatgagcgagttgattatgccttgttttgtcagggggttcctgtgatgtttatcgaggcaaaaggatacagcgaaaaactggataaccattgcccgcagttatccagatactttaactccactccagaagtaaccatttcagcaattacaaatggcttagaatggcgttttttcactgatttaaaacagaaaaacgtaatggatcctaatccatttttgcgcatcaaaatggatgaagtgagcgatgccgatgcaagtcagctttttcgttttaggcacgataaattcaaaccagaagcactaaggactcttgcagaagagagcgtttatttatccgcatttacgaaaacgattagtgctagtctgagagatatagatggtgaattcgtgagatatgttgcaagtagatctaacgtagagcgccagctaaatcagagatttattgaatccattactccattagtaaagcaggcagttgaaaaatctgttagtgcgatggtagtgtccggtctttcaaataaacatactccaattgatggagttcaagatgaggtagagcctcaagaaacactgaaagaaccagatgaaatagtaggatccagataatccaaatattgctttagagcaca

SEQ ID NO: 2318 - DNA, 13480 bp, Xenorhabdus sp.; identical to SEQ ID NO: 2317
  CDS (9585)..(10127)

SEQ ID NO: 2319 - DNA, 13480 bp, Xenorhabdus sp.; identical to SEQ ID NO: 2317
  CDS (8073)..(9476)

SEQ ID NO: 2320 - DNA, 13480 bp, Xenorhabdus sp.; identical to SEQ ID NO: 2317
  CDS (7108)..(8067)

SEQ ID NO: 2321 - DNA, 13480 bp, Xenorhabdus sp.; identical to SEQ ID NO: 2317
  CDS (6215)..(7072)

SEQ ID NO: 2322 - DNA, 13480 bp, Xenorhabdus sp.; identical to SEQ ID NO: 2317
  CDS (5579)..(6202)

SEQ ID NO: 2323 - DNA, 13480 bp, Xenorhabdus sp.; identical to SEQ ID NO: 2317
  CDS (3723)..(5417)

SEQ ID NO: 2324 - DNA, 13480 bp, Xenorhabdus sp.; identical to SEQ ID NO: 2317
  CDS (2244)..(3566)

SEQ ID NO: 2325 - DNA, 12019 bp, Xenorhabdus sp.; identical to SEQ ID NO: 86
  CDS (1714)..(1821)

SEQ ID NO: 2326 - DNA, 12019 bp, Xenorhabdus sp.; identical to SEQ ID NO: 86
  CDS (3946)..(4371)

SEQ ID NO: 2327 - DNA, 12019 bp, Xenorhabdus sp.; identical to SEQ ID NO: 86
  CDS (5106)..(5687)

SEQ ID NO: 2328 - DNA, 12019 bp, Xenorhabdus sp.; identical to SEQ ID NO: 86
  CDS (6130)..(6963)

SEQ ID NO: 2329 - DNA, 12019 bp, Xenorhabdus sp.; identical to SEQ ID NO: 86
  CDS (6963)..(7811)

SEQ ID NO: 2330 - DNA, 12019 bp, Xenorhabdus sp.; identical to SEQ ID NO: 86
  CDS (7781)..(8920)

SEQ ID NO: 2331 - DNA, 12019 bp, Xenorhabdus sp.; identical to SEQ ID NO: 86
  CDS (9055)..(9936)

SEQ ID NO: 2332 - DNA, 12019 bp, Xenorhabdus sp.; identical to SEQ ID NO: 86
  CDS (10105)..(10707)

SEQ ID NO: 2333 - DNA, 12019 bp, Xenorhabdus sp.
  CDS (11642)..(12019)
ctaaagactccgtatttgcctggatcgcaaagaaatattacattctcagttacgtgctattctgcgagcttctgcatttggtaaactccgaatcatgttcccaatgattatttctgttgaagaaattcgggaactgaaaacagagctgttgatgcttaaagatcagctacgtaatgaaaataaggcgttcgatgagtcgattgaagtcggcatcatggtagaaacgcctgctgctgcaaccattgctaaacatcttgcaaaagaagttgacttttttagtattgggacaaacgatctaactcagtatactcttgcggtagaccgtggtaatgagctgatttctcatctctataatccaatgtcaccagcagtgttgaacctgatcaaacaggtgattgacgcctcacacgcagagggtaaatggacgggcatgtgcggtgagctggctggagatgagcgtgctacactattgcttctgggcatggggctggatgaatttagtatgagtgcaatatccattccaggcatcaagaaaatcattcgtaatgcgaattacggtgatgcaaaagcgctagcagaacaagctttaactcagccaactgcacaggagttgatggaattggttgatacttttatcagagaaaaaacactctgctaagttaattgaccaagacagcaccttagccagtacacggtcccattaaaacaattaggagaagatttatgggtctgcttgataaactgaaatcattagtttcagatgataaaaagaacagcggcagtattgaaattatcgccccattatcaggtgagatagttaatatcgaagatgttccggatgttgtttttgcggagaaaattgtaggtgatggtatcgctatcaagcctacaggtaataagattgtctcccctgttgatggcaccattggtaaaatcttcgaaactaatcacgctttttccatcgaatctgataacgggatagagcttttcgttcacttcggtattgataccgttgaactgaaaggtgaaggctttaaacggattgccgaagagggccagcgggtacagaaaggtgatttggttttagagtttgatttagcattcctggaagaaagagccaagtcaaccttaactcctgttgttatctctaacatggatgaaatcaaagaattatctaaagtcagtggatcagtggtcgttggtgaatctgttatcatgcgaattaagaagtagctgaatacatcactggtaagctgttgtgggtcgcctctgttttatcgggttaaatgataaaacagaggcgatttctttattagttaattgaatcaggagaaaccatttcccatttgccaaacagcgtcaatcccacagactttgccaatgccgaagatgcaaaattatcaatctgacatcgatattgaggctcatatccctgaacataagcatgtttactgattgcacgtacaacttgtctggcatggccctttcctctgaaaggttctaaagtcagaacccccatatcagcaataagcgcatcgtcccacgggtacatactggcagcacaaatcagatcgtcttgttcaaaagagccgaacacagcccagtgttccagctcaacataagcattatccaaatcctcctcagaagcagcagactgaaacgttaagaaaacctctccatcttctttttccattagctgacgtaacgtactaccaatattttcctgcaataattttttcttttcttcttctgaaaaataaaaaatataatctgcgccatggagagtaatagctgcttcatgtaatttctggcgaaaagtggattcagtcatttcgtcctgatgataaagccctgctttttcagccagtgctggagtcatcactgatataacttgaccatcaataatttccagcaccatcacacgctcctcctctgccagtcttgcattaatagcgacagtaagaacatcatcactataaataatttctccatttaataatgaagactgccaatagtcagtgatcgtttttgaaaaaaaggacatagcctttactcactaagttagattcagtaaataaaaaagttaattaaaaacgcctgtagataaatatctatcgccgcgatcacaaataattaccgcaataacggctcccggattttcagccgcaatacgtaacgctccggaaacggctccgccggagctaaccccacagaaaattccctctttctgtgccagcaaccgcatcatcgtttccgcctcactctgagtaatatccagtatttgatccaccagatctttttggtaaattccgggcatatatgctggtgaccagcgccgaataccgggaatatggctgttttctgccggctgtaagcctatggtttgtatattatccgactgaaatttcaggtaacggctcactccggtaatagtgccggttgtgcccatactggagacaaaatgggtaatacgcccttgcgtttgctgccaaatttccggccctgttgtcttgaagtgtgccagcgaattatctgtattattaaattgatcaagcacctttccttcgccattcagctccatttgctgtgctaaatctctggcaccttccatacccagctctttactaactaaaattaattcagcgccataagcccgcattgatgcctgacgctcaaggctcatattttcaggcatcagtagcttaagccgataaccttttactgctgcaatcatcgccaatgcaatgcccgtattaccactcgtggcttcaatcaggacatcccccggtgaaatttctccccgtagttcggcttgttggatcattgagagagcggccctgtcttttacagagccagcaggattattgccctcaagtttcacccaaatttctgcatcaatactttcagtaacccgttgtaattttaccaacggagtattaccgataaaattttctaagcttgccactgcattacctgaatcacatatgagaataggcaacagaataatcgtattcagaaaactgtcgcaagctctaaataaaaaacccctgttttcttgtagaaagcaggggaaacccagggtttgagaataatggaaaattatgcagattcagcgagttttaatacttttaatggtgaatctccttcatacaggcgggcacctttgcctcccataaaatactggctgccacgaactggaattgatgaactatccgaccagataaccgataaactctcctctccccaaccaacaggctggacagacaacagtgaaaaatgccctcgtggattaacttccgtcactttaacaggcaaagggcaggatgatgtttgttgtttactgaggttcatctcccacgggcgcaggaatacatcaacacttccctgatgcaatggtgccacttccaatggaaaagtttttccgccaacccacaactgagagcctttaatctcaccatgtaactgattcacttcgcccatgaattccatcacaaaacggctttccggctctttccatacctgctgtggcgtgccaacctgctcgatagccccttgattcatcactacgatccgatcagcaacttccattgcctcttcctgatcatgtgtgacaaacacactggtaaattgcaattcttcatgaagctggcgtaaccaacggcgtaattccattcgaacctgtgcatccagagcaccaaatggctcatccagtaagaggatctgaggttcaacagccaatgcccttgccaaagccactcgctgcttctggccaccagaaagctgtgacggatagcgatcggcaaggtgggataattgcaccatatcaagtaacgacatgaccttgcggcgcagcgcctctcgctcaggtcgctggcgccggggaagtacagttagaccaaaagcaacgttatcaaacacgctcatatgacgaaacagagcataatgctgaaaaacaaaaccaacttgccgatcttttgcatgtacctgactgacatccttaccgtgaaacttaagttgccccgcactctgctgttcaagtccggcaataatcctcagtaaagtcgtcttgccggagccagatgggccaagcaaagcaaccatttcaccagattcaatattcagtgatatatcattcagtatctgaacacgaccaaaagatttactgattttgctgatttcaatactcatatcctgctcccgaccttcatttactggcgattcaaatgactcaaacgccactgcaaggcacttttgacaatcagggtaataatcgccataactgccagtaaagctgccgccacaaatgcgccaacagtgttgtaatcctgataaagcagttcaacctgcaaaggtaaagtgtatgtttcccctctgattgcgccggataccacagataccgcaccaaattcaccaattgcccgggcattagttaaaacaatgccatacagcaatgcccaacgaatattcggtaatgtcacacgccagaacatttgccagccagaagcccctagtaatattgccgcttcatcctcctgactaccctgactcagcatgaccggcaccaattcacggacaacgaatgggcatgtaacaaataccgtgaccagaaccatacccggccatgaaaacattagctggatgtcatagtctcccagccattcccccacccaaccgttagcaccgtaaaacagcagataaagcaacccagccacaacaggtgaaacggcgaatggaatatcaattaatgtcagcaacaattgtctgccgggaaattggaagcgggttaccagccatgcagtgactactccaaaaaacagattaataggaactgtaataagcgcgatcaacacagtcagccagatagcatggagcatatcggagtcaacaaggttctgggcgagaatatcgattccctgtgaaaaagcagtcagaaaaatccacgctattggaatgaccagaaacaggatggaaataaccattcccaccccaatcaggaaccattttccccagtttattgagggacgcatcatctgcgtgtattcagaaaaatcagccactaacgccccccaatccgcttaccaaagcgactttgtaataagttaacgctaaacagcaataacagtgataccgcaagaataactgaagcaatcgcgctggcagcgggataatcaaactcctgcaagcggacgaaaatcatcagggaagccacttcagtctgccacgcaatattacccgcaataaaaataactgcgccgaattctcccagactacgagtgaaggagagcactgtgcctgccactaatgcaggagagacttcctgcaaaataacccgccgaaaagtctgccagcgactcgctcctaatgtctgagcagcttcttcatattcagggcctaattcttcgagtaccggctgaacggtacgaacaacaaaaggcaggctggtaaatgccatcgcaaccgcaatccccagccagctattggcgactctaatatcaaaatgagcaagccaagaaccataccatccggttgtagaaaacagagttgccagagttagtccagcgactgctgttggtaatgcaaagggtaaatccattaatccatcaagcaaattgcgccccggaaaacgatagcgggtaagtatccacgccattagcattccaaaaaacatattgaataagctggcgacagcagccgccaataaagtcacctgataagctgcgacaacctgtggattcgcaatgacctgccaatattgttcccatgtcatgctggaaagttgtatgactaatgcgcttagcggcaatagcaggatcaggcaagtataaagcaggctacaacccagactcagcccaaatccgggtaatactcgtttactggatgcaacaaacattattggcacccatttctcaaagttgctcccacacattgccagtgttgaagtaaatttttatcagaattacccagtaactcgaccacaagcttcattcaaaccttacccatcaagctattcagcaagaattttttatcgactgtttttaacaataatttatccatactgtatccagaatatttataacaggatagttaactaccacctgttttatataccgaatttttatgagaaatgatgaaacgagataagctataaaaaataaagggttattaactgagggctgggggaattgacacctgacatactggagctgattttgtcgaccggaatattgacttgattaaaatacttcctgcataacctccatcgttcaaattacctctttattggcagcgctcccttgccgccacaataatttgaaatttattagatatatcttttagttagctttccagataatgcgggaaattttccatgttttcagcacatcatcaggaggcagcaactcttccgaaccattccatattcccgtaaatacgtaactgatatttcggctttggggagcaatacagacaatctcctgctgcatagttattatgtcgtcggaacgctggcaggcaccataagctttgtcatacagcgtagagaaagatgtacctatttttgttccccaagcggtcttaatcccttcatccagaatgataatatgggccacctttccattattcagacccgataattcaatcctgacctgatctccctctataccctgtattacactgaaaaatttgccatttttcatctccataccactgcgcaggcgatatctgttatccaacccctgctgaatggcagataagttcatatctgtttgtttattgatttcccctaccccctgttcagatacctccagagtacggctaaaccaatttaaaggagacagggaagaccatgaaagcccggatgttcctgcacaggcagttaataacaatgaaccacctatcaggccactgaacgccataattctttttttaaataacaggctaaataaaaaatatcttttcattacaattcattacctttgtctatcctaacatcttattattgatatcattcaaaaacagcaagttaagaatgaataactgccttaatacagaggcatataaaaagacagataaaaatacagttttataagtccattgagcaattatttacaaatagatagatatcatatcggattatggaataaatataaaccaatggtgaaagtgcgtggtggcggcaatgatcccaacatttattgattttctggatatccctactgtaacaaacaattttgtaacaacaagggatatgacaaaaacagcaatacctcaaatgctatatctgacaaatgatataaaaaaagacattataattcaggaaaatgaaaagactcccgggaatattaaggagagtaaagtctgcaatcttcctttaatcaactggcgtatcttaataaacaaacctgaattaccaattaaatatcattattatttccttaaagatagcaatggaaaaattcagattttgattacgccagaaattgaacgtaaaaactatttaatatcaaaaaatctccttacagaaagtaaatataaattcaaacttcatcatgtgataaaaaaaacagcgaggaaattattgagttttttatataaaggtacagctcatggccgaacaacataatatttctcagccatttaccttaaatattcaatcaataatcagacgcttattaaagacagtatgttcctgtccccaataatcatattccattttttcacacatacaaatggtggcatcattctcttctgggaccataattagaatactagggcaacctctcgctaataattttttctcaagacgggaaaccaatgcattagcaatacctctccctctgtattcggggtgaacacctaaataataaacatgaccacgatgcccatcgtagccacccattaccgtcccaacaacttctcctgccacttcggcaaccagaaataaatcagcatcatgagttaatttacgctcaatatcgagttccggatcatcaccgggattaatcagatcacaacgctcccaaagtgtgatagcggcttcaaaatcttcttgccgaaataccctaatttccatcgttagccagcctgtttaataagcaatcagtttaatgtcaataatcactactttcatttcggaatcaatatgaaaatgcgttcattgatactaacaggtatactgcctatagccataaactaaccagaatgaaagcagaaatgaatatagctaatatatattagtttaatgtttcgatgtttgtctatgattattgtttttattttaaaatcaaatgattaattatttacctacctgtatattgttccagtgcttattgacgttttacctctcttgcagcacactgtgtataaacaattatataaatatctttaatgaacatggctggcgaattaaacaagctcagtgataaaaaacttaaaaccctacacggaaaagaaaggaataaaattgaattttttgccgatggcgctggattgagtgcaaaagcatctaaagttggtggtattagctgggtctttacctaccgacttgatggaaaaaagttaaatcgtctcaccattgggcgctatcctgatatgcccctcaagcaagcgcgtgaaacgcgggataaatgccgtaactggttggcatccggtaaagatccaaagctgcaatttaatttaacgatgcaggaatcattaaaaccagtcaccgtaaaagacgccattgagtattggattgaacactatggcagagacaatcgagccaatattgatgccctcattcgccaattagaaaagcatatttatctctatattggtgaaatggcattatctgactgtgaaataacatattggctacaatgctttgataaaatgaaaaaggaagcgccggtggctgctggcgggatgcttcaattatgcaaacaagctctaaaattttgccgtgtaagaagatatgcaattagccatgtattggatgatttgactatttctgatgtcggaaaaaaacaaactaaaggccagcgttatttagaagataatgaacttggtcaattatgggaatctataagatcaggaagctacctgccctattataataatttattgaaaattttgattgtatttggttgccggacgagagagatcagattatctaaatgttcagaatggaatttgaattctatgctatggactgtcccaaaagaaaatagcaagacaggtgaaagaattattcgtccgatatctgagcacatgaaatcattcttagaaaaccttgtttatcaaaataataaaaatgattacctattaggggaatttaaaagcaccgaaacagtatctgagtatggaacgaagatatggagaagattaggccatgtagataaatggtctctgcatgatttaaggcgcactttttccacaaaattaaatgatatgaaagtagccccacatattgttgatcaacttttaggccatattttgccgggcgtcatggcgatatacaacaagagccaatacctaccagagaaacgagttgctttaaaccaatggtgcgaaaggctagatctattggcggctaatcacaataacgtggttatattaaaagcagctcaatagtgggaactaatgagcttgatgatgaacatgatcattgtgatatatacgtaacaaatgtggctttctttcgtaataatttctattaagtaaaataccctcacaaaaacaattaaacagtgagggtaacataatcatgcaatacagtactcctacaccagaagaacgccgctctaccctttcctaatatggcgaaccttatgatcgtcttatccgtgaaaaagaacgtcagcacatcacctctatttccagaacgtcagcatggaaattggaaaatgaaggccgcttccctgcccgtaaaccactaggccgcaattcgtgtgcttggttgcttagcgatctgctgcattgggtacgtaatccgcccacagtagaaaacgtgaataacccatatagccgcaaatctaccaattaaataataacgtcataaaaaactaactgccttaattggcagcggtcaaattcaccctaaaagcagcttaatttcgggaataattggcgtgatggtagatattagttatagaaattctttgatacttaataaccatcaatttgagagacaaccctctttaagagggttaattgatgattcttactcagatgatactttggctttacgttggcggcgtttgatttcactcgacatagccgaaattatgaattgcgcagtgctttcgccttcttctttaagattttccattgaatcaacaagctcatgcggtacacgggcttctaatttttttgactttgcgtttactgctttcgttgccatatctgcatccattagtagttggtggctgacagtatacgcaaaaaatttttataaaaaagaattgacgtggctgacacttaaaaatacgatggtggctgacaccatgctttattcaggtgatacaaatagcaacgccccgaagtgcgctaacactgtcgaggcgtctgaccacaacattatcggagctaatgctatggctgatacacagtctaaccaaactcgccttaaatttacattcctaattatatccggcactcagcggctggtgcatattcatccggtgcgccttatcacggtactggcagacagcgaaggtgaagcccgtctactggctggtatctcttccctgatattcgtttcccgtcagtcatggaatatcggtatcaatacccctttcaactatagcgatatgtctactgttcagggggtgaaccatgcgcaaccctgaaccccatgactattacgctcacaaaaacggggaaaccgtacaggtgctgtcagtcgcctttaatcgtgtgacctttgtccgtgagggttatcaaagcccgatcatcatgccattaagccgtttcactaacgaatacacctacgcagggagagcctgattatgtctgatatctataaccatttggtacgtactaatttcgacgccatgagcaccgaagaactcaaagatctgcgtaaaaactccgaaggggcattgagcagcgtgatggcggccatgtcggcaatgggggagatggcgttctggtcagttgataacgaaaactatgacaatcgtcaggcaagggaagatttacgccgtatcggtgaagcattgatgtatttaccaaggatcgccgaagcgctgaacgatacggaacaaaacgctcagtttgaactccatcaccgcgagggattcccgaaatggtaagtcatgttgatattcgttcggtgaaagcggcagcgcaaaatcagtggcaaggtttattgtctgcctgtggggtggacgttccagcaaagggtaagcatggtgcttgccccatctgcggcgggaatgaccgttttcacttcatagacgaccacggagacggcaactggcattgtcgccagtgtgataacccgcatcatggcgatggctttgatttactgactaaagtcaaaggaattacgctcactgaggctattaaaatcgttgctgatgctttgttacttccattacctgaaccccagcctgccagaaaggaggcgccaaaatcagaggctcttctgataactgagaaagtgaacaagctggtggctcaggctactaccgggcaatctgattatctgaccagaaaggggctgccatgccccaatcagagactgctgaatgacggttcgttgttgctggtcactcagacgctggacggcacaatcaccggtgcgcaaattatcaatccgaagggtgaaaaacgtcttgtcgctggtactcaaaaaaaggggagtgttatccccttatcacctgtaatcggaataccagacacaatcatcattacggagggctatgcaaccgccttaacggtgagtcaattgtatgagggctgggtactggctgcgattgatgaaggcaatttaccgacggtggctaaacaggtcagggaacggtggcctgatgtgaaa

SEQ ID NO: 2334 - DNA, 12019 bp, Xenorhabdus sp.; identical to SEQ ID NO: 2333
  CDS (10986)..(11291)

SEQ ID NO: 2335 - DNA, 12019 bp, Xenorhabdus sp.; identical to SEQ ID NO: 2333
  CDS (10659)..(10826)

SEQ ID NO: 2336 - DNA, 12019 bp, Xenorhabdus sp.; identical to SEQ ID NO: 2333
  CDS (8392)..(9609)

SEQ ID NO: 2337 - DNA, 12019 bp, Xenorhabdus sp.; identical to SEQ ID NO: 2333
  CDS (724)..(1233)

SEQ ID NO: 2338 - DNA, 18490 bp, Xenorhabdus sp.
  CDS (726)..(1403)
tttatgtctgttttttttgctgccttttctgctgatatttatcgtaaaaggagtaaaacttttttcagtatgtaaattcaaatcgatcagctatatgttgattgcaggatttgcaataggatactggtactggatgttcttcggccgattaatggggtgctcatttgctgtatattagctgtggctaatacaatttatgacttaaaaggtggcgagtatatcgggagatgctggcaaccgatctcccgatagctcagaattaaccttcctttggcacttcttcccgttcatacatgccataatcacgaataatggctgagactctcaatttataatctgcaaataccccattgcgtcctaatatttgtgcttcccggtgctggcaggtattccgccactgtttaacagattcctcatcccgccagtaggataatgaaagatatttattattttgagacaggctttgaaagcgctctacagaaataaagcccggaatggtatccagtagtggccttagcatggctgcggtgtcaaagtaacgttcactctggttttctgcgatttcgacttcaaatataactgctaacattatcgtttccttgaagaatagaaaacgtaatcatatattgccgttttgacggttacttcgttgggtagcgaaatatactcttcgtttttcaagtagcctctttgttggctgtatcaggtatgggatagatatgtgtgaattaactctggagaaaaaagtcactgtagtttctgcattattatcggatcgtgctcgtatctgtatgctatttctgatgatggacggacgcgcttacacagcgactgaattaagtaccgcggctgatatagcaccttcgacagccagtgcgcatttaagccggttagtagaacaaaatctggtgagcagtattaagcaggggcgataccgttattttaaaatttatagtaaagaagtcgcagtattgctggaaagcatgatgtgttttgttaatagcgaaagcttcggggttattaaaacatcgacaccaaaatcattgcgttctttccgaacttgctatgaccatatggccggagaaatcgccgtaaaaattcataacagtctgttgtcccgtttttggataacggatgattaccgtttaacgccacagggaaaagaatttttcttttctcttggcctgagtttggatgagaaaacaatttccggacggaaatttgcctgctcctgtcttgactggagtgaacgatatttccaccttagtggttttctgggttcatcgctgctgaatatttttttgcagaaaaaatgggctatccggcaattggatagtcgggaactaacgttgacagagacaggaaggcgggcacttaaacagcggtttggtgtggaaatataggtggtatttttacaccacctatgtccaacaaaaaggcaatctgaaagacggaaagtatagatacattctataactcaacacctttataaccagccagaatctgagcccattcctgtcgggcaaaccatttttgggtttctgcgttgtaatgcatatcatcgggagtaaataccccaaattgggtggagatcccgttatagtttggtgcatttctggcatcgacgagtgtacgatactcaggattagccgcaatcacactatttatcgcttcggaaacataactggtattaatggggtcaaaccagactgaaagcgggtaataaaatttccacggtatattgcgggaacctatggcatcacttagaccggcaacgatacgggtaaaattcattttttctgcttttgctgcggttaaactttcagtttctgcttcccactgattccagtgaacggccagtatacggggatttttacccattttacgcagagaattcaccgtcatccttaatgttctgactgcgcgggggtagagtgattctacatcatcagggtcccgctctggcgcccaacggttatcaggagtatcaggtaaatacattccctgcccaccgtatcccatgagaatgacataaagatcaggtaatttgagaatattaccggtgttaatatgattttgccaatagcgggcaaaacgattggcgatattaaccggatgatcctgattacctcgcggtaaaccacacggagcaccaatattggcatggccaaaactcgtcaggcctgtccagctaatggttgaaaaattgacgctataaacttcaggcagggacagggtaaatacattatttaaaccctgagtaattgcttcatttggtgccagttgagtagcatgaccgtaactatttgactgcccaagaacaactaataatggagcatcatcacttctccacggaagggattttatttcagaacaggctaaatttttatctatcatgaagatctcctttagtattttaaatctgatttatataaaggcgatacttttctgcataacagaaattaacttttttcttaaaaagatcaatagataatatgttttaattatctaatttaataagatagtcagtatatgagttagatttcaatagagagatttactaattgttatattaaaaaatatttcttatgagaaagttaaggcaaatttataagtatggattaaaatttctaaattttagtcatgaaatagaaatataatcacttatgtataaaaatatgtttaatataatgaaatgatatttagtacattgttggtaattatccatactgttattgtaatgtgtttgaattattctttatcaagaaaattccattaaatttaatgatgcttattttattttgggtaatttattacatagatgggggtgctactattaaaaatggcctctaatgaggagtgataatgttttttatattttggagtgttgtttttttgcattttatacaatatataggtggttttatgagtgaaaaagaaaaagtaaatctataaatgattaaacattttttaaaaaagtagaaggtaaatgggaagttgaactttatagataaaacagtcatcataatattatagtcaagatggttggtttttgacaaataatttagctaaacttttttctgatactacaaatttttggtttttcggagctggcgattatttaactatgagtttctacagtgaagatggttcttttcttggaactttccaaggtgcagctctttccatggtagtaggtgatggttatggggcgggtaactggagttaattattttatttttactgagaatgatgaaagttttaattttaaaaaatgaaataggaagccctagccctcacttgttaattaagtattttacagattaaggttttattattgaaggaatgatttgttgacgtatggaattgctaatttcacttttatatatccttggttattaaactaaggatatataaatttagtcttaaataaagtttaagaaattatggggttgaaaataattggtcacacctgagattttttccaaaaatagaaaaaaccgtcactgaaagttttattctcagaagaagatttttcagtggcggtttaaacggaacatgggtgaatgatggacaccactccacaacagatacggcaaatatttagtgtttacgcagtgcgcgaagccgcattgtcaagatgaacaggggtacaccaataagtgtgaagctcaacccaatggggatgaagacgcctgctggtgctgctttcgtcatgatatctgccgcaatgactagattgccgcccaccagagcggaaagaaacaaacgggcgcgacctgtagccgatgaaataaaactggccagatgcggtgccaatatccctagaaagctcaatggccctactgcggtgacagatgcagcgcttaataagacagagaatcccatcagcatcgggcgggaatatttgataggctctccaagggacaaagcaagttcgtttccaagttcatagcgatttaaagcagggccgatgagcaaaatgccgataatactcaataagaataatggcatgaatgatgcgataactgaccagctggcctgaaacaatgatccttccatccatccggcaagatgcagggataactctgttggaagatagagaataagaaaagagctgactgaaccgagaacggacgagacagcaatccccatcagtaaaattgccaagccacttgcgcgattattgccgatgagtaaagtcaaaaacaatgcaacagccagtccaccagccagtgcagcaaggacgatcagtatgttaggtgcggtgggaacgaacgccagcaagataatgatcattgtcatagaaccctgacttatgccaaaaagactggggtcggccaatggattgcgggcaattggttgaagaatagcgccggcaagggccgcacaccaaccaaccatcagccctaataaaatatgcgggatccgtacaacccagagtgcataaaactggtggtgttccagcgaattaccgaaaagcatatgcaagaattcatatacaccaacatccgtaactcccacgcttaaagaaataacgatgagtatgatcgtaatggtaaatagacataacccgacttttatatcgagggtacgcatttgtaatccatttgcgaaacgtaatactctttttccgtctattgcctgaccgaacttcataacaatctcgctgatgttgttgaaagatagcgctttctgataatccagatgaaaaacagcccgcccagaaaatccatcagaataccggtatgaatgacataaggctggaagagtgtctgcgcacaaagattagcgatcaggcagacacttgcccccgtcagagcacaggctggcagcgacagtataaagttctgtccgaccaaaggtttgacaatgtggggtacaaccagccctacgaaaccaataggcccgcatatggcaacagcagaactggatgcgactatggctgcaattaatgcaatgcgcgaaacaagcgttgcattcacgccaatcgaatgcgccttttcgtaaccgagcaaaatgagcgtcagtggacgtgccagtaataaaagcacgattaaggccagcagcccgaaccaccagaaatggtgcagtcttgtgatataaacatgattgatagcccctgctagccagcttaaatattcggttcgcgtttcaggataagcaagaagaacagcattacttaccccaagataaagcatcgctattaatgtgcccgccagtatcagcagtaagtcgcgagaaacagcgttaacacccgacagacgagatattaaaagagatgataaaaaaccaaatagcccacctaaaagggctgctataccttgtgatgttaagtcgagcgaaaacacgattgcaccagctacgacaaacaatgttgcaccggcattaatgcctaatgtcgatgaagaagccagcgggttgcggataagcccctggaaaacaagaccactgcatgccatcaccgcaccgacataaacagagatcagcgcccgtggcagccgctggtataaaatcacggcttgttcatagttttgtggttcagactgggttaaagcggagtaaatttgcgaaaatgaagcaatatttacaccgaaagaaagactaaaaaagaagatcagcagtaataaaaaaggtgcgaatataaagaatagacggggtttcatcgttatactccggaccaattttcaggatggtttatacccggataaggctgacagataaggctgccgttataactgaaaatatcagccggaatatcgaatacacgctggatattatctactgttattgttttactcacagcgcccgcggcaacaacgttaccggtattaagcatcacaacatcatcggcaaaagtggttgtcagatttaaatcatgtaacactacaacgatggtttttccgtgctggagtgagagatcgcggatcagttttagcacggtgtactgatatttgatatctaagtgattgactggttcgtccataagaatgatgtcagtgtcctgtgcaagcaccatcgctacccaggcccgctggcgttgtcctcctgaaagggcgctgacctgagaattggcctgatcagccaagccgacgatttctagcacatcatgaaatagtttgcgatcccgcgcagatgccccgccgaaaagagaatggcgtccacaagcagccagttcgatcaactctcccagtgtcatatagtccgggcagtggcattcctgcggcagataagagatctttcgggccagcgctttgcggcctatccctgcaatcggtttaccttccagaaaaatttccccgcttttcagtggaatgaagcccatgatggacttcaacagtgttgacttaccgcagccattagacccgacgagtgcggtaatgcgtccttgagcaaaatctactgacaaatcatgcaatacggtttttttaccgtaagttgcggtgagattttttgctgtaagcaccaaaagctccttcagttatcttatatataaaaaaaattgcagtgacatggttagggttcaggcagaataccaaaatcaccctatccataacacagcagaaaaatggtggctgttatcgtttatctgacgagcagtcaggttacggttttatcgatggatgaaccattctctgcgtctttaatgctgcatagcctgaaaataatcagcctcactgttattttttactgctcacatacaacatcccgcacgttaactatctggcgggaatcagcaataacgtcattgattaagatatcgattttactactgtcgtgatgatgtggtgtggttattaagtgtgctgtgtttcccgatgttgccagacaatgctttttccagacagcgaccgacgggcatggaaataccaccgtaatagagttgttatgacaccaggcatctatccccgcagaccggaaacgcttaacggcatattgtgccatttccagacagcgtttgacgcggtgacgccaatcggtaaacgagtggctgcgaatagccgcccacatcatcagtggcgtctggccattacgtgaaccggatatagtcttgtcctgagccgaaatgtaatcaatatcaacggaaatacgttcgacgtttttccgtttcgcaacaacaattccgcaaggaataggtgagcctatcattttgtgcccggagacactgattgagtcgataccatcggcaaaggtgaagggttgcgggttatctacaaatggcaagatcatcccacttaaggcggcgtcagcatgcagatagtaattctcgcgggggatacccgcttgctgcatacgctgttgaatgatttttatgttatccaccgccccgcgcaatgtcgtgccaatgttagcaaagatgatgggatggggttctttatgagcgatgattttctgtagcaggtcataatcatctatctcaccggtgggtagggattccactaaacaagatttgatacgcaataatttgacgatttttgccaccgaataatgagtatcttttgaataatagagtgtgccatccgggaataattctcgtcccagatagcagccgaacatattaccttccgttcctccgttggtcacataaccccaactgtcttcaaaaggaattttgaacagctcagcaaagtattccatgacttctttttcgaactcaaaggaatttaaaagatagttgcactccgccccccagtccccgcaattgttgatagagaactgcatgaatctctgtaagtaagagtaatcaaagtctgaggattcaggataaccgatattgaaatgctggtttttaacacagtgataccaaaatgcatctagcctgtccttatcggcaagggataacgtcatttttatctccgatattgtgatgctcttgcagaccaaagctctggaatgatgagttttgaggtaagcgataatacgctcggccaagaagctggttggcaataatgctattacgatatgcgccaagtcccagatcgggagaaccaataccgtgttggaagatctcagcattctgaacgaaaataagaccttttcccttgtcaatgcgttgagcgctaaagtcctctttcacaatcaaatcgccgtaatcatcggtggcaagtaccgtttgtttgagtccttctagccatttgggacgggtgtgcttataacctgtagcagcaataatggcgtcagtctcaatgaaactgacttcatcgagctgctgatgacgaaaaacaatctgtagtgttccggagtcttctctattttccacttgctcaacctcgcagtttgaaacaagcgaaagacccggatcacgaccgccgatggaacgttcatacaaaatatcgaagatatctgcgatagttgagacgctgatacctttataaagccccccttgacccgatgcgatcgtgcggcgtttttctctacttatgctgtggaaatggttcatataagcaggcgtaaagcattcctgaccgagtttcgatgattccatcgggtgaaaaccggcagagcgtgtgatccactggattgaagcaccgtcctctatcatttcaggagtcagtgcactatagagtgccagcacgcattcggcagcactttggcctgaaccaatcacggtgatgcgtcggcatgttgagagttgtgctcgtttgttgatgaagtcagccgaatgaataataggtgctttggtttggatgttagcccattcaggcaggaacggggctgttccgataccaatggcaaggttacggctatagtactgatgtgtcgaacgcgcgtgagtcttactttcaataatgaaacattcagatgttaggtcataagccacatcaatgacattttcaccaaactggcaggagggaagctgttgtgtcacccagcggcaataatggtcatattcctgacgtgggatctgaaatttttcatagtaatagaatttgtaaatacggtcgtgcttatgaagataattcaggaagctcagagggtgtgtagggtctgccatcgtgaccagatcggccagaaatggaacctgcaacgttgtccccggtagcagaagaccttcatgccagcgaaactcgggcttgcgatcgaggaaaaggctggtcagattagagtgtgacgaaagcagggccgccaatccaagattgaaggggccgatgccaataccgataaggtcaatattattcatgttaataatccgaactgttttcaaaagcgcagagatgcgttcagttgctgttcaacctctgcggcattacggcaacgtagcaattgtggtaacgaaaccccaatcgcaaattcctcggagattcgtgccgaaattgtcttcagatgctgggggcgtaatcccatgctgatgaagtcgctggaaacatcaaaatggctatcccgtgattggccgagcacgtccagatagatttccagcactttctttttcattccggtctcttctatctctgtttgttgctcaggggaagaattgtgtcgaataggcgatgcttcatgcacagattccatcaatagactgcgtgctttagggcgatcaggtttgccatttggcgagagcggtaattcggtgacctgtgcgaaccgtgttggaacatgtgatggaggcagacattggctggcatatttgcgtaattctgctcctgacagggcatcttcttttagcggtacataaagtacaccgatggaggtttcaccatgcatttcatcgccataatccaccacaagaatgtgcttaactgacggatgacgaaccagttcattctcgatatccggcaaggaaatacgcaccccgcgcactttgatgtaaccgttgacacggctgtcaaaaacaatgatgccatcgtgacgatagtgtccgtgatcgccggtgcggaatgcccggatgttttctccgttagtatccctgatggtgacaaaattggtctgggtgagcttcccgttttccagataacccagtgcgacattgacgccagccgtatgaatcaggccagtcacacccaccggacagtgattaccacactcgttcaacagaaagtagctgttagcaggcaagggctttccataagggatctggctgatatcatcctgcccaatttcgtgccatatactccatatagttgtttcggttggtccccctaacgaaatcaaccgtactgacggtagaagtgtacgcaagctaccaatcacagcaggtttgatgtaatcgccaccttgtgcaatcaaccgcaggcttttcaattcatcaccctgacggcacgcgaggagcatttccaaaatagcaggcacagagcaccataatgtgaccttgtgtctggcaactaactggttccagcacagagcatccttttcttcaccgacagcgggaagaaccagtgttgcaccggcggtcaggcttccaaaaacgtcgaagaccgacatatcatgatgtaaaggcgttacagaaatgaagacatcctgatgtgttacagaccactctttaagggtactggtaatgacattcgatgttgatttattggataaaacaacgcactttggccttccggttgtccctgatgtgtagagataataggcgggcgcttcacttgatgagagagcgtcaagcggaagtgggagttctgccaaaggttcggcagataagagtgtttcaggcatttcagccggatgttcaataccttctctttttgtcgttacgacaagatccggatggcagttttcaaggagataatgcagtcgctcggagggggagtctgcgtctatcggaacccagatcacccctgttaatgcacaggctagagtgactgctgtgtgctcaggcccacggtgcaggcaaagggcgacaatgctaccctcggaaagccctttctccctgaaagcgcccataattcgacgtacatcacgcccaagatcagcgtagctgatatgtctgtcaccacagatgagtgccgttttggtgtttttattgtcgaaaatattggcggctatccggctgagaaattgcccgcagtgaaaatcagcttcgacaccgtttaatcgatagtggtctgtatcgataatattctgcgctgaaagggtgaatacgcctgacgttacgatgatttgtatcgccttgcttagagcccgtaaaatgtcctgaacgaaagcgggttcaattgcggaagttgcataatcaatgtcaaaaataagctctttgtccgcattggttgaaaaacggatatccattgcgacttgtggtgtctgagtcagaccgctatgcaactgcataccactatcctgacctgataccggccatgaaagcccgttggtaatgacgacaggtaaaacagggccagcaccatttttttcaaccagcatacgggtaatgtctatacctgaaaatgcaaggtgttcaattccttccatcacatcgttctgtagggtgctggcccgttcagaaatgtttccctgctcagcatcccagttgaccacaataaaacttgaacgattacacaaaacaccagagatctgcggtgccacgggaataccgatagatagattcttctcttcgctccaatgggacagaacctcaagcactagtgccataatagtggaattcttaaaaagcgtttgcttagtaccagcttttgatactgcggcataatcttcacaggttacaatcaagctttgtcgtgcgtagcgtgatgtgcctatttgcaccaatggttttatccacggaagtcttggggcgccgctgacggcatcaagttttgttttccaatacgcttcatctgttttgcgcttttcagagatatggctctcattcaaggaggcatcagtatccgcgacaagtgaaaccttgccctcgaaaagttctaccatcagcgcagctatcgagcgcccatcaaggatcagcgcgtcaaaacgaacaaacgcaatcagctcatccttttctaactgattctttggcaaacggcattctggtaaacgaaataatgttatatcccacggagagcgatccaaattgcaaagtgtatgggcatattcttcacggtggttttctacatggcggagagcctcttcccgtgacatagtactcaggtcgacttggtgtaaattgatatctgcatctgcacaaacatattggacaagtcgcttggcatcgattcgggtgcgcaaactgtcatgacgctgaaccatgttctccagattatttcgcaaatgcgccaattccatgcttccgcgatactcacgaaactcttgcatcgcgacgccacccagcggcaattctgcccgtcgcccaagcagatacgccagttgaagaggggttaatggtttttccgtgttatccatcttttccatattgtttttcaggccaatattgtttttcagatcaatttgcgcagtggaatcagcggatttgcgcctgattattgatgatagggctgcgacgttattgggtgaagaatgtattgcttcatcgaatcgttgtgggtgtgtggcgatttcacggacgaaactgacaaaactgtcgaacattgaggttatccatgcttctggcagtatatccagacgaatgtcccaattgatgagaataccgccatcggcagatgccacttgtgcatcaagtgcaacttgcgggccttgtgaaataacccagttcatagaaccaaatgcttgcctgacgcgatctgagagaagttcttctcccgacatatccaaagcggcggtgaagacgacaggggttaattgcgttgcaccatgatgccgggaaagatcacgcatcagattcacccccggataagctgagtgagcgagcaaatcggtcagttgctcgccaagctgttgactaaggtcagcagggctttcagctctatttatatcaacgccgaggataagcacgttagagaaatcgccggcaattctttctacatcattcacatggggagagcgccagaacatcggcacattgaggcgaaaccgcttatctccggtatgccttccaagaataatggagaaaagccccagcatcaggctcgacatggttatcttgtgtatacgggcaagtcttttcagcgcctgacgttcgtctggctggagccatgccgccagacgatggctgtgaacctgatcgggcggagttttgttaataggcagagcaggagctggtggaatatgtggaatacgcgaacgccaccagattctatccctttcacgggccgctttcaggtggggatcggtgcgtacctgatcgcaccattcgaaatatgatgctactaccggggctggctggtctggattatcataaaatatcgccagatcttccattaatatcctgaaacttgaaggatctatagctatcatatccgtatcaatatgcaggcgaaattttccgtcatttagcagactgagcgagaaccgtgatgcctgaccagaagaaagatcaagtttatgatgagtccacttcgcgcgtttaacgagaagtaacttttccacttcttgttctgataatccgcgaaaattgtcgatttccagcgataattgctcaccggatgaagtcacagactgaagtccctcagcatcgacacagagtcttagcataggatgtagagaacaaacgcgttccagagcctgtttaaatcgactcacttcaatgtcatcgccgtcgaactcagcataaagatgcgcggcaacgcctcccagatcggcttgaacatgacgcccgacccagtaagctgcctgcattgacgttaattctctcatagtttattcacgtagttgaaaaatgctgttaataggtacaagtataaaaataggttgaatgcgagcagactctggcgagcaagatcatgttattgcttcgacttagcccacttttccacggctttaagcgtatgttccgcactggcaaacgtgggagtaaaaacttcacctgcgttaagaaaaacaatccgtttttcgcgggcgggtttcatatagtgagcccatccggggacaacccgatcaagcgcggagcgaatggccttctcatcgtgttccttgctgccccagctattgagcacgaccagaacgtcggggttaagttcgcctaatttatctgcgctcaactgtagaagtagttgggatgaattgtcggaaaggccgctttgtttcgagagatttaggcgggtgaaaccaagatcttccaatgcctgagtgaaaccggttgcttcgccaacgacattgatctgatctgtgacaaggatcggcagataagtctgtttagccggattttccggcaagagagcgcgcgttgcggcaacgcgttgcaaatacatatcccttcgtttttgaaagctctgctcacgtccggtcagttgggccagattttcttcgatatgaaaattgtgggattttccagaaaggaaattttgcagatagacaggggcgatcgttgaaagttgttttactttgtcgatatcaaattctgttccgataatcaggtcgggcttcagcgcgtagagtttttccagatcaatctcccggccagctccgatgccttttggttttgtgcgcccttcacccagtacagtatcgacgaaatctgtcccaagctgatagataccatcttccgtgcgcccgtaactgcctacaggttcaacacccagctccattaagggcaggccgatagctggctcgctcataaccacaatacgctgtggatcttcaggaataacgacatcccgccccaggatatccgtaacctgccgtgatgcggcaaaggccgatgttcccatcaggcacattaatattacagtaatagcagatcgcataatgttttctctttcagaacggatcagggttatatgaatcagtcagctaacactgaccgactcacgttaatcatggttgctatagatatcacacagtcacttgagcaagggggaggcttaaggccccaggtgtggtgaagaatgagaaaactttctctattgtttcacagagacgttggacaagttcttcagggtaacgctccttacggtaagtaatgaccagccgcatgatcctttcgccatcaatgacatcttccataatctcgaactgaagaccgaacatggattcctttttatcgggatcaatttgtcgatagcgtatatcgttaccaagcgaggttttaagtacaccgttcagtgcattattggcatggatctgaatataaacgtcgaagattagcccctcctcaggtgacatccccaacgattgctgaataaggtcgagcggcacatctgcatacggcattgaattattgattgtatctctggtgtcttcgatcagtgtaccgacgggtttctcaggatagaattgcagccggtgtgcaaccatggtggtaaaatagccgactgtttcataagtatcatgttcggttctacccgatgcagaagtacctatcacgatatccttcagattaccgagcttatgcagagaaagcgcaattgccgcgtagacgatactgaacagggatgcgttatttttccgggcaaaggaataaagatgatgagtggtttcaggtttgggtttgtactcgatccagccggctttcgatgaactttcatgcgctgcaaccgttttctggttgtcagataaggtaagttctaatccgcgagttgcatcacgcaacatgttcgtccagtaatcgagatgtttttgattaaagccgttcgcctgctgttgcagggcaaattgatggaatgataatacgggttttttccagataggggccacaccggaagaacgtgataaataagcctgggagagttcatccatcagaacatttagcgaccattcatcaataaccatatgatggaccagaagcgataatatctgacgtccggtttccggattgcggagtagtcgtattctgattggcaattcacgggaaagatcgaacgtataagccgcttcgtcatcaaggtgtacaccctggttttcgtgactgaaccagaaccatttataatcactcatgtccgacatcgtgacaatctgttgataaacctttccattttgaacatagaacagggtacgcagactggaatggcgttctatcagatcagaaaaaacctgttcaaggattgtttcatcaacctcatcaagaaaatccagagcaaatggtaaattgaaaatagtgccaaattcataggccttataggcatcccaaagcgaggtttgggcaagtgccaatggggccgttaaatgatcgttctgtgccgaagagatggagcctgtatgctgattttttctgattgcacgggatgccaaagcagtagctgaaggatggctgaagaaatcaccaaagtgtacttccagaccgtgcgtaccaagcaatttaccgataatacgtgttgccagcagggaatgaccgccacaatcaaagaaatcatcctccagtgtcatatctgtaatcgccaacgcttcacggaattctgacaggattattgttgctatttcatcagtgtcagcggagatctctttgctggtggcatcatgcgtagaaggtatatctgagtcagacacagattttgtggctaagctcatcatggcatcttcagtacctttcagaaaagacacaaaacggctcatcaagaactcgccggcatggctggaaaccgactggccggttgttaatataagactaatttcctctgtactttcatactccattgccagctcaaaatcgggtcgcatttcataggtgggtaacagaattgactgactcagtaatctctgttgttcaaccagatcgttcgggcgagataacaaccgaacatatacctccggttcatcatcctctgttacaggagcaccggagaaaaaattgtcttcgtctggttgagcctgaagtttatccatgatggagctgataatctgtgtttccgccatatcaggttcgataataaggcgacggaacccgtccggctgtaacagacaaagtgcaagttttttctggcccccgagcaaagcgatgaaccgggcaaatcgggctgaaataagagccgacacacagtgaggtaatttgtcgcgaggaaggaattcttccagttcattaattttaagcccggttttccaacgcagtgcgagcctgtctttattcaggtcagtttcttcaccaaaagaggagtgaatggaggcattctcatgattgcggcagcataacaaggaaacagcagaagttgcctttccatcgtaaggtaataaagaaacacgttttagaggtggaagttttactaagtgaccagcataagcgcggatcagcatttcgataatttcggtttcatgacaagtttgcgccagtatctcgtgcaagataagcgctaaaataactttatcatttctttgtattatcaatatattgaaaggggagttctgttcagggatccaggcagatgcttgcacagtcagtattttcttgagcatgtctgaatgtgaaccggcatggaaaaactcaaggcacgattgccagcttgtcgctggggttttatacaattcaccgtcatcatttaactcataacgtacgttcaaatccggtattgcctcaataacagattggacagcctgtaccatcattgaaatattaacatcattatgaagctgccatgctgagagctgtttaagtacgcggtcaggattctgttgctggagtaaccagatatgttcttcataacgggatacggctacgtgcaataactttcctgaatcaatgttcaacataaaaaatcccgctttatcaaactaattagttgtttttttaaatgtattaatacgggctgacagtcattaaatactgcatcggaaagccagatgttacccgcagaatatgtgctgtaacggcccgtatttgaagaaatactaacaaatatgtaattgacaaattagaaggttaacataatattacctgcctgtgaacagtaatgataatgataatgataatgataatcatcccgaaaaagacagtaactcccctagctatcaaggcaggaaatcagattttttcacgcaaaaaaatgttacttaacagtgcaattttgctttctttatcctccttaggaggacaagcgattgcgtctgatcaagcagagaaaaataaaacgaggaacgatgaagccgatatcatcactgtaaccggtgaaaaaacggcaagatcactacaaagaacggcaagttcagttaccgttatctccagacaggagatacgaaataagcccgaagcgacaaccatcggtggtatgttgcagggtacacccaatgtgctttataccagtaatacagaggcaccgagtattcgcggtattgagaccaacggcccttttgtagggggaaatacttttctttccaaaccgataccgcgagcaaccaccaatgttgaatgtcgttttattagtgccgcggaatttaacttgggaaaaaggcctatttgggaagtgaatttaaataaaatttttccggggcccacaaaaccacaacacaggggagcaaacatttt

SEQ ID NO: 2339 - DNA, 18490 bp, Xenorhabdus sp.; identical to SEQ ID NO: 2338
  CDS (4915)..(5010)

SEQ ID NO: 2340 - DNA, 18490 bp, Xenorhabdus sp.; identical to SEQ ID NO: 2338
  CDS (10921)..(11031)

SEQ ID NO: 2341 - DNA, 18490 bp, Xenorhabdus sp.; identical to SEQ ID NO: 2338
  CDS (18234)..(18488)

SEQ ID NO: 2342 - DNA, 18490 bp, Xenorhabdus sp.; identical to SEQ ID NO: 331
  CDS (16586)..(17020)

SEQ ID NO: 2343 - DNA, 18490 bp, Xenorhabdus sp.; identical to SEQ ID NO: 331
  CDS (14006)..(14887)

SEQ ID NO: 2344 - DNA, 18490 bp, Xenorhabdus sp.; identical to SEQ ID NO: 331
  CDS (12055)..(12822)

SEQ ID NO: 2345 - DNA, 18490 bp, Xenorhabdus sp.; identical to SEQ ID NO: 331
  CDS (10853)..(11803)

SEQ ID NO: 2346 - DNA, 18490 bp, Xenorhabdus sp.; identical to SEQ ID NO: 331
  CDS (9310)..(10665)

SEQ ID NO: 2347 - DNA, 18490 bp, Xenorhabdus sp.; identical to SEQ ID NO: 331
  CDS (4754)..(9289)

SEQ ID NO: 2348 - DNA, 18490 bp, Xenorhabdus sp.; identical to SEQ ID NO: 331
  CDS (3741)..(4664)

SEQ ID NO: 2349 - DNA, 18490 bp, Xenorhabdus sp.; identical to SEQ ID NO: 331
  CDS (12963)..(13799)

SEQ ID NO: 2350 - DNA, 15281 bp, Xenorhabdus sp.; identical to SEQ ID NO: 230
  CDS (5265)..(5438)

SEQ ID NO: 2351 - DNA, 15281 bp, Xenorhabdus sp.; identical to SEQ ID NO: 230
  CDS (5486)..(5797)

SEQ ID NO: 2352 - DNA, 15281 bp, Xenorhabdus sp.; identical to SEQ ID NO: 230
  CDS (5918)..(7315)

SEQ ID NO: 2353 - DNA, 15281 bp, Xenorhabdus sp.; identical to SEQ ID NO: 230
  CDS (7351)..(8136)

SEQ ID NO: 2354 - DNA, 15281 bp, Xenorhabdus sp.; identical to SEQ ID NO: 230
  CDS (13492)..(14976)

SEQ ID NO: 2355 - DNA, 15281 bp, Xenorhabdus sp.; identical to SEQ ID NO: 471
  CDS (15052)..(15279)

SEQ ID NO: 2356 - DNA, 15281 bp, Xenorhabdus sp.; identical to SEQ ID NO: 471
  CDS (14565)..(15065)

SEQ ID NO: 2357 - DNA, 15281 bp, Xenorhabdus sp.; identical to SEQ ID NO: 471
  CDS (12496)..(14103)

SEQ ID NO: 2358 - DNA, 15281 bp, Xenorhabdus sp.; identical to SEQ ID NO: 471
  CDS (2516)..(6496)

SEQ ID NO: 2359 - DNA, 13159 bp, Xenorhabdus sp.; identical to SEQ ID NO: 87
  CDS (33)..(461)

SEQ ID NO: 2360 - DNA, 13159 bp, Xenorhabdus sp.; identical to SEQ ID NO: 87
  CDS (477)..(869)

SEQ ID NO: 2361 - DNA, 13159 bp, Xenorhabdus sp.; identical to SEQ ID NO: 87
  CDS (1230)..(1871)

SEQ ID NO: 2362 - DNA, 13159 bp, Xenorhabdus sp.; identical to SEQ ID NO: 87
  CDS (1875)..(2357)

SEQ ID NO: 2363 - DNA, 13159 bp, Xenorhabdus sp.; identical to SEQ ID NO: 87
  CDS (2577)..(2708)

SEQ ID NO: 2364 - DNA, 13159 bp, Xenorhabdus sp.; identical to SEQ ID NO: 87
  CDS (10741)..(13080)

SEQ ID NO: 2365 - DNA, 13159 bp, Xenorhabdus sp.
  CDS (7553)..(8971)
aaaaaaatttttagattagcgggtaaccaagtttccctggtgttggcgcagtattcgcgcaccccaacttcggttggggttatttttttgtagcgcccgttaaccagtttcttaatgtttccgtatcatttttccattccagatttaactcatctacccactcttgtacgttatcccaccacgcgggcaaatccggtgactggatctgctgtgctaactgttgcagatgacgtaatccgacagagccagcagcgcctttaattttatgagcctcttctgcaatccctttttggtctctcgccgtcatatttgaatccaatagagcaaggtagcctggcatcatgtcctcaaaaatggtcaggttatcgatgaccattttcggcccgaccagatcgatatactggttaagcatctcagtatcgagtaactcttcctctttcttcggctcaatgaattccggtaatacagtttcagcctccgctgacttaccccagaatttttccattaccgcagtcagttccttaacagaaagcggcttactgagtacttcatccatgcctgcatcaagatattcttttttgtctttcaatacattggcagtcagcgcgatcaaaggaggaagcgtgtgattcggataacgttgatgtaattcgcgggcaacatccagacccgtcatatccggtaactgaatatcaagcagcaccagatcatattcatcaggatcaaacatatccagagcatcgccgccagtcatagccacatcgacactattacccagtttctccagaacagaacgggcaacaatcacattcagttcaatatcctcaaccaatagaatattgagggctggtaatggcaatgcgtcttcttcttccgccccttccgggttttcatcaatcgcaggagcgatgatagataaagtaaaacaggagccttttccgactgtactattgactgtgatatcgccacccatagcctgtgcaagccgtttcgatactgccagcccgatccctgtccctgttgccgggcgaccaccagcactgtctcgtacctgataatacatggcgaagattttttctaattcatcagcagggatgccaataccggaatcagtcacttcaaacagcaggcgatcccctttttcacgccagatacgaaccctgatctctcccttctgggaaaacttcacggcattaccaattaaattccataggatctggcgcaagcgggttccatcagccagtattctggccggtagtggcagctcaggttccaatacaaaacggatcccttttggctgcgccagcaatccggatatgttctctaaatccgctataaaactggtaaaatcaatgggctgactgtctagctggacttttcgtcgttcaatcttatccaactcaatgatgtcattgaaaatattacccagcgtgattgcgctgacatggatcgttttcagatagttgccctgttctggtgtcaggttagtatccatcaggatacggcttaaaccgacaatgccatttaaaggcgtacgaagctcatggctaatcgtagagataaaagtggttttgtccctgctggcattctccagcgcatcctgataacgcttacgctcggtgatatcgcgaccgaatcccatcaggccatgcctcttgccgatacgatcataaaaaggtacttttctcagctcaaaacaggctttgcgcccatccggataaaccagccactgctcataggtcagtgaaacattgtgccgaaagactttttcatccgtctccattaccttgttggcaatttctttatcgtagacttctgtcggtgtcaggccaatcagttgcttttcacttttaccggtcagcagctccattgcgcggttacaaccggaaaattcattgtcttcgttgcggtaataaaccagatcaggcgaagcatcaagaaacgaacgtaacaaaacggattgttgttcaagttcaatctgtgttttttcgcggtgctccatttctaatttcaatttatccagcaggaccagatgcgcctgttccgctttttctctttcactgatttcctgattcagttgagtaatattgtcttttagctgttgattcagtttggcatcacgctggcgcatttcctccagctttgccaccagactggataaacgctggcgtgactcttccaactgttccacaacaatagagagaaaatagacagcccacggtgtgattaataaaccaaagaaaatagaacggattaagtcaatacgctgcacttccccatgcaagacgaacgttacggccatttgcatcgtcattgccagaattaccagaacagacgccagtagtaatgaaaaacgcacaagcccgagtttcatcattaaatcaacgtaatattgggcaagccccctgataaacttcataacagctccaagtaaaatcaccaaattgcatcatagcctaaaaaaagcctgacttcgttaggggatattatttccaattctcaaaaagaataaaaaagcataaaaacagaataataaatcaaatctgaatttaattacccacagcagactaaaaaacaaacaatcatttatacttaacaaacataaaatacataactacattcttacaaaatcaataaaaaaagatgaataaaccaataaaaatcgattttaaagcacatttaaaacgcactttaggtgtagaatggtgatataaatcacatcacatccaagacatgacacaggtcacaaaacggaccattaactaatatatacaatatattcaattaattaacctaattaccagctctaagaacacctttaaacacaatttgacctactttatttttctcgctaagttgggaattcactgaaaatcacctgctagttttttatctagctcatatttatgcagtgcccttatacagaaacacaacatcattttgctgtctgttattagcggtgaatggtactgccgataagacaagcaatatttgactgagggcgcaattcagacgcctgtagaaataatgatttatatcatcacgtaattgatgtgagagtcggacagaacttgagggatttaccatgttgtatgacaaattacaggaaaaagataactgtggctttgggctaatcgcacatattgaaggggaaccaagccataaagtggtgcgtacagcgatacacgcattagccagaatgcaacatcggggagcaattctggcagacgggaaaaccggcgacggctgtggtttattaatgcaaaaacccgaccgttttttccagatgctcgcgaatgaacaatcgtggcgactggcaaaaaactacgccgtcggtatgctgtttttaagtcaggatagccaaatcgctcaggcatgccgcaatattattgagcaggagttagaacatgaaaccctgtctatcgctggatggcgggaagtccccaccaatcaggatattttgggtagtatcgccctgtcgagccttccccgtattgaacagatctttgtcaacgccccagccggatggcgatcacaggatttagagcgcaggctgttcattgtccggcggcgcgtggaaaaacgtattactgataaagatttttatgtttgcagcctttccaatgtagtcactatttataaagggctatgtatggcggctgatttaccacgcttctatccggatttagccgatttgcggatggaatctgcgatctgcctgttccaccagcggttttcaaccaacaccgttccccgctggccactggctcagccgttccgttatctggctcacaatggagaaatcaatacgatcaccggaaaccgtgagtgggcaagagcaagagcttataagtttcgcactcctttgatcccggatttacaaacggcggctccttttgtcaatgaaaccggctccgattccagctcactggataacatgctggagctgtttctcaacggagggatggatttaatccgcgcaatgcgtttacttgtcccgccagcatggcagaacaacccagatatggatgatgatcttcgcgccttttttgattttaattccatgcatatggagccgtgggacggccctgccggtattgttatttctgacgggcgttacgcagcttgtaaccttgaccgcaatggattacgtccggcccgttatgtgattaccaaggataaactgattacctgcgcttcagaagtgggaatatgggattatcagcccgatgaagtcgtagagaaaggaagggtcgggccgggcgaattaatggtgatcgacacccgaaaaggccggattctgcactctgcggaaacagataacgatttaaaaaaccgtcatccttataaagagtggctggagaaaaatgtcaggcacctgacaccattcgaaaaattaccggaagcgcaggttggcaaacgagatttggatgatcgtatgctggcaacctatcacaaacagtttgcttacagtaatgaagagctggatcaggttatccgcgtactcggtgagaatggtcaggaggcaaccggatcaatgggcgatgacacgccgttcgccgtcctttccagtcgcccgcgtattatctatgactatttccgccagcagtttgctcaggtaaccaaccctcctattgatccgctgcgtgaagcccatgtcatgtcgctctccacccgcatcggcagggaaatgaatgtcttttgtgaggcagaaggtcaggctcaccgcctgagttttgaatcaccggtacttctttatcctgattttgtgcaactgacacagcagcaggaatcttattaccgggcagaaacactggagttaacctttaatccacaggagatcactctcaaaaatgccgtctcagccctgtgcgaacaggccgaaaaacttgtccgtgatggtgccgtcttgctggtgttgtctgaccgccatatttctcctgaaaaattaccgatccctgcccccatggctgttggggctatccagcattgtctggtggaaaaaagcctgcgttgcgatgccaacctgatagtcgaaacggccagtgcccgcgatcctcaccactttgctgtgctgcttggatttggggctaccgctgtttacccttatctggcgtacgaatccttaggcaaaatgatcgatgacggcacgctcacgaccccatacgcccgcgtgatgctgaattatcgtaatggcatcaataaagggctatataagatcatgtccaaaatggggatttccacaatatcctcctatcgttgctctaaattgtttgaagccgtcggtttgcattccgaagtcacagatatttgcttcaatggtgttgtcagccgtattgaaggggctgatttcagtgattttgagcaggatctgcataatctctccaaacgggcttggctccaccgccatactatcgagcagggagggttgctgaaatatgtccacgatggagaatatcacgcgtataaccctgatgttgttagtacgttgcaggcggctgttcacagcggtaattacagcgactaccaaaaatattcacaactcgttaatggacgcccggtaacgacactgcgcgatttactggctatctcaccaaaaggtgaacccgttcccattgaagacgtcgaacccgcagaagaactgtttaagcgttttgataccgccgcaatgtcaattggagctctgagtcccgaggctcatgaggcgctggctgaagcaatgaatacactgggtggttactccaattcaggggaaggcggagaagatcctgcccgttatggcacgaaaaaagtctcccgcattaagcaagttgcctccggacgctttggtgttacaccggcttacctaagtagtgccgatgtgattcagattaaaattgctcagggagcaaaacccggagaaggcgggcaattaccgggagataaggtcacgccttatatagccagactacgttactcaatccccggtgtgacacttatttcaccaccgccgcatcatgatatttattctatcgaagatttagctcagctaattttcgacctgaaacagatcaaccccaacgcactgatttccgttaagctggtttccgagccgggagtgggaacgattgccaccggagtcgcgaaagcctatgcagatcttatcactatcgccggttatgacggcggaacaggagcaagtcctctctcctcagttaaatatgccggctgtccctgggaacttggtctggtagaaacccagcaggctctggttgcaaatggcctgcgccataaaatccgtcttcaggttgatggcgggttaaaaaccggtgtcgatattattaaggctgccattttaggtgcggaaagttttggctttggcacagggccgatggtcgccctcggctgtaaatatcttaggatctgccacctcaataattgtgctaccggagtagcaacacaggatgagaaactgcgccagtcccattatcacgggctaccggaacgagtgattaattacttccactttattgcgcaggaaacgcgtgaaattctggcgcaactgggagtccggaagctaacagatctcattggccgcacagacttacttgaaatactggaaggtatctctgccaaacaaagtaaactcaatcttaaacctctgctggaaaccgtgcagccccacgaaggcaaggagcaacactgtacagaagataatccgtcttttgatccgggaattctgaataaagcgattgttaaacaggctctgccttacgtagaaaaatcgcagagtaagtcattctatttcgatatccagaatacagaccgttctgtcggtgcagcattatccggcatcatagcaaccatgcacggtgatcaggggctggcgggtaatcccataaaactgcatttttcaggaacagccgggcaaagttttggcgtctggaatgctggcggggttgaactgacactcaccggcgatgccaatgattacgtcggcaagggtatggctggtggaagaattgtgatcctgcctacgggtggttcagcattcaaaagtaatgaagcaactattattggcaatacctgcctttatggggcaaccggcggaaaaatctttgcagcgggtcgtgccggtgagcgctctgccgtatgaaattgaggctccatcactgtggttgaaggtatcggcgataatggctgtgaatatatgaccggcgggatagtctgcgtattaggtgatactggcgttaacttcggcgcaggcatgaccggaggattcgcttatgttctcgatgaatccgatgacttccgcaaacgggttaatccagaattagtcgaagttctctcaatcgatacccttgccattcataaagaacatctgcgcggattaatcactgaacacgttcgtctgaccagctccccgcatggtgaaagcattctggaaaactggtcacagtgggtcaataaattcgcactggttaagcctaaatccagtgatgtcagcgcgctgttggggcatcgcagccgttccagcgcagaattacgggttcaggcacagtaggagtcaggaatgagtcagaatgtttatcagtttatcgatctacagcgtgtcgatcctccgaaaaaagcgctgaaagtccgcaaaatagaatttgtggagatttatgaacctttttctgaaattcaggcagaagctcaggcagatcgatgccttgactgcggtaatccctactgtgagtggaaatgcccggtacataactatattccgaactggctgaaattagccaatgaaggacgcattattgaagccgcggagctatctcatcagaccaacagcctgccggaagtctgtgggcgggtttgtccgcaggatcgtctgtgtgaaggtgcctgtacgctgaatgacgattttggcgctgtgaccatcggcaatattgagcgctatatcaatgataccgccattgcaatgggctggacacctgatatgtcacaggtgctcccgaccggtaaacgggtggctgtcattggagcaggcccggccggactggcctgtgctgatgtactggcccgcaatggggtacaggctgtcgtttatgatcgtcatcctgaaattggcggtttactgacgtttgggatcccggcattcaaactggaaaaagaagtgatgagccgtcgccgtgaaattttcgccggaatgggtatcgagttctgcttgaacacggaggtaggtaaagatgttgatcttgctgagctcacaaagcaatttgatgccgtttttttgggagtcggaacttatcagtctattcatgccggtctggaaaatgaaaatgccagcggagtatatgatgccctgccctttctcattgccaacactcgccagttaatgggctatgaagaatcaccagaacagccctatattgatatgaaaggtaagcgggttctggttttaggtggtggtgatactgcgatggactgcgtacgtactgcggttcgtcagggagcaagtcatgtgatttgcgcctaccgacgggatgaagagaatatgcctggctcccgccgcgaagtgaagaacgcccgggaagaaggcgtcgatttccagttcaaccttcagcctatcagcgttgaaatcaatcataatgggcatgttaatggggtcagaatggctcggacgcaattaggtgaaatggatacaaaaggacgtcgtcaggcggaactcatccccgattctgagtttgtcattaacgccgatgccgtaattatggcatttggtttcaagccacattctatgacatggctggatgaccatcagatcaatcttgacagacaagggcgcattatcgctcccgaatccagtattttacccttccagaccagtaaccctaaaatcttcgcgggcggggatgctgttcgaggctcagacttagtcgttactgccattgctgaaggcagaaaagctgcctctggtattctcgactaccttgaagtctgatttcattttctcccgaactcttctccggtcttttggccggagaaactcctgccaaataatcgacactcgcatcattatctttttactaccataatgattatgtttttttacattatgcgattattcctatatcccaaaaacaaatatttaaatttaatatcctgaaaattaccaaataaatatttttcctaaaaaaaacatcaggaatacagtgtagccatgaaataaaattccgtttattacaaaaacaacagatttaacatctgccatctcaaaccgattacataataattaattgaacaggatttctgggtgcagaaggtaaagcgctcgattgaaatccggaagatataataatagagagaaataaatgcgtttattaactaaaacatccctgttttctttcgtactcttgattagttttccttctatcgccggtttatccacgccaaaggagattattcagcaaattaccgaaaggggagtgaattccactgttgctgaaataggtgaaagaaataaaagaaatgaaattgctaaacttattgctaccggagatcctgaatggttagaagttgcctttcggttgacgcccaatacccatcgggaattctccaatcagatctttgactccttggcacttgctctgctcaataacccggttgaagtcttagctcaggccaacaaatacagacctaacttaacaaatagcatctgtgatctttcattgacagttatagcagagaaaaacaagcataaacttatcaaaggcatagttgcaagtttaaagaacgctgaaaaatccgcaaaaagaaaagataaagaaaatatagaaaggtgtattttgaagttgaaccaagtatatccaagatatttttaatatacttctaactggttagtccatttttctatccccgccacataagagtgattgaagctgagtttagtttcaatcctgatcattcttactgttttagaaaaagaaatcacttcaaataatttctcacttctttaaaagctaatttccaattcaacatataaaaatttttcttaaagagatatttcagaaaatagggtatgagtgaaataagataatatttcatacgtaaattacagatttgcccctcccacttttaagtaaaatgcatatcacaacattaaataataaccaattaaaaattcattacatgatataccctgtggatttcaacgtgcagcaagcaaagccgtaaattgaaaaatatggatataataattgggagagataaatgcgtttactaactaaaatatccctgctctctttcatattcttgattagttcaccttctgtcgccggtttatctacaccaaaagaaattattcaacaggtgaaggagaggggtgtaaattctgttgttgctgagataggtgagagaagaaaaagagaagaaatagctgactttattactaccggagagactgagtggttagaagtcgcttttcaattagttcctaacatccaccacgatttttccaaccagatctttaattcattatcctttgctttaattaataatccgattgaagttttagcgatggcagataaataccagccatcgtcaatcaataacatctgcaatatcccatcaacactaataggaacacaaagcaaagaaaaatttgttcgggatgtaactgtaagtttaaagaaagccaaaacatcagcaagcagaaaagatgaagaaaatatagaattgtgtcagttcgcgttaaataagtcttatgttgcatttttataaaaaatagaggagagaatttctcctctattttttcgtattacgtttataacgctttattttacaacacgtaacgttggacgaccttttggaggctgaggtggctcatcatccggcgggttatcatcatgagatgttttcatatcacgaatcaataccagattatcggctaccggagactctgaaatctccaactcggagtctgtttcataggcgatttctggctcaaacatcatccctgcaccgttttcacgggcataaaccgcaatgacagcagacataggaacagatacctgacgcgcgacaccaccaaaacgggcattaaaacgaacttcgtcatcagccaattccagattaccaaccgcccgtggagcaatattcaggattatctgcccattctgcgcatattccatcgggacgttgacaccatattgagtcacatccacaacgatatgcggagtcaaatcattatccagcagccactcatagtgtgcccgcagtaaataagggcggcggggagacatttgagtcatatccatacattaaccccgtgactgtaaacgtatttcacgctctgcttctgtcaatgaagccagaaatgcgtcacgctcaaatacacgctgcatataaacctgaagatctttggctcccgggccagacagctcaacgcccagcacaggcaaacgccataacaacggagaaagatagcagtcaaccagactgaactcatcactcatgaagaaaggcatttctctgaaaatcggtgcgattgccagcaactcttcagcaaggcgtttccgcgcagcattagcttcctgagcacttccttcctgaattttatacatcagggaataccagtctttttcaattcggtgcatcatcagacgactggagccacgtgcaacagggtatacaggcatgagcggtggatgggggaaacgctcatccagatattccattatgatgcgagaatcataaagagtcagctcacgatctatgagggtaggaaccgtttgataagggttcagatcaatcagatcctgaggcaaattgcctgcttcaacgtgttctatctcaacgctgacccctttttccgccagtacaattcgcacttgatggctaaaaatgtcggtcgggccggaaaacagagtcattaccgaacgtttgttggcagcgacagccatgaaaacctccaagtttatctaaaaaaaggaacgaacagcccttcaatgaacaatggctattctcgctcatattctcatccggtttcgcacttattatccgaggattattaagacaagtcaggcaaacgcatggataaggcaaaaaattgtcactagtctaccagattttgaacattttgtggggaagtagattgagaattaatgatgatatatcggagttcagggaattatctctgcaatatgctctttttttctgcaaaaaaagcgtattcactaaggaaataaaactccgcaataaaaaacccgccataaacatggcgggtttcaacattaatccaatgccaccgtagtgacaaaaaattaacgcttggagaactgtggacgacgacgtgctttgcgcagacccacttttttacgttcaacttcacgagcatcgcgagtaacgaagccagctttgcgaagatcagaacgcagagtctcgtcataagccatcagtgcacgggtgataccgtgacggattgcgcctgcctgaccagagataccaccacctttaacagtgatgtacagatccagtttgcccagcatgtcaaccagctcaagtggctgacgaacaaccatgcgcgcagtttcccgaccgaagtaatcttcggggctgcgttggttgatgacgatgttaccgctacctggcttaatgaagacacgagcggatgagcttttgcggcgaccagtgccgtagtattgattttcagccattgcctataatcccgattaaatgtccagaacttgtggttgctgtgccgcgtggttgtgctcgctgcccgcataaactttcattttacggtacattgcacgacccagaggcccttttggcagcatgcctttaaccgcgatttcaatgacacgctcaggacggcgggcaatcatctcttcaaaggtcgcttgcttgataccaccgatgtggccagtgtggtgataatagattttgtcagcacgtttgttgccagttacagcaactttctctgcgttaacaataatgatgtaatcaccagtatcaacgtgcggagtatattccgccttgtgcttgccgcgcaggcgacgagctatttcagttgcaagacggcccagagttttgccatctgcgtcaacaacataccagtcgcgttttacggtttctggtttagctgtaaaagttttcattaaagcttacccaattataactttagagcacg

SEQ ID NO: 2366 - DNA, 15621 bp, Xenorhabdus sp.
  CDS (580)..(1074)
agataacctttcaccgattttgtattagtcggatagttaattaatttggaattccattttttatctgcaacaacagcataacgtttttcagctccaagtaaccataggaataagttattcagtttcatcgggctgggtttagcagaaatagcaatgtcaaagtgctttttgcggaatttgagagcggttttggcaatagaaagatatttattccctttaggaaggatattgatgtctacatcagggcatacatacttggcgagatcatggttgccctgttctatgaataggctaatctctgcatttgggtattttttctgtaaaaactttattaatggttgggtacagataagatcaccaagcccatttctgcgtaatatagctattttcatattgaataataaaagaaaactcttttttaatgatagatttagcatctaaaaataaacgatttatttaatatattcaacgtattatgttttaaatttcatattcctgttttttatgacaacagcatagtgtacttacggtaattgactataatctaatctatctgatgctcaccgaaggaaaaactcaatgactatgttgaaagagagacaacatatgattgtccgggctatgaatgataaaaatcatgtaatgaaacctattagtaaggaaaaacttcaattcctgggcgaagcatttggatgggatcagttggctgacgatataaattatttagtaaaagttggattagtgaatcatttcgctatccattttgatgataatgggggttatggttttaaccctgattcaatggcgcttactgctgccggtgttgattacgccaatatggataccattgatgatgagatgaagtcattcacgataaaagttcataaaaatacacttgaacagattgaaacagtcattaaaacggcaaatattccagataatgagaagaaagttatcttagagtttattagagagcaaggtattgaaaccgtgcttggtaagtgtcttgatactctgctgacgaaggtagatcttgcgacacctctgttttctgaagttgccaaaatgagatgaaattggcaggaaggatgatctcttccctgaagtttttcactttttaatagtgagacagggtaaatttcaagatatatcccggaagtgaagggagagcgcaactcactgtttgtctacataatcaccgctcattttgattaccattaaagaaaaattggcagtatatttagcgtggggtctattaattgaaatacattaacgagcggaagtaggcaatggcaaaagtgattatgtggagaacggtatgaagtatcgtctgagcggggttgctcttacagcagtattactggcgggatgtgcaaactcatcaaataattatgaacaagggcgatctgatccgctggaagggtttaaccgggctatgttcaactttaactataatgttctcgatccttatatcttacggcctgctgctgttgtctggcatgattatgtacctatgccagcgcgaaatggtattggcaattttatgagtaatctggaagaaccagccagcatggtgaatagttttttgcgcggagatataaaggaaggcgcaaagcattttaaccgattctttttgaataccattctcggtatgggggggcttattgatgttgcttcaatggcaaaccccaaactggcaaaacaggatccaatgcgttttggtagcacccttgggtactataatgttggttatggcccttatgttgttttgccgggatatggcagctttactgcgcgtgacgaaggtggggatatggcagatatgacttatcctgtattgagttatcttaccccctggatggctgtcggaaagtgggtatttcaggggctcgaaactcgcgcacgtttgctggattcagatggcctgataaaaaattcttcagatccgtatttgatgatgcgtgaagcctacttccagcgccatgattttctggctaacggtggcaaactgctaccggaagaaaatcctaatgctgctgctattgaggatgaattggattctatcgattaaaacaattcgaggaataaaaaggatagcattggctatccttttttgatcatagaagatgattagaatgtgtagttaagacctacaccggctaaccatgcggttcctttagaatcgaaatcatacgccgtggcgaaaggacctttttggagatcttttggtaattcttcgttcacatgtactttcttcccacgcatataagaaatacccacatctacggaggtatctttattaaatgcgtaagtcgtccctacacttaaccagaaacgattctggtctgggatggagatagagcggttttgggctggtacagggctttcatcgaaagcgataccggtacggaatgtccagttatcgtcatgatagtaagttgtacctagtgagatacggtaagcattgcggaaaccttcgtgcttttcaaatagaggcttgtctccaccgtttttaggttcaccttttaattccttgaagctattccagccagtatagaggaagctataatggattgcccattgaggtgcaacacggttataaccagatatttcccacatatcaggcaggtttagatctagtgtacctttgatggtttttcctgcaagtccaggtatttttaggaaaggagtatcaatataaggcagttgattgctgtaatcaccattcttaaactttactttaactttcgaacggtaagttaagctataacggttgttttcatcgaattgatacagaagtcctgcattccaaccataaccccaatctttgccttctagacgagccacttctgtgcttgctggaatattttttcccagagcttgagagagcgcagagcctacttcacccagatgacgaacaatttcagcatcagcataaatggcatttaaacccagaccaaagctaaactgatcattgactttgtatgcaccggccagattaaagttgccggttttgagtgatgttttcccaccaatggagccggcagcatagttattactgaaatttgtggataaaccaaagttgctcgtgattgatgcaccaacaaacaactcatcggtgactggtgtaatgaaatgtagatttggtactggtgcatttggtgcgatatttttcgcatctgtactatttttagtaacaggagactcaccagtaatatcaacttttggcttaacataaataaaaccgccggaaaaggatgggcgatcaaatagggtcatggctgcagggttgcggctgccttcagaggcgtcttctgcaacaacacctgccccagaaaatgcacgacctagtcctgatgatgaatattcattcaattgaaaacctgcagcattagcgttagatgaaataatcgcaaccgccactgctaatgctgaacgtgaaaataggtttttctggttcataaccaaaacctcattgtttaattattatttaacatgctactcaagtagctgagagcgcggaattgtagagtcggttcatcacaatgacaaatcagaccagtgtgagaagtataggcctgagatcgcaatgtgttgcaagaatgtttttaaaatatgacgaaaatgattactaaaatgggacttacttaacaaaaaatagacagttggtgttaacgagatgtaaatgcgatttaattaacgtgctgagatcaataaagagtgaaataaatggtattacgcagtgtaaatagtggttattaaaggaaagtacaacgtaaaatcagatttggatttttattgtcggagaaataagatgactgatgtaattaagcgccatggggctaacgaaacggccgcttgctgttgtgctgatgttggtacagtcattgataatgaagagtgcacggcttcttatcaacagatttttgccagcagtcaggaagcagatgcaatgcttaatatattgacaaaaaaagcaaaaaaggtggaatctgatccttgcatcatcagccataaaatagaagaagtgcatgatggtatgcaattggccatagattttacatttagttgtcaggcagaggatatgatatttcagctgggattgcgttaactactttcagagttacagttttcccattgtggtcaaaaatagttatatcaatgggaaaactgatgattatttgttgtaaccaataagtgtttcttcatcttttgttcgcgtgctatctgttcagatcgtataaattataaatctattaaagttgcgcttgctcgcatttttagtttattcctgtttgctatttcccaacattacgttaacaatgccttatcaggtctgacctcttatgaggtgagtaaataattttaatcaattgatttaattaatgattattgcaggagttgctatgagtcgttcttcaacaaaagtggcacaacaaaaggaacgagttgctattgtcagtggattacgccttccttttgctaaacaggcaacgaactatcacggtattccggctgttgatttggggaaagctgttgtcagtgagttggtcatcagaagtgggctgccaccagagaagatcgaccaattggtttttggtcaggttgttcaaatgcctgaagccccgaatattgcacgggaaatcgtgttgggtgcgggtttaagtgttagtacagatgcgtacagtgtttcccgggcctgcgcaaccagttttcaggcgatagctaatgtagcagaaagtattatggccggaaccgtgaatgtgggaattgctggtggtgctgattcttcatctgtcctgccaattggggtgaccaaatcactggctcgtactctggttgatatgaataaagccaaaagcctttcacaacgccttaagttgctgagtaaattgaaattaaaagatttactgcccgtatcgcctgcggttgctgaatattctaccgggttaagaatgggcgatactgctgaacaaatggcgaaaacctaccatatcagtcgtgaagctcaggatgagctggcgcaccgttctcatttgatggcggctaaagcctgggagaagggcctattacgtgatgaagtgatatcggctcattttccgccatatcgcgaatctttgcaggaagataataatatccgcaaaaattcagaacttacgtcttatgcgaaattacgtccggcttttgatcgcaaatatggcacagttactgcggccaatagtactccgctgactgatggtgccgcggcagtgattttgatgagtgaatctgctgctaaagaacttggcatggtgccattgggctatttgcgcagttatgcattttcagcgattgatgtctggcaggacatgttactggggccatcatatgcaactccactggcactggacagagcggggattacgttaaatgatctttcccttattgatatgcatgaagcgtttgccgctcagactctgacaaacctgaaaatgtttgccagtgataaatttgcccgcgagaaattggggcgttctcaggcgattggtgaggttgatatggataaattcaacgtactcggtggttcaattgcttatgggcatccatttgctgccaccggggccagaatggtgacccagaccctgaatgaactgcgtcgccgtggaggcgggcttgggctggcaacagcctgtgccgcgggtggcttgggtgcggcaatggtattggaggtggaataatggctctggatgaaacaattatgtcagcagcacaatcggtattcagtttttttgtcagagatgacagagttggcgttattactattgatgtccgggtgagaaagttaatacgctgaaagcggagtttgttgagcaatttttggcggttttcgagcaggcacaacaggtttccggtttaaaagggctagtgattatatccggtaagcccgacacctttatcgccggtgcagatattacgatgatcgcaggttgccagactcaacaggaagcaacggctctggctgaaaaaggtcaggaattatttgataaaattgccagttattctttacctattgttgcggctattcatggtgcatgcttaggaggtgggttggaatttgcattagcctgccatgcacgtatttgttctctggatgataaaacccgtcttggtttacctgaagtacagctcgggttgctgccgggttccggcgggactcaaagactcccccgtttgatcggtgtcagctctgcattagatatgatcctgacagggcgtcagctcaaagcaaaacaggcaaaacgactgggtgttgttgatgatgctgttcctttggatattctgttggatgtagcagttcaatatgttaaaaaaggtgttgctaaacgcaaacctctggcatggtcacaacgtctgttagcgagttcttttggcaggccattattattccgtatggttcagcaaaaaacgcgggccaaaactcacggtcattatcccgcaccagaacggatcattgatgtgatccgtcttggtctggagaaagggcaaaaagccggtttgcaggcagaggccaaagcatttggtgagttggctatgtcgtccgaatcatcggcactgcgcagtctgttttttgctaccacctcattaaaaaatgagacgggttcttcggaactgcctgctcagatcaggcatgtggggattttaggtggtggcttgatggggggcgggattgctaatgtaaccgcaactcgtggtcatttaccggcacgtatcaaagatattaatgagaaaggcattaatcaggccctgaaatatacatgggatatgctttccaagcgcgtcagtcaacggcgtctgaccccatcagagcgttctcgtcagatgtctctgctttctggtactacagattacagtggttttaaacaggctgatattgtggttgaagccgtatttgaagacttggtactgaaacgtaagatggtcgcagaagttgaagcgaatacaaaggcggagactattttcgcatctaacacgtcttcattgccgattcaccagattgcggaaattgctaaacgaccggagcaggttattggccttcattacttcagccctgtagataagatgccattggtggaagtcattccacatgcaggaacaagtgaaaaaacaatagcaacagcagtagcactggcgaaaaaacagggtaaaacagccattgttgtgggagataaagccgggttttatgttaaccgaattttatctccttatattaatgaagcgggctattgtctggtggaaggggaacctatcgaacatatcgataaagctctggttgattttggtttcccaatcgggccaatcaatttgctggatgaagtcggtattgatgtcggaaccaaaattattcctgtgctggtggatcaattaggggagcggtttacaccgccggcaattttagatgctgtgctgaatgacgatcgcaagggtaagaaaaacggtcgtggtttttattcctatgcaactaaaaagaataaattctggtcattcaggaaaaacagcaaagaggctgatccttcgatttattccctgttgaaagttcagcctgctgcaaaaatggcacgctcagacattgctcagcgttgtctgatgttaatgttaaatgaagctgtacgttgtctggatgaaggcatcatccgcagccctcgtgatggtgatataggtgctgtatttggtatcggtttcccgccattcctgggagggccattccgttatatggataagcttggtagccgtcatgttgtagaaactttgcaacgtctggcacagcagtacggaaacaggtttgcaccctgtgaacgtctgattcagatggctgaacaggataagcgattctacgaataacgcatatacgcttcttctggtattttttaataagtgataccggtcctttaaacttaaagggccggttttatctataattgctaaaaaatatattgtgtgtgaatttttattgttaagttatcagcttaatataatagccaaacaatacatatatcacccattattagtaattttatttagccatattttgcggcagaatatctctcaattttcattgaaaccttttgtcaaaggttcacagttcgctctcaataatattattttactttcgtgataagtgacctgaaaacgggtgacttcaattcagctaattgcctgagtaatttcagggttatttttggtagaatgaaagtaagtattagaattagttctgaaatttaactcaacggtgaattatgttcgtgtttattatgcgtcatggtgatgctgcttttaactcaatcagcgatgcaacgcgggagttaacgccgcgcggctgtcaggaatcgcagaaaatggcgctttggcttgagcaacagaatcctgagattgattgtgtactggtcagtccttatatccgggcggagcagactctgcaagtggtgcgtgagagtctggtattacctgatagtgaggaaatgttagaagagctaaccccgtcgggtgatgctgagctggtggccagttacttacaggttttggcagagcaaggaaaaaaagccattttggtagtttctcatttacctttagttggctatctagtgtccgaactttgccctgagcaaactcctccgatgttttcgacatccagtattgcctgtgtggaactggataagcagacacaaaaaggccgcctgctatggcaaacctctccggcacaattgtagccctgaccagcccgcaggttaaaaacgtgttttagctaacgctgtataaattcatcctgttcaaccaaaatgagtaatgcagcgtttcctccccattctttaggtgcctgatgaaaagcgataacatcaggatgttgggcaagccatagtggcgtttgttgcttgaggatatgcttaccgtggccatgcataacacaggcacaatagacattttctcgacgacaggctgcgattaacgccccaatttcctgtttagcctgtaactgagttaatccgtgtaaatccagaaaaagctcagggggataatcacctcgccgcagctttttcagctcataatgattggctccttctcgtacataacgagtcgggccttccatatccaggttaggctgaaactcatcagaaaaatagtaactggcatcgacctgttcttgtatcaggcgctcaggtgccatgtgactgattttttttctttttggggagtgtaagactttatcctgagtagtccgacgggttcccactactgacgttctaaatagactgatgtcttcttcatttaatggttttttcttcttcattacatactaattcattaacaactttcggtgattgtacccgatttattaagattttgcttagacgctattatttttgggaatatgctgttcataaaattatttgacaattgtgtctggttataaaataaatgtatatacaacataacaactgtcagtaacaacaaaaaaataacaggacgaaaataatgtcgattgaactgaaagataccgacattatctggcgtaatgccagacttgccacaatgaaccctacaatcagtaacatggatggcaagcataattacggtattctggaacaatatgatttgatcatacgggatgaaaaaattctggcagttctgccaacggagagtgtgccagctaaccgttgcaaggtgattgatgcagaacagcgattaattactcccggcctgattgactgtcatactcatctggtttttggtggtaaccgggcatcagagtgggagcagcgtctgaatggtatttcttatgcacaaatcagtgctaaaggtggcggtattaatgccacagtcaatgccacccggcaaagttcagcccaacaactggaaatcgcggctcaaaagcggctgagtgcattgatagctgaaggtgtgacaaccattgaaatgaaatcaggttatggactggatttagagaatgaagagaaacaactggacgttattcggatattagggcagaaaaacccagttgaaatcagcccgactctgctttctgcccatgctgttcctcccgaatacaaacataatcctgatgcttatattgacttagtttgtgacactattctgcccaatctttggcaaaaacagttatttgaatctgtggatgtgttttgcgaaagcgttggattcagtcttgaacagactaaacgcgtctttgatgcggccagaagattaaatattcccgttaaaggccatgttgaacagctgtccaatctcggtggtactgagctggttgctgattatcagggcttatctgttgatcacattgaatatctggatgaaaaaggggttcaggcaattagccgcagtggaacggttgcggttttattgccgggagcattttattttctgaaagagacgcaatgtcctccgattgccttattacgccagtaccgcgtaccgatggcgatttctacagattttaatccgggaaccagcccgttcacgtcactacgtatgatgatgaatatggcttgtgtccagttcggtctgacaccggaagaagcatggcagggtgtgactattcatgcggcacgcgcattaggcagagcggaaagccacggtcagatagcagcaggttatatggctgattttattgtttgggatgcaaaagaacctgtagatatattatacgaattagggcgtaacccgttggtttaccgtgtctatcgtggcgtaattacgcataattttttgtgaacaataaataataacgagggaaataacatgaaattatggcatccgacatcagaaaacatttggcaggggcgtaatgaccttgccgaggccaataatgctttacgcatgttccagacgataaaacaacccgctgatttttctcctgaacaatatccgaatcatattgcattgttgggttttgagtgtgatgaaggtgtgaaactcaatcaggggcggccgggagcaaaatcagggcctgagtatttgcgtcagtcgctggcaaatatggcgagtcatgatgggcatgaattgctggtggatttgggtaatatccgggcgaatagcggtcagttaagtgaagcccaaagtgcactgagtgatgctgtctatgcctgtcagagccagaaaatgcgtaccctcatttttggtggcggtcatgaaactgcctttgctcatggtatgggcatatatcgtgcgttcccgacacagcgggtagggatcattaattttgatgcgcatctggatctacggaatgcgccacaggcaacatcaggcacaccattccgccagcttgctgattattgtcaccagcaacagcgtccgtttaattacagctgtgtgggtgccagtctggcctcaaatactcaagccttattggatgaagcgaatcatcttgatgtcactattatttgggatactcaatgcattgattctatgctggataaagttcaacaacagatacaggatatgctgaatcaggctgaaatcatctacatgacgattgatttggacgtgttaccgatttggcaaatgccgtcagtttcagctccggctgcgctcggtgttccgttggagcgtttattgtcactgatccagccgatttgccagagtaaaaaattacaggctgttgatctggttgagctgaatccattgtacgatattcagggtatgggcggtaaagccgcggctcgccttgcatggcaaatagtgcattggtggaatggataattggctcgggagtaggaaggaatttattgtgaccattgatttatcagacaaaataactaaacccgtacctctgtatgcgaaagtcaaacaatcaattattgaaaaaattcataccggggagtggcaaccccatgacagagtgccttcagaatctgagttagtaaaacaattcaattgcagccgcatgacagcaaacagggcattacgggaactgacggcagaagggcttttattccgtttacagggggtcggctcttttgtatcagagccgaaagggcagtccgccctgtttgaaattcacagtattgctgatgagattgcggcacgtacccatcgccataactgtaaggtattaaagctggcggaagtcaccgctaatatgactcaggccaaagagctgggaataaaagcaggtacagcggtttatcactcaattattctccattatgaaaatgatgtgcccgtacaaattgaggatcgttatgttaatgcattagcggccccggaatatcttcgacaggatttccatcaacagactgcccatgattacttatcgatagtggcaccgcttacggaaggagagcatattgtagaagctgttgccggtgatgcccgctcctgtcgtttactgcaaatagaggagaattctccttgtttattaatcagtcgccgaacttggtcgaaagaacatatagtttccagtgccagattattatttcccggtcaccgttataagttgaaaggacgttttagctcgtgaattgacgtttatgattggttttctctgtactcaaaaatctcctctttggcattatgcatgagaggagaaggtaacaaaaatgtaaagcatatgtgatgtaaaacacaaaaccagcaaaattcccttatgatattttgagagtgaattataaccatcctattgatcttcaataaaaaagaaaaataacaaaattattgactttatctctgtcacatttttgcctattgaatatacatgtatatacaactatacagttaataagttttcataaatatgaaaaaggaaaaactgtgacaacgcaaaataataaattcagtaatgcggttatccgtgctcccagaggaacaaaactcacagcaaaaagctggctgacagaagctccgcttcgcatgcttatgaacaaccttgatcctgatgttgcagagaatccccatgagctggtggtttatggtggtattggtcgcgcagccagaaattgggaatgttatgaaaagattgttgagactctgaaaaaccttgagagtaacgagacattactggttcagtcaggcaaacccgtcggcgttttcaaaacacatgaaaatgctccccgtgtactgattgccaactcaaatctggttcctcactgggcaacgtgggaacactttaatgaactggatgccaaaggattaacgatgtatggccagatgacggccggcagctggatatatatcgacagtcatggcattgtgcagggtacttatgaaacatttgtcgaagccgggcgtcagcactatcacggtgatttgaccggtcgctgggttctgactgccggattaggtggtatgggcggggcgcagcctctggccgcaacactggcaggtgcttcatcgctgaatattgaatgtcagcaaagccggattgattttcgtttacgtactcagtacgtggatgagcaggccgcagatctggatgatgcgctggcacgtattgagcgctatacccgcgaaggtaaagcagtatcaatagcattatgtggtaacgcagcggagattttaccagaactggttcgccgtggtgttcgccctgatatggtgacagaccagaccagtgctcacgatccattacacggttatttgccggtagggtggacatgggaagagtattgtcatcgggctgaaactgagccggaacacgttgttcaggcggcaaaagcatcgatggcacagcatgtagccgcaatgctggatttccagaaacagggtatccctacttttgattacggcaataatatcaggcagatggctaaggaaatgggcgttgaaaatgcctttgatttccccggttttgttcctgcttatatccgcccgcttttctgtcgcggcataggccctttccgttgggcggcactttctggcgaccctcaggatatttataaaacagatgccaaagtaaaagaactattgccggatgacaaccatctgcatcgctggctggatatggcacgggaacgcatcagctttcagggcttaccagcacgtatttgctgggtaggattgggcgatcgcgccaaactgggtctggctttcaatgaaatggttcgtaatggcgaactttccgcgccaatagtgatcggacgtgaccatctggattcaggctcagtagcaagccctaaccgtgaaaccgaatcaatgaaagatggttctgatgcagtatctgactggccattgctgaatgccctgttaaataccgccagtggagcaacatgggtttcgctgcatcacggcggcggggttggtatgggcttctcccagcactctggcatggtgattgtctgtgatggttcagatgaagcggcggagcgcattgcccgggtactccataatgacccggcgacaggcgttatgcgccatgcagatgcaggttatgaactggcaattcaatgcgcagaagaacaagggctgaatttacctatgctcaatacccgaaaagaagacactcaagcggcagaaataaaataaggagcgttactaatatgaaatatatcactattcatccgggaaaaatgacgcttgaagagttacgccatatctatcagcatccggtacaaataacgttagatgagcaatgtcttccggcgatagagaacagtgttgaatgtgttaaccgcatcatcaaggaaaacagaactgcttacggaattaatacgggttttgggttactggcaaatacccgaattgcagaacaggatttagaagaactgcaacgttcgattgttatgtcacatgcggcgggtgttggtgaaccgctgccggatgaaatcgtccgtttgatggtcgtattaaaaattaacagcttagcccgtggctattcaggtattcgtctggaagttattcaagccttgatagcattggtgaatgccgaagtttatccttgtattccggctaaaggatcggttggggcttctggtgatttggctccgctggcacatatgagtctgttattactgggtgaggggaaagcccgttatcgtggagaatggttgccggcaaaagaagcgctggcaaaagcgggtcttcagccattcacactggtcgcaaaagaggggctggcattactgaacggaactcagacttcaacggcatttgccttgaaaggcttgtttgcagcggaagaattactggcatcagccgttgtgtgtggcgctttatcagttgaagcagctctgggatcccgtaagccattcgacgcacgtattcatgaagtccgtgggcagaaagggcaaattgatgttgcagctttatatcgctttgtattggaagagaaaagtgacatttcttcttcccacgaaaactgcccgaaagttcaggatccttattcactacgttgccagccacaggttatgggcgcttgcctgacccaaatccgccatgctgctgatgtcattatggttgaggctaatgctgtttctgataacccactggttttcactgagcaagacgaagtgatttccggcgggaatttccatgctgaacctgttgcgatggcatcggataatctggctcttgcgctggcggagattggtgcactggcagaacggcggattgctctgctgatggataacaatatgtctc

SEQ ID NO: 2367 - DNA, 15621 bp, Xenorhabdus sp.; identical to SEQ ID NO: 2366
  CDS (1319)..(2071)

SEQ ID NO: 2368 - DNA, 15621 bp, Xenorhabdus sp.; identical to SEQ ID NO: 2366
  CDS (3815)..(4111)

SEQ ID NO: 2369 - DNA, 15621 bp, Xenorhabdus sp.; identical to SEQ ID NO: 2366
  CDS (4428)..(5717)

SEQ ID NO: 2370 - DNA, 15621 bp, Xenorhabdus sp.; identical to SEQ ID NO: 2366
  CDS (5809)..(7878)

SEQ ID NO: 2371 - DNA, 15621 bp, Xenorhabdus sp.; identical to SEQ ID NO: 2366
  CDS (8274)..(8744)

SEQ ID NO: 2372 - DNA, 15621 bp, Xenorhabdus sp.; identical to SEQ ID NO: 2366
  CDS (9508)..(10761)

SEQ ID NO: 2373 - DNA, 15621 bp, Xenorhabdus sp.; identical to SEQ ID NO: 2366
  CDS (11026)..(11748)

SEQ ID NO: 2374 - DNA, 15621 bp, Xenorhabdus sp.; identical to SEQ ID NO: 2366
  CDS (11810)..(12508)

SEQ ID NO: 2375 - DNA, 15621 bp, Xenorhabdus sp.; identical to SEQ ID NO: 2366
  CDS (12805)..(14508)

SEQ ID NO: 2376 - DNA, 15621 bp, Xenorhabdus sp.; identical to SEQ ID NO: 2366
  CDS (14523)..(15620)

SEQ ID NO: 2377 - DNA, 15621 bp, Xenorhabdus sp.
  CDS (15494)..(15619)
gagacatattgttatccatcagcagagcaatccgccgttctgccagtgcaccaatctccgccagcgcaagagccagattatccgatgccatcgcaacaggttcagcatggaaattcccgccggaaatcacttcgtcttgctcagtgaaaaccagtgggttatcagaaacagcattagcctcaaccataatgacatcagcagcatggcggatttgggtcaggcaagcgcccataacctgtggctggcaacgtagtgaataaggatcctgaactttcgggcagttttcgtgggaagaagaaatgtcacttttctcttccaatacaaagcgatataaagctgcaacatcaatttgccctttctgcccacggacttcatgaatacgtgcgtcgaatggcttacgggatcccagagctgcttcaactgataaagcgccacacacaacggctgatgccagtaattcttccgctgcaaacaagcctttcaaggcaaatgccgttgaagtctgagttccgttcagtaatgccagcccctcttttgcgaccagtgtgaatggctgaagacccgcttttgccagcgcttcttttgccggcaaccattctccacgataacgggctttcccctcacccagtaataacagactcatatgtgccagcggagccaaatcaccagaagccccaaccgatcctttagccggaatacaaggataaacttcggcattcaccaatgctatcaaggcttgaataacttccagacgaatacctgaatagccacgggctaagctgttaatttttaatacgaccatcaaacggacgatttcatccggcagcggttcaccaacacccgccgcatgtgacataacaatcgaacgttgcagttcttctaaatcctgttctgcaattcgggtatttgccagtaacccaaaacccgtattaattccgtaagcagttctgttttccttgatgatgcggttaacacattcaacactgttctctatcgccggaagacattgctcatctaacgttatttgtaccggatgctgatagatatggcgtaactcttcaagcgtcatttttcccggatgaatagtgatatatttcatattagtaacgctccttattttatttctgccgcttgagtgtcttcttttcgggtattgagcataggtaaattcagcccttgttcttctgcgcattgaattgccagttcataacctgcatctgcatggcgcataacgcctgtcgccgggtcattatggagtacccgggcaatgcgctccgccgcttcatctgaaccatcacagacaatcaccatgccagagtgctgggagaagcccataccaaccccgccgccgtgatgcagcgaaacccatgttgctccactggcggtatttaacagggcattcagcaatggccagtcagatactgcatcagaaccatctttcattgattcggtttcacggttagggcttgctactgagcctgaatccagatggtcacgtccgatcactattggcgcggaaagttcgccattacgaaccatttcattgaaagccagacccagtttggcgcgatcgcccaatcctacccagcaaatacgtgctggtaagccctgaaagctgatgcgttcccgtgccatatccagccagcgatgcagatggttgtcatccggcaatagttcttttactttggcatctgttttataaatatcctgagggtcgccagaaagtgccgcccaacggaaagggcctatgccgcgacagaaaagcgggcggatataagcaggaacaaaaccggggaaatcaaaggcattttcaacgcccatttccttagccatctgcctgatattattgccgtaatcaaaagtagggataccctgtttctggaaatccagcattgcggctacatgctgtgccatcgatgcttttgccgcctgaacaacgtgttccggctcagtttcagcccgatgacaatactcttcccatgtccaccctaccggcaaataaccgtgtaatggatcgtgagcactggtctggtctgtcaccatatcagggcgaacaccacggcgaaccagttctggtaaaatctccgctgcgttaccacataatgctattgatactgctttaccttcgcgggtatagcgctcaatacgtgccagcgcatcatccagatctgcggcctgctcatccacgtactgagtacgtaaacgaaaatcaatccggctttgctgacattcaatattcagcgatgaagcacctgccagtgttgcggccagaggctgcgccccgcccataccacctaatccggcagtcagaacccagcgaccggtcaaatcaccgtgatagtgctgacgcccggcttcgacaaatgtttcataagtaccctgcacaatgccatgactgtcgatatatatccagctgccggccgtcatctggccatacatcgttaatcctttggcatccagttcattaaagtgttcccacgttgcccagtgaggaaccagatttgagttggcaatcagtacacggggagcattttcatgtgttttgaaaacgccgacgggtttgcctgactgaaccagtaatgtctcgttactctcaaggtttttcagagtctcaacaatcttttcataacattcccaatttctggctgcgcgaccaataccaccataaaccaccagctcatggggattctctgcaacatcaggatcaaggttgttcataagcatgcgaagcggagcttctgtcagccagctttttgctgtgagttttgttcctctgggagcacggataaccgcattactgaatttattattttgcgttgtcacagtttttcctttttcatatttatgaaaacttattaactgtatagttgtatatacatgtatattcaataggcaaaaatgtgacagagataaagtcaataattttgttatttttcttttttattgaagatcaataggatggttataattcactctcaaaatatcataagggaattttgctggttttgtgttttacatcacatatgctttacatttttgttaccttctcctctcatgcataatgccaaagaggagatttttgagtacagagaaaaccaatcataaacgtcaattcacgagctaaaacgtcctttcaacttataacggtgaccgggaaataataatctggcactggaaactatatgttctttcgaccaagttcggcgactgattaataaacaaggagaattctcctctatttgcagtaaacgacaggagcgggcatcaccggcaacagcttctacaatatgctctccttccgtaagcggtgccactatcgataagtaatcatgggcagtctgttgatggaaatcctgtcgaagatattccggggccgctaatgcattaacataacgatcctcaatttgtacgggcacatcattttcataatggagaataattgagtgataaaccgctgtacctgcttttattcccagctctttggcctgagtcatattagcggtgacttccgccagctttaataccttacagttatggcgatgggtacgtgccgcaatctcatcagcaatactgtgaatttcaaacagggcggactgccctttcggctctgatacaaaagagccgaccccctgtaaacggaataaaagcccttctgccgtcagttcccgtaatgccctgtttgctgtcatgcggctgcaattgaattgttttactaactcagattctgaaggcactctgtcatggggttgccactccccggtatgaattttttcaataattgattgtttgactttcgcatacagaggtacgggtttagttattttgtctgataaatcaatggtcacaataaattccttcctactcccgagccaattatccattccaccaatgcactatttgccatgcaaggcgagccgcggctttaccgcccataccctgaatatcgtacaatggattcagctcaaccagatcaacagcctgtaattttttactctggcaaatcggctggatcagtgacaataaacgctccaacggaacaccgagcgcagccggagctgaaactgacggcatttgccaaatcggtaacacgtccaaatcaatcgtcatgtagatgatttcagcctgattcagcatatcctgtatctgttgttgaactttatccagcatagaatcaatgcattgagtatcccaaataatagtgacatcaagatgattcgcttcatccaataaggcttgagtatttgaggccagactggcacccacacagctgtaattaaacggacgctgttgctggtgacaataatcagcaagctggcggaatggtgtgcctgatgttgcctgtggcgcattccgtagatccagatgcgcatcaaaattaatgatccctacccgctgtgtcgggaacgcacgatatatgcccataccatgagcaaaggcagtttcatgaccgccaccaaaaatgagggtacgcattttctggctctgacaggcatagacagcatcactcagtgcactttgggcttcacttaactgaccgctattcgcccggatattacccaaatccaccagcaattcatgcccatcatgactcgccatatttgccagcgactgacgcaaatactcaggccctgattttgctcccggccgcccctgattgagtttcacaccttcatcacactcaaaacccaacaatgcaatatgattcggatattgttcaggagaaaaatcagcgggttgttttatcgtctggaacatgcgtaaagcattattggcctcggcaaggtcattacgcccctgccaaatgttttctgatgtcggatgccataatttcatgttatttccctcgttattatttattgttcacaaaaaattatgcgtaattacgccacgatagacacggtaaaccaacgggttacgccctaattcgtataatatatctacaggttcttttgcatcccaaacaataaaatcagccatataacctgctgctatctgaccgtggctttccgctctgcctaatgcgcgtgccgcatgaatagtcacaccctgccatgcttcttccggtgtcagaccgaactggacacaagccatattcatcatcatacgtagtgacgtgaacgggctggttcccggattaaaatctgtagaaatcgccatcggtacgcggtactggcgtaataaggcaatcggaggacattgcgtctctttcagaaaataaaatgctcccggcaataaaaccgcaaccgttccactgcggctaattgcctgaacccctttttcatccagatattcaatgtgatcaacagataagccctgataatcagcaaccagctcagtaccaccgagattggacagctgttcaacatggcctttaacgggaatatttaatcttctggccgcatcaaagacgcgtttagtctgttcaagactgaatccaacgctttcgcaaaacacatccacagattcaaataactgtttttgccaaagattgggcagaatagtgtcacaaactaagtcaatataagcatcaggattatgtttgtattcgggaggaacagcatgggcagaaagcagagtcgggctgatttcaactgggtttttctgccctaatatccgaataacgtccagttgtttctcttcattctctaaatccagtccataacctgatttcatttcaatggttgtcacaccttcagctatcaatgcactcagccgcttttgagccgcgatttccagttgttgggctgaactttgccgggtggcattgactgtggcattaataccgccacctttagcactgatttgtgcataagaaataccattcagacgctgctcccactctgatgcccggttaccaccaaaaaccagatgagtatgacagtcaatcaggccgggagtaattaatcgctgttctgcatcaatcaccttgcaacggttagctggcacactctccgttggcagaactgccagaattttttcatcccgtatgatcaaatcatattgttccagaataccgtaattatgcttgccatccatgttactgattgtagggttcattgtggcaagtctggcattacgccagataatgtcggtatctttcagttcaatcgacattattttcgtcctgttatttttttgttgttactgacagttgttatgttgtatatacatttattttataaccagacacaattgtcaaataattttatgaacagcatattcccaaaaataatagcgtctaagcaaaatcttaataaatcgggtacaatcaccgaaagttgttaatgaattagtatgtaatgaagaagaaaaaaccattaaatgaagaagacatcagtctatttagaacgtcagtagtgggaacccgtcggactactcaggataaagtcttacactccccaaaaagaaaaaaaatcagtcacatggcacctgagcgcctgatacaagaacaggtcgatgccagttactatttttctgatgagtttcagcctaacctggatatggaaggcccgactcgttatgtacgagaaggagccaatcattatgagctgaaaaagctgcggcgaggtgattatccccctgagctttttctggatttacacggattaactcagttacaggctaaacaggaaattggggcgttaatcgcagcctgtcgtcgagaaaatgtctattgtgcctgtgttatgcatggccacggtaagcatatcctcaagcaacaaacgccactatggcttgcccaacatcctgatgttatcgcttttcatcaggcacctaaagaatggggaggaaacgctgcattactcattttggttgaacaggatgaatttatacagcgttagctaaaacacgtttttaacctgcgggctggtcagggctacaattgtgccggagaggtttgccatagcaggcggcctttttgtgtctgcttatccagttccacacaggcaatactggatgtcgaaaacatcggaggagtttgctcagggcaaagttcggacactagatagccaactaaaggtaaatgagaaactaccaaaatggctttttttccttgctctgccaaaacctgtaagtaactggccaccagctcagcatcacccgacggggttagctcttctaacatttcctcactatcaggtaataccagactctcacgcaccacttgcagagtctgctccgcccggatataaggactgaccagtacacaatcaatctcaggattctgttgctcaagccaaagcgccattttctgcgattcctgacagccgcgcggcgttaactcccgcgttgcatcgctgattgagttaaaagcagcatcaccatgacgcataataaacacgaacataattcaccgttgagttaaatttcagaactaattctaatacttactttcattctaccaaaaataaccctgaaattactcaggcaattagctgaattgaagtcacccgttttcaggtcacttatcacgaaagtaaaataatattattgagagcgaactgtgaacctttgacaaaaggtttcaatgaaaattgagagatattctgccgcaaaatatggctaaataaaattactaataatgggtgatatatgtattgtttggctattatattaagctgataacttaacaataaaaattcacacacaatatattttttagcaattatagataaaaccggccctttaagtttaaaggaccggtatcacttattaaaaaataccagaagaagcgtatatgcgttattcgtagaatcgcttatcctgttcagccatctgaatcagacgttcacagggtgcaaacctgtttccgtactgctgtgccagacgttgcaaagtttctacaacatgacggctaccaagcttatccatataacggaatggccctcccaggaatggcgggaaaccgataccaaatacagcacctatatcaccatcacgagggctgcggatgatgccttcatccagacaacgtacagcttcatttaacattaacatcagacaacgctgagcaatgtctgagcgtgccatttttgcagcaggctgaactttcaacagggaataaatcgaaggatcagcctctttgctgtttttcctgaatgaccagaatttattctttttagttgcataggaataaaaaccacgaccgtttttcttacccttgcgatcgtcattcagcacagcatctaaaattgccggcggtgtaaaccgctcccctaattgatccaccagcacaggaataattttggttccgacatcaataccgacttcatccagcaaattgattggcccgattgggaaaccaaaatcaaccagagctttatcgatatgttcgataggttccccttccaccagacaatagcccgcttcattaatataaggagataaaattcggttaacataaaacccggctttatctcccacaacaatggctgttttaccctgttttttcgccagtgctactgctgttgctattgttttttcacttgttcctgcatgtggaatgacttccaccaatggcatcttatctacagggctgaagtaatgaaggccaataacctgctccggtcgtttagcaatttccgcaatctggtgaatcggcaatgaagacgtgttagatgcgaaaatagtctccgcctttgtattcgcttcaacttctgcgaccatcttacgtttcagtaccaagtcttcaaatacggcttcaaccacaatatcagcctgtttaaaaccactgtaatctgtagtaccagaaagcagagacatctgacgagaacgctctgatggggtcagacgccgttgactgacgcgcttggaaagcatatcccatgtatatttcagggcctgattaatgcctttctcattaatatctttgatacgtgccggtaaatgaccacgagttgcggttacattagcaatcccgccccccatcaagccaccacctaaaatccccacatgcctgatctgagcaggcagttccgaagaacccgtctcattttttaatgaggtggtagcaaaaaacagactgcgcagtgccgatgattcggacgacatagccaactcaccaaatgctttggcctctgcctgcaaaccggctttttgccctttctccagaccaagacggatcacatcaatgatccgttctggtgcgggataatgaccgtgagttttggcccgcgttttttgctgaaccatacggaataataatggcctgccaaaagaactcgctaacagacgttgtgaccatgccagaggtttgcgtttagcaacaccttttttaacatattgaactgctacatccaacagaatatccaaaggaacagcatcatcaacaacacccagtcgttttgcctgttttgctttgagctgacgccctgtcaggatcatatctaatgcagagctgacaccgatcaaacgggggagtctttgagtcccgccggaacccggcagcaacccgagctgtacttcaggtaaaccaagacgggttttatcatccagagaacaaatacgtgcatggcaggctaatgcaaattccaacccacctcctaagcatgcaccatgaatagccgcaacaataggtaaagaataactggcaattttatcaaataattcctgacctttttcagccagagccgttgcttcctgttgagtctggcaacctgcgatcatcgtaatatctgcaccggcgataaaggtgtcgggcttaccggatataatcactagcccttttaaaccggaaacctgttgtgcctgctcgaaaaccgccaaaaattgctcaacaaactccgctttcagcgtattaactttctcacccggacatcaatagtaataacgccaactctgtcatctctgacaaaaaaactgaataccgattgtgctgctgacataattgtttcatccagagccattattccacctccaataccattgccgcacccaagccacccgcggcacaggctgttgccagcccaagcccgcctccacggcgacgcagttcattcagggtctgggtcaccattctggccccggtggcagcaaatggatgcccataagcaattgaaccaccgagtacgttgaatttatccatatcaacctcaccaatcgcctgagaacgccccaatttctcgcgggcaaatttatcactggcaaacattttcaggtttgtcagagtctgagcggcaaacgcttcatgcatatcaataagggaaagatcatttaacgtaatccccgctctgtccagtgccagtggagttgcatatgatggccccagtaacatgtcctgccagacatcaatcgctgaaaatgcataactgcgcaaatagcccaatggcaccatgccaagttctttagcagcagattcactcatcaaaatcactgccgcggcaccatcagtcagcggagtactattggccgcagtaactgtgccatatttgcgatcaaaagccggacgtaatttcgcataagacgtaagttctgaatttttgcggatattattatcttcctgcaaagattcgcgatatggcggaaaatgagccgatatcacttcatcacgtaataggcccttctcccaggctttagccgccatcaaatgagaacggtgcgccagctcatcctgagcttcacgactgatatggtaggttttcgccatttgttcagcagtatcgcccattcttaacccggtagaatattcagcaaccgcaggcgatacgggcagtaaatcttttaatttcaatttactcagcaacttaaggcgttgtgaaaggcttttggctttattcatatcaaccagagtacgagccagtgatttggtcaccccaattggcaggacagatgaagaatcagcaccaccagcaattcccacattcacggttccggccataatactttctgctacattagctatcgcctgaaaactggttgcgcaggcccgggaaacactgtacgcatctgtactaacacttaaacccgcacccaacacgatttcccgtgcaatattcggggcttcaggcatttgaacaacctgaccaaaaaccaattggtcgatcttctctggtggcagcccacttctgatgaccaactcactgacaacagctttccccaaatcaacagccggaataccgtgatagttcgttgcctgtttagcaaaaggaaggcgtaatccactgacaatagcaactcgttccttttgttgtgccacttttgttgaagaacgactcatagcaactcctgcaataatcattaattaaatcaattgattaaaattatttactcacctcataagaggtcagacctgataaggcattgttaacgtaatgttgggaaatagcaaacaggaataaactaaaaatgcgagcaagcgcaactttaatagatttataatttatacgatctgaacagatagcacgcgaacaaaagatgaagaaacacttattggttacaacaaataatcatcagttttcccattgatataactatttttgaccacaatgggaaaactgtaactctgaaagtagttaacgcaatcccagctgaaatatcatatcctctgcctgacaactaaatgtaaaatctatggccaattgcataccatcatgcacttcttctattttatggctgatgatgcaaggatcagattccaccttttttgctttttttgtcaatatattaagcattgcatctgcttcctgactgctggcaaaaatctgttgataagaagccgtgcactcttcattatcaatgactgtaccaacatcagcacaacagcaagcggccgtttcgttagccccatggcgcttaattacatcagtcatcttatttctccgacaataaaaatccaaatctgattttacgttgtactttcctttaataaccactatttacactgcgtaataccatttatttcactctttattgatctcagcacgttaattaaatcgcatttacatctcgttaacaccaactgtctattttttgttaagtaagtcccattttagtaatcattttcgtcatattttaaaaacattcttgcaacacattgcgatctcaggcctatacttctcacactggtctgatttgtcattgtgatgaaccgactctacaattccgcgctctcagctacttgagtagcatgttaaataataattaaacaatgaggttttggttatgaaccagaaaaacctattttcacgttcagcattagcagtggcggttgcgattatttcatctaacgctaatgctgcaggttttcaattgaatgaatattcatcatcaggactaggtcgtgcattttctggggcaggtgttgttgcagaagacgcctctgaaggcagccgcaaccctgcagccatgaccctatttgatcgcccatccttttccggcggttttatttatgttaagccaaaagttgatattactggtgagtctcctgttactaaaaatagtacagatgcgaaaaatatcgcaccaaatgcaccagtaccaaatctacatttcattacaccagtcaccgatgagttgtttgttggtgcatcaatcacgagcaactttggtttatccacaaatttcagtaataactatgctgccggctccattggtgggaaaacatcactcaaaaccggcaactttaatctggccggtgcatacaaagtcaatgatcagtttagctttggtctgggtttaaatgccatttatgctgatgctgaaattgttcgtcatctgggtgaagtaggctctgcgctctctcaagctctgggaaaaaatattccagcaagcacagaagtggctcgtctagaaggcaaagattggggttatggttggaatgcaggacttctgtatcaattcgatgaaaacaaccgttatagcttaacttaccgttcgaaagttaaagtaaagtttaagaatggtgattacagcaatcaactgccttatattgatactcctttcctaaaaatacctggacttgcaggaaaaaccatcaaaggtacactagatctaaacctgcctgatatgtgggaaatatctggttataaccgtgttgcacctcaatgggcaatccattatagcttcctctatactggctggaatagcttcaaggaattaaaaggtgaacctaaaaacggtggagacaagcctctatttgaaaagcacgaaggtttccgcaatgcttaccgtatctcactaggtacaacttactatcatgacgataactggacattccgtaccggtatcgctttcgatgaaagccctgtaccagcccaaaaccgctctatctccatcccagaccagaatcgtttctggttaagtgtagggacgacttacgcatttaataaagatacctccgtagatgtgggtatttcttatatgcgtgggaagaaagtacatgtgaacgaagaattaccaaaagatctccaaaaaggtcctttcgccacggcgtatgatttcgattctaaaggaaccgcatggttagccggtgtaggtcttaactacacattctaatcatcttctatgatcaaaaaaggatagccaatgctatcctttttattcctcgaattgttttaatcgatagaatccaattcatcctcaatagcagcagcattaggattttcttccggtagcagtttgccaccgttagccagaaaatcatggcgctggaagtaggcttcacgcatcatcaaatacggatctgaagaattttttatcaggccatctgaatccagcaaacgtgcgcgagtttcgagcccctgaaatacccactttccgacagccatccagggggtaagataactcaatacaggataagtcatatctgccatatccccaccttcgtcacgcgcagtaaagctgccatatcccggcaaaacaacataagggccataaccaacattatagtacccaagggtgctaccaaaacgcattggatcctgttttgccagtttggggtttgccattgaagcaacatcaataagcccccccataccgagaatggtattcaaaaagaatcggttaaaatgctttgcgccttcctttatatctccgcgcaaaaaactattcaccatgctggctggttcttccagattactcataaaattgccaataccatttcgcgctggcataggtacataatcatgccagacaacagcagcaggccgtaagatataaggatcgagaacattatagttaaagttgaacatagcccggttaaacccttccagcggatcagatcgcccttgttcataattatttgatgagtttgcacatcccgccagtaatactgctgtaagagcaaccccgctcagacgatacttcataccgttctccacataatcacttttgccattgcctacttccgctcgttaatgtatttcaattaatagaccccacgctaaatatactgccaatttttctttaatggtaatcaaaatgagcggtgattatgtagacaaacagtgagttgcgctctcccttcacttccgggatatatcttgaaatttaccctgtctcactattaaaaagtgaaaaacttcagggaagagatcatccttcctgccaatttcatctcattttggcaacttcagaaaacagaggtgtcgcaagatctaccttcgtcagcagagtatcaagacacttaccaagcacggtttcaataccttgctctctaataaactctaagataactttcttctcattatctggaatatttgccgttttaatgactgtttcaatctgttcaagtgtatttttatgaacttttatcgtgaatgacttcatctcatcatcaatggtatccatattggcgtaatcaacaccggcagcagtaagcgccattgaatcagggttaaaaccataacccccattatcatcaaaatggatagcgaaatgattcactaatccaacttttactaaataatttatatcgtcagccaactgatcccatccaaatgcttcgcccaggaattgaagtttttccttactaataggtttcattacatgatttttatcattcatagcccggacaatcatatgttgtctctctttcaacatagtcattgagtttttccttcggtgagcatcagatagattagattatagtcaattaccgtaagtacactatgctgttgtcataaaaaacaggaatatgaaatttaaaacataatacgttgaatatattaaataaatcgtttatttttagatgctaaatctatcattaaaaaagagttttcttttattattcaatatgaaaatagctatattacgcagaaatgggcttggtgatcttatctgtacccaaccattaataaagtttttacagaaaaaatacccaaatgcagagattagcctattcatagaacagggcaaccatgatctcgccaagtatgtatgccctgatgtagacatcaatatccttcctaaagggaataaatatctttctattgccaaaaccgctctcaaattccgcaaaaagcactttgacattgctatttctgctaaacccagcccgatgaaactgaataacttattcctatggttacttggagctgaaaaacgttatgctgttgttgcagataaaaaatggaattccaaattaattaactatccgactaatacaaaatcggtgaaaggttatct

SEQ ID NO: 2378 - DNA, 15621 bp, Xenorhabdus sp.; identical to SEQ ID NO: 2377
  CDS (12154)..(13491)

SEQ ID NO: 2379 - DNA, 15621 bp, Xenorhabdus sp.; identical to SEQ ID NO: 2377
  CDS (6300)..(6842)

SEQ ID NO: 2380 - DNA, 11313 bp, Xenorhabdus sp.; identical to SEQ ID NO: 231
  CDS (11039)..(11311)

SEQ ID NO: 2381 - DNA, 11313 bp, Xenorhabdus sp.; identical to SEQ ID NO: 231
  CDS (9979)..(10125)

SEQ ID NO: 2382 - DNA, 11313 bp, Xenorhabdus sp.; identical to SEQ ID NO: 231
  CDS (9481)..(9630)

SEQ ID NO: 2383 - DNA, 11313 bp, Xenorhabdus sp.; identical to SEQ ID NO: 232
  CDS (2406)..(2618)

SEQ ID NO: 2384 - DNA, 11313 bp, Xenorhabdus sp.; identical to SEQ ID NO: 232
  CDS (2642)..(3043)

SEQ ID NO: 2385 - DNA, 11313 bp, Xenorhabdus sp.; identical to SEQ ID NO: 232
  CDS (5235)..(5942)

SEQ ID NO: 2386 - DNA, 11313 bp, Xenorhabdus sp.; identical to SEQ ID NO: 232
  CDS (6709)..(7083)

SEQ ID NO: 2387 - DNA, 11313 bp, Xenorhabdus sp.; identical to SEQ ID NO: 231
  CDS (2547)..(2735)

SEQ ID NO: 2388 - DNA, 11313 bp, Xenorhabdus sp.; identical to SEQ ID NO: 231
  CDS (10209)..(10496)

SEQ ID NO: 2389 - DNA, 11313 bp, Xenorhabdus sp.; identical to SEQ ID NO: 231
  CDS (10522)..(10770)

SEQ ID NO: 2390 - DNA, 15826 bp, Xenorhabdus sp.; identical to SEQ ID NO: 332
  CDS (2665)..(4086)
  unsure (1)..(15826): unsure at all n locations

SEQ ID NO: 2391 - DNA, 15826 bp, Xenorhabdus sp.; identical to SEQ ID NO: 332
  CDS (6050)..(6553)
  unsure (1)..(15826): unsure at all n locations

SEQ ID NO: 2392 - DNA, 15826 bp, Xenorhabdus sp.; identical to SEQ ID NO: 472
  CDS (14578)..(15681)
  unsure (1)..(15826): unsure at all n locations

SEQ ID NO: 2393 - DNA, 15826 bp, Xenorhabdus sp.; identical to SEQ ID NO: 472
  CDS (13453)..(14274)
  unsure (1)..(15826): unsure at all n locations

SEQ ID NO: 2394 - DNA, 15826 bp, Xenorhabdus sp.; identical to SEQ ID NO: 472
  CDS (10577)..(11680)
  unsure (1)..(15826): unsure at all n locations

SEQ ID NO: 2395 - DNA, 15826 bp, Xenorhabdus sp.; identical to SEQ ID NO: 472
  CDS (8895)..(9200)
  unsure (1)..(15826): unsure at all n locations

SEQ ID NO: 2396 - DNA, 15826 bp, Xenorhabdus sp.; identical to SEQ ID NO: 332
  CDS (9295)..(10143)
  unsure (1)..(15826): unsure at all n locations

SEQ ID NO: 2397 - DNA, 15826 bp, Xenorhabdus sp.; identical to SEQ ID NO: 472
  CDS (8309)..(8623)
  unsure (1)..(15826): unsure at all n locations

SEQ ID NO: 2398 - DNA, 14442 bp, Xenorhabdus sp.; identical to SEQ ID NO: 237
  CDS (50)..(265)

SEQ ID NO: 2399 - DNA, 14442 bp, Xenorhabdus sp.; identical to SEQ ID NO: 237
  CDS (2295)..(4142)

SEQ ID NO: 2400 - DNA, 14442 bp, Xenorhabdus sp.; identical to SEQ ID NO: 237
  CDS (10888)..(11100)

SEQ ID NO: 2401 - DNA, 14442 bp, Xenorhabdus sp.
  CDS (6500)..(7267)
tgctctaaagtcaatcacatcgctccattaatgtcggcccgtgtattgcgcgacaaacatgcgacttatttggattagctcatcgccaccatagaacgctgcctagtagagcaagccagctgttttgatgatggtcgagagctgctgttggcagaacttaataagctggccgttaacattcaggctgtgcgccagaaagatgtggttatagcagaagtgcgcagtgccgagttctggcaaaacccgactatcgataagctggaaaaagctcgcaaagagttgcggggcatcatgaaatatcgccaaaccgttagcggtggattgtacgctataccagcaacaaaaacgggtgacaccggtttgcaactaaaagaacgtgaggtaacaatcgcaggtgccaacgaggccatgatctaccgccgtagactcaaagatattctagatcagatgatagctgccaaccccacgttacagaaaatccgtaaaggcgaatctattgccgaaccagaattaaaaaccctcacctcgaccatactcaccagccaccccagtgtgagtttggaggtgctgaatgaattctatggccgcactgccgatcaactacacctgaccgtgcgtgaaattatcgggctggactcgcaagccatcgaagaccacttcaagagctttttgcacgcccacccaacacttacagcacagcaagtgcgctttatgaacttactgaaaaactacatcgcccagcacggctcgatcaagatcgaaaaactgtacgatgcgccttttacctcagtttcgcacgagggtattgacggcgtatttaccgccgatgacgtgggtgagttaatcaccgtactaaaaccttttatcaaggctgaacctaaattgttaggctcacagcctgagagcacacaggagtgaccatgcaatcactagaatggacgactaaactcacgattattgcctctgtggcgggcctggttctcactgcttttggctatctgctggctatggtcctgctaggacgtaagaacactgagctcaacacccaattgcaacaggctgatcaaacccttaagctggccaacactcaaaaccagaaataccaggatgagctcaaacagcttggtatcactctgcacgagaaagaactgtcggaaagcaagctacagacgcaacagaccaatgcaaaggtcacagaacaacgcctgaatgacgcattagccgagcgtaaaggcgagctggcatccttacagaaaacgctggaagagttacgagggcagcaccatagtacagaaaagcaactagaaaccgctcaagccgataaccgagcgttgaaagaacaagcgcaggatttacgagaccgtctggaaaaatgtgagcagaacgttcagcaagaacgcaccttggtgagccaactcaaagatgagctggcacaagaaggcaaaaaggccaaagagttggaggcatccaataccgaagctcgcgaacagctgaaagacgtcaaacagacccttacaggtcaacaacagcgttatgatcagattcaggagcactatcagtcgcttagtaacgagtatactgagcttaaaaccacgctggagcgcaaagaagaacactttaaagagcaaatgcagcagctcagtgaaaccaaacaatcgctcaccaaagagtttgagaatctggccaataaaattttcgaggaaaaaggtaaaacctttacccataccagtcaggccagtatcgacactatgctcaagcctttccgcgaacagatcgaaggcttccaaaagcgtataaacgaagtacacgatgcttcgctgcaaggcaataccagcctcaatgccgagattaaaaaggtactggaaattggcctgcaaatgagcaaagaagccaataacctcacttctgcgctgaaaggggattctcagaagcgcggagcctggggcgaggcacagcttcgtcgcaccctggaaatgagtggcttgatggaagaggctcactacgaagttcaaggctcattcagagacgcagaaggcaagcaaaagcagacagactatctgataaagttgcctgatggtaagcacatcatcatcgacagtaaggtagcactgaacgcatacgaccgggctgtgagcgcagaatcaccggaagaataccagctggctatgagcgaacatgttaaagcggtacgcaggcacattgatgatctggcatccaaggattacaccaaccttgttggtatgcgtagccccagctttgtgcttatgttcatgcccattgagccagcctatatcgaggcgctcaaagataacaaaaacctgttcgaatacggctacaaaaaaggtattgtattggtctcccataccacgctcattcccattttgcgcacagtgtctaacctgtggatgattgaacgcagtaatgctgaagctcgcgaaatcagcgaaaaagcaggtgatatatacaactcagtgtgtactgtagccgagcgtttaagtaaattaggtggcaccctgagtaccgtcagcaaccactacaacagcaccgtcaaagcgctggtaggacagcaaggcttgtatggcaaggtggatcggttcagtcaactctctgccaaagtcagtaaaagcctgccccacttggaggctgcacatatagacttcgaaaccgagcgcctgaccttgatcgttgaacctattgatgagcagacgaaagaacaggtgaaagatccggcagacgaaagaacaggtgaaagatccggcagacgaaccgatggatgagttggcttaagagatagagccaagccagttggaaaacacggcacagggcaatgtgctaagcgcagcgccaatcgaatcagaaacagcagaaaatcattaagcgagctattcaatgctaacaggccaaatacgtaacgatatcgacaatctctgggaaaaattctggaccggcggtatcaccaaccccttaaccgtgatcgagcaaatcagctacctgatgttcgcccgtatgctcgacatgcaggaagacatggccgagcgtaaagcgaaccgtacaggtaaagattttgaccgcctgtttccgaatacaccagaagggcagctgctgcgctggaaaaactttaaaaatctcagtggtaaagaactgcataaacaccttaagcaaaatgttttcccttactttgcaaaacttggcaaaaagtccgatgaacaagatggtctgggcaacgacggtagtgccatcgaagctttggggcatatcggcgaatatatgcaggatgccgatcttgaaattaaaaatgaatcggtgctcgtcagtgccgtggagatggtggatgaacttccactaacccaaagcgatgtaaaaggcgatatttacgaatacctgctcagtaaactcaccaccgccggtatcaatggtcagttccgcacgccgcgccacattatcgatgctatgatcgaactgattaatcctcagcccactgatactgtctgcgacccagcctgtggtacagccggatttctcgcccgcatcatggaatatctcaaccgcgtgcattccagtgagttcggtattcttgaagacgacgacggtaacaaacactacaccggcgacttgttagagccttaccgtgaccatatcaataaacagatgttctggggcttcgacttcgacaccactatgctgcgcgtcagcagcatgaatatggctttgcatggggtgaatggggccaatattctctatcaggacagcctgaataaatccattaaagaaaacttcccgcagcaggaagagaacttctttgatgtcatcctcgccaacccgccgtttaaaggcagcctggacgaaacaaacaccaaccctgacctgctgggtctagtaaaaactaaaaagaccgagctgctgtttgtggcgcatatcctgcgcgccctcaaactcggtggccgcgccgccgtcatagtacccgatggggtactatttggttcctccaaggcccaccagcaattgcgtcaggagttgatggaaaataaccagctcgaaggtattgtgagtttgcccagtggtgtgtttaagccctatgccggtgtcagcacagccattctgatgcttactaaaggtggtaacactgaacgtgtttggttctatgacctgcaagctgatggctattcattagacgataaaagaacaccattgaaaggcgaaggtagcaacgacctgcccgatgctattgccaagtggaaacaatatatcgttttggttgaaaagaacgcttcagccaaagagatcgatacagcctttggcgataaaacccaaaaggcgtttgtggtggatgctaaagacattgtcgccaacaaattcgatctatccatcaatcgttataaggaagtggtgtatgaagaagaaaaatacgaagacccgaaggaaattcttaaaaaactgaaagcgctggaaagcgaaattatggcaggtttgaatgagctggagggaatgctatgagttggcctttagtctgtatcggtgactgtgttgaaaaggtcgcgtcttggaatccattaaagtctgaaagtcagactccgtttttctatattgacttgagctcggttgataaagacaaaaaggcagtggatcgaaacggtgtatctaaggtgttgccaaacgatgcgcccagtagagctaggcaaatagtgaagtcgggggatgtactagttgcaaccgttagaccgaacttaaatggtgttgcgttagtgccagaggagtatgaaggtgctaccgcctctacaggttattgtgtgctaaggcctgagggcaaccgtttggatagtaaatatctgtactactgggttcagacgagagtttttgtaacagacatgatggaaaaggctacaggggccaactacccagctgtgtccgataaaataataaaggaaagtaaaattcctctcccccccctaacagaacaaaaacgcattgccgctattctcgataaagccgattccatccgctacaaacgccagcaagccatccagtttgccgacgaattcctccgcgccgtgtttctggatatgtttggtgatccggttacgaatccgaaggggcttgatgttaaaactgtgtccgagtgcatatcagataaaataatcctgcaagttcaggacggaaatcacgggaatgatcacccaaaagtgagtgatttttcagaaacaggtattcccttcgtaacagcaaatgtggtgagacgaggaaaaatcctttttgatcaatgttactacttggaaagagagtggctagataaacttaggataggctttgctaaaccaagagatgtacttatatcgcataaaggatcattagggtttacggctgttctggataataccttcgagaactacatttttagccctcaagcgacttattatcgagtaaatgaagagcaacttctccctgagtatttgaaagcttactttgactcggcattttttcagagattgtttgcaaaagaaggaattcaatctacgagagcttacttaggtataacgcgacaaaaagaacttccaattttactgccaagaattgaattgcagagagagtttttgtcaatccatgattacttttcgaaggtatgggcgaacatctttaattcaatgccaaagcttgatcaatgcattagcgcattaagccaaaaagccttttctggtcaactctaagaagagggtatgatccgcgaaatccaaataaactcacccatagccactatatgagtctaacaagactcagtgatgttcgtcgcatcaattatattttggtgctaacggtacaggcaaaacactatcagttgtgtaattgctcaagcgcatgaccatgagcattgccgattgcaataaggtggcacagagcttgagcggatggtgtataaccgggatttcgttgatcgaaattttaattaggatggccctctacagagtgttttgaccttgagtgaaaatcagattgaagccaatgaagcatattttcgtgtttttcgaagcatcttcagtaaagcgggtcaaattggacactacacatgatgacagggactgttatcgaagaacagaatgattactctggtgacgaagaaactgctgtagggtctgaattggaagcaaaatacaatgaaaatcactcaaatatcactgataaatttccgctcctttaaatagacgcaaacaatctatattgcgccgctgacgcttttgtttgggctaaatagcgtcggtaagagtttcgtattaatggcgctcgcttacgtgcagcagatcttgaaacatggacattacaactcccaaaaactggattccctaggtaaaaaaacaataggtggtttgatggctatgagcaagcggacaaacctattgtttatctggatgaaagtggttttccccaatccatgcctcgcctgcacgggtgttcaaaaaaagggttacggtgcttcggtatggtcgtgcgcagacgccagttaatgacgatgttggtggctgaacgtaccgggcgttcaaccggcaccgggcatccgggattcagcttttttaatcgcggtggtgcgccgctgaccttcgatccgatgaacaaacaggatcgcacccagaatgcgcacttattgctgtttggtccgaccggggcaggcaaatccgccactctgtgtgcttctctggttcaactgatggctatccaccgaccgcgcctgtttattgtcgaagcggggaacagttttggactgttagcagactattacgccagtctggggctgacggtgaataaaattggtatcaaaccgggttgtggcgtcagtctggtcctgtttgctgatgcgcatcagttactgaaactcagtcccaaacaattacggattaatgaagccgatattccggagactgatgaagcacaggaagacggcgatgaacagcgtgatattctgggggaaatggaaattgccgcccggctgatgatcaccggcggtgagaaaaaagaagaagaacgtctgacccgttcagatcgcggattaattcgtgaagcgattatgttagccgcacagatcagctatgaggcagggcatcagatggtggcctcggatttacaaactgcgctgtatgccattgcccgtaaccatcagcaggatgaacacggccagcccttaggtgtcgcttgcttgtgcagcagttccagcaagagcaagcaacccgatcatcagccatgtgcgtgcatggcctcgttttctttggcgcataagaaatgaactccttgtaggttgttgtggcacgtccacttgacgggacttgttcttaattttggatcaaatcatttccaaaatcaagatgagcacgttatggcaaaaaaaacgcccccgaagagccgttgagttgctgtagtgggatcagtcggggagcagccgcattgccatcgccacatctacaggattgccatccaagttgaaggaacacaggccggattccggcgcgccccccgacacgttctgcaaggcgacgatcgtcttcgcgatctgcagcatgcaagtcgtctgcgatgtggctgcgcagcccgagaaggtgaccttcacggccaactgccgaggcgcttcgccatgcccgagaaaaaggccattttttagccactgctggcactggcatttgtcattattcgtttccccatgtgggtcgaataaatgatgaatacaaaacgtcaacacgccctaataaatagcgtcaataaaacaggtaacccggcaataaatgcaagaatcagtaaagatatagaataattcatcatcagcagtaggtgggcaataagtggccctatacttgctccaacaaatagtacaaatgtatagagtgatatggctgttcctctatattgttgttctgccagaacagcaattacaccaaccagagaagggacactgaatgcacgtccgccaataaaaataatactggcgaaaagtaatccccatgcactaccaaaagaaacagtgactgaggccactattaatcctgccgcggcaattaaaaagctccatcggacgagcgatatcgcacctattttttgtattatccaaggtgcaagcagggaaagaaacatcacgggtaaaacaatcagcctcgtagtgaagggttctatacccattatggcaaattttttaccgtaactttcgtccatcataatataaaaagcaactaacgctgataacgtacataatgtacttagatacaaccactttaagtttttctcaaacaatattcccggtattttcctataaatatcaaacaatgttgttttattatgctcttctacttgattgctttccttatccctgtgaacaacaaaataaatcaaaataattgacacaaaataaacaggaaccagcgcaagctcgatagtattaaaaccataatgactgaattttatagcataaagctgggcaacaatactcgctgttaaaaaacccaacgacataaacgatattgctctcgatttcagcgtagaagacagtttttcattcaggtatgccagtataatgggcggataacaagaggcggcaagtccctgtaatacccgaagtgttaataacaggctaaagttagagcaaaatccgactaaaacggtgaataacagaaaaaagataaacccggtgagcatgaccaatctacgaccaaagcggtctgaaagtgggcctgataataaaaaacctgccgaataaccgatactgaaagcgctgctcacccatccagccatgtttttattgttgttaaaatgctgggttatctccgtaaggatcggaatcggaatgtaaatctggcctacgaccgtaaggcctgttaatgctaaaagtacactgataagtagtgggtaccgatgtaatgttcgggttgccatcattacatttcctcaattgttggaactacgatgccattttggtaaagccccccaacacattgaacagtactgatacaaatcgacatgcactgttttgtttcaatttaagtgtatgagggaatttcgggatttcaaggagaaggacatacaagaaaatgccatcgaacatcgctatttattaccttatttaagcgagagtataaaaccacagcatattttattgagtattattcaatttgataaaacaatcctgacctaccttcattggtcagcaggtggctcaaggtgcggctgcctatcgccccccggctttggttatacaagttcacgaactccgatgcgtcagtgccttacctactggcgttatcccctgtatttctgcgttgtactgacgaacccattttcccagcgtgctgttattaatcccccaatgactgggcgacatcgacaacccgttgttaatggagaacaacctgttgaaccgcttccagtttaaattcagcggaatactggcatttggtgagtttcaatttcattgtgacacctcatggtcatattaataacattagctggctttataccactacatttttctcagggggaattttatatacaatcataaccacccgtataacgggtggtttgctcttgccctataagggcttgttaccgactgcgcctaaatgacgctgctttctcttcgttcaagctaagtgtctttgctgctttggcctaccccttgaaggggtctacatgctctttactactcaatttatccgagattaaatccgacttttcttgctctctgatatatttttgaattgtcgcttcatttagccctaccgtactgacatagaacccttccgcccaaaactttctgttgccaaatttatattttaaattggcgtgtctatcaaagatcatcaacgaacttttacccttcaaatatcccataaagcttgaaacgcttagctttggtggaatactcaccaacatatgaacatgatctggcatgagatgaccttcgattatttccacacctttatacttacaaaggtctctgaggatctctcccacacttgaacgaatattattaaaaatcactttccgtctatatttcgacgaaaagacgatatggtatttacacagccactttgtatgcgctgagctttgtgctttaatgcccataaacacctttccttatttgagttacgaatattagcttgtacatctatatcgtaacggaaaggtgtttttcttggtataacctttgaactccacccgcaaagcgggtggttttatgtttaagacgctaacgcgacttaaactggctaaagccataaataaaaaagcgcctgtcgaaacaggcgcttttcagacttaacagtaaatattttgattagtcatcaaggaagctacgcaatacttccgaacggcttggatgacgcagtttgcgcagagctttcgcctcgatctgacggatacgctcgcgggttacgtcaaactgtttaccaacttcttccagtgtgtggtcggtgttcatatcgataccaaaacgcatacgcaggactttcgcttcacgcgccgttaatcctgccagcacatcgtgggttgctgaacgcaggctttctgaagttgcagaatccagcggcagttccagcgtagtatcttcaatgaaatcacccagatgcgaatcttcatcatcaccaactggcgtttccatggaaattggctctttggcgattttcagcaccttgcggattttgtcttccggcatcagcatacgctctgccagctcttccggtgatggttcacgccccatttcctgtagcatctgacgagaaatacgattcagtttgttaatcgtttcaatcatatgtacaggaatacggatagtacgcgcctgatcggcgatagagcgggtaatcgcctgacggatccaccaagttgcataagttgagaacttataaccacggcgatattcgaatttatcaaccgctttcatcaggccgatattaccttcctgaattaaatcaaggaattgcagaccacggttggtgtatttcttggcaattgaaataaccagacgtaagttagcttcaaccatttccttcttcgcacggcgggcttttgcttcaccaattgacatgcgacggttgatatctttaacttgatcaattgtcaggccagtttcttcttcaatctgacgcagtttttgcaaactgcgcatgatttcttcttcaacttccggcagtttgtcagaccaaggcttgttcattgcttttgcagccgtgaaccatgtctcagttgtttcgttaccggaaaacagagtgatgaagtttttcttcggcattttgcactgttcaacacacatcttcatgatttgacgctcttgaagacgtacacgatccatcatggaacgcatgttgttgaccagataatcaaactgctttggcaccagacggaactgtttgaatacctcggacagcatcaaaatttcagcggcagtgcttggatggctgcggccgtggctttttattgactgacgggtaacttcatattgctcacgcaattccatgaatttttggcgagccagctccggatcgatgctgttatcatcgtcactgtcagtatcatcttcaccgtcttcatcttcatcatcgtcgtcgtcaagctcttcctgaggaagttcagagccaatgtgagtagctgtcggtgctagatcttcttctgcgttaggatcaacaaatcctgtaatcagatcagacaggcggctttcacctgcttcaacatggtcatactgttctagcagataggtaatagcttcaggatattcggcaacggagcactgtacttggttgatgccatcttcaatgcgtttcgcaatgtcaatttcaccttcacgagtcagtagttcaactgtacccatttcacgcatgtacatgcgaaccgggtctgtagtacgaccgatttctgactcgacactggataacacttgcgcagctgcttctgccgcatcttcatcggtgtcgttcgtgttttctgccaacatgaggtcatcggcatcaggtgcctcttccattacctggatgcccatgtcattgatcatttggatgatatcttctatctgatcagaatcgacgatatcttccggcagatggtcattgacctcagcataggtcagatagccttgctccttacctcgggtgacaagtagcttcagctgtgactgcgggttttgctccataagacagtatccacacttcagagtattggttggtgtcagtcggcgaaacaaatatgccaacaataacattcagggggcatttcgttgtattgccactgccctcaatagcggcaattgtagggctatctccctacctcattcggcacttaagccgtaaattctggattcattttttagcgctggattcagaaatcagccagacttctttacgttcttccggtgtcagaccttcagttctttctttagccaccaaaaatttaaaacgttcttccaacgctgatgcgaaaagatgatttaacgcatcactaaacgttttttcagcaatttcttctacttgtatatcgttccatgcggcgagtttttcaagctgttttgcgtacttattatcgcgatattgctccaaaagttgaccggttgttaaccccggctgagcaaggcatgtgtcgacaagctccataaatagcggtaatcccgctacctgagcagaaaacattccctgtaatgaagggactaatgtcgctaaatgcgggttctgcaccagtaatgcgattagtatgcgcattgtcgttggtttcagttttagcgcctgatatgtattggtatcttttttgacaagttttgccagagatcgttccaattgtgtagtatcaggtatgcccagcagttttccaagctcctttagcaggtaaagccgcaatgcttcgcccggaatctggctaattagtggcatcgcaagtgaattaagcttagttgctccttccggagtacttaaatcaacctgtaacaatagtgaatcaaacagaaattcagacagagtcagtgccttttccattctctgttcaaatacttctcgcccttctttgcgtactagtgaatctggatcttcgccatcaggcaagaacataaaacgtaattgccggccatcattcagataaggcaatgctgtttccagcgtcctccatgcggcagtacggcctgcacggtctccatcgtaacaacagattacactatcggttgtccggaaaagtagctgaacgtgttcggctgtcgtagatgtccctaacgaggctacagcataatcaatgccaaactgagccagtgcgacgacatccatataaccttcaaccaccaataacctggaaagggtattgtggctttgctgtgcttcataaagaccatacaactggcggcctttatggaaaatctccgtttccggtgagttcagatacttgggaagtgcatcccccaaaactctgccaccaaatgcaatgacacggctcctgcgatcacgaatagggaacataatacgttcacggaaacggtcataagtgcggccgttatcattcgtgaccagcatccctgcatcgcttaactgattgcggtcttcggtattatgggcaaactgcttcaggacattatcccaccccgcaggggcgaagccgatcgcaaaacgctgaatgacctcttcactgagcccgcgcctggtcagatattgccgggcggcctgtccatttggtgtcgtcagtgaacgctgatagaagctgtttagcttatccatcaactgataaagattttgccgttggtggcgttcgatatgtccgccacctgagcctgcttcgtaagggacttccagtccgtgcattgtggccagttcttcaatggattcgacaaaatctaacctgtcataattcattaaaaaatcgatggcgttaccatgggctccacaaccgaagcaatgataaaactgtttgtcgccattaacagtaaatgaaggggttttctcattatgaaaaggacaacacgcctgatgatttttacctttctttttgagaggcactctgacatcaattagatcaatgatatcggttcttgctaacaagtcattgataaatacgcgtggaattcgtccagccataagcccttttacgcctgttgatgaacgagaataagccgcgctttctcagggaaagcacggcctttaactgcagtagtttgttaaaacaaacactttgcgggcaggccgcaaagattagtacaaacgagtgcgacgtgcgttttcacgagccagctttttagcgtggcgcttaaccgcagatgctttagcgcgtttgcgttcagtcgttggtttttcatagaactcacgacgacgaacttctgctaatacgcctgctttttcgcaagaacgcttgaagcgacgcagagctacgtcaaatggctcgttttcacgtactttaattactggcatgtgcctctcacctcaatagaaatcgggtttctttagagcacatggctcg

SEQ ID NO: 2402 - DNA, 14442 bp, Xenorhabdus sp.; identical to SEQ ID NO: 2401
  CDS (2890)..(4494)

SEQ ID NO: 2403 - DNA, 14442 bp, Xenorhabdus sp.; identical to SEQ ID NO: 2401
  CDS (921)..(2777)

SEQ ID NO: 2404 - DNA, 14442 bp, Xenorhabdus sp.; identical to SEQ ID NO: 2401
  CDS (187)..(918)

SEQ ID NO: 2405 - DNA, 14442 bp, Xenorhabdus sp.; identical to SEQ ID NO: 2401
  CDS (4686)..(5699)

SEQ ID NO: 2406 - DNA, 17116 bp, Xenorhabdus sp.
  CDS (1)..(1128)
atggctctgctcgcacttccgatgacattttttgctcaccggggaatgtgtcgttttgtcctgtccggcaaaaatagcggtgaagatatcactggtgtagtagaagagcatttcgggaaagtagccggcttttttattactatcctctacttctttgctatctaccctatcctgctggtttatagtgttgcactgaccaatacggtagaaagtttcatcatccaccagctgaatatggatgcacctcctcgtgcactgctggcactggtcctgattctcggcgttatgagtattatccgtttcggtgagcaagctattgttaaagcaatgagcgtgctggtattcccattcgtcactgtattaatgctactggctctgtacctggttcctcattggaacactgcgatttttgatactctgtcactggaaaatgctgtttcttccacaaacagtcacggcctgctgttcaccctgtggctggctatcccggttatggttttctctttcaaccattctccaatcatctctgcgtttgctgtagcaaaacgtgaagaatacggcgagaacgcggaaaagaaatgttcacgcattctgggctatgctcatatcatgatggtactgacagtcatgttctttgtgttcagctgtgtactaagcctgtcacctgagaatctggcagaagcaaaagcacagaacattactatcctgtcttatctggccaaccactttaatacaccactcattgagtctattgccccattcattgcctttatcgctattaccaaatcatttcttggtcactatctgggggctcgtgaaggttttaacggtatcgttagtaaagctatgagcgcacgaggcaaatctattcagcacaaaacgctgaatcgaatcactagcctcttcatgctgatcagtgcatggattatcgcgactcttaacccaagcattctgaacatcattgaatctctgggtggccctatcattgctatgatcctgttcatcatgccaatgtatgccatttacaaagtacctgctatgcgtaaatacgcaggcaagccaagcaatatcttcgttattctgacaggttcaattgcgatttctgccgcagtttactctgtaatgtaagcagtatatcaggcaactttttcgagttgccttcctgaaaaaaatgccagtctcttttataggactggcatttttatatcgctctggctgtatgatacacaatggatttcaagttgcatcgcggcggcaagagagtaacaaattcgtcgggaacgaatttgcccagccaaaggctggcctccggtgagaagcaggagcctctcagtaatccccaggagcatagatactggggtgaacgagcgcagccaacaaagaggcagcttgaaagacgaagtgtatatattttcgtatttttaaaatcacttattaactgaaaattgagttaaaccagccactgaccgtctttacaacaaaatcccaaatacggccaaaaaatcccgtttcctcaaccgcgtcttttactaccagtgggtgctgttcaactaccttcccatccagcataaaattaacggttcctacgatctgattttttgccaatggcgcttccagctcaggctgattcagggtgaaactcgctttcaaattaccggcctgcccacgtaaaagagtaacagcggcatctttttcaacacctaatgctacctccgagcgtgttccgtaccatactttttgcgtgacaaaaacagcatcagcctttaatgggatcgtggtttcataaaaacgaaagccccatgacagaagcttttcactatccacaaagcgcattcgatcactggaagctcccaaaacaaccgagattaagcgcatcgggccttctgttgcagatgcgactagattatatcccgcaccactggtatgccctgtttttatgccatccacattcatattctgattccacaacaaacggttgcggttaggttggcggatcttgttaaacgtaaattctttttctttattcagcgcatattcttccggaacatcacggatcatcgcctgccccaaaacagccatatcacgcgcagtactgtattgccctgaagcatctaatccatgcactgttttaaaatgcgtattcgtcagccccagtgactgagaatatttattcatcaaatcaacaaaagcatcctgacttcctgcaacataatcagcaagcgcaatacttgcatcattgccagactggataacaatcccgcgattcaaatcaataactttgactctatcacccggttttaaaaacatcagggatgagcctttgagtgcaggattacctgtcgcccacgcatcctttcccactgtaaccatatcgtcctgagagattttacctgacttcatcgcctgcccaacgacatagctggtcatcatttttgtcagacttgcaggatctaagcgttcatcagcattatttgatgccagaatttttccgctggcatagtccatcaaaacataagatttcgcatcaacctcaggtgctgcaggttcgtccattgcatataagctggtactcgccagccaaaaaacacccagccccaccgaaaaagactttattctcttaatatgacctctttttttcaccattatcatccaccttctctctctgacaaccacatcctattcaacaattgaaatacaaaactcctattaatatagatgttataggataagactccaatccaataacgcaaagattctcctgttatttctatgaatttattgtcatattatcaaacgacttgatattgaggagaaaatgatgctgacagtctggggccgtaaaaattcatcaaatgtcaaaaaagtgctttggtgtctggaggaattaaaagttccttaccagcaaattgatatcggagggaaattcggcaaacttgatgatccgaattatttacacatgaatcccaatggagtaattccatgcttacaggatggtgattttatactgtgggaatcaaatgtgatcgttcgctaccttgccgaaaaatttggcgaaaatactctatatccgaatgatattaaataaaaatataatatcgagaagtggatggactggactgggtgcaatctcttctcccccatcaaacaactcatgataagccttgtcaggacaccagaggcacagcgtgatcaaaaagtcatcgctcaggctttagctgaaatagaaagactgctgaaaattgccgatgaagcattaagccaacaaacatacctttccggtgataaatttggcatggctgatatagccctggctccgtttatctacccgtggatcaatgtggtaactgaacgcccatcactgccaaacttagaacgctggtatcaattaatgaccgaaaggccagcattccaaaaaatcgttatgatcgaaataaattaattacagactcatcggcatactcccgggatctggatattgatactcgaaccccagttcccggcaaatacggcttccatccactgttttacatttttcagtgtcgctttccgatccctcatcttccggctgtaaaaattctggcggagtcagattaagctggcaacaagcctgtgagtaaaattctgatcttttaggatggacaggtgcacataaattgtagacattccctccctcagagcgctgaataagcaatttaatggcggagatagcatcatcctgatgaaccaaattaacagcattttctcctcctgaaattgccttccgccctgccagaaaacgccctgcgtggcgacccgtaccgaccaagcctgccaaacgtaaaatatcaactgaagtattgggtaactgatgcagccagttctccagttcaaccaatgctctggctgactgagtttcaggagctaatggcgcatcttcattaagatgaccaacagacgagccataaacggaagttgagctggtaaaaataatatgaggaacggaatgagaaagtgctgtgtctacaatcaactgtattgctctgacatagtctacaccacctcctgcgataccactggttggcaacatcagaaccaatacatcaactgacatcagctgttcaagctcatcggctgcacagactatttcaggaaccaggtttaataaatggcaatcaataccacacatacatgctgcttcaaccccgtctggtgttgttttactgccaatgacctgtaaaccactcccttgcagggcttgcgctaatggcagtcccagccatcccagcccgataattgaaacctttttcactataatattctccagctcatatgctattgattattaggttaaattattcacataaaaaatattaatcaattatatattgataagagaaaacataattatttataaaacaaatagttaatatctaaaagtaacttttttgaaaaaaaaggttgcttttcatacatagaatcagataggttaaacgacagacagtttattatttattctggcaaaccatgccagcatatagacaaagttaagcataaagttaccctgaagtcacaaaatagcccttaatacaaataacacaaaaaatcacatcaaacagagaacacacatattatgaatcgtattcaatttagccatcatcatcaccatcatcctgactagtctttcaggctgttgtgtgctggaagacatttagtaagtcttccggaggcatgaatacgataaaaaccctcggaagatttttcgggggtttttttatacctaataaatcccgagcccaatgaatttcgagctacagaaaatattctgatttatatatagggtagacataacatgttagataaaacacgcttgcggatagccatgcaaaaatcagggcgcctgagtgatgattccagagaattactggcacgctgtggtatcaaaatcaatttgcaacaacagagattaatcgctttcgcggaaaatatgcctatcgatatccttcgtgtccgtgatgatgacattccgggcctcgtgatggatggcatcgttgatttaggtattattggtgaaaacgtactggaagaagaactactgagccgccgggcacagggggatgatccccgttataccacattacgccgtcttgattttggtgcttgccgtctttctcttgctgctcctcttgattacaactatacaggagaggaatgcttacaaaattcacgcatcgccacatcttatccacacttactaaagcgctatttagataaaaaaggcattcaattcaaaccttgcctgctcaatggctcagttgaagttgctccaagggctgggttagctgatgccatctgtgatctggtttcaaccggtgcaacactggaagcaaacggattacgggaagtagaagtcatctatcgctcaaaagcctgtctgatccaacgtgatggggaaatgccggaagctaaacaacagctgatcaataagctgatgacccgtattcagggtgtgattcaggctcgtgaatccaaatacatcatgctacatgcaccaagtgacaaactggaagaaatcatcgatctgttgccgggcgcagaacgccccaccattttgccgctggccggagcgcagaatcgtgtagctatgcacatggtaagcagtgagacactattctgggaaactatggaaaaactcaaggcactgggagccagttcaattctggttttaccaatcgaaaaaatgatggagtaagcccgatgagcaccaatgtcagtaatgtcgattttagcaccattatccgttggcaggcatgtacaccgaagcagcaagaaatgctgctgacccgtcctgctgtcaccgcatctgaagatattacatatacggtgagacagattctggaagcagttaaagagcgcggtgatagcgtgttacgggaatacagccagcgttttgacaacacaacaattgatgctgtccgagtcccagaagaggagattaatgctgcaggtaggcacctgacaacggaaatccggcaggctatccagcaggcaatggataacatacgtctgtttcatgaagcacaaaaacctgtggtaattgaagtagaaactatgcccggcgtgtgttgccaacaaatcacacggccaattgattctgtagggctctatattcccggtggctcagcaccactgccttctacggtattgatgctggggatcccggccagcattgccgggtgtcgtaaagtaacactgtgttctccaccacctattgccaatgaaatactctacgctgcgcaactatgcggtatcagtgatatcttccagattggcggtgctcaggctattgcagcaatggcatttggcacagaatcggttccgagagtagataaaatttttggcccgggtaacgcatgggtcactgaagctaaaaaacaggtcagtcaacatattgacggtgcggccattgatatgcccgctggcccttctgaagtactggtgatcgctgatagtggtgccaatcccgtattcacagcagcagatctactttcacaggcagaacacgggccagactcgcaagtcatactcgttacacctgacgaaagctatgccggggaagttatccatgaaattgaaaaacagctcccaaccctgccacgccaacaaattgcaatacaggccttacagtccagccggattatcgtcgctgacgatatcgcccaatgtgtggcgatcagcaaccaatacggccctgaacacttaattattcagacacggcaaccagagcaaattgtagataaaattaccagtgccggttccatttttctcggcgactggtctccagaatctgcgggagactatgcctccggtaccaatcacgttttgcccacttacggctatacctctacccattcaagccttgggctggcggattttctgaaaagaatgaccgtacagaaactaacgccacaaggcctgaaaaagctggctccaaccatcgaaacactggcacaggcggagcaactcactgcacacaaaaatgcagttacattacgcatcgctgccttaaataatcctgataatacaaacaataatgcagacactagctctcaggctaaggagtaattaatgagcactgtttttgatgtcacttcactggcaagagaaaatatccgtaaattagtcccttatatgtcagcccgtcgtttgggtggcaatggtgatatttggttaaatgccaatgaatatcacgccgcacctgattttcagttctctgaaaaaacactcaaccgttaccctgaatgccagccggcaacagttattcagcgttatgctgattatgctggcctgcaaccagaacaagtacttgtcagccgaggagcggatgaatctatcgaactgctgatacgtattttttgtgagccgggcaaagatgcggttatgttttgtccgccaacctatggcatgtacagtgtcagcgctgaaaccttcggtgtcgcacagaaaaagatcctcgctggcatagactggcagccaaatataacaaccatcaaaaataatctggatcgcgtcaaattaatctatatctgtagcccgaataacccaacaggtaatctgattgctccctctacgttacgccagatcctcgaactggcccgtaatcgtgccatcgttgctattgatgaagcctatatcgaattcagcctgcagaatactaccactcgctggctaaaagagtatccacatctggtaattttgcgaaccctctcgaaagcttttgctttagcagggctgcgttgtggatttacgctggcttctgccgatattatcgcgctaatgttgaaagtgatcgccccctatcccattgccacacctgttgctgatatcgcggcacaggctttaacagcatcaggcatacgggtaatgcaggagcgggtagaagaaactattgccaatcgcgcttacctacaagacgcacttgataagctgatattagtggagaaagtatttcccagtgaaaccaactatattctggtgagattcaccaatgctgaatttgtattcaaggcattatgggatcagggcattattcttcgtgaccaacaaaagcaaccgaagctggaaaattgcctgcgtattactgttggcagtcgcagtgaatgtgagcagctgatcaccgccattgacgctctttgcaaacaaaatcaacaagtacaggaaacagagaatccatgagccagaaaatactttttattgaccgcgatggcacgttaatcactgaaccaccaacagattatcaggttgatagccttgataagctggcatttgaatccggggtgatccctgctctgttagccttacagaaatccggttataaactggtcatggtcactaatcaggatggattaggcacagacagctttccgatgactgattttgaaccacctcacgcactgatgatgcaagttttttcttcacagggaattcagtttgaagaaatattaatctgccctcacaaacctgcagataactgtaactgtcgtaagccaaaactcggcttaatagaaaaatatctggctgatggaatgctggatacaaaaaatagttacgtcatcggtgatcgggaaactgacctgcaattagcccgaaatatgggaattcagggtcttctctatcaacctgaatcattcggctggtcagcaatttgtgagcagttaacccgcaaggatcgttattccagtgtaaaccgcacaaccaaagaaacagccatcaatattgaggtctggctggatcgtgaaggaaaaagccgcattaatacaggggtaggcttttttgaccatatgctggatcaaattgccactcatggtggttttcgcatgaatattcaagttgatggtgatctttatattgatgatcaccacactgttgaagatacaggccttgctctgggggaagcgctgaaacaggcgttgggtgacaaactcggtattgcccgtttcggttttactcttccaatggatgaatgccttgcccgatgcgcactggatatttccggcagaccgcaccttgaatataaagctgagttcaaacatcagcgtgtcggggatttgagcacagaaatgattgaacattttttccgctcactctcttataccatggggtgtactttacatctgaaaactaaaggtaaaaacgatcaccatcgtgccgaaagtctgttcaaagtttttggtcgcacactgcggcaggctatccgcgttgaaggcgatactctacccagctctaaaggtgttttataagagagaataatgatgaaagttgttattttggataccggctgtgccaatcttgcttcggttgactatgccattcgtcggttagggtatgacccaataatcagccttgatgcagatgttgtgaaatcagcagaaaaattgctcttgccgggtgtcggcaccgctgccactgcaatggcccagctacaacaacgggagttaattcctctgatcacttctcttactcagcctgttttgggtatttgcctaggcatgcagcttctggctgaaagcagcgaagaaggcggtaatatcccgctactgaaattaatcagcgctcctgttaaaaaaatggcaacttctggcctgccattaccgcatatgggctggaataaggttaattttccatcagatcatcctctgtttcatggcatcgaaaataatgcctatttttattttgttcacagctacgcactacccgttggcgaatacaccattgctcaaacagattatggcggctcgttcagtagcgctatttcaaaacacaatttttttggtgtccaatttcatcccgagcgttctggtgcagcaggagaacagctattaaaaaactttctggagatgtaaccccatgattatacctgcattagatttaatcgatggcaatgttgtacgtttacatcagggggattatggtcagtgtcgaaattacggtaattctcctttatcccgtttgcaggaatacgaacagacaggagctaaactgctgcatttggtggatttgaccggagcgaaagatcctgccaaacgccagatttcactgttacgcgaactactatccggcgtatctgttccagtacaggtaggaggggggatccgctcagaaagcgatgttgctgcactccttgaagccggagcaagccgggttgttataggttcaactgcgatcacgcagccagcgttagttaagcagtggtttgagaattatggtgcggaatctattgtgttagcgctggatgtccgcatcaatacagacggcattaagcgagttgctatcagtggctggcaggaaagcagcgaagcaacactggaacaggtcgttgaacaatatctccctgttggtctgaaacatgttctgtgtactgatatttcccgcgatggcacactgaacggttctaatatttcactctatcaagaaattagccaacgctatccacaagttgcatttcaggcatccggaggcgttggctgtctggccgatatttattctctgcctgcatccggcgttacgggtgtcattgtcgggcgcgcgttgcttgaaggaaaatttacactgaaggaggcaatccaatgctggcaagacgcataattccctgccttgatgttcgtgatgggcaggtagtcaaaggggtacaattccgcaatcacgaaattattggtgatattgtgcctcttgcacaacgctatgctcaggaaggggctgatgagctggtattttatgatattaccgcctcttcttatggccgtgttgtggataaaagctgggttgcaaaagtagctgaagtaatcaatatcccattctgtgtcgctggcgggatcaaaacagtcgaagatgccgggcaaattttatcctttggtgcagataagatttctattaactcccctgctctgtcagacccttctttaattaatcgtctggccgatcgctacggggtgcaatgtatcgtaatcggcatcgatacgtggtttgatgaaaaaagtaatagctatcaggtataccagttcaccggagatgaaaaacgcaccacagcaactacgtggcagactctggattgggtcagggaagtacaacaacgtggagccggtgaaattgtcctgaatatgatgaatcaggatggcgttcgcaatggctatgatcttgcccagcttaaacaagttcgggaaacctgttccgtgcctttggtcgcatcagggggagctggcgctccggttcattttctggatgcttttaaacaggctaacgttgatggagccttggctgcttccgttttccataagcagattattaacattggagaactgaaacaatatctggcggaacaagaagttgaggtaagaatatgttaacgatatcaccactgaccccgcaggaaatcgaaaaattagactgggaaaaagtcgataacctgatgcccgtgatcgtgcagcatgccgtatctggtaccgtactgatgatgggatacatgaatagagaagccctgaatgcaacgctaaattccggcaaagtcaccttcttttcacgcaccaaacaacggttatggacgaagggtgaaagttctggtcactttctggaattatccgagatttatcctgactgtgacaacgataccctgcttatccttgccaaccctatcggaccaacctgccataaagggactgaaagctgctttggttcagcacaaacacaatggggttttctttatcaattagagcaattactggcaagccggaaaaatgcttctcccgatagttcctataccgcccgcctgtatgccagcgggacaaaacgcattgcacaaaaagtgggagaagaaggtgtagaaaccgcattagcagcgactgtgaatgatcgggaagaactcaccaatgaagcggctgatttactctaccatctgctggtgttactccaagatcaaaatttagatctgagttgtattatccgtcaattacagaaaaggcattcagttaaagatagcgcgcccttttctgctcaggaataaagttcagaaaacagagccacttcgttaaatgacagcaaccgaataaaacgaagtggcattttatgactaaggcctatctttagctggataactacatcgcctcttcgaaaatagccacaatatcttcgtgtgatgcctgaattgggttagtgaacccacaagcatcttttagtgcattagctgacaatacaggcaaatcttccactttgacgttcaattcagttaatcccgctggaatattgacatcttttgccaaccggcggatttcccgaatacaggcttccgcgccctcctggtcagaaacattctcgacatttgctcccatcgcagcggcaatatctttcaggcggggtgctgcgacttttgcattaaagcgctgtacatggggcaacaacactgcattacagacaccatgtggtaaatcatagaaaccgcccaactggtgagccatcgcatgaacataccctagagaagcattattgaatgccatacccgctaaaaactgggcataagccatattttcccgcgcttccacatcactgccattttcaaccgcacggcgtaaataactactgatcatttccaccgctttcagcgcacaggcatcagtaatagggttggcagccgtagatacataagcttctactgcatgagtcagcgcatccatacctgtcgctgcggttagccctttcggcataccgatcatcaaagaagggtcattcacggataaaataggcgtcacgtttttatccacaatcgccattttgatgtggcgctctacgtccgtgataatacaaaaacgcgtcatttcagaagctgtacctgctgtggtattgatcgctatcaacggcaactgaggttttgcagaaacatcaactccttcataatcgcggatatctccgccatttgccgcaaccaatgcaatacctttagcgcagtcatgcggcgaaccgccccccaacgaaatcacaaaatcgcagctatgctgatgcaaaatcgccaacccttcttcgacattaatcgtcgttggattaggattcgttccatcatacagcgcactttttatccctacattagtcaataaattctgaactttcccgacaacaccaatctcgttcagtactcggtcagtaacaatcagagcctgcttgtaaccataagtttttgctaactgaatggcctcgttcagacatccttcaccgattttattcactggtgggataaagaaagttgatattgccattaggaactccttaggttttactgaggtatctcaaatattgaataagagaagtgatttataatttctcacttatccacgtcagtcattttgactcaaatcaacaatcacaagtgtaggaataaaaaataaacggacattcactaaacttcaaaaggataaaaatttatttaataatcatataaatacaattaaaaatactcagaatcaggagagcattttgttaaaaaatgatatttttgaacaccttactaccttacttgatactaatcatgcctgttatcgggtgatggaacatgccactggcgggaaatcagaggaagtcgcaaaaatacgtgggacacatttaggtcaaggggcaaaagctttagtctgccatgttaagggaaataattaccgtcaatatattctggcaatcttacccgccgatcagcaggctgatctggcagttctggccaaacaggctggtggcaacagagcatcactggcaagcccgaaagaggtttccgaattaacccgctgtgtttttggtgccatccctccctttagttttcaccctgacttaaagctgattgccgacccacttttatttgaacgctatgatgaattggcatttaacgctggcagcctggaacgatcaatcattttaaatacagaagattaccgccgtatcgctatgcctgagttaattgcatttcgcaaagtgatcaatcagccagatttaacctgagcaaaacttacgttctgctataattcaaccagacaagatgagtaattatcctatgaataaattgtttattttgataatgcttggtctggttattattacctgcatcatattactgaacaatatgcttgatgctcatctcgatcattggatggagcatgttgcccactggctgttagaatagtaatcatttccctgaatttactactgggaattgcctgtaaaaaaggtgctgaataattcagcacctttttgaataataatagttaaatattaactttctattattctaaccactcggtatggaatacaccttctttatcagtgcgtttgtaagtatgcgcaccaaaatagtcacgctgtgcctgaatcaggttggcaggcaggactgcggaacggtagctgtcataataagagatggcagcagagaatgttggagttggaataccgttctgtacgccataagaaacgacatcgcgcagagcttgttggtattcatcagcgatttgtttgaaataaggtgccagcaacaggttagcaatagccggattttcgttgtaagcatccgtgattttttgcaggaactgagcacgaataatacaacccgcacggaagatcttagctatctcaccatagttcagatcccaattgtattcatcggaagaggctttcagctgttggaagccctgcgcataagaaacaattttgcctaagtacaacgcacgacggactttttcaataaattccgctttatcacctgcaaatggctgcgcttctgggcctgacagaactttagatgcggcaacacgctgatctttcagtgaagaaatgtaacgtgcgaaaactgattcagtaatcaacgttaccggaacacccaaatcaagagaactttggctggtccatttaccggttcctttattggctgcttcatccagaatgacatcaaccagatatttaccttcttcatctttcttacggaagatatcagcagtaatttcgatcagataactactcaattcgccttcattccagccactgaatacatctgccagttcctgattacctaggttcagtgaatgtttcaataaagagtaagcctctgcaatcaactgcatgtcgccatattcaatgccattgtgaaccattttcacatagtgaccggcaccatctgcaccaatataagtcacacaaggttcaccatccacctgagcagcaatctctttcagaatcggcgcaaccagttcataggcttctttctgcccacccggcataattgaagggccttttaatgcaccttcttcaccaccagaaacccctgtaccgatgaaattaaagccttgcgcagataattcacggttacggcggatagtattctgaaaataggtattgccgccatcaatcagaatgtcacccttatccaaatgtggcgtcagagatgcaatagttttatccgtagcttcaccggccttaaccatcaacaggatacgacgcggtttttccagtgaatcgacaaactcttcaatggaataacttggaactaattttttccctggattttcagcgataacttcatcagttttatcactggagcggttgaagatagatacagagtagccacggctttcaatattcaacgccagattgcgacccataaccgccataccgacaacaccgatctgttgtttggacatgaataactcccgtctgataatgactgctatctaccaaaatgttgcacatgtaacaatgttgagtacaacaaaatatagtagacaatttgttaatgagatcacatgttaactcatgaatgggcattgggggtagttattgatgcaatcgatatcgtcatactgtttttttgctgaaaaaatttccagccgcaataaatcatctattgatattttgacagtcaatcctcattattcaggagtcggcacacgccgtcatactaaaaggtaaaatacactgtatggaatggatcgctgatccgacgatatgggcaggtctggccactcttatcgttttagaaattgttctgggcattgccaacttaatatttattgccattctggcagataaactaccggaaaagcaaagggataaggcaaggctaacgggcttatcctgtgctctgttaatgcggcttatcctcttattcagcctctcctggcttgtctccctgacagcgccattgctggctctgtggggtcattcattcagcgcccgcgattcaattatgctgattgggggaatattcctgctttttaaagcaacaatggaactgaatgaacggctggaaggaaaaaatctgcataccaatcaacagcgtaaaggagcaagtttctgggcagtggttgtacaaattattgttctggatgcggtcttctcactggactcagtgattactgctgtcggtatggttgatcacattggtatcatgatcgctgctgtcattattgctatgatcctgatgatatgggccagtaagccacttacaaagtttgtcaacgctcacccgaccatagtgatattgtgtctcagcttcctgttaatgataggcttcagtctggttgcagaaggctttggttatcgcattccaaaaggctacctttatgccgccattggtttctctattataattgaagcactaaatcaatttgctcagttcaaccgccgtaaatttctgagtgcttcccgttcattacgtgaaagaacagcagaagcggttctgcatattttaaatggtaagcgtgaaagcgcgaatctggatgatcatgcatctaatttgattgcagatcatgaagagcacaaagaagtctttgaaccacaggaacggcaaatgattgcccgtgttcttagccttgcacaacgcactgtcagcagcatcatgacttcacgccatgatgtcgtttaccttgatgttcattcccccatggacaaactggctgtactactgaaacaaaaaccgcatacccggattgtggttacagatgaaaaaaccagtgatgaaccactgggggtcatgcatggaatcgatatccttaatcaacagcttactcatcatccctttgatttgcgtcagttagtacaacaaccattaatttttcctgaatctctt

SEQ ID NO: 2407 - DNA, 17116 bp, Xenorhabdus sp.; identical to SEQ ID NO: 2406
  CDS (2816)..(3085)

SEQ ID NO: 2408 - DNA, 17116 bp, Xenorhabdus sp.; identical to SEQ ID NO: 2406
  CDS (3152)..(3439)

SEQ ID NO: 2409 - DNA, 17116 bp, Xenorhabdus sp.; identical to SEQ ID NO: 2406
  CDS (4829)..(5728)

SEQ ID NO: 2410 - DNA, 17116 bp, Xenorhabdus sp.; identical to SEQ ID NO: 2406
  CDS (5755)..(7101)

SEQ ID NO: 2411 - DNA, 17116 bp, Xenorhabdus sp.; identical to SEQ ID NO: 2406
  CDS (7105)..(8211)

SEQ ID NO: 2412 - DNA, 17116 bp, Xenorhabdus sp.; identical to SEQ ID NO: 2406
  CDS (8208)..(9275)

SEQ ID NO: 2413 - DNA, 17116 bp, Xenorhabdus sp.; identical to SEQ ID NO: 2406
  CDS (9525)..(9878)

SEQ ID NO: 2414 - DNA, 17116 bp, Xenorhabdus sp.; identical to SEQ ID NO: 2406
  CDS (9883)..(10620)

SEQ ID NO: 2415 - DNA, 17116 bp, Xenorhabdus sp.; identical to SEQ ID NO: 2406
  CDS (10602)..(11378)

SEQ ID NO: 2416 - DNA, 17116 bp, Xenorhabdus sp.; identical to SEQ ID NO: 2406
  CDS (11372)..(12031)

SEQ ID NO: 2417 - DNA, 17116 bp, Xenorhabdus sp.; identical to SEQ ID NO: 2406
  CDS (13561)..(14001)

SEQ ID NO: 2418 - DNA, 17116 bp, Xenorhabdus sp.; identical to SEQ ID NO: 2406
  CDS (15953)..(17116)

SEQ ID NO: 2419 - DNA, 17116 bp, Xenorhabdus sp.
  CDS (14519)..(15682)
aagagattcaggaaaaattaatggttgttgtactaactgacgcaaatcaaagggatgatgagtaagctgttgattaaggatatcgattccatgcatgacccccagtggttcatcactggttttttcatctgtaaccacaatccgggtatgcggtttttgtttcagtagtacagccagtttgtccatgggggaatgaacatcaaggtaaacgacatcatggcgtgaagtcatgatgctgctgacagtgcgttgtgcaaggctaagaacacgggcaatcatttgccgttcctgtggttcaaagacttctttgtgctcttcatgatctgcaatcaaattagatgcatgatcatccagattcgcgctttcacgcttaccatttaaaatatgcagaaccgcttctgctgttctttcacgtaatgaacgggaagcactcagaaatttacggcggttgaactgagcaaattgatttagtgcttcaattataatagagaaaccaatggcggcataaaggtagccttttggaatgcgataaccaaagccttctgcaaccagactgaagcctatcattaacaggaagctgagacacaatatcactatggtcgggtgagcgttgacaaactttgtaagtggcttactggcccatatcatcaggatcatagcaataatgacagcagcgatcatgataccaatgtgatcaaccataccgacagcagtaatcactgagtccagtgagaagaccgcatccagaacaataatttgtacaaccactgcccagaaacttgctcctttacgctgttgattggtatgcagattttttccttccagccgttcattcagttccattgttgctttaaaaagcaggaatattcccccaatcagcataattgaatcgcgggcgctgaatgaatgaccccacagagccagcaatggcgctgtcagggagacaagccaggagaggctgaataagaggataagccgcattaacagagcacaggataagcccgttagccttgccttatccctttgcttttccggtagtttatctgccagaatggcaataaatattaagttggcaatgcccagaacaatttctaaaacgataagagtggccagacctgcccatatcgtcggatcagcgatccattccatacagtgtattttaccttttagtatgacggcgtgtgccgactcctgaataatgaggattgactgtcaaaatatcaatagatgatttattgcggctggaaattttttcagcaaaaaaacagtatgacgatatcgattgcatcaataactacccccaatgcccattcatgagttaacatgtgatctcattaacaaattgtctactatattttgttgtactcaacattgttacatgtgcaacattttggtagatagcagtcattatcagacgggagttattcatgtccaaacaacagatcggtgttgtcggtatggcggttatgggtcgcaatctggcgttgaatattgaaagccgtggctactctgtatctatcttcaaccgctccagtgataaaactgatgaagttatcgctgaaaatccagggaaaaaattagttccaagttattccattgaagagtttgtcgattcactggaaaaaccgcgtcgtatcctgttgatggttaaggccggtgaagctacggataaaactattgcatctctgacgccacatttggataagggtgacattctgattgatggcggcaatacctattttcagaatactatccgccgtaaccgtgaattatctgcgcaaggctttaatttcatcggtacaggggtttctggtggtgaagaaggtgcattaaaaggcccttcaattatgccgggtgggcagaaagaagcctatgaactggttgcgccgattctgaaagagattgctgctcaggtggatggtgaaccttgtgtgacttatattggtgcagatggtgccggtcactatgtgaaaatggttcacaatggcattgaatatggcgacatgcagttgattgcagaggcttactctttattgaaacattcactgaacctaggtaatcaggaactggcagatgtattcagtggctggaatgaaggcgaattgagtagttatctgatcgaaattactgctgatatcttccgtaagaaagatgaagaaggtaaatatctggttgatgtcattctggatgaagcagccaataaaggaaccggtaaatggaccagccaaagttctcttgatttgggtgttccggtaacgttgattactgaatcagttttcgcacgttacatttcttcactgaaagatcagcgtgttgccgcatctaaagttctgtcaggcccagaagcgcagccatttgcaggtgataaagcggaatttattgaaaaagtccgtcgtgcgttgtacttaggcaaaattgtttcttatgcgcagggcttccaacagctgaaagcctcttccgatgaatacaattgggatctgaactatggtgagatagctaagatcttccgtgcgggttgtattattcgtgctcagttcctgcaaaaaatcacggatgcttacaacgaaaatccggctattgctaacctgttgctggcaccttatttcaaacaaatcgctgatgaataccaacaagctctgcgcgatgtcgtttcttatggcgtacagaacggtattccaactccaacattctctgctgccatctcttattatgacagctaccgttccgcagtcctgcctgccaacctgattcaggcacagcgtgactattttggtgcgcatacttacaaacgcactgataaagaaggtgtattccataccgagtggttagaataatagaaagttaatatttaactattattattcaaaaaggtgctgaattattcagcaccttttttacaggcaattcccagtagtaaattcagggaaatgattactattctaacagccagtgggcaacatgctccatccaatgatcgagatgagcatcaagcatattgttcagtaatatgatgcaggtaataataaccagaccaagcattatcaaaataaacaatttattcataggataattactcatcttgtctggttgaattatagcagaacgtaagttttgctcaggttaaatctggctgattgatcactttgcgaaatgcaattaactcaggcatagcgatacggcggtaatcttctgtatttaaaatgattgatcgttccaggctgccagcgttaaatgccaattcatcatagcgttcaaataaaagtgggtcggcaatcagctttaagtcagggtgaaaactaaagggagggatggcaccaaaaacacagcgggttaattcggaaacctctttcgggcttgccagtgatgctctgttgccaccagcctgtttggccagaactgccagatcagcctgctgatcggcgggtaagattgccagaatatattgacggtaattatttcccttaacatggcagactaaagcttttgccccttgacctaaatgtgtcccacgtatttttgcgacttcctctgatttcccgccagtggcatgttccatcacccgataacaggcatgattagtatcaagtaaggtagtaaggtgttcaaaaatatcattttttaacaaaatgctctcctgattctgagtatttttaattgtatttatatgattattaaataaatttttatccttttgaagtttagtgaatgtccgtttattttttattcctacacttgtgattgttgatttgagtcaaaatgactgacgtggataagtgagaaattataaatcacttctcttattcaatatttgagatacctcagtaaaacctaaggagttcctaatggcaatatcaactttctttatcccaccagtgaataaaatcggtgaaggatgtctgaacgaggccattcagttagcaaaaacttatggttacaagcaggctctgattgttactgaccgagtactgaacgagattggtgttgtcgggaaagttcagaatttattgactaatgtagggataaaaagtgcgctgtatgatggaacgaatcctaatccaacgacgattaatgtcgaagaagggttggcgattttgcatcagcatagctgcgattttgtgatttcgttggggggcggttcgccgcatgactgcgctaaaggtattgcattggttgcggcaaatggcggagatatccgcgattatgaaggagttgatgtttctgcaaaacctcagttgccgttgatagcgatcaataccacagcaggtacagcttctgaaatgacgcgtttttgtattatcacggacgtagagcgccacatcaaaatggcgattgtggataaaaacgtgacgcctattttatccgtgaatgacccttctttgatgatcggtatgccgaaagggctaaccgcagcgacaggtatggatgcgctgactcatgcagtagaagcttatgtatctacggctgccaaccctattactgatgcctgtgcgctgaaagcggtggaaatgatcagtagttatttacgccgtgcggttgaaaatggcagtgatgtggaagcgcgggaaaatatggcttatgcccagtttttagcgggtatggcattcaataatgcttctctagggtatgttcatgcgatggctcaccagttgggcggtttctatgatttaccacatggtgtctgtaatgcagtgttgttgccccatgtacagcgctttaatgcaaaagtcgcagcaccccgcctgaaagatattgccgctgcgatgggagcaaatgtcgagaatgtttctgaccaggagggcgcggaagcctgtattcgggaaatccgccggttggcaaaagatgtcaatattccagcgggattaactgaattgaacgtcaaagtggaagatttgcctgtattgtcagctaatgcactaaaagatgcttgtgggttcactaacccaattcaggcatcacacgaagatattgtggctattttcgaagaggcgatgtagttatccagctaaagataggccttagtcataaaatgccacttcgttttattcggttgctgtcatttaacgaagtggctctgttttctgaactttattcctgagcagaaaagggcgcgctatctttaactgaatgccttttctgtaattgacggataatacaactcagatctaaattttgatcttggagtaacaccagcagatggtagagtaaatcagccgcttcattggtgagttcttcccgatcattcacagtcgctgctaatgcggtttctacaccttcttctcccactttttgtgcaatgcgttttgtcccgctggcatacaggcgggcggtataggaactatcgggagaagcatttttccggcttgccagtaattgctctaattgataaagaaaaccccattgtgtttgtgctgaaccaaagcagctttcagtccctttatggcaggttggtccgatagggttggcaaggataagcagggtatcgttgtcacagtcaggataaatctcggataattccagaaagtgaccagaactttcacccttcgtccataaccgttgtttggtgcgtgaaaagaaggtgactttgccggaatttagcgttgcattcagggcttctctattcatgtatcccatcatcagtacggtaccagatacggcatgctgcacgatcacgggcatcaggttatcgactttttcccagtctaatttttcgatttcctgcggggtcagtggtgatatcgttaacatattcttacctcaacttcttgttccgccagatattgtttcagttctccaatgttaataatctgcttatggaaaacggaagcagccaaggctccatcaacgttagcctgtttaaaagcatccagaaaatgaaccggagcgccagctccccctgatgcgaccaaaggcacggaacaggtttcccgaacttgtttaagctgggcaagatcatagccattgcgaacgccatcctgattcatcatattcaggacaatttcaccggctccacgttgttgtacttccctgacccaatccagagtctgccacgtagttgctgtggtgcgtttttcatctccggtgaactggtatacctgatagctattacttttttcatcaaaccacgtatcgatgccgattacgatacattgcaccccgtagcgatcggccagacgattaattaaagaagggtctgacagagcaggggagttaatagaaatcttatctgcaccaaaggataaaatttgcccggcatcttcgactgttttgatcccgccagcgacacagaatgggatattgattacttcagctacttttgcaacccagcttttatccacaacacggccataagaagaggcggtaatatcataaaataccagctcatcagccccttcctgagcatagcgttgtgcaagaggcacaatatcaccaataatttcgtgattgcggaattgtacccctttgactacctgcccatcacgaacatcaaggcagggaattatgcgtcttgccagcattggattgcctccttcagtgtaaattttccttcaagcaacgcgcgcccgacaatgacacccgtaacgccggatgcaggcagagaataaatatcggccagacagccaacgcctccggatgcctgaaatgcaacttgtggatagcgttggctaatttcttgatagagtgaaatattagaaccgttcagtgtgccatcgcgggaaatatcagtacacagaacatgtttcagaccaacagggagatattgttcaacgacctgttccagtgttgcttcgctgctttcctgccagccactgatagcaactcgcttaatgccgtctgtattgatgcggacatccagcgctaacacaatagattccgcaccataattctcaaaccactgcttaactaacgctggctgcgtgatcgcagttgaacctataacaacccggcttgctccggcttcaaggagtgcagcaacatcgctttctgagcggatcccccctcctacctgtactggaacagatacgccggatagtagttcgcgtaacagtgaaatctggcgtttggcaggatctttcgctccggtcaaatccaccaaatgcagcagtttagctcctgtctgttcgtattcctgcaaacgggataaaggagaattaccgtaatttcgacactgaccataatccccctgatgtaaacgtacaacattgccatcgattaaatctaatgcaggtataatcatggggttacatctccagaaagttttttaatagctgttctcctgctgcaccagaacgctcgggatgaaattggacaccaaaaaaattgtgttttgaaatagcgctactgaacgagccgccataatctgtttgagcaatggtgtattcgccaacgggtagtgcgtagctgtgaacaaaataaaaataggcattattttcgatgccatgaaacagaggatgatctgatggaaaattaaccttattccagcccatatgcggtaatggcaggccagaagttgccatttttttaacaggagcgctgattaatttcagtagcgggatattaccgccttcttcgctgctttcagccagaagctgcatgcctaggcaaatacccaaaacaggctgagtaagagaagtgatcagaggaattaactcccgttgttgtagctgggccattgcagtggcagcggtgccgacacccggcaagagcaatttttctgctgatttcacaacatctgcatcaaggctgattattgggtcataccctaaccgacgaatggcatagtcaaccgaagcaagattggcacagccggtatccaaaataacaactttcatcattattctctcttataaaacacctttagagctgggtagagtatcgccttcaacgcggatagcctgccgcagtgtgcgaccaaaaactttgaacagactttcggcacgatggtgatcgtttttacctttagttttcagatgtaaagtacaccccatggtataagagagtgagcggaaaaaatgttcaatcatttctgtgctcaaatccccgacacgctgatgtttgaactcagctttatattcaaggtgcggtctgccggaaatatccagtgcgcatcgggcaaggcattcatccattggaagagtaaaaccgaaacgggcaataccgagtttgtcacccaacgcctgtttcagcgcttcccccagagcaaggcctgtatcttcaacagtgtggtgatcatcaatataaagatcaccatcaacttgaatattcatgcgaaaaccaccatgagtggcaatttgatccagcatatggtcaaaaaagcctacccctgtattaatgcggctttttccttcacgatccagccagacctcaatattgatggctgtttctttggttgtgcggtttacactggaataacgatccttgcgggttaactgctcacaaattgctgaccagccgaatgattcaggttgatagagaagaccctgaattcccatatttcgggctaattgcaggtcagtttcccgatcaccgatgacgtaactattttttgtatccagcattccatcagccagatatttttctattaagccgagttttggcttacgacagttacagttatctgcaggtttgtgagggcagattaatatttcttcaaactgaattccctgtgaagaaaaaacttgcatcatcagtgcgtgaggtggttcaaaatcagtcatcggaaagctgtctgtgcctaatccatcctgattagtgaccatgaccagtttataaccggatttctgtaaggctaacagagcagggatcaccccggattcaaatgccagcttatcaaggctatcaacctgataatctgttggtggttcagtgattaacgtgccatcgcggtcaataaaaagtattttctggctcatggattctctgtttcctgtacttgttgattttgtttgcaaagagcgtcaatggcggtgatcagctgctcacattcactgcgactgccaacagtaatacgcaggcaattttccagcttcggttgcttttgttggtcacgaagaataatgccctgatcccataatgccttgaatacaaattcagcattggtgaatctcaccagaatatagttggtttcactgggaaatactttctccactaatatcagcttatcaagtgcgtcttgtaggtaagcgcgattggcaatagtttcttctacccgctcctgcattacccgtatgcctgatgctgttaaagcctgtgccgcgatatcagcaacaggtgtggcaatgggatagggggcgatcactttcaacattagcgcgataatatcggcagaagccagcgtaaatccacaacgcagccctgctaaagcaaaagctttcgagagggttcgcaaaattaccagatgtggatactcttttagccagcgagtggtagtattctgcaggctgaattcgatataggcttcatcaatagcaacgatggcacgattacgggccagttcgaggatctggcgtaacgtagagggagcaatcagattacctgttgggttattcgggctacagatatagattaatttgacgcgatccagattatttttgatggttgttatatttggctgccagtctatgccagcgaggatctttttctgtgcgacaccgaaggtttcagcgctgacactgtacatgccataggttggcggacaaaacataaccgcatctttgcccggctcacaaaaaatacgtatcagcagttcgatagattcatccgctcctcggctgacaagtacttgttctggttgcaggccagcataatcagcataacgctgaataactgttgccggctggcattcagggtaacggttgagtgttttttcagagaactgaaaatcaggtgcggcgtgatattcattggcatttaaccaaatatcaccattgccacccaaacgacgggctgacatataagggactaatttacggatattttctcttgccagtgaagtgacatcaaaaacagtgctcattaattactccttagcctgagagctagtgtctgcattattgtttgtattatcaggattatttaaggcagcgatgcgtaatgtaactgcatttttgtgtgcagtgagttgctccgcctgtgccagtgtttcgatggttggagccagctttttcaggccttgtggcgttagtttctgtacggtcattcttttcagaaaatccgccagcccaaggcttgaatgggtagaggtatagccgtaagtgggcaaaacgtgattggtaccggaggcatagtctcccgcagattctggagaccagtcgccgagaaaaatggaaccggcactggtaattttatctacaatttgctctggttgccgtgtctgaataattaagtgttcagggccgtattggttgctgatcgccacacattgggcgatatcgtcagcgacgataatccggctggactgtaaggcctgtattgcaatttgttggcgtggcagggttgggagctgtttttcaatttcatggataacttccccggcatagctttcgtcaggtgtaacgagtatgacttgcgagtctggcccgtgttctgcctgtgaaagtagatctgctgctgtgaatacgggattggcaccactatcagcgatcaccagtacttcagaagggccagcgggcatatcaatggccgcaccgtcaatatgttgactgacctgttttttagcttcagtgacccatgcgttacccgggccaaaaattttatctactctcggaaccgattctgtgccaaatgccattgctgcaatagcctgagcaccgccaatctggaagatatcactgataccgcatagttgcgcagcgtagagtatttcattggcaataggtggtggagaacacagtgttactttacgacacccggcaatgctggccgggatccccagcatcaataccgtagaaggcagtggtgctgagccaccgggaatatagagccctacagaatcaattggccgtgtgatttgttggcaacacacgccgggcatagtttctacttcaattaccacaggtttttgtgcttcatgaaacagacgtatgttatccattgcctgctggatagcctgccggatttccgttgtcaggtgcctacctgcagcattaatctcctcttctgggactcggacagcatcaattgttgtgttgtcaaaacgctggctgtattcccgtaacacgctatcaccgcgctctttaactgcttccagaatctgtctcaccgtatatgtaatatcttcagatgcggtgacagcaggacgggtcagcagcatttcttgctgcttcggtgtacatgcctgccaacggataatggtgctaaaatcgacattactgacattggtgctcatcgggcttactccatcattttttcgattggtaaaaccagaattgaactggctcccagtgccttgagtttttccatagtttcccagaatagtgtctcactgcttaccatgtgcatagctacacgattctgcgctccggccagcggcaaaatggtggggcgttctgcgcccggcaacagatcgatgatttcttccagtttgtcacttggtgcatgtagcatgatgtatttggattcacgagcctgaatcacaccctgaatacgggtcatcagcttattgatcagctgttgtttagcttccggcatttccccatcacgttggatcagacaggcttttgagcgatagatgacttctacttcccgtaatccgtttgcttccagtgttgcaccggttgaaaccagatcacagatggcatcagctaacccagcccttggagcaacttcaactgagccattgagcaggcaaggtttgaattgaatgccttttttatctaaatagcgctttagtaagtgtggataagatgtggcgatgcgtgaattttgtaagcattcctctcctgtatagttgtaatcaagaggagcagcaagagaaagacggcaagcaccaaaatcaagacggcgtaatgtggtataacggggatcatccccctgtgcccggcggctcagtagttcttcttccagtacgttttcaccaataatacctaaatcaacgatgccatccatcacgaggcccggaatgtcatcatcacggacacgaaggatatcgataggcatattttccgcgaaagcgattaatctctgttgttgcaaattgattttgataccacagcgtgccagtaattctctggaatcatcactcaggcgccctgatttttgcatggctatccgcaagcgtgttttatctaacatgttatgtctaccctatatataaatcagaatattttctgtagctcgaaattcattgggctcgggatttattaggtataaaaaaacccccgaaaaatcttccgagggtttttatcgtattcatgcctccggaagacttactaaatgtcttccagcacacaacagcctgaaagactagtcaggatgatggtgatgatgatggctaaattgaatacgattcataatatgtgtgttctctgtttgatgtgattttttgtgttatttgtattaagggctattttgtgacttcagggtaactttatgcttaactttgtctatatgctggcatggtttgccagaataaataataaactgtctgtcgtttaacctatctgattctatgtatgaaaagcaaccttttttttcaaaaaagttacttttagatattaactatttgttttataaataattatgttttctcttatcaatatataattgattaatattttttatgtgaataatttaacctaataatcaatagcatatgagctggagaatattatagtgaaaaaggtttcaattatcgggctgggatggctgggactgccattagcgcaagccctgcaagggagtggtttacaggtcattggcagtaaaacaacaccagacggggttgaagcagcatgtatgtgtggtattgattgccatttattaaacctggttcctgaaatagtctgtgcagccgatgagcttgaacagctgatgtcagttgatgtattggttctgatgttgccaaccagtggtatcgcaggaggtggtgtagactatgtcagagcaatacagttgattgtagacacagcactttctcattccgttcctcatattatttttaccagctcaacttccgtttatggctcgtctgttggtcatcttaatgaagatgcgccattagctcctgaaactcagtcagccagagcattggttgaactggagaactggctgcatcagttacccaatacttcagttgatattttacgtttggcaggcttggtcggtacgggtcgccacgcagggcgttttctggcagggcggaaggcaatttcaggaggagaaaatgctgttaatttggttcatcaggatgatgctatctccgccattaaattgcttattcagcgctctgagggagggaatgtctacaatttatgtgcacctgtccatcctaaaagatcagaattttactcacaggcttgttgccagcttaatctgactccgccagaatttttacagccggaagatgagggatcggaaagcgacactgaaaaatgtaaaacagtggatggaagccgtatttgccgggaactggggttcgagtatcaatatccagatcccgggagtatgccgatgagtctgtaattaatttatttcgatcataacgattttttggaatgctggcctttcggtcattaattgataccagcgttctaagtttggcagtgatgggcgttcagttaccacattgatccacgggtagataaacggagccagggctatatcagccatgccaaatttatcaccggaaaggtatgtttgttggcttaatgcttcatcggcaattttcagcagtctttctatttcagctaaagcctgagcgatgactttttgatcacgctgtgcctctggtgtcctgacaaggcttatcatgagttgtttgatgggggagaagagattgcacccagtccagtccatccacttctcgatattatatttttatttaatatcattcggatatagagtattttcgccaaatttttcggcaaggtagcgaacgatcacatttgattcccacagtataaaatcaccatcctgtaagcatggaattactccattgggattcatgtgtaaataattcggatcatcaagtttgccgaatttccctccgatatcaatttgctggtaaggaacttttaattcctccagacaccaaagcacttttttgacatttgatgaatttttacggccccagactgtcagcatcattttctcctcaatatcaagtcgtttgataatatgacaataaattcatagaaataacaggagaatctttgcgttattggattggagtcttatcctataacatctatattaataggagttttgtatttcaattgttgaataggatgtggttgtcagagagagaaggtggatgataatggtgaaaaaaagaggtcatattaagagaataaagtctttttcggtggggctgggtgttttttggctggcgagtaccagcttatatgcaatggacgaacctgcagcacctgaggttgatgcgaaatcttatgttttgatggactatgccagcggaaaaattctggcatcaaataatgctgatgaacgcttagatcctgcaagtctgacaaaaatgatgaccagctatgtcgttgggcaggcgatgaagtcaggtaaaatctctcaggacgatatggttacagtgggaaaggatgcgtgggcgacaggtaatcctgcactcaaaggctcatccctgatgtttttaaaaccgggtgatagagtcaaagttattgatttgaatcgcgggattgttatccagtctggcaatgatgcaagtattgcgcttgctgattatgttgcaggaagtcaggatgcttttgttgatttgatgaataaatattctcagtcactggggctgacgaatacgcattttaaaacagtgcatggattagatgcttcagggcaatacagtactgcgcgtgatatggctgttttggggcaggcgatgatccgtgatgttccggaagaatatgcgctgaataaagaaaaagaatttacgtttaacaagatccgccaacctaaccgcaaccgtttgttgtggaatcagaatatgaatgtggatggcataaaaacagggcataccagtggtgcgggatataatctagtcgcatctgcaacagaaggcccgatgcgcttaatctcggttgttttgggagcttccagtgatcgaatgcgctttgtggatagtgaaaagcttctgtcatggggctttcgtttttatgaaaccacgatcccattaaaggctgatgctgtttttgtcacgcaaaaagtatggtacggaacacgctcggaggtagcattaggtgttgaaaaagatgccgctgttactcttttacgtgggcaggccggtaatttgaaagcgagtttcaccctgaatcagcctgagctggaagcgccattggcaaaaaatcagatcgtaggaaccgttaattttatgctggatgggaaggtagttgaacagcacccactggtagtaaaagacgcggttgaggaaacgggattttttggccgtatttgggattttgttgtaaagacggtcagtggctggtttaactcaattttcagttaataagtgattttaaaaatacgaaaatatatacacttcgtctttcaagctgcctctttgttggctgcgctcgttcaccccagtatctatgctcctggggattactgagaggctcctgcttctcaccggaggccagcctttggctgggcaaattcgttcccgacgaatttgttactctcttgccgccgcgatgcaacttgaaatccattgtgtatcatacagccagagcgatataaaaatgccagtcctataaaagagactggcatttttttcaggaaggcaactcgaaaaagttgcctgatatactgcttacattacagagtaaactgcggcagaaatcgcaattgaacctgtcagaataacgaagatattgcttggcttgcctgcgtatttacgcatagcaggtactttgtaaatggcatacattggcatgatgaacaggatcatagcaatgatagggccacccagagattcaatgatgttcagaatgcttgggttaagagtcgcgataatccatgcactgatcagcatgaagaggctagtgattcgattcagcgttttgtgctgaatagatttgcctcgtgcgctcatagctttactaacgataccgttaaaaccttcacgagcccccagatagtgaccaagaaatgatttggtaatagcgataaaggcaatgaatggggcaatagactcaatgagtggtgtattaaagtggttggccagataagacaggatagtaatgttctgtgcttttgcttctgccagattctcaggtgacaggcttagtacacagctgaacacaaagaacatgactgtcagtaccatcatgatatgagcatagcccagaatgcgtgaacatttcttttccgcgttctcgccgtattcttcacgttttgctacagcaaacgcagagatgattggagaatggttgaaagagaaaaccataaccgggatagccagccacagggtgaacagcaggccgtgactgtttgtggaagaaacagcattttccagtgacagagtatcaaaaatcgcagtgttccaatgaggaaccaggtacagagccagtagcattaatacagtgacgaatgggaataccagcacgctcattgctttaacaatagcttgctcaccgaaacggataatactcataacgccgagaatcaggaccagtgccagcagtgcacgaggaggtgcatccatattcagctggtggatgatgaaactttctaccgtattggtcagtgcaacactataaaccagcaggatagggtagatagcaaagaagtagaggatagtaataaaaaagccggctactttcccgaaatgctcttctactacaccagtgatatcttcaccgctatttttgccggacaggacaaaacgacacattccccggtgagcaaaaaatgtcatcggaagtgcgagcagagccat

SEQ ID NO: 2420 - DNA, 17116 bp, Xenorhabdus sp.; identical to SEQ ID NO: 2419
  CDS (12952)..(13677)

SEQ ID NO: 2421 - DNA, 17116 bp, Xenorhabdus sp.; identical to SEQ ID NO: 2419
  CDS (3843)..(4994)

SEQ ID NO: 2422 - DNA, 17116 bp, Xenorhabdus sp.; identical to SEQ ID NO: 2419
  CDS (1428)..(2834)

SEQ ID NO: 2423 - DNA, 913 bp, Xenorhabdus sp.
  CDS (1)..(912)
gcattgtcaaatctgttgcgtaaagattccccgttagatcggtttggaccattgccgccggttgggggcaatccgatgatccatggcattgaaccacaggaagcggaagtgtatatggatctgcgcgagcgggtcgggcataccttagtgatgggcacgacgcgggtggggaaaacccggctggctgaactgctgataacccaggatatccggcgcggtgaagtggtgattgtctttgatcccaaaggggatgccgacctgttaaggcgcatctgggcagaagcccaccgggcaggccgtggcagtgaactttccctctttcatctgggctggccggaaatctcggcacgttataatgcggtcgggcggtttggccgggtatcggaagtcgcttcccgtctggcggggcaattgagtggcgaaggcaacagtgccgcgttccgggaatttgcctggcggtttgtcaatattgtcgcccgtgcgttggtggcgctggggcaccgaccggattacacgcttatcacgcgttacgtcaataatatcagcgaactgtatcagctttatgccactaaagtgatggcagacaggcagcctgtgctgctggaacaaatcaatcaaactctcggcaagctgaaagaaaaagatattccgcgcaatatgcaggggcagccggatgcgctccggctctgggcaatggaaatgatgctcagctctgaggccggtaaacagctctatgaccccattctggatgggttacgctctgccgtgcgttatgaccggacctattttgataaaattgtcgcttctttgctgcccctgctggaaaagctgaccacgggtaaaattgctgagttgttatcaccggattatctcaatatggccgatttacgccccattttcgactttagagcac

SEQ ID NO: 2424 - DNA, 14936 bp, Xenorhabdus sp.; identical to SEQ ID NO: 333
  CDS (213)..(689)

SEQ ID NO: 2425 - DNA, 14936 bp, Xenorhabdus sp.; identical to SEQ ID NO: 333
  CDS (695)..(1705)

SEQ ID NO: 2426 - DNA, 14936 bp, Xenorhabdus sp.; identical to SEQ ID NO: 333
  CDS (1698)..(2105)

SEQ ID NO: 2427 - DNA, 14936 bp, Xenorhabdus sp.; identical to SEQ ID NO: 333
  CDS (2147)..(2572)

SEQ ID NO: 2428 - DNA, 14936 bp, Xenorhabdus sp.; identical to SEQ ID NO: 333
  CDS (2640)..(3374)

SEQ ID NO: 2429 - DNA, 14936 bp, Xenorhabdus sp.; identical to SEQ ID NO: 333
  CDS (3416)..(3685)

SEQ ID NO: 2430 - DNA, 14936 bp, Xenorhabdus sp.; identical to SEQ ID NO: 333
  CDS (3688)..(4470)

SEQ ID NO: 2431 - DNA, 16822 bp, Xenorhabdus sp.; identical to SEQ ID NO: 88
  CDS (66)..(680)

SEQ ID NO: 2432 - DNA, 16822 bp, Xenorhabdus sp.; identical to SEQ ID NO: 88
  CDS (717)..(1472)

SEQ ID NO: 2433 - DNA, 16822 bp, Xenorhabdus sp.; identical to SEQ ID NO: 88
  CDS (1495)..(2277)

SEQ ID NO: 2434 - DNA, 16822 bp, Xenorhabdus sp.; identical to SEQ ID NO: 88
  CDS (2360)..(3121)

SEQ ID NO: 2435 - DNA, 16822 bp, Xenorhabdus sp.; identical to SEQ ID NO: 88
  CDS (3187)..(4272)

SEQ ID NO: 2436 - DNA, 16822 bp, Xenorhabdus sp.; identical to SEQ ID NO: 88
  CDS (4272)..(5240)

SEQ ID NO: 2437 - DNA, 16822 bp, Xenorhabdus sp.; identical to SEQ ID NO: 88
  CDS (7042)..(8004)

SEQ ID NO: 2438 - DNA, 16822 bp, Xenorhabdus sp.; identical to SEQ ID NO: 88
  CDS (10301)..(12226)

SEQ ID NO: 2439 - DNA, 16822 bp, Xenorhabdus sp.; identical to SEQ ID NO: 88
  CDS (13380)..(13922)

SEQ ID NO: 2440 - DNA, 16822 bp, Xenorhabdus sp.; identical to SEQ ID NO: 88
  CDS (14178)..(14303)

SEQ ID NO: 2441 - DNA, 16822 bp, Xenorhabdus sp.
  CDS (16098)..(16265)
taaatggcacccgtcaagtttttgccattaatcgcaaaccgcgtttggcacgccaaacccaccacgacaagcaagacgtaatgcaaaaaaatccagtttctggaattccacattgttcatccaagcattaaataacgtattaacaccagacagtgcggtaaatttataacgggaaagctctttaaccgttgagttcacatcccgcggattggtaatcaataagttccggccacccaattcagtgaacagcaggcaatttatagtaagagcaaaaatatggtatagcggcaatgccgtgacaaccagttcttgtttgggacgtaacaacgatgaataactggctttaacctgttcaaggttcgctaacatattccggtgggtcagcacggcgccttttgccacacctgttgtacctccggtatattgcagaaatgccaaatcttcgttatttacctctggtttgacatactgcatgcgataacccttgtggataacgctgcgaaatgaaattgcatccggcaagtgatatttcggaacaagccgtttaatatattttacgacgaaatctacaagagtcccttttggacgggataactggtcacccatgcgagtcaaaatgacatgtttgaccggagtattgaaaactattttttctaaggtatgagcaaaattagagacaatgactatagccgaagtaccactgtcagtcagttgatgctccaattctcgtggggtatacagtgggtttacattaacgacaatcattcccgcacgcaaaataccaaaaagggcaatgggatattgcagcagattcggcatcattaatgccacacgatcgccttttttaagccccaatccattttgtaaataagcagcaaaagcgcgactacgctcttccagtttgcggaaagtgagaacctcacccatattaataaatgcgacctgatcagcataattcgccacggcattttcaaacatttcaatcaatgatgaataacgatcgggatcgatttctgccggaacatccgccggataatgttttagccagactttttccaagttgagtactcctgaaatctaattgctgtgtaaccattgaccatgaaacaaaaaccagacctgcgtatttaacaaattattaactcagcgtaccagtttgaaaaggaacattgttcaggttggcgatacacatcactaatttaatacttcattatcgctgctaaaaaataaggcagcttatgccgcctatatgtttttattatttatcaaatagttaataccataactagtatttagatgtataattgactaattatacactgatttagctatttttgccgaaaacccatatcattattccaaatagttataaacaatgtaaaccaatgcccgataattattaagggttattcgcatgttactggttagtatccaaacaaaataatgcattaactacgctcccgaggatgggctcccttgccaccgccacgtattctgaaatccattgtgtacacatcttgacctaacaaacgcttctgtgttgtttatcttgtattgataattttttcactatattaggagaagatcattttattcatggataaccctggtgtaatcaaacgggtattttgtcatcagcaataaaatttatatgtgcgagtcggtagaaataagggtatattaatgaacgaacaaaaaacaattcttttttcatgctttttactcgttgttggtttaatggctgttgatttttttaatccttcactaccttttattttaaaagaactcaatacttcacaagaaagcatcaaaaatttaattgtagtttatatggcaacactgggtatttctcagttattttatggcagtatcagtgatcactatggcagaaagcctgctgttgttatcggatttaccatttctattattggtctgtttttatcaggctatagcgaacaaatcaattacctctatttgtccagaataatcacagcatttggtgcagctagttttactgttatctcaagggctattatcgttgatgtctttcagggaaatttaaaattaaaaaaagcattttcttatttttcaatgtccagccagctatctccggctcttgcccctgtctttggaggctggctacaaatgaaatataactggcatatatccttttttacactggctgttatttattttgttggtctaattattaccttactcacaatgggtgaaacgaggaataaggaactaaaaccatcagcgttcctgacaccatatattcaattggcaaaaaatatacaatttattgcattcagcattgcatcatcactcatcttttcttatacaataggctattactccacttctccttatattttccataaacttggttacagcccgatagaaaacagcctattcttcattatttattctgctggaattattttcggatcatggttgttaggaaggcaatttataagaataacgtctaaaaaactctatttactatcactcatattttatagctttattcttgtttttttctcattacaaaacttagaaacaccgattaatattatgatattctcttttttattagccacagtatcaggtgttactgcacctttatcattgattttgtgcatggagaatgtaactaagaacaaaggtgctgccagtgctttacagggtgcattaaaaatgagtttcaccggcgtatttatgatgtgctttgatttatttcatataactgagtttcatcagttaattaatatttttatgattttcactattcttttatttgtaatatatttttctttacgactccagtcttgtaataataaaatttagtgcttattttaaatggccccatatttgttacaaatatgagaccacctttatcactcgactggatgtttttcagtcaagatagtttcaacaggcgcagactgaatttctggacgttctatccattcattaaaatagggatcaccataataaccccacatatttcctactgaaggtggtaatgaaatacgtcttatttcatgccagcgtttaaaaccattaacattcatcacaacatagttatatgggctatccccgacttttcctttttctattcccgtaatcaagccgacaacagtcacataatggtttttgaaatcagtgggttccagaaaagaattcacgtaagcataaagccggccgagtgaaggggaaccaataagaggagcagcattacttgccagtgacattgttgaaatttctaaccgtgtccgtcctttttcatttaagacgcttaggacttttccaccaaagcgcccttcatgcccaatatataaatcgggttttcttttgacactaatcaggttttcctccgggtgtttagtcgctccttttattgagtccggaactgatgcacaaccgatgagtgccattgcccccataaatacaatagattgcaatatgacccgacagtatgttccattgagcataataaatacctcccatacaggaaaaatcagagaatgcgacttcttcgtctttcagattgcctcttctttggctaagatacaacctgaaagatggtgggtatagctagtcctgtttttatggatatcaatatttcatggacaccagcttccgctacaagttgcattaaatttatgcaactttctcccctaaagttacctgagcaattttagcggcccggtaattttttccatgtgacttcattacgcagataaacgggttctgccagctcaactgcggttgcctccccctctttccacatctgaacggctaacggcaacatgtcttctgcatgaggtaacgccatatctcccggaattaaagttaagtgactttccagtaattgaggataagcttcccatcccgttccagctattgcccattcccctgttaaattagacatgatggcctgtgcctgctcaggttttaacacagattcggtttcatcccctgaccatttaccctgctcatcacgggtatactgtgcccaataaacctctcccatacgggcatcaatggcaaccaagacattcgatatatttttaaggcggaataccccctgagccattgtcttcagggaagaaacacctatcattggcagaacagctcctaaggccagcccgtgagcaatccccactccaatacgcacaccagtaaaactgccagaaacataatgccaaatgccagagcatccaattgttgcaactttataccacctttggacaataccgtctccaccataggtagaatacgttgagtatgttcccgtggagaaatctcaaactgcgcctcgatgagaccatcattccaaagtgcaacagaacatgcttcagttgcagtatcaatagctaaaatccgtgtggacatgccttaactccggcaagaatagaattcgaaataagggggctatgctatcatacccccagagattttatacccttcgtctttcaagtttcctctttgttggttgcactcactcaccccggtcaccgtttttataaatatacggttatctatgctcccggggattcgctcccttgccgccgcgatgcaacttgaaattcattgggtatactgcgactgtgattggcgggatttaagaaattccaccgctttcgacagatcccgggtacggggagatgggggcagactgttgagaaagacttcaccataaggtcgcatgactagtcgattatcacaaataactaccacgccataatcatcaacatcacgaatcaaacgcccgactccctgtttcaggctaagtacggcatcaggaagctgaacttcactgaaagcatctccccctttatgctgacagtcttcgattctcgctttaagtagcggatcatccggcgccgtaaagggtaatttatcgataatgacacaggatagtgcatcacctcgcacatccacgccttcccaaaaacttccggtagccaccagcaaagcattacccgctgcgagaaattgtgacaataattttcccttactggtttcaccctgtaccaatacaggtaatgtcatacttgcacggaattcttcaaccaaactgcgcatcatttgatgggaagtacacaggaaaaaacagcgccctttattactttcgatcagtggttttaacatacccgctaaccatttcgccccaccattctgattaggtaatggtaaatgacgcggaacacacaacaacatttgccgctgataatcaaacgggctgggaaggagcaaagtttgagcctgttttagccccaaacgcgcggtgaaatgttcaagttgttcgttaactgacaacgttgctgatgtgaaaacccaacaaccgggttgttcacggatcatttcactgaatttatcagagactgacagaggcgttaatgccaacaaaaagtgccgcccataactttcaaaccagtaactataatcaggcacagtcacatcaatcagtcttttaagacggttacgatagattgtagcccgttcaaaagctgcatccagcattgctgaacgccccagtgacagtttcataacgtcataacaaagttccagtgcatcatccagccgcaccaatgcccgcttaatatgttgctgctgcaaaatttcacggagattaccacgataactgttttctccgagttctaaacgaaaatcttgcgtactctggctcagacgatccgcacttttctgtaactgagcctgatccctgacttccgtgcggtaagccatgatgatatcccgggataaatccagtaattgtcggctgcttaactgctgcccaaaatactggctggcgatatcaggaatttggtgcgcctcatcaaaaatcatcacttccgcctgcggaattaattcgccaaatccggtatctttgacaaccgcatccgccataaacagatgatgattgacgatgacaatatctgcttccatcgccctacggcgagctttcaatacaaaacactcctgataattcgggcagtcacgaccaaggcagttatcattagtgcttgttaccaacggccagacagtgctgtcttccgcaattttatggcaggtactgatatcaccatcttcagtttgtgacgaccaatttttcagcgtaattatttctgagagtgtttctggctcaagttgagagccaccgattgattgctgttcaaggcgctcaaggcataaataatttgaacgtccttttagcagtgccagacgaccggaaaatgccagcgaatcagtaatagcaggcaaatcccggctatagagttgatcctgtaacgcctttgaacccgtggaaataatcactttcttgcccgatcgcaatgcaggcaccagataggcaaaagttttccccgttcctgtccctgcttctaccactaactgttgcttattttgaattgccgcagtaatcgcagaagacatttcccgttgtgcatcgcggggcttaaagccctgtatggttttggcaagtatgccattttctgcaaaatcgtctgacacagatcgtctcttttttaatagaataagattgatttaaaaatcacaatataaacatagaaattaagatcaggataattcatttcacctaaaaatgccgctagtctgcagatgcacagcgcaaaatgacagtatgtattagcagctctcttttatcactcagggaatggataaatattaactttaatcccagacatttctcgcaaacattacgtcctgatatatcccaataataaagagcttgcagacggaactggacaataggttatgacatcacaataatgaacacccccctatcaggataaaatgtgctacgggtttatttccatagaccttttacaggggcaataacccgccaattcaggatcaaaattgtaccaatcgacaggaaattaaatgactattaaacgcattgacccagatacccgttggtcagaagctgttatccacaacgacaccatttattataccagtgtgccagaaaatctggatggtgatatcacagcgcagaccgccagtacactgtctgacattgatgctatgttgcaacgtttgggttcaaacaaaagtaaaatcattgatgcaacaatttttctggctgataaagccgattttgcaggcatgaatgccgcttgggatgactgggttgttgcaggccatgctcctgtacgttgcactgttcaggctgggctgatgcatccaaaatacaaagtggaaatcaaaattattgcagcttgttaagctctaatattgttctaatactgaaataaaatttatggcattgaaaattgttaacttattcaatgccattttagcagtcaggtttaagctgaatttatgccattttgatcataaccataccgatcaacaataacacaattcctccccatcccttaaaattcagacgctggttaaacataatccagcccgccgcaactgtggcaataattccgaatgctccccaaagcgcatatgcaatggaaagctcaataccttttaccgcttgtgccagtgcgctgaatgcacctaaaacagccaccagcgataaaataccaatccagaagcgctcgaacccattggaaagtttcaacaaaatatttgccacaatttctaaacaaacagccagaatcagaaaagcgatatgccaccattcaaaatgcgccagcatattatgcctccttctctttcatctggagttttggtgctttttttgcacctgctttgataagtgcaatacccattattagcagtgacaacccacctactttcatgggtgacaatgattcatcaaaccacaacacactaaacgctgtaataaacaggataccgatcccttcccacaaagcataagcaacacccaaagcaacttttttaaccgctattgctaataaaatataagacgttgtgatcatgaaatacatcacaaacataccggtgaaatcacctgaaatactggcttgcttcatggacagcgtaccaataacctctgtcacaatcgccagtgcaagaaatatccaataaatcatttttctctcccaaacataccgaataggcatgccaagacatcaaactattcatgccaataacatcacctaaaaatgcgatatcaaaagaagcctgatattttggcacataattagttgactaataattggctaaaaagtcgctagaattttccggaacaaaccggttaataggagaaaaaggagctaaagtgcaccacaccagtagtgttcactggataaaatagctgagaggaataagacgtgggtattgctttgaattttggtactacgttggatttttacgcttttggcgctattcatgatgttttattctttcatcacacggaaatcactgtgtaatatactacgaaccctcatattagtggtgtaactgattgcgctctatttttagcatattcaaacaataaacacaattaatgaaatcacttaactcatttgagttagcttaaacaatatatggatagtgcaatcactttccgtctatatttcgacgaaaagacgatatggtatttacacagccactttgtatgcgctgagctttgtgctttaatgcccataaacacctttccttatttgagttacgaatattagcttgaacatctatatcgtaacggaaaggtgtttttcttggtataacctttgaactccacccgcaaagcgggtggttttatgtttaagacgctaacgcgacttaaactggctaaagccataaataaaaggctcttatcgcaaacagataagagccggaaatcacagaattaaattagaatgtattatctatacatctcaaacaaagacattccttttaaatcagtaaatgctttgaaagaagcctgcaaagaagcctgttgctgataatagttggaaatcgtggaagtccagtccacatcaactaactcccctgagcgaactttgttggcaatactgcgttcactacccagagaatccagctgttccagttcctgaagctgtaaacccagtactgcttcaacagaagataggttattcaggctattacgaataccacggttagctttgttgataagctccgctgcttggtttttttcttcttcagtcgctgaactgtatggttcttttaaggctttgatagccatatcgatagtggcaaaaatatcgtcactcgcagttttgccatcaggttctttgattggattaggaggcgaggataaaaacacctgttctccggtatgagcaatcaccattgagcggttatcatccaccttctgggtgattttttcagacccaccaacataagtgactttgccatctttatccgccgaaaaaggcggcacatctgttttatagccggcaaaaatataacggccattgccatcagttttattagcaaggtttaacagctcatctttaaaaccctgcaattgctgtgcataggatgaacgatcctgatcactttgttcatctgctgctgccactaaagtctcaaacacattcgttgttaccttaacggcgttcgctgtaatgctcagctgggatgacattgcatttttggcaaaaatacgcgcagtagtaaattgctggtttttcgattcagactgagaaaccatgatattctgcgatgccgccagaggatcatcagatgggttaataacccggcgtccgctggacagttgctcaccatatttcatccatttggactgagcgccaaaaattccatccattttctggccgtataattgattcgtacttacacgcacagtatcactccttattattccttttatcagcgaatgcctaaaatagcatcgaacaacgtcgtcgccgtctggatcacacgggcgtttgccagataatactgctgcatacgctgcaattcgccgtactcttcatccatattaacgccggagattgattcacgggtttctttcaatttatcaacgatatggccctgtgtttcaacgctgatttgtgcgctgttggctttactgcccacggtactcaccaatgaggcataagcgccggaaaaagaagccttgccatccaccagacgcttatcctgtaattcaaggaatttcttcgcgttgcggttatcacttgggccggcacctttctcgctggcggttgccagttgggaggaatccttgagatttacttccagtgttgcgataacattgccgacagttttcagggtatatttatcgtgttcctgtgcatcagtcgctgtgatttcgactttcagtccatcgaattccagagtattgccgtttttggttacagcaaccatttcacgatcagaaacacgctgaactttccagtctccaccttcatatttgagggtgtaatcgctggctttgactttcgtggaatccgcatattccaccttaatctcagccgtgcctttgttatcgctgctggaaataatttctgacgatttgaaattgaagaaatcaatccctttctcgcctttcagatcaaaaccgccgtgttgtacctgattaaactgatccgccatcaccagtgccagttggttcagttcattacgggtcgagtcaactacttcgctgcgaacacgcaatgcaccacccaacgcgccaccagaaatgaaacgctcatcaatttctctcgtacctactgtgccgttgttataacccagtgtaatacggccgctgtcagcactggatggaatggcttccatacggtaggatttactgcctgataccagcgacatgccaccaccgaatgaaacgttataaacgccaccatcctgctgagtaacatttacttccaccaactgatttaatttattgaccgccagatcacgtttatccagcaatgccagcggttcacccgtgccagtaccacgcatacggatgatttcgttattcagcttggcaatttcttctgcatatttgttgatttctttgacattctgctcaatctgagaattgatgccactatcaagctggcgcagaaattcatcagcttctttaaaacgactgaccaagccttccgctttgcctaaaaccgtggttcttgccgcactgtcttctgcattgctctcaacggtaccaatgcttttgaaaaagtcttcgaaagaattggaaaggctggtgtctttatcggccaacagattgttgatcttagttatctgttcgttatatgactttaacgccgagtgtttggtctgagctgaattgaactgctggttaataaattcgctgtattcacggttaattgtcgtaaccgttgttccgttacctataaaacccaccggggacatagttccattattttgcgtcatgacggtgttctgtcgattgtagccctcacttttggagttggcaatattattacttactacacccattgccacctgagcggcattaataccgctcatcgcagtattcataagactgttggacatgtgtagatccttttacgttttcgctctgcctctattcagagagacatgactgctatcgttatcggtataaattctctgtaaaagttatcggcagaagaacctgaaccttgaacaaaaatgatttggacggtgacttagaacaaatcatcaaaatcgtaggtataggcttttaccatctgagtgccgttactctttaattgctggatcagtgagaccagtttctgcgcataaccggggtctgtggcataacctgcttcctgcaaggaatgtgccccctgctcggcggtcactgactgtgcgactttggcgtagcgggggttttccgtcagcagcctgacataatccgtgacggcttccagataagaatcatagacccggaaactgtcacgcattttttgcggctcaccattcacatactcggttgtcatgatattggtgaccgcgcccttccagtttttacccgccttaataccaaacaggttatggctcggtttaccttcttccgtcagtatttcccgctgaccccagccagattccagagccgcctgtgcaataatcaacaaatgaggaattccgctttgctgactggctatctgtgccggtatggaaagcatggaaacaaaactggaactgtttattggcagagattttgactgtgtgccccctgaagaggatttatcagacaggcttttttcgggcatcgcccggcgtagaaactgctccagcgcttgtgtcggcagcgtatgcaggatgtcattgcccagcggcatcggcacagttccggccagctcactgggagcactgttggcaccggaaacctgtttgacgatcatatcggcaaatcccagccccttttgggaaagatcctgcgcaatctgttgatcgtacatcgaagtataaaaacgcgtctggtcactgcttaacatgccgtcctgcggcaacgaggaacgcatacttttcagcatcatctgaacaaatacgccttccagttgttgggctacctgccgtagcccctgttgtggttcctgtgataatttggctttcagtgaatgaagtgaattcacatcataagccgcagtcggcatcgacagaaaatcattcatcagataatctccagcttcgcccgtaagcagcctgcactttccatcgcctgtagaatcgacattaagtctgtcggtgttgcacccaatgcgttcagtgcacggataacctgtgtcaaattcgcactggagttgactttctgtagcacaccgccctgctcctgaataccaacaccggtattccgggttacgacagtattaccacccgccaacggagtatccggctgactgactgcggtctgacgttcaacaattacagacaggctaccatgcgcaatcgcacaactatccagtgtgacattgcggttcatcaccagcgacccggtacgggagttgaaaatcactttggcatcacccgcatcaacgcgaatattcaggttctgcacttgtgacagaaatttcacctgctcactgttttctatcggcagacgcaactgtactgtgcgggaatccagcgctgttgccgtacccacgccttgcaggcggttgactgcatcactgatttgctgcgccagactgaaatcatcctcattcagttgcagattcagtgtccctttctggccgaatcgcgttggtaactcccgctcaataactgcaccattagaaattcgcccgcctgccagctggttgattttcacgctgttaccgccggcgctgacacccgccccgccaaccagaatattaccctgagccagtgcgtatacctgattatccacacctttcagcggcgtcatcagcaatgtaccgccgcgcagacttttggcattacccagtgaagaaaccaccacatcaatattctgccctgaacgtgcaaaaggtggtagcttgcctgtcaccatcacagcagcaacgtttttaagctgcatattcgtgccagggggcacagtgatccccagctgtgacaacatattattcaggctttgcgtggtaaaaggtgtctgcatggtctggtcacccgttccatccagcccgaccactaaaccataaccagggagtgcgttatccctgataccttcaatcgtcgtcaaatcacgaatgcgttcagcaaaagcgctggtcggtgcgaacgtattgaacagtaccagcaccaacgtaaaaaggctggcgactaattttttcatcctgaccatcctcttttaaaacggtgagatattcataaagaaacgttgtaaccagcccatatgctgcgcttcattatataaccatcgccaacatactcaatgcgggcatccgcaacctgattggagctgactgtattactgccgctgatagtgcgcggattcacaacgccggagaagcggataaattccgttccctgattgatggcaatttgtttttcgccgataacatgcaggttaccgtttgccagcaagtgatccacagtcacagtaatggtgccccggaaagtattgttggcattcgctccacctttgccgccaaactcactgttaccttccatctcaatatcggttttacctccaccaatcacgccctctaagaaacgaggtgtcacagcagcaaggaaacccgttttaccgctacgactggcattggcggaagagtttttgctcgcactgacattttcttgcaggataatagttagcgtatcaccgatattgcgtggacgacggtcttcaaacaatggctgataaccatagtaaactggctggacggtctgaaaaacagaaccattcggcgctggcgcaggtgcttcggttggcttggcagttgtcacccctttcaccagtggtttgtgcggcatataagcacatccccctaatgtcagtactgacaatgcgagtaccgccgcagttctgctgatacgccgcttatttccccggtttttccgtaaaccggcacagctatcagccataggattttcagtatggctttcagcaacgggcattgtatccatcttcgatgctcttatgtttatcgcagtaatcatgaagggtttataccctctgggtataaatccctactgattaatgattagattataactgggtaagtttttgcagcatctgatcagatgttgatactgccttactgttaatttcgtaggctcgctgaacctgaatcatattgaccagctcttccgccacgttgacgttagaggtttcaacataaccctgatacaacaatccggcaccattgatgcccggcgcgttttcgaccggaataccggaactgttggtttccagatacaggttctcaccaatactttccagaccactttcgttaatgaaagtcgtcagtgtcagttgcccgatctgctgtggtgcgttctgcccctgtacgttgacgctgacaataccatcacgggcaatgctcattttggtggcattgtccggaataatgatggcaggcatgacctgaaagccgcccgctgttaccagctgaccattctgatccacctgaaatgaaccatcgcgggtatagccggttgtgccatcaggcatctggatctggaagaaaccctgtcctttgactgccacgtccttgctgttgttggtctgagccagattaccctgactatgcagtcgttcagtcgctaccggacgaaccccagtaccaatctgcaaaccggatggcaggttagtctgttcagacgacatcgcaccgggctgacgttcagtttgataaagcaaatcttcaaacaccgcgcgctgacgtttaaaaccattcgtgctgacgtttgccaggttgttggcaataacgtccatatttgtttgctgagcatccagcccagtcttggcaacccataaagaacggatcatgaatttatcctctgtttccggctcagctcattgcgagaatttgattagctcgctgagcgttttcatcggaactgtgtatgactttcatctgcatctcaaaacgacgtgcgttagcgatcatattcaccatactttccactggattcacattgctgccttccagtacacccggcatgatttttacttcggtgctcgctgccagttcgtcgccctgctgttcccgcgcctgtggcgttaaatggaataatccatcatcaccgcgcacgacctgccccgcttccggtttgacaatcttcagtttgccaatctgccccaacaaagtcggaggatcgctggcaatcagggcagagatagcaccatctccggcaagagtcagttcagcctgtggcggaacatcaatcggcccgttctcacccatcaacatgcgtccctgtactgtcagttgcccttccggtgaaatctggatgttaccattacgggtataggcttctgtcccgtcttcaagctgaacagccagataaccgccttgtccgacagcaacgtccaacgggcgggcggtataattcatcggcccctgacggctatccattccgggagtagaagcaacaaccaaagtacgggttggcagggtttcaccttcaatggggacagcccgcagcgcagcaagctgggctttaaagcccggcgtcgaagcgttagcaagattgttggcagtgacagcctgatgttccagtgtctggcgcgcggctcccatagcggtgtatataacgtgatccataaagcgatctccaaaaaagctatccgcctgagattattaacgcatgctgaccagagtttgcaggatttgatcctgagtcttgatggtctgggcgttggattgatagttacgttgagcgacgatcatattgaccagttcctgactcatatcgacgtttgaggcttccagcgcaccgctgatcagcttaccgaagttaccggaacccgccgtacccacaaccgggctgccggatgcgccggtttcgacccaaacgttatcaccttgtgatgccagaccttccgggttagagaagttagccagaaccacctgtcccagaacctgagtctgctggttagaatagataccgtaaattttgccgtcagcatctacacggtaattagtgaagtgaccagcttcatagccgtcttgttgcaggttggaaacagaatcctgctgaatgctctgctgtttgctgccgttaaaatcgatagtgatcgccgcaggattagagccattcagtgctggcatattaaatgcaaatgcgttgtcattgcctttaatacgaccattattgtcaaattctacattacccagtttctgggccgcagaacctgctacagaagtatcctgtgcatgaatttcccatttgttatcttcggtcttgacgaagaaatattcacgttatgttcattacccagactatcgtatacggacatacccgtgctgtagttaaaact

SEQ ID NO: 2442 - DNA, 16822 bp, Xenorhabdus sp.; identical to SEQ ID NO: 2441
  CDS (6916)..(7260)

SEQ ID NO: 2443 - DNA, 16822 bp, Xenorhabdus sp.; identical to SEQ ID NO: 2441
  CDS (1684)..(2469)

SEQ ID NO: 2444 - DNA, 15801 bp, Xenorhabdus sp.; identical to SEQ ID NO: 89
  CDS (1)..(1644)

SEQ ID NO: 2445 - DNA, 15801 bp, Xenorhabdus sp.; identical to SEQ ID NO: 89
  CDS (4005)..(4871)

SEQ ID NO: 2446 - DNA, 15801 bp, Xenorhabdus sp.; identical to SEQ ID NO: 89
  CDS (5179)..(7143)

SEQ ID NO: 2447 - DNA, 15801 bp, Xenorhabdus sp.
  CDS (13073)..(14014)
gagcgttcagtggccttcggtagccaatctgacaacctgaaagccaaatacggagcgcaacccgggcagttgtttgcggaaaccgcttacgggatcaacccggactggctgaatctggagcctttcgccaacctgtcccacgttaacttccgtaacgatggcatcaatgaaaaagggggtgccgctgccctgaccggtaaaaaacaatcgaagaatgctactctctcaacattaggtttacgtgtgaaccagaactggcagacgcaggatcaactgactgtcgacatgtatggcgaattaggctggcaacatcagttcggtaatgtcaaacgcgacagtcaattgagtttcagcaacagcgatgtgtcatttacggtcaacagcgtctctgctgaacgtgatgcggcagtcatcaaagccggtacttccctgagcattaatgaaaataccaaactatcagtgggatacaacggtgtcttatcacgtggtcacaaagataacggcgtattcttaaacgccaactggaaattctagtcaataaacaatcccactcactgctggcaagcagtgagtttttctttgtgtataaatccattatatgaaaaacaggcttatcactatgaaaaaaaacaactcagtaaaacctattgttttgtggataacattattgtgtgggcttttacctgctactgcttccatcgcggataacgggtatcaggaaaaaggtcagctaaattcgccggatagctggttatcagaagagtttaaacgccagtggggattaacagccattggtgcgcattatgcctatgcccgtggttacaccggaaaagggatcactgtcggggtgctggatcaagccgtaacgcctcatgctgagttcgcaaacaaactgagaagattaggcccggaagatattgtgagctataaatataatgacgataaatctggcaatatctctttcggtaaccatggtaaccatgtcgccggtactattgtcgcaaaccgggatggcaaagagatgcatggagtcgcatttgatgccgacttggttactgcaaaatttttggggagttatcagaaccgcacagaagcgatgattcaaagtaatgtccgggtcatcaataatagttggggcgttaggcctggctatgaagtagatgaacggggaaaccccaaacgctggccgaatggaacagtaaaatataagcaggtgacattagatcatgttattaacgaaatggaaccgattaaaggaatactggatcatttaagccattcgccaatccctgagatatacgatgaactctccggtacagcaggtttattacgtgcagcacgccatcataaattagttgttcgttccaccggaaatgctaataactataacgtgacctggatagatgcaggcataccatttttcttccctgacgttttgaaaaactatctcagtgtcgccaacataacacaggacaaggagctggctctgtcatcaacccgttgtggatataccgccagctattgtttatctgcaccgggcaccctagtttacagtagcaccggtgaattcgttccaaaatcaggtggtgcaataaacgaaggtgcactgaatagaggggagcttgaaattgactcttcctatggtctcaagacgggtacatctatggcagcgcctcatgtcgtcggagccgccgctgtcctgatgcaacgtttcccttatatgacggcgggacaaatttctgatgtcctcaaaactaccgcaaccatcattaataaagaaggcaaaaggatccatgaactttccggctggggcatgcttaacctgaaagatgccattgatggcccgaaaatgtttatcacgaaggacgatattcccgctgaattttatattgaaaattcctataccgatacgcagtttgtcgccaatatcgtcggcatgggggaaaaagtagaagcaggcacaacggtagaacgcgtctgcaacagcattgaatgtacctatgactactggagtcatgatatctccggtcatggcggattaactaaaaccggtaaagggatgctggaactgaccggtaaaaacagcacatatcaaggcccgacaatcgttgatcagggtcagttgcaggtcagtggcggcatcacttctgaggtgacgatacataagggtgctacattcagcggaaacggtacggttggctttctcatcgctaagagcggttcttacattgcccccggtaatgtaggccccatgaatactgatttaatcggcacactgaaagttaacaacgatgtgacttttgaatcaggttcaaattacctggttgaaatcgccagaaataccgctgggttaagtgaccgtatttatgctgatggtttagctacgttaagaggcggctcggtagaggttaagtttgaaaacagcagtaacctgctttcaaaacccgaagtccgcagcctgctgggtcagcaatacaatattctacaggcccacaaaggtatcaatggtcagtttactgccgcttcacctgactacctgttcattgggactcaactgagctaccagcctaatcgcgtcatgttagatatcaatcgtaacgccaccccatttgccagtgtgacaaaaaccaccaatgagcgcgccatcgccaacgcggcggaaaaattgcatctgggccatccggtttatgaaagtattctgatgtcggatacagtggcacaggcgggcaaggccttccagcaattgtcttccggccagatccacgctgatatcgcgtcagcacaaatcaatggcagccgttatctgcgcgataccctgaatacccgtttacgtcaggctgacactggattagccagtcaggatatcaaggctgatcaaaacggggtctgggcacagatcaccagtaactggcaacggaccaacagcaacagtgaagccaacggttatcgcatgtctaactacggcgtatttctgggcgcagatcgggaagtagccaatgacctgcgtctcggcatggctaccggttttacccgctcttccctgcgtggcggtgataatacttccgcaggcagtgataacttccatctggcattttatggcagcaaacagctggatgctctggccttgcgtaccggcgtagcctatagctggcaccggtttgataccgagcgttcagtggccttcggtcgtcaatctgacaatctgaaagccaaatacggtgcacaaaccgggcagttatttgcggaagccgcttacggggtcaacccaggctggctgaatctggagcctttcgccaacctgtcccaggttaatttccgcaatgatggcatcaatgaaaaaggcggtgccgctgccctgaccggtaaaaaacaatcaaagaatgccaccctctcgacattaggtttacgtgtaaatcaaaactggcaaacgcaggatcaactgacggtcggcatgtatggcgaattaggctggcaacatcagttcggtaatgtcgcacgcgacagtcaattgagtttcagcaacagcgatgtgtcatttactgttaacagcgtctccgctgcgcgtgatgcggcagtcatgaaagccggcacgtccctgagtattaatgaaaatactcaattgtcagtgggatataacggcatattatcaagcagccataaggacaacggtgtgttctttaatgctaattggaaattctagtcaataaaaattattataaatcaacaaattcactggtggcgctagctggcagtgagtttttcttttatttcttatttatttctcatttaccggatttgtatatgcaaggacacaaaacagttaaatagaacttattaatgttaatcctgataataacctccgagtcatcgacataacctaaaggaggaaaattatgacttatcgtaaagctctattggctagtttaatttctatcgcaacatgctcaaatgctttggctaatgaagcaccactaatgaaatccactgatcctggtgctgataaattcaaaaccgtcggtaaatttatgggtggttcacattgtaccgcaaccctgattgctggcgaaaatacaccggctaaagatacaccagcactaatcgtaacagctggtcactgtgttgaaaatagcagcaatacaaatgaggtcattgttgatcaaccagcatctgaatactgggagtttacaccagattacttcattgataaaaaagacagcctttcaccaataaaggttgaccgtattttatattcaaccatgaaatatgaagatatcgctgtcttacaattgaaagcaacttatggtgatttggctcaaaaaggctatcatccactgaagctgaagaaaaatcttgcgatggaacaacagcctatcgtgttaactcacattcctgtcaataatgttgactatgattccacttatctcaggaaatctgaatgtgatattaccggaaaagcgcctgtactctatgaaagctcaattccatggctgtggtccccagttttctctgttaactgtgcaggtgtcgttggcggaacgtctggttcccctgtttttgaaaaaggcaaaacagatgttatcggtattctaaacacgactaccgagccgggaatgaatggttgcggaagtggcagaccgtgtacgattgaagacaataaaggtgtttcggcagaaggtgccagctattttattcctgtagactctattgctaatgcaataaccaaagataataaactggatctgtctaaacttgaaaataatagcggtaatttcttagaaagaagccagttttggtcaccttgggttactcaaagtgttgttgatggcgagaaagctaaatgggatgtggttattaaagaagatgctgatgtcaaaaatatccgctataaagtcggattaatcagtgaaattgactgtaaagatgtaagcggatatggcgctccagtttcggccagccagaagccactggaaaacctgctggtgcctgaaggcgaaggtatctataagctctgtgctattcatcagaataattctggtaagtggcagaacgcaaaagatgcatctgtgatgttgcgggaaattgataatactccaccaaccactaagccaactattcgttatgatgaccatggaactgacaattggtttgtaacgattgaagctctgccatatgaactttcagggctgacacaagtaaaatacggtcctaaagcaaccacggactgtgaagataaatcaggttatgctcctttatggagacctgtcaatctggctaaatctgaagcaccatggcgtgtttgtgcattcagccacgatgtagcaaaaaatgaaagtccgattagcgtacttgatcttgaagcagcctctgctaaataagtaataatcaccaacctcactgccggcaatcgctggcagtgaatctgaactaactcacctgaatatctgcattacccaaactatccccctgttcatccatatttatttttcaatacgaaacacattagcttaaaactcaaccacctattggcctccctctacacaatctattttttactaaggagacttaaatatgtcaccacgtattacatcgcctgtcgcttcaccctttattttgctgatattttcgtgtgctgtatttttcatcggtacgacagagtttatgttagctcctatactccaaccattagctgaggcatttaacacaacaactgataaagctgcctggttggtatctggttatgctttctcttattcgcttatggcccccgtttttggctggttgtcagataggataaaccggcctaaattgctgctggcatctttattatttctttcactggatgggctgctattaactatagcgcccaatttagtagttgctattgggctgcgtatctttgggggtatcgcagcggctgcattgattccaactatttttgctttgattgcagagatctttcctcttcacaggcaagcttcagcaatggggatcgttatgctcggtatgactatgggaattgttaccggccctgtctttgccggtattttaactgagaagttaaattggcagatgccatttttgataagtggggcaggatgttttttgctctgcattttaagccaaaaacaagtattacacctaaagtacaattcacaccaaccttcagaaaaagaaaaaataaaactcccattgataaagtttcaatggatatctcagggcgacttaatccgccctcttattgcaaaaggactttggaatggaacggcagtatctgcttttatcttatctggagaagttttgcggcgttattatgagctagcaacagacacgattggtatatctgtatccgtatttggtatcggacttggcattggcaatttatccataacttttgtgaagcgtagaggtattcgggatgaatacatactactgttgacaataaccttacttttcgtggcttatgcggtatttatgctaattccattatccctgcttttcagcctgagttgtctaatgttatggggttatgcgcaaggaattgccgcccctgttagtacctctattctggcaaatcgggccaaacagaataaaggtcagatattagcagtatcagaaagcttcaataacctgacaattttattcttactccctattgcgactgtacagttaactcaacatagtattgtcgctacgatgatcactctgggaagctgtctgatcgcgggaattgggctgacattaaaagattttttagtgacaccgtcacttaattgaggccgatgtttgaaattcatttagtaaatccattaatgaaggaaactcaaatggcaattgattttaatgcaaaagagaaccggcatacttatcttggacgcgatgcacaacaggaatggtacgatataattcatagtttgactgagcctaaaggtaaagatatcgcagatattggctgtggcggcgggatttactctcgggcatgggctaatctgggagcaaagagcatcacttgtgttgatttttcagatcaaatgctggctgatgcggctgagaatactcaggagttgaaaaatatcaccctcaaaaaaggaaatgctctccataccggccttcccgcaaacagtcaggatattatattcgagcgtgcacttattcatcatatcagcgaagaagacagagtaatttgttttgccgaaaccaatcgtttattgcgatcagggggtatatatatcttacaggatcgaactgttcaggacgttaacctgcccggctcacctgaacacattcgtggttatatttttgatgtttacccacatttacgcgattttgaaaaccaacgaagacctgataccgacaatgtgattaatgggtttaaggaagtcggattcaggcatgtaaacacactttcttttttagaaaaacgcactacgtataataatttttcacaattagcggatgattttcgattacgaaaaggacgttctattttgcacgaactgagtgataaagaaatagcttaccttgttgattatatagagaacacccttccctctttaaccaatattgttgaaaatgattattggactatttggactggtattaaataaataacatatatatgtcaccaaaaactcagtctcgactttatcaattaaacgatttcgtcactaatcaaaaagataaaacgagactgaggtgagttttattaattaagtattttgggcacaacggcgtgtatcagatactccacacattttggggctggctaaaggtgagaatgaagaaatgatttcttgattggttttaaccggatcgataaataacttattaatctcatccagttctaaattagataggtagctgttattaattcttgggtagttttctggaattgttgctgttgtgggaagaataagtttatcaggatataagcgaccgctccaaaattcatctcctttttctaatggcctaaataactatatggacaccgaccttaattcaagtctataaaaatatttttctgacaaaagtagtcgcaaaaatatattcggcttcaaagagccctgatgaaaatccgccctctctgtcctcattatttcaacagtcttggtagactgagctatttgccaggttcacagagagtcggtactgcctgtcagtacatctactacttacggacttcaaccacataataatattcacataatccctcctcgaggggtataaaccgatggttggttaaccaatgcccaagcgattcgggcattcttattatgattaaaaatcaagatattaaattatgaaaaagtaaggtttgaatagtgaaatagcagaatatttcatcgacataacaaatctatcgaactatctctaactgacaaaggatatatacacaatggatttcaaggtgcatcgcggcggcaagggagagaaccctcaggagcatagataactatgtgactggggtgagtgagcgcagccaacaaaggggcaacgtgaaagacgaagtgtatagctcttcgctctcagattgcccctttgttggctctgctcacatatcctgtcatagaagacccgactttgaccgggtcaactgagttttcagtatcctcacttctgagatacaacttgaaattttactgggtatattctcttcgcgcatcagctaagaaatgaaatgttgaaatctgatttttgatataatgatttttcttgttcatcaacaagctgaattaattttttcacaaaaatggattttaattgctcccaatattcttcgaagtgttcctgatcacgtaaacaatgtgtcattactgctgcccgtaatacatatatatgatgtattttttcccattcgctctggctaaaaccacattgttcagcataatgtcgaggagtatctccgtaatctttataacccaacattgtcgatgatgtgatgaagtcgttggtataagcacgctcggtggaatatgaacagagttcatagagccgtttattgagagcattgtgattcagcaggctatcatttccgatttccttaaaagaaaagttaatcatatgaaaatcaggagatggcatgatatgtatttcaaattggtattttccaacctttatcggttgcatattctttatatgatttaataaccaatttgctgtgacgatccctgcggctatgactttgccatatccactgatatttagaggcaataacctatgagctgcccataatgcagcggccgtcgcccctgatttcgagccttccataatggaagagcctaatatattcttattattgtttgagaagttattgattaatgaatcgctttgaggggaactatcctgaaaaacataagctgcccgagaggaaattaaatcaagaattctcttgtccttcatacagatagccccggcagaatattggatgaaacccattttatggggatcaactgtaatagaatcaacatgtttcaatgccttgaaactccggtagactgccggtttaggccaaataatattttcaggagtcaaaccaagttcctgatgcttcttaaccaactcatcatattccataaattttccctgctcatccagtagcaaagagcaggcatatccggcataggcagcatcaacgtgaatataaaatgatgcgccataatgttcttcacactcttttcttaatgcaatgacttcatcaatacaatcaatagctccgacttctgttgtccctaccattgcaatcatagctaaaatggcttctcctttctcaataagggaaagtgtaatttcgcgcattttggcaacatcagtctgatactctgtattcacaggtagaggaataatattctcctgaccgataccgaagatatccgctgctttgacccaggaataatgtttcgattgtggaacaagtagcttacctataacttctggtttaactcctgaaccacgacacgttagatcacggatttcattaaatatcccctgttcttttaactcactgattaaatcaagcacttctgtcgtgggcatattcattaactgttttggggatttgtgactgagcaaatttttagtttcaggatgttgagaaatagcaaaaggcagtgttttcaaattcctggcaacccaaaggccttcgtagtttgctactgtaccgcctgaagtaatgtgcccccaggctcgttgtggatcgtagccaaacatgcggcagagatctaaacctgattcgatctcaagttcagtggttgttggtgatacttcataagaacaattattcgggttgtacatcatcgccatgacataagcgaggttagaaaccatcagagtatcagcgttgatatgaccaaggtaacggggagaaaagaaagggatagaggaattttttagttttgctgacaactgattaagtatcccttcagttcgatacagtgtttctctgtagttatgctcatagcgatcaacagatgttactaatgccgcgtcttcaggatgaaagcccgaacgccagtgcatgtgttcactgactgcataatctatcatttctttgaagaacacagcattttctgactttggacctaaaaacagagcatcaatatttaagttaggattaaatagcttaggcataattacaatatcctcactgattattattttttgttatttattaaccattcattatatgaatcaaactacggatacagatataaaacatacgatcgaaaactttaataagaaattaacaaatactttgaatttgtgcacgggaacaaagaaatgaatgaaaaaagagatcagtagctgaaattatctacttatatgactttatggataaaaggtgtatttctgcacataaaaataagtattggtgttacattttttattgtgcagaatggaataaatggagggtatgcactcattaattgagtaataattagacgttactcattgcaaagaagatatattggttaattatttcagccaccagcatgatcattgttcctgataagatgggacaacttatgcgaatgagtgttttatttctgcttttccacaatgtataggcccatatcgtcatggcaagaatatataaacaccaagttatcatcctgaagccaaatgcgcttttcaggttaatttcgggttggtggggaaaaatgatattttcagtttcaccatcagtgactgcctctactaaccaacccatgtatgctggctgttcaattaagcgcgttgtcacactgataaagacaatgattagtgctgccataagcaatttagtcggaattttttcccgcatgaattgcctgccagactgaccaataagtgataatgacagtgccggccccagagtaaagactgcaccataaaacagaaaataagtattaacatttgtccaggtaattatgtcactattagagtaaatattgaccatgtagtgaatatcaactaatccaataacgctgattcccgccataatatatgcatggctctgcttggtaagcaggacaaaaagcgtatataaactcagagtaataaaatagatagcagccagtgctgtttctgtatttatccactcctgcattatgttatgtaattgtaataactgatatacgctgaatgggtatcctatgatatccaaagaagagagcagtcctattccggctagaatactactgatggctaaaattctgcgaacaggtacagcttctgttttctgccctggccctgctttgcgactaaaaaaatgagtataaagtgcactcatcaataccagaccaatagaactttgcactatcattgtaaatgcaatcaacagccattcactcatgctaatccatccatttatttgtaaaaccaccgccattacaacgtattatactcaatggatttcaagatgcatcgcggctaaaaagcgtgttccgggtgcatagtcagcaatttgattgagttcatccaacaaaatagcgacttgaaagaccaagggtatatattattaatgtaatttaagtttaattgaaatgttatatcgagtatgcaagattttacgcaagttatgcatgaatcgcagcaaaatttcatttttttcttcttcaataataactgggagtgattaacataaaaagcaagctcttatcagagcaaccgaaatatgttaaattgacaggcatcaataatttctaacgagcgcttcctatggtcccggaaaaacgtattatcaggcgaattcaatcaggtggttgtgcaatccactgtcaggattgcagtattaaccaactatgcattcctttcactttaaacgaacatgaactcgatcagcttgataatattattgagcgtaaaaaaccaatccaaaaagggcaaacgctttttaaagctggtgacgcactaaaatcgctttacgctatccgttctgggactattaaaagttacactatcaccgaagaaggtgacgagcagatcacaggctttcatcttgctggtgatttagtcgggttcgatgccattataaatactgaacaccccagctttgctcaggctctggaaacttcaatggtatgtgaaatcccgtttgagacattggatgatctttccggaaaaatgccaaatcttcgccaacagatgatgcgtttgatgagtggtgaaatcaaaggtgatcaggaaatgatccttttgctatccaaaaagaacgcagaagaaagactggcagcgtttgtttataatttatcccgtcgttttgcccaacgcggtttttctccccgcgaattccgtctgaccatgacccgcggtgatatcggtaattatctcggtttgaccgttgaaacaatcagccgcctgcttggacgattccagaaaaatggtattttaagcgttaaaggtaagtatatcgctgtcgaaaatatggaaaaattgactgaactggcaggcaaagcccatacaaatgtaacatagcgttgtttcaaaatttaagccagatcactatattttactgatctggctaccctatcccctgttatagttgtctatagtttatcttccgtacaaaaattacatccagcctctgcgagggattaatatggcaaactatcaaaacctcttagttgcaattgatccgaatcaggatgatcagccagcgttaagacgcgcggtatatatcgtgcaacgtaatggtggccggattaaagctttcttacccatttatgatctttcatatgatatgaccacgttactttctcctgaagaaagaaacgctatgcgtaaaggtgttattggtcaacggatcgcctggataaaacaacaggcgcactactatcttgaatccgggattgatattgaaatcaaggtagtctggcataatcgtttctatgaagcgattattcaggaagttatctccgggaagcatgatttgttattaaagatggcacatcaacattccctgctggaatcaataatctttacgccgcttgactggcatttgttgcgtaaatgcccttgccctgtctggatggtaaaagatcagatatggccggagaaaggttctgctgttgttgctgtcaatttatcaaatgaagaatcctatcataatgaacttaatctgaagttagttaatgaaacacaggatcttgccaacagaattgtgaaagaacctcggattcatctggtcagcgcctaccctgcggctcctttgaacatcgcaacagaactccctgattttgatcccaatgtatataaccgagcattacgtggtcagcatttggtcgcaatgaaagaactaagacaaaaattttgtattagtgaagagcaaactcacgttcaggaaggtttaccggaaaatgtcattcccgaaatttgtgatgaactcaatgcaggcgtggtcgttttaggtattcttggccgtaccggtttatctgccgcatttcttggtaatactgccgaacatgtgattggccgattgaaatgtgatttgttggcaattaaacccgaaggttttgtttgcccgattaatgtggatgaataatagacaaccccgccgcttgcggcgggaaatctatttatgaaaaacataaaaaatatcttaaatttcagcatgcttttctttatctttcgatcaaaaaatagtattcaggctaggcgatcataacattagctaataagctagacttaaatcaatcgattataaaatttaaatatttctggcatatcatgtgtagtccagtttgagttaagagccgaacgcaaccaatcttcaaaatttccggtgaatttccctttatcccataaacctgacatatacttcataagttcagctccgttgagctcagcctcaacattctcaacaagaccatgtgttataagtcttaattcattaatgacagaagatgcattgtttatagatcctttcccaatatattgcacatataaattttcaaatattgtttcattgacccctaaagtgtaagaacgactacctgactctccctcaattttcactatattattaaataataggctagtattgttcttcctttttatattaaaacctaacttaaccatcatgttccaatttttttctcgtatcaggctaatatctgcctctaaattttcagtgccttctactttgctaattgcgccattcatccttacattattataatcttgtagccaactattgtgttcagcgatattagctgaacctgctgttctgagagagttttcagattgctccagtcctctattaaatctgattataaccttgttccctaccttcagtattcctcttgctactgctacacttattcctataccgataattccagcaagaatagaaagcccatcaagtattccagaaagtataggatgactgccttctgtaacttcactaccagctaccaatccaaaactggtaacctcagcagcaatagcccctattccaactagagacagccctccactagcaatagctgttgctacactggctgctacaccaatagctcccaaaataagccctataattccaaatatacttacatgcccacttgggtcactccgattaataggatctcccagacaataagcataagcattaataccaccaacactgaatggactaagactgtctggtgcagtaaatcgcatcaatacaggactataggtacgataaccattacctaaatgatatgttccccatattggatcaatacgttcaccattataagaaggcaattctgggttacgttcatccggtgcctgttgcccatacggagaataacgataatgagtttgactaccatctccttgacaacttaacagtacactactatttccatcacaacccaataaatgcgtatcattggctgttacagttgcaactgattcgccatgtgcccgtaagaaacgcatggcgtcattactctcacgtacaacttcggccacacgagttacaccttgataataaatttcatgggttttatcaaagccaattcgttgtaacactaaacggtcaatgccgtcataaagataatcgctgatctgattattgatactcacagaggctaaacgtcctagcgcatcataggtcaaatgacgtccggattcatcttgaattaaacgccctgcgcgatcataagacaatttgatggtagctggataagcaggatgtgtatgcttgattgtttctagctggcaaatatcatttttattgtaggtaaaagtagcagtatctttgctcccatcggagaggaaagttgtacaggttaatatatttcccaattgatcataacaaaatctgtgacctttagagcacat

SEQ ID NO: 2448 - DNA, 15801 bp, Xenorhabdus sp.; identical to SEQ ID NO: 2447
  CDS (6810)..(7604)

SEQ ID NO: 2449 - DNA, 15801 bp, Xenorhabdus sp.; identical to SEQ ID NO: 2447
  CDS (6514)..(6774)

SEQ ID NO: 2450 - DNA, 15801 bp, Xenorhabdus sp.; identical to SEQ ID NO: 2447
  CDS (4257)..(5375)

SEQ ID NO: 2451 - DNA, 15801 bp, Xenorhabdus sp.; identical to SEQ ID NO: 2447
  CDS (659)..(3700)

SEQ ID NO: 2452 - DNA, 15801 bp, Xenorhabdus sp.; identical to SEQ ID NO: 2447
  CDS (1)..(534)

SEQ ID NO: 2453 - DNA, 15801 bp, Xenorhabdus sp.; identical to SEQ ID NO: 2447
  CDS (5617)..(6381)

SEQ ID NO: 2454 - DNA, 17314 bp, Xenorhabdus sp.; identical to SEQ ID NO: 90
  CDS (16479)..(17081)

SEQ ID NO: 2455 - DNA, 17314 bp, Xenorhabdus sp.; identical to SEQ ID NO: 90
  CDS (17129)..(17314)

SEQ ID NO: 2456 - DNA, 17314 bp, Xenorhabdus sp.; identical to SEQ ID NO: 474
  CDS (4362)..(5420)

SEQ ID NO: 2457 - DNA, 17314 bp, Xenorhabdus sp.; identical to SEQ ID NO: 474
  CDS (1295)..(2473)

SEQ ID NO: 2458 - DNA, 17314 bp, Xenorhabdus sp.; identical to SEQ ID NO: 474
  CDS (12292)..(13086)

SEQ ID NO: 2459 - DNA, 17314 bp, Xenorhabdus sp.; identical to SEQ ID NO: 474
  CDS (9576)..(10016)

SEQ ID NO: 2460 - DNA, 17314 bp, Xenorhabdus sp.; identical to SEQ ID NO: 474
  CDS (6284)..(7369)

SEQ ID NO: 2461 - DNA, 17314 bp, Xenorhabdus sp.; identical to SEQ ID NO: 474
  CDS (7711)..(8472)

SEQ ID NO: 2462 - DNA, 17314 bp, Xenorhabdus sp.; identical to SEQ ID NO: 474
  CDS (15880)..(16815)

SEQ ID NO: 2463 - DNA, 12902 bp, Xenorhabdus sp.
  CDS (353)..(535)
  unsure (1)..(12902): unsure at all n locations
ctctcaagaagaacgggcaagatattttttaatggcagatggtggatttttcttactttacttcttttttattattatttctttttgttttttacttagggttcgtactattcctccttttatcatagatagagaaaggcagattttttatacttggttaaaagggaaggtatatgtggccaattatgctcagttagaggtctataatgcctcaggtaatttaggcttaaaaacttgtggatacgataaaaataataaccttattaattatttttactcacctaaatttccaaatattttcaatacaaatatagatatagaatatttacttatctttgtctcaaaatattttgtgcaaggaaaagacgctgttagcttagttgattttaaacgtagaaaatcatttttctggttacgtgaagagccaaagccagcagattgggaagctcaggttgccgcaattttagctgaagtagagcgatttggaccacctcatgtttctgtatctgaaaaaacttctaaggaacagatttaataaaaataattctaaggtgtctacataacttgctatcagagcgttcaaaacgctctgtaattatttgaaaggattatttttaaaatagtgaatgatgtggaaaaataggcgatgaaaggcatggattataaaaataatagagatgaaaaaattaatagactatcaacagtatgcgatccttttttgaatgaagacattggagatcttgattctaaaggccaaatagaatcagagggttttattagtttaattgatgataaaaaatgtgaaatacgttatggaaaaaataactttcctgagaaagttttactttcctctttagctggttttgtattagggttttatttttttattagtgatgttattaacacatggagagcgaatgaagagagttatctggaaactgttgttcgtgccaaaaaaatatggagatgagttttatttaaatccaaaattgccagattttattgagccatataaatatatttctgatgcgaaaaatatatcttggtctcaatatttttatattcgttatatggacaatggtttttatgaaaaatctagggtgagaaaaaatttattactagatggtggtttttttctattttctattacaatggttttaattcatttatggggattctctttaattcgaaaaatatctcctcttgttattgatcaggaaaaaaaactgttttatacatggcgtaagggaaggatgtatgttgcacgttactctcaattagatgttattaatataaataatgttctgtacttaagagtttatggatttgataaaaataacgaactgatgatttattcttttgagcctcgtattcctaacctaatagatgatgtaataagtaaaaagtatttattagcttttatggcaaaatatttgatacaaggaaaagagtcagttagttcagtagattttaaacgccaatcaccaatatttactttatgtaaaaattcaaaaccaaccgactggcaacaacagatttcagcaatcttagcggaactagacaggcttgggccgccgagaagggctacagaccccaaatagcaatcggaaaaacagttaaacagcaaaaaaccgtcattgagtatcttttgttataaaaaaagatattaatgacggtttaagtataattaggttgaattagagttttgtaaattgtttattatctaataccttggaaacttctttattcaaaatattcagcagaagaattgaacgagtttctccatctggttcattataaatggcctgaatcccttcaaaaatcccttcagttatcagaacagtatctccggaaacaggagtttctggtgcagtgaattcctgttcagtcgcattcattaattcatcgattaattgttgtgggacaaccgctgggtatgtactgaaacggataaagtgattaaccccccgcgttgaattaactgtggtggtatgaatcacttctggatcaaagttcacaaaaaggtagttcggaaaaagaggttcggttacggtcgttcttttgccccgtataattttttcaattttggctgtgggtgtcaggcaaatgacatcctgtctctccaggttttctatcgcccgagagatttgcccgcgtttacaataaagaagataccaatttcccataatattccgactccattacacaatgtactaagcataacaaaaccgatataccagaatcacctataaaatgaagcataacaaaaccaatataagcaaatcatatataaagtgaaaaatgtgtttaaagaaaatgacatgtttttacagccagtaaagtgttttacaggccaaaacccatatcttatacaccttatctttcaagttgcttctttgttggctgaaaaaattcgtcgggagcgaatttgacgctctcctgccgctacggtgcgtcttgaaatccattgtgtatcattattaaaccgataatcgtttcattttacttatcattatgaatttaaattattttttagataaaattgtagaatagtttattttttgaaaaacacatattaagaggatagcactattttattggtgtaaatgaatagcttaaaatttatctacgtaatcagacgtttttcatgcaatttggtaagcaggaatggaggctgaacaacgtttctctgtgtcttagcaagttgacccacaagaatacaataaattcattgatttttagtaagttatgggtttaccttgtaacctgcattcgagagcttataatgtccttcccccttaaaaatcggcataattgaataatatgaaataccgcgatctaagagactttctttccttgctggaacaatctggtgaattaaaacgaattagtatggaagttgatccctatctggaaatgactgaaatcgcggatcgtactcttcgtgccggtgggcctgccttgttgtttgaaaatccaaaaggatattcgatgccggttttgtgtaatctgtttggaacgcctaaacgggttgcgatggggatggggcaggatgatgttaaagctttgcacgatgttggcaagttgctggcttttctcaaagagccggagccaccaaaaggttttcgtgatttggttggtaagttgcctaaattcaaacaagttttaaatatgccaaccaagcgcctcagttctgcgccttgtcaggagctggtctgggaaggggatgacgttgatttgacccgaatcccggtgatgcactgttggccagaagatgctgctcctttgattacatggggtctgactgtaaccagagggccaaataaagaacgccagaatctgggcatctatcgtcagcaagttttaggtaaaaataagcttattatgcgctggctatcacatcgcggtggggcactcgattttcaggaatggtgtcaggctcatccgggggagcgttttcctgtttctgtcgctctgggtgcggatcctgccacaattttaggtgctgttacgcctgtacctgataccctgtctgaatatgcttttgccggattgttgcgcgggcataaaacggaagttgtgaaatgtttatccaatgaattagaagtgcctgccagcgctgagattatcctcgaagggtatattgagccgggtgaaatggcaccggaagggccatatggtgaccatactggttattataatgaaatagatatgtttcctgtattcaccattactcacattacccagcgtcgtgatgctatctaccactctacctatacagggcgtccaccggatgaaccggctgtattgggcgttgcattgaatgaagtgctggtgccgatcctgcaaaaacaatttcctgagattgtcgatttttatctacctcctgagggttgttcttatcggcttgccgtcgttacgatgaaaaaacaatatgcagggcatgccaaacgggtcatgatgggtgtttggtcatatctgcggcaatttatgtacacaaaatttgtgattgtctgtgatgatgacattaatgcccgagactggaatgatgttatctgggcaataacaacgcggatggatccgcaacgggatactgtcttaatggaaaatacaccaattgactatctcgattttgcatcacctgtttccgggcttggctcaaaaatgggattagatgcaaccaataaatggccgggagagacacaaagggaatgggggcgtccgattgtcatgagtgatgaaatccgggcccgtgtcgatgaaatttgggatcaattagatattttgaagcgataagagggaacgcatgacaacactaagctgtaaagtaacatcggttgactccattacagatacagtttatcgggttcgtttattacctgattcgcctttttcttttcgtgcagggcaataccttatggtagtgatggatgagagggataaacgccccttctctatggcatcatcgccatcagaaaaacagacgattgaattgcatataggggcttctgaattgaacctgtatgcaatggcggtgatggataggatcctggatcagaaagttattgatattgatattccacacgggcaagcgtggtttcgtgaagacagtaaaaacccgatgctattaattgcaggaggaaccggattttcatatacccgttctattttactggctgccttagagaacgatcctgagcgcgaaattgcaatttattggggtgggcgtgagctgcaacatctctatgatttgggtgaattacagtctttaagtgaacattactctaatttaaccgtcgttcctgtggttgagcaggctgatggtaattggcggggaaggacgggaactgtattaagtgctgttctggaggattttggcaatttagctccgtatgatatttatatcgccggccgttttgaaatggctaaaattgcccgtgaacggttttgcagtgagcgtgatgcttctcttgagcgtatgtatggtgatgcgtttgagtttatctgatttatacacttcgtctttcaagttgcctctttgttggctgcgcttgttcatcccagtcacatagttagctatgctcttggggatttactcccttgccgccgcgacgcatcttgaaatctattgtgtatatacctaccatctggtgagcaataataaaaaaacccgcccctgacaggcgggaaactacggcaacaacttattcgagtgatgcaatagataagacagacaaggggaaaatactcacaaataatcgtcagatactccgatagctaaactctttcaataatcgtggcgatgccctgacccagcccgatacacatggttgctaatccgaactggacatctttacgttccatcagattcagcaaggttgttgtgatcctggtaccagaacagcccaatggatgaccgagtgcaatagcaccaccattcaggttaattttgtcatccatactatccagcagattcagacccttcatacatgccagagactgggcagcaaacgcttcgtttaattcaaatagatcaatatccgaaagagccagaccggcttttttcaatgccatttgtgttgccggaacagggccatagcccatgatggaaggatcacaaccaacaaccgccattgagcggatacgggcacgaggcttcaatcccagttcacgtgctttactttcactcatgaccagcattgctgatgcaccgtctgaaagtgctgaagagttaccagcggttacactacccgtgactgggtcaaagacagggcgcagaccagctaaatctttcaggttagtatccgggcggataacctcatcaaaattaacaagctgaatgtttccgtcagcatcgtgcccgtgaagaggggcaatctcactggcaaaggcttttgattctgtcgcctgtgcagcgcgctgatgtgaacgcatagcaaattcatcctgcatttcacggctgataccatgcatttttgccagcatttcagcggtcagacccattacacccgcagcttttgctacattacggcttaatttagggtggaaatcgacaccatgagtcatcggcacgtggcccatgtgctcaacaccaccaatcatggcaatattggcatctcccgtcatgatcatgcgggtagcatcatgcaatgactgcatcgaagaaccacacagacggttaacggtaaccgcgggtactgaatgaggaagccctgccagcaaagctgcattacgggcaatattaaatccttgttccagtgtttgttgtacacatccccaagagatatcatcaatctgctcaggttgtactgatgggttacgtttaaggagtgatttcatcaaatgtgctgagagatcttcggcacgggtctgacggaatactccaccttttgagcgccccattggggtacggataccatcaataatgactacgttttccatgttttcagacctcacgctgtttcacctgaattaacagcaagttttgctgccgcaggatagtaactttcattgctctcagctttcgctttcaggccggctggaacctgataaagtgcacctaaatgggcatagctttcagccagtttcacataggctgctgttcccattgtatccagataacggaaaacaccaccgtggaatggagggaaacctaaaccataaaccagcgccatgtctgcttcagcagggctggcaatcacaccttcttccagacaacgaacaacttcgttaatcattgggatcatggttcgtgcaatgatatcttcgccagagaaagtctgtttaggctggcttacacctgccagtaactgatcggtggtttcgtcctgctcttttttcggtttaccttttctatcctgagtatatttatagaaaccaacaccatttttctggccataacgctggttttcaaacaagacatcaatggcatcccgataatcgcggctcatacgctcaggaaaaccttgtgccataacactttgtgcgtgatgggcagtatcaatcccaactacgtcaatcagataagcagggcccatcggccagccaaattctttttccatgattttgtcgatttgacggaaatcaccaccatctcgcaataacatgccaaagccggccagatatgggaatagaacacggtttacgaaaaagccagggcaatcattcacaacaatcggggttttgcccattttgctggcataggcaacaacagcagaaattgttttttctgatgttttttctccacgaatgacttcaaccagcggcatgcggtgaaccgggttaaagaagtgcataccacagaaattttctggtcgcttcagtgatttggctaattcagtaattggaatcgtggaagtgttggatgccagaatgcaatcatcattaatatgagattcagtttctgccagaactgccgctttaattttcgggttttcaacaacggcttcgacgacaacctgagattgctcaataccggcataattcagtgttggttggattgatgacaaaattttagccatcttcattgcatccagacgcccgcgctcaaactgtttattcagcaacttagctgcttcgttcatgccgagatccagcgctttctgattaatatctttcatcagaaccggcacacctttacgtgctgattggtaagcgataccgccacccataatacccgcacccagaacagcggcctgttgaggtgttgaaacttctttcagatgtttttttgccagaccttttacatactgatcattcaggaagatcccgaccaaagcacgggcaactgaagtatgcgccagcataacgaaactatcactttccagttttaatgcttcatcgcgattcagagtcgctgctttttcaatggtttttaccgcagtaatcggagccggataatgtggccctgcgactttcattaccatgccttttgccacagtgaagctcatggtgcgttcaatcgcatttaggctaagcggtactagtttaggttgacgggcggctttccagtctaaatcacccttaatagcctgttccagaatagaaacagcagagtcaaccagcttctctgtaggcacaacggcatcaaccaagccatttttcaacgcttcttcagcaccgatatctttgccggctgtaataatttcaagggcattatcagttccgatcaagcgtggcatacgcactgagccaccaaaacccggcatgatacctagtttagtttctggtaaaccgattcgaagatcgggggatgctacgcgaaaatcagtggcaaggaccaactcgcaaccaccaccaagcgcatacccattgattgcggagactgtaggaacagcgaggtcttcaattcgattgaaaatgttattagcgagattcagtaattcatgcagtttttctgccggagcgctgaataaggataaaaattctgtgatatccgcaccgacgataaaggcctgtttttcagaacggattaatagcccttttaattcagattgttgttcaagggttgcaattgccttatccagtgatgcaacagtcttggtatccagtttattaattgcggctgacgcattgaagatcagttctgcaatgccatctttcagccagtttacttgaatagtttcacttaggtagagcatgtcattctcctcaatgagtgcataccatctggtatgaccagatacagttgattgtgattagtgtgttaagtgaatgcaaaccaatgattaattttttgtagggcggatcacaggtaagatttatgatgggaagtgctattttttattattgccttgaaaaatataaatattatcagttaattcttattaagttgattttcagtgatgacacgaaaaataatgtattgtggtaaaattcaaattccggccagataacccaaaggttcataaaatggaaaagttggcatctctgtatcaagaacatattaaaattttgcaaaagcgcgctaaagaaatattagcacgcagtcagcttgacgccctgcttattcactctggtgagttattacgagtatttctcgatgatagccattacccgtttaaggcaaatgcacatttcaaggcatgggttcctgtaaccaaagtaccgaattgctggttatggattgatggtgtcaataaacccaaattatggttttattccccagtggactattggcacagtgtggaaccacttcctcacggatactggacggaagaagtggaaatgttccatctggccagtgccgaagatatcaacacagcactgaatggcttttcaaaacaacatatggcctacatcggcgaacaagttgaacgtgctaaatcgctggggatctccgagcataatcttaaccccaaagccgttttagattatttaagcttccatcgttcctataagacagattacgaactggcctgtatgcgtgaagcgcagaagacagcagtgaatggccatatggcggcacatgatgcgtttttgtcaggtgtcagcgagttcgaaatcaatatgttctatctgatcgcaacaggccaccgcgatactgatgttccttatgacaatattatcgctctgaatgaaaatgctgctgttttgcactacacaaagttgcagcaaactgtacccgctgaaatccgcagttttttgattgatgcgggtgcagaatataatggctatgcggcggatatcaccagaacttatgcagcgaaatcaaatagcgagtttgcttctctgattaaagggctgaatgacgaacagcaggcaattataaccacgatcaaagcaggaactcggtacaccgattatcatatcaatatgcactaccgcatagccagattgctgaaaaagcactatatcattaatgggatcagtgaagaggctatggttgaaaaagggctgacagcgccgtttttccctcacgggcttggtcacccgcttggcttgcaggtacatgattccgccggatttatgcaggatgataccggaactcatttggctgcgccggaaatgtatccttatttgcgttgtacacgtgttctcgagccaagaatggttttgaccattgagccggggctttattttattgaaaccttactggcgccgtggcgtgtcagcgaatatagcaaacacttcgactggaaaaagatcgaggcgcttaagccatatggcggtattcgtattgaagataatatcgttatccatgatggaaaaattgaaaatatgaccagagatttacagttgccgtaatgaagccttatttaattccagcggcttcagtcagctttactgaagaaataaagaaaagccgttttattaccctgctggagcgtaccagcggggttgatgaagcaaaatcgtttattcaacgtatcaaacagcaatacccagatgctcggcatcactgctgggcttttgttgctggcgctcctgatgattctcagcagttagggttttcagatgatggagagcctaccggaaccgcgggtaaaccgatgattgcacaattgataggaagtggtttaggggagatcaccgcaatatccgtccgttattttggggggattaaactgggtactggcgggttagtgaaagcctacggtaatggcgttcagcaggcgcttaagctattggaaaaagagtataaagttccacagaaacagtaccagatacaatgtgaatatgcacaaatctcaatggtagaacagttattacagcaattttcagggcaagtacttgccagtgaatatacggaaaatgttacattgcaagtctcattacctgctactcttgcagatgaaataggtaataaattacgtgacttaagtcgcggttcactatttttaacatcaaaaaaataattattttgtcataccggatttcgaaggaacctgctgaatgcattttcgcaccataacccgtattgtcgggctacttgtcattattttctctgtcacaatgattattccggggttggtggcattgatttaccgagatggtgccggcagagctttcagtcagacattcatctttgcacttctgattggtctggtactttgggtacctaatcgggaacaaaaatatgaactgaaacctaaggaaggtttcttgatcgttgtactattctggactgtactgggtagtgtcggtgctttaccttttattttttcagaaaaacctaatctttctattactgatgctttttttgaatctttctcaggattgacgacgacaggggcaacgacactcgttgggcttgattctcttcctaaagccattctcttttaccggcaaatgctgcaatggctgggaggaatgggaataatcgtactggcggttgcgatcctgcctttgctgggagtagggggaatgcagctttatcgggctgaaatgccggggccactgaaagataataaaatgcgtcctcgtattgctgagacggcaaagacgctctggctgatttatgttttgttaaccattgcctgtgcggttgccttatgggcagccgggatgtcagtttttgatgccatttctcatagcttttctactattgcgataggggggttctcaacccatgatgccagcgtaggcttttttaatagcccgacgattaatactattattgcaatttttctgttgatctctggctgtaactttggtttgcactttgctgtgctttcaggaagaagcctgaaagtctattggcgtgatcctgaatttcgtatgtttatcagtattcagctggcattggtcatcatctgtatgctggttttgtggcagcactccgtttatgaatcaaaattaaatgcactgaatcatgccttctttcaggttgtgtcgatggcaactacagcagggtttacgacagatagttttgctaagtggccgctgtttttgccatttctgttactgtgctccgcatttgtcggcggatgtgccggctcgactggtggtggtttgaaagtcatccgcatcttgttgttgtttctgcaaggctcccgcgaattgaagcggttggttcaccctaatgcggtatacacaattaaactggggcgtagggcattaccggaaaaaattattgaagcagtttgggggtttttctccgcttacgcgttggttttcattattagtatgttgttgctgatcgctacaggagttgatgagttttctgcattctctgctattgccgcaacactgaataatcttgggccgggcttgggtacggtagctgataacttcactacaatgaacccgacagcgaaatgggttttagtggtgacaatgctgtttgggcgtttggaagttttcactttattagttttatttacgccaactttctggcgcgattaatcgaagatacagaggcgtatttatgaattacctattgctctattccacacaggatggacagactaagaaaataatcatgcgtattgcagaaaatattcgtcgagcaggtatcaattgtgacttgagagatcttgcgacagtcaatcatatgaatttgcttccttataataaggtgatgatcggggcttcaatacgttacgggaactttaattcggtattacataaatttgttgtacgtcatcaaaagcaattgaatcaactaacgacagctttcttcagtgtcaatttaacagcaagaaaaccagaaaaaagaacgcctgagacgaatgcttatgttcgcaagtttttggtaaaaagcccttggcagccagatttgtgcgatgtttttgccggagcactgctttatcctcgctaccgttggtttgatcgcataatgattcagctcattatgcgtatgaccggaggagaaactgatacaacaaaagagattgaatacaccgactgggctcaagtggatctttttntcagactttttacaatagagtttagagcacaat

SEQ ID NO: 2464 - DNA, 12902 bp, Xenorhabdus sp.; identical to SEQ ID NO: 2463
  CDS (2815)..(4296)
  unsure (1)..(12902): unsure at all n locations

SEQ ID NO: 2465 - DNA, 12902 bp, Xenorhabdus sp.; identical to SEQ ID NO: 2463
  CDS (4307)..(5008)
  unsure (1)..(12902): unsure at all n locations

SEQ ID NO: 2466 - DNA, 12902 bp, Xenorhabdus sp.; identical to SEQ ID NO: 2463
  CDS (8911)..(10245)
  unsure (1)..(12902): unsure at all n locations

SEQ ID NO: 2467 - DNA, 12902 bp, Xenorhabdus sp.; identical to SEQ ID NO: 2463
  CDS (10584)..(10856)
  unsure (1)..(12902): unsure at all n locations

SEQ ID NO: 2468 - DNA, 12902 bp, Xenorhabdus sp.; identical to SEQ ID NO: 2463
  CDS (10894)..(12345)
  unsure (1)..(12902): unsure at all n locations

SEQ ID NO: 2469 - DNA, 12902 bp, Xenorhabdus sp.; identical to SEQ ID NO: 2463
  CDS (12368)..(12901)
  unsure (1)..(12902): unsure at all n locations

SEQ ID NO: 2470 - DNA, 12902 bp, Xenorhabdus sp.; identical to SEQ ID NO: 475
  CDS (6462)..(7625)
  unsure (1)..(12902): unsure at all n locations

SEQ ID NO: 2471 - DNA, 12902 bp, Xenorhabdus sp.; identical to SEQ ID NO: 475
  CDS (4264)..(6450)
  unsure (1)..(12902): unsure at all n locations

SEQ ID NO: 2472 - DNA, 16322 bp, Xenorhabdus sp.; identical to SEQ ID NO: 91
  CDS (2852)..(5470)

SEQ ID NO: 2473 - DNA, 16322 bp, Xenorhabdus sp.; identical to SEQ ID NO: 91
  CDS (5620)..(6630)

SEQ ID NO: 2474 - DNA, 16322 bp, Xenorhabdus sp.; identical to SEQ ID NO: 91
  CDS (6810)..(7361)

SEQ ID NO: 2475 - DNA, 16322 bp, Xenorhabdus sp.; identical to SEQ ID NO: 91
  CDS (9807)..(11717)

SEQ ID NO: 2476 - DNA, 16322 bp, Xenorhabdus sp.; identical to SEQ ID NO: 91
  CDS (13081)..(14745)

SEQ ID NO: 2477 - DNA, 16322 bp, Xenorhabdus sp.; identical to SEQ ID NO: 91
  CDS (14793)..(15350)

SEQ ID NO: 2478 - DNA, 16322 bp, Xenorhabdus sp.
  CDS (15239)..(16321)
aactacatttatcttgaaaaatgaaaataccggcctttgtttaaaggggtcaaaacttaaatcaaaacaaataaacagctctcgtatatcatactgatacaccggacaaatttattttaatcaaatagttattttcattactcatgccgtggtgcaacagattaaaaaagtgtgctcacaactacaccacatactaagcaaaggcaatcatgctactgcaaggtaatcagtatctttacaggtcattaagtttagcagggagggattgccacgttaatcaatcaattccatggcatatacagtgccgacatcgggtatcaacttttattcgtgctaatagctgacctgaggaatataaaattcttcatcttttatttaagaaaatggatcgccatatttattacaataattataataacctaccttgaatagctcgtgttccttctctatttcttcttttttctcgctatatatggctttcaggatttgttcggaaaactctatcgcggctgttccatttgcagtaataaggtttctatcagtgacggtttgttctttgatgaaattttctccatttttgtactccttatattcattccatagatattgagaattacctgtatgttgaaaattgtttaataaaccatttctggctaaaaaatctacggtaccacaaatagcaccaacaattatccctgaagtgagatagaacgttataagacttttcagctcattattttctatattccatgaattaccgccaattaagacaacagattcaatatcacgggggatcttttctaaaggatagataataactgtgctaaaacctcttatggatttacacgtcccgctctctaaagaagcggtttccaccagccattctttgtttatattcagtctggaagcaagatacgcactttcccaatcagcataatcattcaataagaaaaaaatggcttttttcatacattatccttttgtataagatatctggctggcaatagactgaattaactggttataacccatggataaagtacgtactaattgcgcatagccgttttctgtctgtttcaactctaaattaaatgcccgcttaaccgtctctttttgattagataaaagccagtatccctgaatgataacccgaccatcatagcgcccatgaaaagcggttattgtgatatccaatatgtcggcatttttttccagaagctggtcagagaccagcctttgcggaaatgcggcgctcaactgagtagtcagaatttgttgtaactgctgttccagcgggctagcccataaatgattcgtagcattgatgtaactaacatcccctgtttgataaacaatacccggtgatgctaggtaatcagcaagactgaccttttttatccatagttgaggttcatgttcgatatttacccgttttacctctgaggattttgtgacaacaggtagttgataataagttttctgtggctggctgctgctacatcctgaaagcaacattccccctatcagtaagaaaccagcaggtataaaaaatgccaaccttaacatcagttttttcattaattatgcgcctttttcggttcaggatcctgtgtggcttccgcttcaaataccagtgcattgctcttattgttcagggtcttcaatatcggctgcaattcacgcaagacctgatccaaccgttgcatattatcaaccagtttattgtaagcctgtgaacccggctgaatcccctgcatactacggtttaattcattcaaggtattatgtagatctttaggcagcccctgcgcttctttgctcgcaagaatacgatttaactcatccatcgtcttctgcgcagccttgatggttttctgactttcttttaatgtttgtgttgcctgaataaagagaggttcaatcggcatttgattaattttatccagcgccatggtgactttttgttgtatctgagccaatccgctacttgtagtaggtaaaatctcataacctgctatttctctcgggcctttccataccttttcatcagcgtaaaagtccagatcgatgaacagtgctcctgtcagtaaattaccggatttcagagaagctcttaagccccgggaaataattttttccagttctttatctgtgtaaaagccatcaccaatttctttctcaaaccgttcaggctccatatgaattaagacaggaatgcggaaatcgttatcaaggcgttgtttgatcccgtcggcataaaaaggcactttggcgactgtgcccacccgtataccacgaaactcgacaggtgctcccggctgtaggcctctgattgaatcagagaagaaaagcaagaagtcccggtgctcggtatacagtgagttctctatatttctttcgttatcgtacagcctaaatatttctttttcttgtaccggtttgcctagatcccagcctttgggcacatcaaaactgactccaccagcaaataaagtggataatgccgcgacctcaaccctgactccctgtgatgacacatcaaaagcaacaccactgtctttccagaatcgaatattggttgttaatagtccgtcataaggtgaattaatgaaaatctgatatctggcgagacgggatttaggatcgaaagtacttgtttccactgaaccaacacgataaccccgaaacaaaacagggtcgcctgcggataatcgccctgctttttcactggttaagatcagccgcataccttttgcatcaggtgaggctaatggtggtgaatccaatagtgaaaattttctttctccacttccttcgctaccgggctgtaattcaataaatactcccgataacaatgtactcaggccagaaaccccttcacgcccaatttgaggtttaacgacccaaaatgcggtgtctttatgtaataggcgctccataccatcattcagccgagctttgataatcacttcacccaggttatcgcttaatgatactctttcaaccacaccaacattcacactgcgactttttatttttgttttcccagcttcaataccttcagcattagaagttatcaatatgacttcaggcccctgatggctaaagtgataaaatagtatccaggcaccgatgagtacagtgataattggtacgatccatataggtgaccaactcttaagtttgctgatcttggcttgagccaaagcttcttctttatccgtcaccttatgattccccattattccgtaactcaaattttttatttgctttgtcccatgtcaggcgcggatcaaaggtcattgatgcaaacattgttaaaatcaccactgaagcaaacaagattgctcccgttgcggggtagatactcataaactgccccatgcgtactaatgccgataatacagcgataacaaaaacatcaatcattgaccagcgaccaacaaactccactatttcataaataaaatgcatggtttcagagttgtatctgccatgcctttttgcatcccagcataaccagcaaatagcgagcattttcagtaaaggcaccataatactggcgataaaaataaccagagcaacgggataagaccccgtgctccaaagcaaaataataccttccagaatggttgaattaatgtcacttcctaatgattgtgtcaccataatcggcaacatatttgctggaatataaagtatggctgatgtaatcaatagtgccattgtccactgaagactgtaatggcgacgggcatggccctttgagtggcaacggggacattgatgtttctgcgctggtagaatagctgtgcagcactgacatagcctgaccccctgaattaggccgggtttacccgtttgtagaggaagacgtattttcggcgcagattttatatcattccagatccagtaccgatccagacattgaaaggctctgatctgaaacaagcaaaaaagacagtaaggcagaaaactgagaccaaccgcaatatcgccatacgccatgagcttaacaaagctgactaacacgccagctaaaaatatttcggccatgcaccaggttttcatctgaaataaaatgcgcgccaactcaattttcagccgaagcgccatttttatgttctggcataaaaggatgatagaaagcatgcagaatgcaggtacaagctgcacaaagatcaggaagaatacagctagactcgaataatcctcactgaacatggttttggggatttctgtcagtgtaatttcactgacaatccccgcaacattcatgctgacaaaagggaacagacaggcgaggaataacataaataatgcactgactgcataacctgtcggttgattatgtggttctttccactttgcagtcagtaaagtatcacatcgtggacaaacagcctttttcccttcctccagatcaggcaatgccaccagcatatcgcattggtagcataaaaccagcctgtcatgctgatgattgtcagaacacaaagtacctctcccataaacaaaatcaatgctgccctttatatcatcaggttgtcagattaccgcgggtatagcggtaatctgtacactgtcggatatcaccggcaagcattatccatttttcatcatttccagttcctgccagcgatcaaaagctttctctaacgactgctctttatttgccagatcctgtagaacattttgtgtgacttcgtgtgactgattgaaaaaatcaggatcactgaccttagcttgtaactgttctatttcttgctctaacgtttccaataatgatggtagttgttctaattctctgagtaaatggtaacttatcttattatttgaacgttttgtggtttctttaaccttagccggcttactctctgctttctctttttttgcggaagactgacgtaaagaaacggtttgcgcccgctgttgctgagcatcgaaatacccaccaacatagttgttgatctcaccgttgccttcaaaaatccagcattctgtcactgagttatcaacaaactgacggtcatggcttaccagaatgaccgtacccgtgtagccatccactaattcttccagtaactccagtgtttcaacgtcaaggtcattcgtcggttcatcgagaataagcaggttgctgggcttcaggaataagcgggctaacaacaaacggttacgttctccgcctgaaagagcccgtaccggtgtcattgcgcgcttaggatggaaaaggaagtcttgcagatagcctaaaacatggcgcgggcgaccatttaccatgacttcctgtttgccttcggcaaggttatccatcactgttttgtcaggatcaagcgcagcacggtgctgatcaaagtaagcaacttccagttttgtaccacaatgaagtcgtccactatctgccttcaaatcccccagcatcagtttcagtaatgttgttttaccgcaaccattcggtcccactaaggcaattttgtcaccacgctgaatctgagccgaaaagtttttaactaacgttttgtcgccaatctggtaattaacgttttccagttcaaatacaatcttgccggaacgggttgcttcctcaacctgcattctggcactacccataacgttacgacgttctgagcgctcgactcgcaacgcttttagtgctctcacccgtccttcattacgggtacggcgggctttaattccctgccggatccagacctcttcctgagccagttttttatcaaattccgcattctgtagatcttcaacccgtaatgcttcttctttgccttcaaggtatttatcatagttccccggccaagacgtcagttttccgcgatccaaatcgataatacgggtcgccatgctgcgaatgaatgaacggtcatgggaaataaaaaccagactgccattaaagtctttcaggaaattctccagccactcaatcgtctcaatatccagatggtttgttggctcatcaaggaaaagaactttcggtgaactgactaaagctctccccaaagccgctttgcgtaaccagcctccggataaagaagataatttcgcctccgcaggtaaagcaagttgctttaatacatcactgatacggctgtccagtaaccagaggttacgggtatccaacacttcctgtaattctgccagtcggttgaggtttttctcactaggatctgtttccaccagtcgtgaagtatgatggaatgccttaatatactccgcctgctctttgacaccttccgctacaaaatcaaagaccgtaccttctacatcacgaggcggatcctgttgtaagcgggcaacaatcaaatcctgttcgtaaataacctgcccgtcatccaatggctgctcttttgccagcacacgcaacagggtagatttccctgcaccgttgcggccaaccagacatactctttcattttcttcaatatggagttcagtatcatccaataatggcgaatcaccgaatgacaaccaggcacccgatagattaatcaatgacataatattattttccctcgccagcgtgacgcagtagccagcagttgtggatctggcggttacgggcaaaatcctgcgacaaagttttttctgtaatatcttctgctaccagacctaatttctccagttcagcaaaatccattttgaaaccacgtttattattggagaacattaatgttcctccgcgacggagtaagcgctttaattgcttcattaaatcgatatgatcgcgctgaacatcaaaggtatcttccatacgtttagagttggagaatgtcggtggatcaataaaaatcaggtcaaactgttcgcgtgtttgggccagccaccccagacaatctgcctgaatcaaacgatgctgacggccagacagaccatttacctgtaaatttttctccgcccactcaaggtaagttcgggacatatccactgtggtcgttgagcgcgcaccacccagtccggcatgaactgttgctgatccggtataggaaaacagattgaggaagtctttaccctggctcatttccccgagttttttgcgggcaatacggtgatcaaggaataaccccgtatccagataatctgtcaggttaacccagaatttcgcgccatattcattcaccaaaaagaattctttcttttcagcaagtttttcatattgatttttgcctttctggcgctggcgggttttcagaatcagctgattagattgcagcccgagcacattcattgttgcgctaataacatcaaacaagcgttggcgggctttattggcatctaccgatttaggcggagcatattcttgtacgataactttgtcggcataacgatcaacggcgacgttatactccggcaaatctgcatcatataaacgatagcaatcaattccctgctgtttcgcccatttactgagtttcttttcatttttacgcagacggttagcgtaatcttcagcaataccaccatccagtggctgaggtttgcctgatgcttgttcattttgctgaatcgcatcatttttttgaatagaatagtttttctgaacacaatctaaagggccgtttttcgctttaaactcgcgctcagcacgcaattgcaggcagcttaacaactctggtgaagcgctgaacagggataagcgccaacccggaaaacgattttttatgatccgaccgaatacattgtgcaaagcaatcaatgccggttcactttcgagacgctctccatatggcaggttacttaatatcgtacctgttaccccttcctgcaatggattttctagcttactcgcatcaccctgctgaaattcaatcagctgcgaaacgccggctctgcgtgcatttgaacgcgccatatccataacacgacgatcaatatccagcccccaaaagcgtgatgaagtttcctgtaatcctctacggaaacgcacctgtgcctcggtggtgacttcacgccaaatagcttcatcgaatttcagccatgatgtgaagccccaacgctgacggtttaaacccggcgcacaatcggcagccatcatcgctgcttcgattaacagtgttcctgaaccgcacatcgggtcaaccatcggtgttcccatactccagccggaacgcaacacgactgcggctgccagagtttctttcagtggagcctgaccggctaaatcacgataacctcgaatatgtagcccttctccactcagatcgagtgatacgcttgctttttctttattaagaaaaacattaatacgcacatccggctgttgtttggcaacatcaggacgctgctttgttttccgcataaaacagtcaacaatcgcatctttgactttcagtgcaccatattgggtatttctgatttcttcatttgtcccactgaaatggactgcgatgtgctatctactgaaaaaatttcagtccagtcaatagactggacaccaagatacaggtcaagatcgctataaactttaaattcattaagcggtagcaggatacgggatgctaatctgctccagagcagacttttatacatcacccgttcgtcgcctttaaaatgaaccccaccctgggcaatcttacaagattgtgcccccagcgtttccagttcgttctttaacagttcttccagtccacgtgccgtgctggcaaagagagagttcatgtattattcaccaagactattatttactaaaaaatgtaccaccaaaaaattgctgccattatagctaataccagcaacatgtcataagattgctcgcttcaggtaaaaataaaggtgaaaaatagcctgtggcgcagtgttgaggcgcttatgtacgaaaaatgccggcggttttcaatggacaggagtgagttaagagttaattaagattgagaaaaaactgtcagcttgtagctgatttctggatctgtgtattgggatcaatcatagagccggattaataattctttaaatcgccttatcatatataggggcctgagttggttcagtataaggcattaaacggtcattcattatttttatcggatcacagaaattcattacacgatctccgagatctagtttttgctctactaataaacaaacactggcattttcacctgcttcagcaaccataaataacgcctctgtgccatcttcctgcaaacgaacctgaataatttcaccctgttcaggtttgtttattaaagaacagatagaaaaataccagctcttaggcatctgtggtttcataaaacgaaaggcaaccaatccatttaaagctaattcagccctgagttgtggggcaatattaatacggcgggaatattcttcgaaagtataataaagcgctgcatcatcgacagaaaagttaatttctttcattgtcgtgacataagcagtcaacattctggcaggaaaacgagaacgaaaaaccataccattagcaagatcgagcatgacacggttatgctcagtatcaaaataccagcgccattgatcatcaggtctaattttcattggttacccttttctgctcaaaatagtttatttgtttaaaaataagcaccgccctaatgggaattttaaaaagttgataaacttttaatctgtcaaacaaaatatagatgagttgggggcagaaataaacccccaacgcctttaatacaaaaccttaaacatcagattgcagaaaatattcagatatgattaacaatatctttgattaatttcggccctttatagataaagccggagaatatctgaatcaatgaagcacctgcttccattttctctctggctgaaactaatgaatcaattccacccacgccaataatggggatttcaccttttaattcctgagaaagacggcgaataatttctgtactgcgtagctgcaccgggcgaccacttaaaccaccagcctgctggcagtgatttaatccttcaataatctttctgtccaaagtggtattcgttgcaatgactccatcaatttgatggcgcattaaactatctgcgatttctactaattcagattcggtaaggtctggcgaaatttttacggcaacaggaacatacttttgatatttttgttgtagttcactttgtttatttttaatcgcagatagaagatcatccagtgcttcgccatactgtaatgttctcaggcccggtgtattaggtgaagagatattaatcgtaatataaccagcatggggatacactttatccatgcaaattaaataatcatctttaccattctctaccggagtatctttatttttgccaatattaattccgataatcccgtcgtattttgctttcttaacattctcaaccaaattatcaacgccgagattattaaagcccatccgattaataataccttctgcttcaacaacacggaataatctcggtttatcattccctgcctgcggacgtggagttactgtaccaatttcaacaaaaccaaagcccattgcaccaaaggcatcaatacaatcaccatttttatcaagaccggcggctaagccaagaggattcttaaatgacaaccccatgcaggtaacgggtttagtggcaactgactggcggatgaggaattcgaaaggagtaccggtaacaagtttgagctggcgaaaagtaagctcatgggcctgttccggatcaagctggaacaatgccttctttagaagcggataatacatgcaatctcctgcgctgcgagcataatgacaggttgtggtgactgtgaaataagcgcggagcatcttaaagagatattgtcaaaatgtaaatgtaacgcagaagatatttattaatttcctccggctgaagccggaggaaatgtcattactcagctttccagtgcttttgtgattttctcaaataaatcacccgataagttttccagtgttttcagttcttctagcgttgtacgcatcaacgcctgacgtttttcatcataacgattcaggcggattaatggctcaattagacgtgaagccacttgcgggttacgcgtgttcagatcagtcagaacttctttcaggaactgataaccacgaccattctcagcgtggaatgcgactgcgttattggcaaagaaggttctcagcagtgaataagtgcggtttgggttactcagactgaaagagcgatggctcatcaaactacgtactttatcaagtacatcaaatgccgggctggttgcctgaatcataaaccatttatccatgaccaacccatcctgatgccagcgttgatcaaactcatccattagttgataactgcaaggcaattctgccgccattgccgcagatagtgctgcaacagtatcggtcatattatctgcctgataatactgagcggcgactagtttatcagcctgtgcttggtcttcaacaaaggctaaataatgcaggcaaatattacgcaatgaccgttttgcaatatccttatgctccacacgatatgcccctgtgtgaatactatggtacacagccgcaaattcatctgccatttcgtttgccagactacgtgtgatgacatcaagcacttcatgaatggcctgtggatcaatcactgtaaacaactctgccacttcattttcagacggcagtgtcaggatcagggccgccagtgctgggtcaatatctttatccagcaatacagcacggaatgcatcaataacatgtattggcaattctaccggctgggattgctgataacgggtaacattcagttttatataattagctaacagtgcctgtgccgcatcccaacgagaaaattcattgcgggcatatttcatcaggaaggtcagctggctgtcactatataaataatccagtttcactggtgcagagaattcacgtaataaagaaggcaccggctgtgacggtacatcatcaaatacaaatgtctgttctgtactgataacattcagaacatgatgcacaggctgcccatcacgacgtagcggaatgacacgaccatgttcatcatatagttcaatatccagcggaatgtgcagaggcaatttctctttctgatctgcggttggtggtgtcatctgactgacatgcaacagatactgatgtttttctgcatcatattcatcacgtactgtcagtaccggcgtacctgattgactgtaccagcggcggaatagtgtcaaatcaacgtttgaagcatcctccattgcctgtacaaaatcatcacaggttgctgcactgccatcatgacggtgtacataaagctggatacctgcctgaaattgctcttcacccagtaaagtgtggatcattcgaataacttctgagcctttttcataaacagtcagcgtatagaagttattcatttccatcacctgctcagggcggataggatgcgccatcgggctggcatcttcagcaaactgagctgcgcgcataatacgcacattgttaatacgattaacagagcgtgaacccaaatcagaactaaattcctgatcacggaatacggtcagcccctctttcaggcttaactggaaccagtcacggcaggtgatcctgttgcctgtccagttatggaaatattcatgcccaattacagcttcaatgccaagataatctttgtctgttgctgtttccgttttcgctaagacatatttggagttaaagacattcagccctttattctccatcgctcccatgttgaagaaatcaacggcaacaatcatataaatatcaagatcatattccagaccaaaacggctttcatcccacttcatcgaatttttcagcgacgtcatagcccagccagcacgatccagattgccccggtcaacaaacaattccagcgcaactttgcgaccactacgggtagtaaaagtatcatgcaggacatcaaaatcccctgcgactagcgcgaacaaataagagggtttcgggaatggatcctgccatttaacccaatgacggccatcactcagctctccctgctcaatacggttaccattggacaataaatacgggtacttggatttatccgcagtgagacgagtggtaaaacgggccaatacatccggcctgtccagataataagttatattgcggaaaccttcagcttcacactgggtgcacaaagcatcacctgatacatacagcccttcaagtgcactgttagccgcaggattattttcattcactattttcagggtaaactgagcaggcagttgttcaatgattaatttgccatcctgctcctgataatgctcccatgccttatcattaatatggatactctttaatgtcaggttttctccatctaaaatgagtggagtaatatcattaatcagacgttttacttggctggttgctgttacagttgttttatctgcatccagttcaaaatcgagatcaatatctgtaatagtatagtctggcgctttataatccagacgatgcttaacaagccgctgttgtgtcataagaaaccttttttcattacttaatgtgagaagctaacgctgccacagagactctatcctttcaatccggaaatctcttttttcagatgttaatcatttactaaataaaggtataaaacctgttttgagaatattggtacttttgtgctacttgccatctcatattgtatttaacatgatatcatctataaattgatcaaccttaatctgtattgtccggaaaaatatatgcgattatgtagctttaataacagaataatcgcggtatactcttcggactttatcgatttagcagacacaaatgctccgcgaggatgcctgacgcgccatgactttagacgctaccccgattatcaaatcactgcttgatactgatgcttataaatttcatatgcaacaagcagtgtaccaccattacaacgatattcatgttgttgcagagttccgctgccgtggtgatgaactactcggtaaatacgccggggcattacgccagcagattaacatgatggctgatctgactctgacagaacaagaagctgaatatctgtctggtttaccattttttaaacaagattatctggactggttcaaaaccttccgttttaaccctgaacaagtagaagtttctgttactgataaaggacagcttgctatcagaatttcaggtttatggcgtgaagttatcctgtgggaagtaccgttacttgccctgattagtgaactggtacaccgcgatcgctcgcctgagattaaagcagaagcggctgtcagccagctcagaaaattaattgagctgttctatcaggatgccgcagcagaacatatcgatttatcgggtttcaaactgatggatttcggcacccgccgccgtttttcacacgaagtgcaatatgccattgttaaggaactgaaagagagttttccttatctgattggaaccagtaactaccagctggcacaacaacttgatctggcaccgctcggtacgcaggctcacgaatggtttcaggctcatcagcaaatcagccccgaactcgctaacagccagcgcgcggcgttgcagacctggctgaatgagtatccgaaccagttaggcattgccctgacagattgtatcactatggacgcttttttacgggatttcgataaaccttttgctgttgcctataacggcctgcgccatgattccggtgatcccgttgactggggcgaaaaagcgattgctcattatttgtcactgggtatcgacccactgactaaaacactggtattttcggatagtctggacctgcaaaaatcactggctctttatcgtcatttccatcaacgaatcaatgtcatgttcggtattggtacacgtctgacctgcaatattccagggataaaaccgctgaatattgtgatcaaactggttgaatgtaacggtaagcctgtagccaaactgtctgacagtccgggaaaaaccatctgtgaagatgtcgaatttgtcaacagattacgcagggcatttgatatcccggaaatgaaaaaagccgtgtaattttcaggatagtttttaccaatctttaattggcgtaatcaacgtctttctggttacgccgataaaaaacaacttttccctttatttccgccttaacccccttaatttctacttgtttcctgtgaaaggacaagtaagataaggagtcatcgtgccgtttggcacgacttacagtaagtctagttatctatattaattacctattataaagaagagagaaatttatgagcgtagcgcctgtagtcgatgtactgcaagcccgtgttccggttggcagcgaagtcaccgtccgcggctgggtacgtacaaggacagattctaaagctggtatctcgttcctcgccgtctatgacggttcctgctttaatcccttacaggccgtcgttaataataatttgcctaattatcaggatgaagttctgaacctcacaaccggctgctctgtagaagtaaccggtactgttgtggaatcacagggtaaaggtcagagtttcgaattacaggcaaccaacattgtggtcgttggtatggtggaagatcccgatacttatccgatggcagcaaaacgccacagtatcgaatatctgcgtgaagtcgctcaccttcgcccacgtactaacctgattggtgccgttgcacgtgttcgccacacactggcgcaagcactgcatcgtttttaccacgaaaaagggttcttctgggtatcttcacctctgatcacagcctcagatacagaaggtgcaggtgaaatgttccgcgtttccactctggacatgcaaaacctgccattgactgataaaggtgaagttgatttcagtaaagacttcttcgggcgtgaagccttcctgactgtatccggtcagttaaacggtgaaacttatgcctgtgcattaagtaaggtttacaccttcgggccgactttccgtgctgaaaactccaataccagccgccatctggccgaattctggatgcttgaaccagaagtggctttcgctgatctgaacgatatcgctaaactcgctgaagaaatgctgaaatatgtctttaaagtggctttggaagagcgtgctgacgatctggctttctttgcagagcgcgttgacagtgaagttattacccgactggaaaaatttgtcgattctgactttgttcaattggattacacagatgccattgaaattctggaaaactgtggtcataaattcgaaaacccggtttattggggcgttgatttgtcatctgagcatgagcgttatctggcagagaagcactttggtgcaccagtcatcatgaagaactatccattta

SEQ ID NO: 2479 - DNA, 16322 bp, Xenorhabdus sp.; identical to SEQ ID NO: 2478
  CDS (13800)..(15014)

SEQ ID NO: 2480 - DNA, 16322 bp, Xenorhabdus sp.; identical to SEQ ID NO: 91
  CDS (11835)..(13052)

SEQ ID NO: 2481 - DNA, 16322 bp, Xenorhabdus sp.; identical to SEQ ID NO: 91
  CDS (15354)..(15941)

SEQ ID NO: 2482 - DNA, 13509 bp, Xenorhabdus sp.
  CDS (2)..(1048)
ttttgataaagatatccgccatattgaaattgatctgggggattcgggtttgcgttatcagcccggtgattcattgggggtttggtttgaaaacgatccggtattggttgatgagttgacaggtttgcttcatctggaaggaactgaaactgtcacagtgcatggaaagtcacttgctttgcgtgaggctctgaccagccatcttgaactgacacaaaacacgggtgttattgtcgaaaaatatgcagtcctgacgaaagatgaaagtttgcttgctttgatctccgaaaaatcaacgctacaacaatatgcccaaaaaacgcctatcgtggatatggtcaggcaggcagctcagcaacctgaagctcagcaatttatcgatatattacgtccattaactccacgcctatactccattgcctcttctcaggatgaagtcgaaaatgaagtacacattaccgttggtgttgttcgttatgacatagacggccgtgcccgtaccggtggggcatcaggttatctggctgatcgattacaggaagatgacaacatccgtgtctttattgagcataacgataacttccgcttacccgccgatccacaaaccccggtgatcatgattggccccggcaccggagtggctccattccgggcattcctgcaacaacgggataatcagggcgctgaaggtaaaaactggctgttctttggcaaccctcattttgtagaagattttctgtatcaggtggaatttcagcgttatgtcaaagaggggttacttacccgcattgatttggcatggtcgcgggatcaaaagcataaagtgtatgtgcaggacaaactgcgtgagcaggctgaggaaatctggcgctggattagtgagggagcacatttatacatctgtggagatgccaatcgtatggcaaaagatgtagagcaggcattactggatatcatttcacaacagggtggtatagatgcagagcaggccgatgaattcctaagtgaactgcgcctcgaacgtcgttatcagagagatgtttactagcaaaaataacgaaaaactataagtataaaaaccaacgggcaatgaaaacgatcatgaaaacaatgagcaatgaaaaacaaggtcctttgattgttgaaggtaaactcgctgacagtgaacgtatgaagtcagaaagcaactacttacgcgggacgatcagcgaagatttaaagaatgggctgacaggcgggtttgaaggcgataattttctcctcatccgtttccacggtatgtatcaacaggatgatcgtgacatcagagctgagcgcgcggaacagaaacttgaaccccgccatgccatgatgttgcgttgccgcttaccgggaggaattattactccccgccaatggctgggcattgatcagtttgcgacagagagcacgttgtatggcagtatccgattgactaaccgccagacattccagtttcacggcatcctgaaaaacaacgtcaaaccggcgcatcaattactggctcaaatgggattggattcactggcaaccgccaacgatgttaaccgtaatgtactgtgtacctctaatccagtgcagtcggctttgcatcagcaggcttatgaatgggcgaagaaaatatctgaacacctcctgccacgtaccaacgcgtacgctgagatctggctggataaagaaaagatcgctacaaccgacgaagagccgatcctcggtaaaacgtatctaccgcgtaaattcaaaacatcagtcgttatcccaccacaaaatgatgttgatctgcatgccaatgatatgaacttcgttgctattgcagagaatgatcagttgatcggctttaacgtgctggtgggtggtggattagccatgactcacggcgataagaacacttttccacgtctggcaagtgaatttggctatatcccactggagcatacactggctattgctgagtccattgtgacaacacagcgtgactggggtaaccgaactgaacgtaaaaacgctaaaaccaaatatacccttgagcgtgtcggcgttgaaactttcaggcaggaagttgaaaaacgtgcaggtgtgaaatttgagccagtccgcccttatgaatttactgggcgtggagatcagattggctggttaaaaggcattgatgatcaatggcatttgaccctgtttattgaaaacggccgcttgctggattatccggataaaccactaaaaaccggcgtggcagaaattgcccgaattcacaaaggcgattttcgtcttaccgcaaatcagaacctgatagtagcgggagtggcggaaaatgaaaaagcgcgtattgaatccattgcccgtgcgcatggtcttattgatgacggcgtgacctcactgcgtcaccattctatggcgtgtgtttcatttccgacttgccctttagcgatggcagaagcggaacgtttcctgccaacctttgttgatcatgtcgatgcgttaatggcaaaacacggagtcagccatgaacatatcgttctgcgtgttacaggctgccccaatggatgtggccgggcgatgctggcagaagtcgggctggtgggcaaagcgccggatcgttataacctgcatcttggtggaaatcgcaatggtagccgcattcctcgtatgtatcaggaaaatatcacctccgctgaaatcctgactattctggatgaacttattggtcgttgggctacagagcgtaatgaaaatgaagactttggcgatttcctgatccgaactgacattatcaaacctgtattgaactcagctatcgacttttacgactggcaggaggcagtatgagccggccacatttagctgagttactggctttgcccccagagcagcgcacggaagtgctcgctgagacaaaccaacaactggagttgctggatgcccgccaacgtgtcctatgggcactggaacatctgcccggtgagttcgtcctttcatccagttttggtattcaggcggcagtctgcctgcatctggtcacgcaggaataccctgatatcccagttatcctgacagataccggttacctgtttccggaaacttatcagtttatcgataaactagcggataaactaaacctgaacctgaaaatattccgtgcagaacaaagcccgatttggcaggaagcgcgttttggcaaactgtgggaacagggagtagacgggattgaacgttataaccagattaataaagttgagccgatgaaccgtgcgctgaaaacattggatgcgcagacatggtttgcagggttacgtcgtcagcaatcggaaagccgagctaatttgccagtactggcagtgcagcgcagtgtttacaagatactgccaattatcgactgggacaatcgtaaggtacatcaatacctgaccgagcatggccttgaataccatcctctatgggaacaaggctacctttctgtgggggatactcataccacgaaaaaatgggaacctggaatgagtgaagaacaaacccgcttttttggcctgaagcgggaatgtggcttgcatgaaggctgagttccttttgaatttttggaatggccgaattattcggccattcttaaacccaaagattcagttatagctaaaatcagttatcacaatgcccttctttagcaaggtgcatgtccatctccatcttagattcttcttgctcctttgttcaatatactcaaactggcgtcttaaagttaaattagtacactccaaatttagctggtgtgagtatagatgccactattcccttggaataatagaaagctataataacaatgatggaaggcctgattaattaaatcatcatctgaaaaaggtatagaagaaactacaaaggtaccccgaatttgtgtgtgtaccataatattccgaagtatttctttgtataatctacccagtcattatcttcagcgtttgtggacttctctttgatagacataccaccaaccggatcaccatgaaaaataaacaacggatacatgccctgtgttacacaccaccctatccatggtatagggttctcaaatatagcttttttatcttggcaatatttttccaaatattgaaaaacatcagtgtcagtatgaagtgttacaatagctcctgcacttaccattgagcttggtctctctgagtatttactttcaacggcacttacaatcccatttacaggaggtgtttctactctcaatctaccattaacacaaccaaccaataaacaagaaactaaaaaagtgattaatagtgacttcatctttctctcttattatattcagaccatagataaggataaaactcttttgaaaatgttgtccattcattatcagaaacaaaattttgtttttcaaatatccccatcgttcccaattttgcatctatatctgttctacttataataaataaaggaattttatcctttgttatacaccatcctgagtatatagtgtattgttcaaaatttgcatttttatttttacaatactctttaattctattaaataatattggtttaacatggaggtctacacttttaatgaatttaaatcgatgtgtagaatattgtgggtactctgattctaaaaaacttataactccattatccaatggttctccttgtttgaaagttacacatccagataacaaaaacattacaaaaattgaggttattattgggcgcattgcatatttctcttaaaataattaattttttccattgaagattccttttgtgataactattttttaataaattcagtttgaattttattttatctttcctatgatttttttcaagttatagttgctgttaataaacggattcttagcatattattgttcgaaataactttttttatctatattaggtggtaagggaatgggattatatgtgtcatatatagccacctccgttaatagattgaatggtaagtaataaaatttagcaatccatacatttaataaatgagaatatgatcaagaaaaaatttagtgaaatagattattctattgttttcaataaataatggataatgcatacagactcactaaattttaatcgacaacatgaaaagtgtagccttaagataaatattcggaataatatgaataaaaatattgatattggatatgttaaattattatggttatatatactatgccaatttctaattggatgtgataactccaatgcgaattttgataatagtgaaccatctgaagctcagataattaagggcatacaaaaccactttgatttgaatgcaattgacaacagagttcaagaaatacaactttttttgaattcagtaaaaaaattagatgattgtgaatggcttgaaatagaagctactaaaatacgttgtcctgtagacataattgttagtatgcaactcagctccagaacaatctcaagacaatttaaaattagacataaagtgcatcttagagaagataatggaaaattaattgtggatgaaaaattaaaaacaaaaatacgtcaaatgataatcactaatggagttaatgctaagatgtaaacatatggaagataattggtctaatatataatttgcttttatgacaattgataaaaataatgttaaggaaatgatgattatggaatcgattaatttatttggtctatttttactatgtatagttttaattggttgtgataataccaataccaataccaataccaataccaataccaataccaataccaataccaataccaataccaataccaataccaataccaataccaataccaataccaataccaataccaataccaataccaatattcattttgccgatgatggtccatcggaaagccaaatatatgatgctattcaggctagattgagtgagtctgaaccaaataagcctattcaagaagggccattctctgtggcgagtgtaaaaaaagtgggaaattgtaaactatctaaggatgaacccaccaagatgcgttgccctgttgagatgaccttcaataatgatcatgggctaaattcagggtccaaacaaggctcatttaaacgatttaattctacttttaattttaaggagcagattgttagcctaaaaatgtatatttggcaggaaaatgggaattgggttgcggatgatcaattaagatcacgaatacaagcagatactttgcttagcaaggctggtgttcgggttagatacgcggaagatgtggaacctaatatcagtactcattttgatgatggtggtccatcggaaagtcagatatataatgctatccaagatctttatgataaaactgaatcagatggtgaaactgagaaagaagcattttttttggaatcagtaaagaaaataggaaattgtacacccgttgcgactgagccgactaagatgaattgtccagtggatgtcaccgcaggatggcaaggcggagcaaattctattcctcaaaagtatacgtttaatcaatatatatctatctggcaggaaaatggtaattgggttgcagatagccgagtaaaatcaagaatacagttggtgatgcttttcagtatcaggaaaggttagtatgggattattgttgctcctagttccctagtttcgtaaggatccttaatgaaaaaatggtgtgttaagagtggattgttctttttaatagatagttaattcttttagtgtaaatcctcgcccaatgtggcggggtataaaagaaagaagtgggagcctgaaaaaaagtagtcattttcccctgaatatttatcatgtcaccactttataacccattaaaaaacctaccttatacgattcaggaactaataattactttttgacatttcataactctatcacagccacatatattcatcccttatacacttcgtctttcaagttgcctctttgttggctgcgctcgttcaccccggtcacatagttagctatgctcacggggattactgagaggctcctgcctctcaccggaggccagcctttggctgggcaaattcgttcccgacgaatttgtcattcccttgccgccgcgacgcatcttgaaatccattgtgtatcgataattattaataaattaaactctggatggcctgtcattgtggattacttacccttatttgttgagctgaaatcgcgtgctgttttgctggtgggaggtggcgaagtggcttcccgcaaggccagcctgttattgcgagctggtgcggcattaacagtcgtggctcctgaattacactcagaattgcaacaacgccatcaaaaaggggattttgagtggcgacagggtacattccgtacggattatcttgatggtgtatttctggtgcttgcagcgactgacgatcatgatttaaaccagtttatttttaccgaagctaatcgtcgcgctattttggttaatgtggtggatgatcagtcactgtgctcagctattttcccctcaattattgatcgttctccggttatggtggcgatctcatctgccggaaaatcccctgtattaacacgattgctgcgggaaaagctggaatcgttgttgccttttcatcttggtgcgatggcagaaattgccggtcgttggcgtggaaaagtaaaacagagcctgaattccctgcgccagcgtcgttatttctgggagaaagcctttaacgggcgttttgccacgctagttgctaatgggcagttacaacaggctgaggagcaactggctcaacagattgctgatgaacaacaaaagcaaaccagtaagcaaggtgagttggtattagtcggagcaggtcccggtgatccggggttgttgacgttaaaagggttacaggtgatccagcaggctgatgtggtgctttatgatcatctggttagcgatgaaatactcgaattagtgcgccgtgatgccgacaaaatctgtgtaggcaagagggcaggcagccattctgttgcgcaggaagaaacaaacactctgatcgtcaaactggcaaatcaggggaaaaaagtggttcgcctgaaaggtggtgacccctttatttttggtcgcggcggagaggaattacaggttgccgaatccgcgggcattccttttcaggttgtacccggcataactgccgctgttggtgcttcggcttatgcgggtattcctctgacacacagggaacactcccaaagtgtcacgtttattaccgggcattgtcgcgaaaatggcaatgaactggactggcccgcactggcgcgaggtaatcagacactggcaatttatatggggatcatcaagtcagccttgattagccagaaactcatttcacacgggcgggatgccagtacaccggttgctgtcattggctgtggaacccgcgctgagcagcaggtattgaccggtacgttgtctgaattggagcagttggcacaggaagcgccatcgccagcgttgttggtggtgggagaggttgctcagcttcaccatcaattagcctggtttgggctgaaatcggttgatcatcaaaatctggcagaacacacagaatctactgagccggcaaatcgccctgctgttgttgatttagcctaaagaactatttatttatggaagaactattaatgggggagcattaatggacaacaaaagactgactcatttgcagcaacttgaagcagaaagtattcatattattcgtgaagttgctgccgaatttgctaatccggtaatgctttactccattggtaaagattcttctgtgatgctgcatcttgcacgtaaagcattttatccgggaaagttgccttttccgctgctgcatgtcgataccggctggaaattccgggaaatgtatgaatttcgcgataaaaccgcagagaaatatggttttgaattgctggtctatcgtaatccgcagggggaagaactgggtattaacccttttattcacggtagtgccaaacatactgatgttatgaaaacggaaggcctgaagcaggcgctggataaatacggattcgatgccgcatttggcggtgcccgacgtgacgaggagaaatcccgtgctaaagagcggatttattctttccgtgatcgctctcatcgctgggatccgaaaaatcagcgcccggaactctggcgtaactataacggccagattaataaaggtgaaagtatccgtgtattcccgttatctaactggactgagctggatatctggcagtacatctatttagagcagatagatattgttcctctctactttgcgaagccccgtccgatcgttcagcgcgatggcacgctgattatggttgatgacaatcgtatcgatttgaaagcgggtgaagttatcagccagcgtaaagttcgtttccggacactcggttgctggcctttgactggtgccgtggaatcggaagcggagacactgccggaaattatcgaggaaatgctgatatcgacaaccagcgagcggcaggggaggctgattgatagtgatcagtccggttcaatggagctgaaaaaacgtcagggttatttttgaggcacagcgttatttttttgaggggagcataaaaatgccggcactcgcacataatgaagtcatcgccaatcaaatcagagagcagggcggtgttgaatcctatctgagagcacaacaggaaaagggattactgcgttttctgacctgcggtagcgttgatgatggtaaaagcacgctgatcggtcgcttattacacgataccagtcagatctacgaagatcagctggcgactttacaaaatgacagtaagagactgggaactcagggagaaaagttggatctggcgcttttggttgatgggcttgcggctgagcgggaacagggtattactatcgatgttgcctaccgttatttctccacagaaaaacgaaaatttatcatcgcggatacgccggggcatgaacaatatacccgtaatatggcaacaggggcatcaaccagtgatctctctattcttctgatcgatgcgcgcaaaggtgtacaggaacagactcgccggcatagttttatcagtacgttgctggggatccgctatttggtggtggcagtaaacaaaatggatctggtggagtaccggcaggatattttcgatcggatcaaacaagattatctggattttgccagccagttgcccactgatctgcacatttattttgtccctatctcggcgctggaaggggacaatatcgtcagtcacagtgagaaaatgccgtggcacagcggagcaacgttgctggatctccttgaaacagtagatgtacagaaaaatgcttcagagcagcctctgcgctttcctgtgcaatacgtcaatcgccctgatcttgattttcgtggttatagcggcacattatcatcgggaattttacgtcaggggcaaaaaattaaagtgatgccatcaggccgggtttccacggtagagcggatcgtgacttttgatggtgatttgacttttgctgtatcggggcaggccatcactatcgtcctgaaagatgaaattgatatcagccgtggtgatctgctggttgcggttgaaagccaaatgacggtagcgcgccatgctctggtggatgttgtctggatgtcagaaaagccgctgattcaggggcaaagtctggatatcaaggtagcaggtaagaagagccgggcaaaaattgataatgtccagtatcaggttgatattaataatctgacccagaaagtcgcggttgagctgccgttaaatgctattgggctggtggagttttcatttgatgagccgctgttgattgatagttatcagcaaagtgcggataccggtggcatcattttgatcgatcgcctgactaacgttaccgttggagcaggactggtgcgggaaattcagactgatgtctatcaggagccgcatgagtacagtgagtttgaactggagttcaaccggttggtgcgccgccatttcccacactggggagcacgtgatttattgggagggaagtaagtggttcaggtcagggaggattctcccaatactaatactatttcccacaatacggtcttccacaacacggtctcgcctaatgtagtctggcactcacactctgtgggcagacaacagcgggaggcggtgaacgggcatccggctttggttatctggtttaccgggttatccggttcaggcaaatcaacacttgctgggatattagaacaggcgctgttttcacaggggatcaaaacctacttattggatggggataatctgcgtcatgggctgtgcaatgatttaggtttttctgaagctgataggcaggagaatatccgccgtgtgggagaagttgcaaaactgatgcttgatgccgggctggtggtattgacggcttttatttcccccaatcgtgctgagcgacaaaaaatacggcaatccgtggagccagagcaattcattgaggtatttgttgatacacctctggaaatttgcgaatcccgtgatccgaaaggcttatataagaaagcacgagccggagaaattctgaattttaccggcattgattcagattatgaggcaccagaacatcccgatattcatttagatggttcacaacccattgagttattgatggaagaattacttatttcgctaaacgaaagaaatattctgactacctgatatcccatttttgttttccactctctgaacacatttcccggacaaagtaaaaacacattattgcgagtcaggtaatgtgtttctacactcatgtcactgcgtattcttttgtgatccatttgtgatttgtttgtgatagtggcgtcatctcctgagttatgggatgattagcgggtttttcagggggcggaaatgggtaaactaacgctactattactggttttacttggctggttacagtattcgctgtggatcggcaaaaatggtattcacgattatatgcgggttaaggatgaggttgcaaaacaagagaaaaacaatctttttctgaagtcgcgtaatgaccagctatttgcagaaattaaggatttgaaaggcggccagcaagcaattgaagaacgtgcccgtaatgaattaggtatgattaaacccggtgaatctttttatcgcatggtaccggatacaacgaaacaaaatgcacaacaggcttcgggacaaaataacgagaaataaaacagtgaacaataactcaaatgaattgctcaactcttcactctcctgctgatatttttataactgaattttatgactgaaatagttgctttaatccctgctgcgggtatcggtagccggatgcaatcggagtgtccgaaacaatatctcagcattgccgaaaaaacgattattgaacatacactctctgcactgcttgaacatccccgcatacagcaggccatcgttgtgttacatcccgctgacaaacaatttaaccaattgcctatcgcttctgatccgcgtattacaacagttatcggtggtaacgaacgtgctgattcagtattagccgggctgaattatctggccgggttgtcgccagaatgcccggattgggttttggttcatgatgccgcccgcccctgtttgcatcggaatgaccttgataacttactgaaattgctggatgaaaagtctgcttcttctgtgctgagtggtggaccgtttgatgacgaacggttttgtgggggattactggccgcaccggtcagggatacaatgaaacgtatgatggctgcttcttcgggaagaataactgaaacagcaccacaggtggttgatcacaccgttgatcgcagtggtctctggcatgcgttgactccacagttatttccgttgcagttattacgcgattgtctgatgaaagcccttgccgaacgagcctgcattacagatgaatcttctgcgctggaatattgtggctatcatccagctctggtcagcggtcgggcggacaatataaaagtaactcagcctgaagatctggctctggctgaattttacctatcccgaaaatcaaaggaacgtatcgtatgagaattggtcacggttttgatgtacataaatttggcggagaagggccactgatcattggtggtgtccgcattccttatgaacaggggctgattgcacactcagatggtgatgttgccttacatgctgcaacagatgctttgctgggagcggcagcattgggtgatatcggcaaactgttcccggatactgacccggcttttaagggcgcagatagtcgtgagttgctgaaagaggcttatcgtcgcattcgtgaaaaaggttatcggataggtaaccttgatatcaccattattgctcaggcaccgaaaatgttacctcatattccccagatgcgcgtcaatctggcacaagatcttgagtgccatatggatgatatcaacgtttaagcgacatcgactgagtaattgggatttgtagaccgtaa

SEQ ID NO: 2483 - DNA, 13509 bp, Xenorhabdus sp.; identical to SEQ ID NO: 2482
  CDS (1102)..(2841)

SEQ ID NO: 2484 - DNA, 13509 bp, Xenorhabdus sp.; identical to SEQ ID NO: 2482
  CDS (2886)..(3572)

SEQ ID NO: 2485 - DNA, 13509 bp, Xenorhabdus sp.; identical to SEQ ID NO: 2482
  CDS (6258)..(6617)

SEQ ID NO: 2486 - DNA, 13509 bp, Xenorhabdus sp.; identical to SEQ ID NO: 2482
  CDS (7156)..(8619)

SEQ ID NO: 2487 - DNA, 13509 bp, Xenorhabdus sp.; identical to SEQ ID NO: 2482
  CDS (8663)..(9571)

SEQ ID NO: 2488 - DNA, 13509 bp, Xenorhabdus sp.; identical to SEQ ID NO: 2482
  CDS (9606)..(11048)

SEQ ID NO: 2489 - DNA, 13509 bp, Xenorhabdus sp.; identical to SEQ ID NO: 2482
  CDS (11175)..(11714)

SEQ ID NO: 2490 - DNA, 13509 bp, Xenorhabdus sp.; identical to SEQ ID NO: 2482
  CDS (11907)..(12227)

SEQ ID NO: 2491 - DNA, 13509 bp, Xenorhabdus sp.; identical to SEQ ID NO: 2482
  CDS (12306)..(13085)

SEQ ID NO: 2492 - DNA, 13509 bp, Xenorhabdus sp.; identical to SEQ ID NO: 2482
  CDS (13082)..(13471)

SEQ ID NO: 2493 - DNA, 13509 bp, Xenorhabdus sp.
  CDS (9478)..(9630)
ttacggtctacaaatcccaattactcagtcgatgtcgcttaaacgttgatatcatccatatggcactcaagatcttgtgccagattgacgcgcatctggggaatatgaggtaacattttcggtgcctgagcaataatggtgatatcaaggttacctatccgataacctttttcacgaatgcgacgataagcctctttcagcaactcacgactatctgcgcccttaaaagccgggtcagtatccgggaacagtttgccgatatcacccaatgctgccgctcccagcaaagcatctgttgcagcatgtaaggcaacatcaccatctgagtgtgcaatcagcccctgttcataaggaatgcggacaccaccaatgatcagtggcccttctccgccaaatttatgtacatcaaaaccgtgaccaattctcatacgatacgttcctttgattttcgggataggtaaaattcagccagagccagatcttcaggctgagttacttttatattgtccgcccgaccgctgaccagagctggatgatagccacaatattccagcgcagaagattcatctgtaatgcaggctcgttcggcaagggctttcatcagacaatcgcgtaataactgcaacggaaataactgtggagtcaacgcatgccagagaccactgcgatcaacggtgtgatcaaccacctgtggtgctgtttcagttattcttcccgaagaagcagccatcatacgtttcattgtatccctgaccggtgcggccagtaatcccccacaaaaccgttcgtcatcaaacggtccaccactcagcacagaagaagcagacttttcatccagcaatttcagtaagttatcaaggtcattccgatgcaaacaggggcgggcggcatcatgaaccaaaacccaatccgggcattctggcgacaacccggccagataattcagcccggctaatactgaatcagcacgttcgttaccaccgataactgttgtaatacgcggatcagaagcgataggcaattggttaaattgtttgtcagcgggatgtaacacaacgatggcctgctgtatgcggggatgttcaagcagtgcagagagtgtatgttcaataatcgttttttcggcaatgctgagatattgtttcggacactccgattgcatccggctaccgatacccgcagcagggattaaagcaactatttcagtcataaaattcagttataaaaatatcagcaggagagtgaagagttgagcaattcatttgagttattgttcactgttttatttctcgttattttgtcccgaagcctgttgtgcattttgtttcgttgtatccggtaccatgcgataaaaagattcaccgggtttaatcatacctaattcattacgggcacgttcttcaattgcttgctggccgcctttcaaatccttaatttctgcaaatagctggtcattacgcgacttcagaaaaagattgtttttctcttgttttgcaacctcatccttaacccgcatataatcgtgaataccatttttgccgatccacagcgaatactgtaaccagccaagtaaaaccagtaatagtagcgttagtttacccatttccgccccctgaaaaacccgctaatcatcccataactcaggagatgacgccactatcacaaacaaatcacaaatggatcacaaaagaatacgcagtgacatgagtgtagaaacacattacctgactcgcaataatgtgtttttactttgtccgggaaatgtgttcagagagtggaaaacaaaaatgggatatcaggtagtcagaatatttctttcgtttagcgaaataagtaattcttccatcaataactcaatgggttgtgaaccatctaaatgaatatcgggatgttctggtgcctcataatctgaatcaatgccggtaaaattcagaatttctccggctcgtgctttcttatataagcctttcggatcacgggattcgcaaatttccagaggtgtatcaacaaatacctcaatgaattgctctggctccacggattgccgtattttttgtcgctcagcacgattgggggaaataaaagccgtcaataccaccagcccggcatcaagcatcagttttgcaacttctcccacacggcggatattctcctgcctatcagcttcagaaaaacctaaatcattgcacagcccatgacgcagattatccccatccaataagtaggttttgatcccctgtgaaaacagcgcctgttctaatatcccagcaagtgttgatttgcctgaaccggataacccggtaaaccagataaccaaagccggatgcccgttcaccgcctcccgctgttgtctgcccacagagtgtgagtgccagactacattaggcgagaccgtgttgtggaagaccgtattgtgggaaatagtattagtattgggagaatcctccctgacctgaaccacttacttccctcccaataaatcacgtgctccccagtgtgggaaatggcggcgcaccaaccggttgaactccagttcaaactcactgtactcatgcggctcctgatagacatcagtctgaatttcccgcaccagtcctgctccaacggtaacgttagtcaggcgatcgatcaaaatgatgccaccggtatccgcactttgctgataactatcaatcaacagcggctcatcaaatgaaaactccaccagcccaatagcatttaacggcagctcaaccgcgactttctgggtcagattattaatatcaacctgatactggacattatcaatttttgcccggctcttcttacctgctaccttgatatccagactttgcccctgaatcagcggcttttctgacatccagacaacatccaccagagcatggcgcgctaccgtcatttggctttcaaccgcaaccagcagatcaccacggctgatatcaatttcatctttcaggacgatagtgatggcctgccccgatacagcaaaagtcaaatcaccatcaaaagtcacgatccgctctaccgtggaaacccggcctgatggcatcactttaattttttgcccctgacgtaaaattcccgatgataatgtgccgctataaccacgaaaatcaagatcagggcgattgacgtattgcacaggaaagcgcagaggctgctctgaagcatttttctgtacatctactgtttcaaggagatccagcaacgttgctccgctgtgccacggcattttctcactgtgactgacgatattgtccccttccagcgccgagatagggacaaaataaatgtgcagatcagtgggcaactggctggcaaaatccagataatcttgtttgatccgatcgaaaatatcctgccggtactccaccagatccattttgtttactgccaccaccaaatagcggatccccagcaacgtactgataaaactatgccggcgagtctgttcctgtacacctttgcgcgcatcgatcagaagaatagagagatcactggttgatgcccctgttgccatattacgggtatattgttcatgccccggcgtatccgcgatgataaattttcgtttttctgtggagaaataacggtaggcaacatcgatagtaataccctgttcccgctcagccgcaagcccatcaaccaaaagcgccagatccaacttttctccctgagttcccagtctcttactgtcattttgtaaagtcgccagctgatcttcgtagatctgactggtatcgtgtaataagcgaccgatcagcgtgcttttaccatcatcaacgctaccgcaggtcagaaaacgcagtaatcccttttcctgttgtgctctcagataggattcaacaccgccctgctctctgatttgattggcgatgacttcattatgtgcgagtgccggcatttttatgctcccctcaaaaaaataacgctgtgcctcaaaaataaccctgacgttttttcagctccattgaaccggactgatcactatcaatcagcctcccctgccgctcgctggttgtcgatatcagcatttcctcgataatttccggcagtgtctccgcttccgattccacggcaccagtcaaaggccagcaaccgagtgtccggaaacgaactttacgctggctgataacttcacccgctttcaaatcgatacgattgtcatcaaccataatcagcgtgccatcgcgctgaacgatcggacggggcttcgcaaagtagagaggaacaatatctatctgctctaaatagatgtactgccagatatccagctcagtccagttagataacgggaatacacggatactttcacctttattaatctggccgttatagttacgccagagttccgggcgctgatttttcggatcccagcgatgagagcgatcacggaaagaataaatccgctctttagcacgggatttctcctcgtcacgtcgggcaccgccaaatgcggcatcgaatccgtatttatccagcgcctgcttcaggccttccgttttcataacatcagtatgtttggcactaccgtgaataaaagggttaatacccagttcttccccctgcggattacgatagaccagcaattcaaaaccatatttctctgcggttttatcgcgaaattcatacatttcccggaatttccagccggtatcgacatgcagcagcggaaaaggcaactttcccggataaaatgctttacgtgcaagatgcagcatcacagaagaatctttaccaatggagtaaagcattaccggattagcaaattcggcagcaacttcacgaataatatgaatactttctgcttcaagttgctgcaaatgagtcagtcttttgttgtccattaatgctcccccattaatagttcttccataaataaatagttctttaggctaaatcaacaacagcagggcgatttgccggctcagtagattctgtgtgttctgccagattttgatgatcaaccgatttcagcccaaaccaggctaattgatggtgaagctgagcaacctctcccaccaccaacaacgctggcgatggcgcttcctgtgccaactgctccaattcagacaacgtaccggtcaatacctgctgctcagcgcgggttccacagccaatgacagcaaccggtgtactggcatcccgcccgtgtgaaatgagtttctggctaatcaaggctgacttgatgatccccatataaattgccagtgtctgattacctcgcgccagtgcgggccagtccagttcattgccattttcgcgacaatgcccggtaataaacgtgacactttgggagtgttccctgtgtgtcagaggaatacccgcataagccgaagcaccaacagcggcagttatgccgggtacaacctgaaaaggaatgcccgcggattcggcaacctgtaattcctctccgccgcgaccaaaaataaaggggtcaccacctttcaggcgaaccacttttttcccctgatttgccagtttgacgatcagagtgtttgtttcttcctgcgcaacagaatggctgcctgccctcttgcctacacagattttgtcggcatcacggcgcactaattcgagtatttcatcgctaaccagatgatcataaagcaccacatcagcctgctggatcacctgtaacccttttaacgtcaacaaccccggatcaccgggacctgctccgactaataccaactcaccttgcttactggtttgcttttgttgttcatcagcaatctgttgagccagttgctcctcagcctgttgtaactgcccattagcaactagcgtggcaaaacgcccgttaaaggctttctcccagaaataacgacgctggcgcagggaattcaggctctgttttacttttccacgccaacgaccggcaatttctgccatcgcaccaagatgaaaaggcaacaacgattccagcttttcccgcagcaatcgtgttaatacaggggattttccggcagatgagatcgccaccataaccggagaacgatcaataattgaggggaaaatagctgagcacagtgactgatcatccaccacattaaccaaaatagcgcgacgattagcttcggtaaaaataaactggtttaaatcatgatcgtcagtcgctgcaagcaccagaaatacaccatcaagataatccgtacggaatgtaccctgtcgccactcaaaatcccctttttgatggcgttgttgcaattctgagtgtaattcaggagccacgactgttaatgccgcaccagctcgcaataacaggctggccttgcgggaagccacttcgccacctcccaccagcaaaacagcacgcgatttcagctcaacaaataagggtaagtaatccacaatgacaggccatccagagtttaatttattaataattatcgatacacaatggatttcaagatgcgtcgcggcggcaagggaatgacaaattcgtcgggaacgaatttgcccagccaaaggctggcctccggtgagaggcaggagcctctcagtaatccccgtgagcatagctaactatgtgaccggggtgaacgagcgcagccaacaaagaggcaacttgaaagacgaagtgtataagggatgaatatatgtggctgtgatagagttatgaaatgtcaaaaagtaattattagttcctgaatcgtataaggtaggttttttaatgggttataaagtggtgacatgataaatattcaggggaaaatgactactttttttcaggctcccacttctttcttttataccccgccacattgggcgaggatttacactaaaagaattaactatctattaaaaagaacaatccactcttaacacaccattttttcattaaggatccttacgaaactagggaactaggagcaacaataatcccatactaacctttcctgatactgaaaagcatcaccaactgtattcttgattttactcggctatctgcaacccaattaccattttcctgccagatagatatatattgattaaacgtatacttttgaggaatagaatttgctccgccttgccatcctgcggtgacatccactggacaattcatcttagtcggctcagtcgcaacgggtgtacaatttcctattttctttactgattccaaaaaaaatgcttctttctcagtttcaccatctgattcagttttatcataaagatcttggatagcattatatatctgactttccgatggaccaccatcatcaaaatgagtactgatattaggttccacatcttccgcgtatctaacccgaacaccagccttgctaagcaaagtatctgcttgtattcgtgatcttaattgatcatccgcaacccaattcccattttcctgccaaatatacatttttaggctaacaatctgctccttaaaattaaaagtagaattaaatcgtttaaatgagccttgtttggaccctgaatttagcccatgatcattattgaaggtcatctcaacagggcaacgcatcttggtgggttcatccttagatagtttacaatttcccactttttttacactcgccacagagaatggcccttcttgaataggcttatttggttcagactcactcaatctagcctgaatagcatcatatatttggctttccgatggaccatcatcggcaaaatgaatattggtattggtattggtattggtattggtattggtattggtattggtattggtattggtattggtattggtattggtattggtattggtattggtattggtattggtattggtattggtattggtattatcacaaccaattaaaactatacatagtaaaaatagaccaaataaattaatcgattccataatcatcatttccttaacattatttttatcaattgtcataaaagcaaattatatattagaccaattatcttccatatgtttacatcttagcattaactccattagtgattatcatttgacgtatttttgtttttaatttttcatccacaattaattttccattatcttctctaagatgcactttatgtctaattttaaattgtcttgagattgttctggagctgagttgcatactaacaattatgtctacaggacaacgtattttagtagcttctatttcaagccattcacaatcatctaatttttttactgaattcaaaaaaagttgtatttcttgaactctgttgtcaattgcattcaaatcaaagtggttttgtatgcccttaattatctgagcttcagatggttcactattatcaaaattcgcattggagttatcacatccaattagaaattggcatagtatatataaccataataatttaacatatccaatatcaatatttttattcatattattccgaatatttatcttaaggctacacttttcatgttgtcgattaaaatttagtgagtctgtatgcattatccattatttattgaaaacaatagaataatctatttcactaaattttttcttgatcatattctcatttattaaatgtatggattgctaaattttattacttaccattcaatctattaacggaggtggctatatatgacacatataatcccattcccttaccacctaatatagataaaaaaagttatttcgaacaataatatgctaagaatccgtttattaacagcaactataacttgaaaaaaatcataggaaagataaaataaaattcaaactgaatttattaaaaaatagttatcacaaaaggaatcttcaatggaaaaaattaattattttaagagaaatatgcaatgcgcccaataataacctcaatttttgtaatgtttttgttatctggatgtgtaactttcaaacaaggagaaccattggataatggagttataagttttttagaatcagagtacccacaatattctacacatcgatttaaattcattaaaagtgtagacctccatgttaaaccaatattatttaatagaattaaagagtattgtaaaaataaaaatgcaaattttgaacaatacactatatactcaggatggtgtataacaaaggataaaattcctttatttattataagtagaacagatatagatgcaaaattgggaacgatggggatatttgaaaaacaaaattttgtttctgataatgaatggacaacattttcaaaagagttttatccttatctatggtctgaatataataagagagaaagatgaagtcactattaatcacttttttagtttcttgtttattggttggttgtgttaatggtagattgagagtagaaacacctcctgtaaatgggattgtaagtgccgttgaaagtaaatactcagagagaccaagctcaatggtaagtgcaggagctattgtaacacttcatactgacactgatgtttttcaatatttggaaaaatattgccaagataaaaaagctatatttgagaaccctataccatggatagggtggtgtgtaacacagggcatgtatccgttgtttatttttcatggtgatccggttggtggtatgtctatcaaagagaagtccacaaacgctgaagataatgactgggtagattatacaaagaaatacttcggaatattatggtacacacacaaattcggggtacctttgtagtttcttctatacctttttcagatgatgatttaattaatcaggccttccatcattgttattatagctttctattattccaagggaatagtggcatctatactcacaccagctaaatttggagtgtactaatttaactttaagacgccagtttgagtatattgaacaaaggagcaagaagaatctaagatggagatggacatgcaccttgctaaagaagggcattgtgataactgattttagctataactgaatctttgggtttaagaatggccgaataattcggccattccaaaaattcaaaaggaactcagccttcatgcaagccacattcccgcttcaggccaaaaaagcgggtttgttcttcactcattccaggttcccattttttcgtggtatgagtatcccccacagaaaggtagccttgttcccatagaggatggtattcaaggccatgctcggtcaggtattgatgtaccttacgattgtcccagtcgataattggcagtatcttgtaaacactgcgctgcactgccagtactggcaaattagctcggctttccgattgctgacgacgtaaccctgcaaaccatgtctgcgcatccaatgttttcagcgcacggttcatcggctcaactttattaatctggttataacgttcaatcccgtctactccctgttcccacagtttgccaaaacgcgcttcctgccaaatcgggctttgttctgcacggaatattttcaggttcaggtttagtttatccgctagtttatcgataaactgataagtttccggaaacaggtaaccggtatctgtcaggataactgggatatcagggtattcctgcgtgaccagatgcaggcagactgccgcctgaataccaaaactggatgaaaggacgaactcaccgggcagatgttccagtgcccataggacacgttggcgggcatccagcaactccagttgttggtttgtctcagcgagcacttccgtgcgctgctctgggggcaaagccagtaactcagctaaatgtggccggctcatactgcctcctgccagtcgtaaaagtcgatagctgagttcaatacaggtttgataatgtcagttcggatcaggaaatcgccaaagtcttcattttcattacgctctgtagcccaacgaccaataagttcatccagaatagtcaggatttcagcggaggtgatattttcctgatacatacgaggaatgcggctaccattgcgatttccaccaagatgcaggttataacgatccggcgctttgcccaccagcccgacttctgccagcatcgcccggccacatccattggggcagcctgtaacacgcagaacgatatgttcatggctgactccgtgttttgccattaacgcatcgacatgatcaacaaaggttggcaggaaacgttccgcttctgccatcgctaaagggcaagtcggaaatgaaacacacgccatagaatggtgacgcagtgaggtcacgccgtcatcaataagaccatgcgcacgggcaatggattcaatacgcgctttttcattttccgccactcccgctactatcaggttctgatttgcggtaagacgaaaatcgcctttgtgaattcgggcaatttctgccacgccggtttttagtggtttatccggataatccagcaagcggccgttttcaataaacagggtcaaatgccattgatcatcaatgccttttaaccagccaatctgatctccacgcccagtaaattcataagggcggactggctcaaatttcacacctgcacgtttttcaacttcctgcctgaaagtttcaacgccgacacgctcaagggtatatttggttttagcgtttttacgttcagttcggttaccccagtcacgctgtgttgtcacaatggactcagcaatagccagtgtatgctccagtgggatatagccaaattcacttgccagacgtggaaaagtgttcttatcgccgtgagtcatggctaatccaccacccaccagcacgttaaagccgatcaactgatcattctctgcaatagcaacgaagttcatatcattggcatgcagatcaacatcattttgtggtgggataacgactgatgttttgaatttacgcggtagatacgttttaccgaggatcggctcttcgtcggttgtagcgatcttttctttatccagccagatctcagcgtacgcgttggtacgtggcaggaggtgttcagatattttcttcgcccattcataagcctgctgatgcaaagccgactgcactggattagaggtacacagtacattacggttaacatcgttggcggttgccagtgaatccaatcccatttgagccagtaattgatgcgccggtttgacgttgtttttcaggatgccgtgaaactggaatgtctggcggttagtcaatcggatactgccatacaacgtgctctctgtcgcaaactgatcaatgcccagccattggcggggagtaataattcctcccggtaagcggcaacgcaacatcatggcatggcggggttcaagtttctgttccgcgcgctcagctctgatgtcacgatcatcctgttgatacataccgtggaaacggatgaggagaaaattatcgccttcaaacccgcctgtcagcccattctttaaatcttcgctgatcgtcccgcgtaagtagttgctttctgacttcatacgttcactgtcagcgagtttaccttcaacaatcaaaggaccttgtttttcattgctcattgttttcatgatcgttttcattgcccgttggtttttatacttatagtttttcgttatttttgctagtaaacatctctctgataacgacgttcgaggcgcagttcacttaggaattcatcggcctgctctgcatctataccaccctgttgtgaaatgatatccagtaatgcctgctctacatcttttgccatacgattggcatctccacagatgtataaatgtgctccctcactaatccagcgccagatttcctcagcctgctcacgcagtttgtcctgcacatacactttatgcttttgatcccgcgaccatgccaaatcaatgcgggtaagtaacccctctttgacataacgctgaaattccacctgatacagaaaatcttctacaaaatgagggttgccaaagaacagccagtttttaccttcagcgccctgattatcccgttgttgcaggaatgcccggaatggagccactccggtgccggggccaatcatgatcaccggggtttgtggatcggcgggtaagcggaagttatcgttatgctcaataaagacacggatgttgtcatcttcctgtaatcgatcagccagataacctgatgccccaccggtacgggcacggccgtctatgtcataacgaacaacaccaacggtaatgtgtacttcattttcgacttcatcctgagaagaggcaatggagtataggcgtggagttaatggacgtaatatatcgataaattgctgagcttcaggttgctgagctgcctgcctgaccatatccacgataggcgttttttgggcatattgttgtagcgttgatttttcggagatcaaagcaagcaaactttcatctttcgtcaggactgcatatttttcgacaataacacccgtgttttgtgtcagttcaagatggctggtcagagcctcacgcaaagcaagtgactttccatgcactgtgacagtttcagttccttccagatgaagcaaacctgtcaactcatcaaccaataccggatcgttttcaaaccaaacccccaatgaatcaccgggctgataacgcaaacccgaatcccccagatcaatttcaatatggcggatatctttatcaaaa

SEQ ID NO: 2494 - DNA, 13509 bp, Xenorhabdus sp.; identical to SEQ ID NO: 2493
  CDS (7649)..(7798)

SEQ ID NO: 2495 - DNA, 10956 bp, Xenorhabdus sp.; identical to SEQ ID NO: 239
  CDS (2)..(700)

SEQ ID NO: 2496 - DNA, 10956 bp, Xenorhabdus sp.; identical to SEQ ID NO: 239
  CDS (6184)..(6993)

SEQ ID NO: 2497 - DNA, 10956 bp, Xenorhabdus sp.; identical to SEQ ID NO: 239
  CDS (10502)..(10954)

SEQ ID NO: 2498 - DNA, 10956 bp, Xenorhabdus sp.; identical to SEQ ID NO: 240
  CDS (8408)..(8545)

SEQ ID NO: 2499 - DNA, 10956 bp, Xenorhabdus sp.; identical to SEQ ID NO: 240
  CDS (7798)..(8148)

SEQ ID NO: 2500 - DNA, 10956 bp, Xenorhabdus sp.; identical to SEQ ID NO: 240
  CDS (2722)..(3747)

SEQ ID NO: 2501 - DNA, 10956 bp, Xenorhabdus sp.; identical to SEQ ID NO: 240
  CDS (1243)..(1965)

SEQ ID NO: 2502 - DNA, 10956 bp, Xenorhabdus sp.; identical to SEQ ID NO: 240
  CDS (737)..(1231)

SEQ ID NO: 2503 - DNA, 18624 bp, Xenorhabdus sp.
  CDS (166)..(834)
ttgccctgatggagttcaggatacagcctgtaaggctacaatttgaatgttggcaggtatagctattcaatattcaatgttgatatagttgttcgtggtaacaatatgagcaaatgtcccatcaatggatatcatgtaatggaagtattatctttggagaattcgatgtcatccttaagtacagaagccgcgctggtgcattcggcactggttgagcgtggtcttgaaaccccactgcgtgaacagactttagagcctgaagtgcgaaaagtccgcattgaggaacacatgacagaaattatgaagctgttaaacctcgatttgagtgatgatagtctggcggatacgccgagtcgtattgcaaaaatgtatgtggatgaaatattttcaggtttggattacagaaattttccgaaaatcacactgatagaaaataaaatgaaagtcgatgagatggtgacagtgcgggatatcacactgaccagcacttgcgaacaccattttgtgactatcgatgggaaagccactgtagcttatattcctaaggataaagtgattgggttatcgaaaattaaccgtattgtccagttttttgcgcaacgcccacaggtacaggaacgattgacacagcaaatcttgattgcacttcaggctctgcttggcacaaataatgttgctgtttctattgatgctgtgcactactgtgtaaaggcgcgtggtatccgtgatgctaccagtaccacaacgaccacatctcttggcggtttgtttaagtccagtcaaaatacacgacaggaatttttgcgtgccgtgcgccatttgcacttatcgtgatgaacctgcattgccatgacaagtagtaaattaaatagtggagcagcgaaccacaggattgcagtgcttgatagcgtgcgtggtttcgctgttctgggaatattgttactgaatatctcaggctttgcgttgccctatgccgcttatactaatctcttttataaagccaatgttctgttttctgatgtattaacatggtctgtcctgaatacatttgctcagggaaaatttttatttattttaacgctgttatttggcgcatcacttgaattattgaggcagcgggatcactactggaatcgttgcaggttagtgattctggctgtgattggtttattgcacggaattttgctatgggatggcgatatcctattgtcatatggtctggttggccttctggtattacattggatcaataagagacccaatttattcaaacagggtattgtcttatatttatttgggctgatgatgttctatctattggggctattcccggtagaggaaaacagtactttctggcatccgctagagcaggatattttgcatgaaagttactggaaaacccatggtgggttagtggcgatagagcaccgtataaatcagattagcggtgtgatgatagtgaccattgtgcagtatagctggcagataataggaactatgctttgcggcgcaatgctattacgtaatggttggctgaagggcatgtacagccttcatcactatcgtcgtgcggctctgtggctgtttgtcattggcctgttgattcagtctctggccctgtcagtattgtatttatatccttatagttacttcactgcctggactgtccgacagaccatcactgaattagcgacaccatttatagcattatcgtatgtggcgctgatttatgggttctggccggttatattccgttgtcgagtagttttctggctacagcaggttggcaaaatggcactgagctgctatttaatgcaaactttaatctgcaccacacttttttatcatttggggctgtttaatcagtttgctcgctgggaattgttaatattcgtcccttttatttggggatgtaatatcggatttgcctgctggtggttaaaacgttatcagcaagggcctgctgaaaaactctggcgggtactgaccagaaaactgcaagaaagattttaaacgattaagagcctatcttccgagaataggctcttatttgctgcgattcctcgtctccattccctgtaattcttctggtgataccgccggatagccttcaatgcctgtaggagagatctgctggctaggaatgggggttaaaggccccagaaaacgaggttcacgttttaagatatacaggtcagcccaggcaccaaggcgggcaaatacttcacgaaaacgtatcgtcatcatattcttaggggaagagacagcataacattgcgcttctatgcccatatgcatcgcaataaagagagcacgttcacagtggaagcgctgggtgataatggtgaagtcattggtatcaaagaccttgcgagttctgacaaccgaatctaatgtccggaatcccgcaaaatccatcacgattttagaggccggaatacctgctttaatgagatctcttcgcatcgtattgggttcattatagctgtgttgggcattatctccgcttaatagcagatatttaactttttcactgttataggcgttaacagctccctgaatacgatagaaataatattggttatatgcgccggctttataatatttggatgtgcccaaaaccatgcccacttctcgttccggaagttgtctgaggtcatcaaaaatgtagggagccgttttccagctgatccagcgatcaagcataacagcggatagtataaaaacagctattatgaggattaggctggtaattagatacttccacattatttttgccttttatataaccatgaacaagtcattaaaggctactttacttggaatattgaagcaagtgctggattaaccacattaatataaatatgctttgtgagataaatgcctgccgaaaatactggcaggcattaagattatcagaatgatgtgcgtttatagatgcgatattccggtttccagaaattacgctcaatcgcttcttccaaagcgtcttctgacgtgaccgttgcgacaccctgaatctgggcttttttcgccacttctttggcgattttgcgggaaacatcctgaatatcatcaatcaatggcagtagtgggccagagccggtttgcgccagaggagagcaatctgccaatgagcggcttgctgccattaacatgtcatctgttacacgtctggctcctgaagcaataacacctaacccgatacccgggaagatataagagttattacactgggcaatcgggaattcctgaccttcatactgtactggtgagaatgggctgcctgttgcaaccagcgctttaccttccgtccagttaataatgtcttctggacgggcttctacgcgggatgtcgggttagacagcggcatgacaatcgggcgctcacagtgcttatgcatttcacggataatttcttcagtgaacaggcctgactgaccagaaacaccaatcagaacagtcggtttggcgttacggacaacatccattaatgacaggctgtctttgtcgacatcccaggaatccagggcgctgcttttctgaaccagtacgctttggaaatccaacagatttggttgtttatctgtgagtaacccgaagcggtcgaccatgaatacacgggcacgggcctgttcatcactcaaaccttctgatttcatctgagcgataatctgctctgcaataccacaaccagcagaacccgcaccaaggaaggtgactgtctggtctttcagttgacggcctgcagcacggctggcagcaatcagactgccaagagcaacagcagcagtaccctgaatatcatcattgaagcagcaaagatcattacgatagcgggtcaacagtggcatggcattgttctgagcaaagtcttcgaactgcaacagaacattcggccagcggcgttttactgcctgaatgaattcatcgacgaaatcatcatattctttgccggtaatgcgcggatggcgccagcccatatagagtgggtcgttcaggcgctgcggattgtttgtacctacatccaacacgacaggcagggtataagcaggactgatcccgccacaggaggtatatagcgataatttaccgatagggatacccatgccaccaattccctgatcgccaagccccagaatacgctcaccgtcggttacaacgataactttaacattctgtttggtggcattttgtagcatgtcatcaatataagcccggttcgggtaggagatgaacaaaccacgggcacggcggtaaatatcagaaaaatgttcgcacgcttcaccgactgttggtgtgtaaatgataggcatcatttcgctgagatgtgcgtcaaggagccggtagaaaagagtttcgttggtatcctgaatattcctcaaataaatatgtttatccgcatcatttttaaaatcgcggtattggcgataggcgcgttctgcctgctcttcgattgtttcaaccgcttgaggcaataagccatgcagattgaaattgctgcgttcttcttccgtaaaggcgctgcctttgtttagcaggggaaactccaacaggatggggccagcgtagggaatataaagaggacgtttactttcgtgttccagttccatgatgcttactctttggactaatcaataacaaaatcggctacatatacttcgtctttcaagttgcctctttgttggctgtgatgcatcttgaaatccattgtgtatagatcctaagaagataaaaaaataagtacagtaaatgttacttaaatatgtttatcatgagcaaaaatgagagataacatacagaattggctaattaaatgttatttaatttctcacttttgcccaaaaatcttgcagggcggtcagaatgtgtggcgttccgtttgtttgcagccgaggaaatttaaagtagattcggttgtattccactgggacaggtgaccattttgcccctcaacaagtattgcccgcttgatcgaatggcaatcacttcctgacatattcattaatattagcgctgcctgtaaaggtggcaagcttggattaaatgccgcattttctgcatagcggccagtataaacgcgatcttgttcatctatcagggcaacaccggagtgggactggctatagggtgcatggctctgattcgccgcatttaatgcggccagaacgagttcatcttcagcatcgagctgatagccgtggtgagtgttatccagcagaaattgagtgacagataagtctcgcgggccaaatgcttctggcagataatcggccagtgtcaggcgtgggcgatcaggtaaacagatttccagttgtgttccgctgtttaactcattcataaactgtcggcagtgaccacagggagagtaattaatggtgatggataccagtttcttctcgccacgtaaccaggcatgagtgatggctgattgttcggcatgaacagtttgctgtaatgcaacacctgtaaactccatattcgcgccaaaatagaggttgccgctctctccccgtgctatagcaccaacatgaaagtttgagataggggaaatggcacaggccgcagcgagtggtagcagggccagtgccagtgcatgatcatcaaggccacaggtctgcttaattgactccacctgctctgctgtcagcatagctggaaaatcgtcattaccaatatagggcaataacgccttttgcaattcaggcgtgatttctgaccagatagcatgaaaacgagcttgcataaaataatctccaaattaattaaaggttattctaggatgagtgctcaggtttgtaatgtgatgtatgccatataattcatgaaatttctgtaacaaaaatattattttagtaacttatgtcaaatttttactatctgaacgagttttctgatgattattactagctaaacaggtgtagtagcacaggaaacaaaaacggtgccaccagcgaagtaatcactccgcaagtcatcagtgccagtgaactatatgccccttccacatgatctatttctgcacatcgtgctgtcccgatggcatgggaagctgtccccattgccagacctctggaggctttagttttaatcttcaatacattaaacagattgtgaccaaaaatggcaccgagaataccgacagcaattacacaggcagcactgatcgccgggataccaccaatggaatgagccacagccatagcgataggcgttgtgactgatttcggtaatattgaagccgcgatttcaggagtggctcctgcccataaagcgatagctgtgccggttatcattgcagtgatactgccgatgaaacagatactgatgagggatttccactgagcccggatttggtggagttgttcgtacagcggaaaggccagagcaacaacggcaggttgtaataaatcattcaatatttcgctaccggcaaaatagtgcttataaggcgtgtgggttaacaacagcagaggaataataaccgccattgatatcaataatggattgaaaatagggaatttgagccgaacggctaattttttggcaacataaaagacagacagagttaatgggagtgaccaccagatatggcttagcattttttgtttccttcctgttgtgaaagctctgtttgtgatggttgattttgtagaggcttttcttgtaatcgttgatctgcctgacgggcgccaataatcgtccgttcgcgatggatatagtgagaactgtaagcgacggtaatcatgacaataacggtactgataatgcaggaaagggcaatcgggactatctgttggctgagttgtggataatactgcatgacaccaaccccgataggcaaaaagagcagagtcatatttttcatcaataaattacagcccggttttacccaatgagcggggacaatctggagtgacagtaaacagaacagaagaagtaagccaataatgctgccgggaagagagaaggggaggtgtgctgaggtgaagtttccgacaatgaggcataaatagagcaatgcaaatgcgcgcagatattgccagccgatcagcaacacgttcaggaaagacataacgtataattcctcaatataaagagggttatcatacgactaatattgtaaatgtgctacacgtcacataaaaaatgcgggttttttaagcccgcatttttacttttagtgtgaatttttcgccagattgtgctggtgattatttaacctgcatgcccggttgtgcaccgctatccgggcttaacaggaaaatttcttttccgccgggacctgctgccatcaccataccttctgaaataccaaaacgcattttacgtggggcaaggttagcaaccataaccgtcaggcgattttccagtgctttcggatctgggtaagctgagcgaataccagagaagacctgacgagtttcaccgccaaggtcaagaactaatctcagcagcttatctgaaccatcaacaaaatcagcctgtttaattaatgcgatacgcatatccactttggcgaagtcatcaaatgtgatggtatcctgaataggatcatcagccagagggcctgtcacggttttttgtggcttaatactttctgtggaatctgccaccatagcttcaactttagccatttcgatacggttaaacagtgccttaaatggtgaaatattatggctcagcagtggctgcgaaattccatcccaagtcagttcagtattcaggaatgcttctgcacgttcagtcagacccggaagaattggtttcaggtaagtcatcaggacgcggaacaggttaatacccattgagcagacagcctgaaggtcagcatcacggccttcttgcttcgcgataacccacggtgcctgttcatcaacatagcggttggcgagatcagccagcgccatgatttcgcgtacagccttaccaaattcgcgattggtgaaatcgtcttcaattccctgtgctgcatcgacaaatttttggtacaaagcaggatcagcaagtttatctgccagtttgccgccaaaacgtttattgatgaaaccagcgttacgcgaagctaggttaacaactttgtttacaatgtcactgttaacgcgctgaacgaaatcttccagattcaggtcgatatcatcgatacgggaagagagttttgcggcgtagtaataacgcaggcaatctgcatccagatgtttaagatacgtttccgccttgatgaaagttccgcgggacttggacatcttggtgccgttgacagtaatgtaaccgtgaacaaacacattagttggtttacggtaattgctgccttccagcatggcaggccagaacagactgtggaaatagacgatatctttaccgataaagtggtacagatcagttttagaatcttttttccagaattcgtcaaaattcaggtcgtcacgcttgttacacagattctggaatgaacccatataaccgataggcgcatccagccagacataaaaatatttacccggttcatcagggatctcaaaaccgaaataaggcgcatcacgggtgatatcccactgttgcagaccagattcaaaccattcctgcattttgttcgctacctgctcttgcagggtgccggaacgagtccactgttgcagcatatcgctgaatgcaggcaggtcgaagaagaaatgctcagtctcgcgcatttcaggtgttgcaccggataccactgaacgcgggttgatcaactctgtcggtgcataagtcgttccgcacacttcgcagttatcgccatactgatcttccgacttacatttcggacaggttcctttaacgaaacgatccggcagaaacatgcttttttccggatcgaaaagctgagaaatcgtccggttcttgatgtaaccgtttttctttagtttcagataaatttcggatgcaagagctctgttttcttcgctgtgcgtagagtgatagttatcataactaatcgcaaaaccagcaaaatcctgttgatgctccagatgcactttgtcgatcatttcttctggcgtgatcccggcctgctgagctttcagcatgattggtgtaccgtgggcatcgtcagcacagacaaagtgaacctctttgccgcgcattcgatgataacgaacccaaatatcagcctgaatgtgttctaaaatgtgaccgagatgaattggaccgttagcatagggtaacgcacaggtcaccaataattttttcgcgacttgagacatagttaggatctgacttccataaattaaaaagggctttcgatgttacctgataaggagcattgccgctaggggaggttggcatttcgggaaggattttaagcagcatgatgtccggtattactgtcttcgctaaaaaagattataccgagtcatcatgccagtatgtatattgttagggttcatgcgaaataagttatctgtattaagacagtatcctgaactcatttattctgaagttatatgctgactgatttaaatgtgccgcgcttaattacactgagtaaccatcttagaaaacccgggatctgtagcaggatcataaatccgaatgctacttgatatgcgatctgaggataatgcccggctgcatctataggccaaaaaccgatgatcacaccgaacacagtttgtatgagaaacgtaccaaatagaataagcaggttaaggcaggtagaagcacgcccagtcatcgctggcgatacactctgtgccacgatagaatattccaggccagcaatggcgcttatcaaagtaaatccgacagagagtagcggtagtaacgggaggatgtttaaagcacataaaacttgtatcaccagaaataaaaaaatgcctattccgccaacttccatgggtttaatattgaacttaccggcccattcagtgacagcgcctacaaaaagtgagccgacaacgcctgctcccattcctataaacagatagaccgaagtgagtttattgctgtaatgccctacatcctgtaaccattttcccatccacaatccttgtagtccgaaagcaactgtatgaggaagtaataacaaactgatgactttgcgaaaggagtgatctttgtaaacttcaattagcgaggtaatccttggccacttcaccattttatgttcaattggatctttgggaacccatattgcggtaactaccataacaatcagagttacaccagccatagcaaagaatagcgttcgccaggaaataaaacctaccagccaggcaaccggcaatgttgatagcatgacacctaatcccccaacagccagtaggtacccataaatagagggcagtttattgtcgggaacccaaaaggaaagcactttgaccgaacccataaagcaggcggataatcccagtccaataagtattctggctagtaataatgtagtgaagtcctgcccaataccaaatagtaaagctcctaccacggcaatccctaaaagaaacagttgcactcgttttggtccatagcgatcaagggcaagtccaacaggcagttgagctaaggaaaatgaaagaaagtaagcacttgataagatcccaagttgtcctgcggacaatgacattgctgaaaccaaaaatggtgttaggacagcatttatatttcggaacagaaatgatatgccgtgcccgaatgcaaaaggcaagaacacatgagtcattactttagacgagtttatttgttgagccgatgatatttcagccatgataataccttaattttaagcaatattattcggaatgcattgggtatgttttgtctccaccttttcgtttctcatcgtgctttgggttaaacttacagccagagctaagggtgtaacgggacttacttttatcaccggtaatttgtgtgcttggttcttcgtttaactaagagtgccaatatcaacaaatgcaagaaacgcctgacttcttcgcagagatagggcgaaagagactcgggtgattattaagtcgaactcttcaatgaagtaacaatgatgaacataaaacgttagcagacttcggaacaatgcgagaacttcatcacttttgcttgtgtccttatcgcaagttgtttgcttctgttatgatggccagacagtttgaggttgaaaaagaaaatgaaaaggagccgggatgaactcacaatcccccgagcagaccaatcctgacctgctgaaagaaagcgttgcgaaaatactgacagcatttaagcatcctacattagaacaagatttaatgactctgaaagctctgcatcattgcactgtgcttgatggagtactgcatattgaactcatgatgccgtttgtatggaaacgggcctttggagcactgaaagaagaaactactcaactcttattagatgcgactggcgcaaaaggcgttgaatggcggctttcccatgatatctgtacattacgtcgtgccaataacctgccgggaattaatggagtccgtaatattctggcggtcagttcaggaaaaggtggagtaggaaaatccagcacggcggtgaacctggtactggcattggcgcaggaaggggcaaaagtaggcattttggatgcagatatttacggcccatccgttcccagtatgcttggaacagccaaagaacgtcctacctcacctgatggtcagcatatggctcccattatggtgcatggtatggcgacaaactctattggttaccttgtcaccgatgataacgcgatggtctggcgtggcccgatggcaagtaaggcgcttatgcagatgttacaggataccctgtggccggatttggactatctggtcattgatatgccaccgggaacgggtgatattcagctaacgctatcgcagaatattccggtgactggcgctttagtggttactactccacaggatattgccctgattgatgccatgaaaggtattgtgatgttccagaaagtcagtgtgccggtgttgggtattattgaaaatatgagcacacacatctgtaataactgtgggcatcatgaagcgatttttggcacgggtggcgctgaaaaactggcggaaaaatatgagtgccagttattaggtaagatcccgctgcatatttcactgcgcaaagaccttgatcgcggagagcctacggttatcagccagcctgatagccagtttgccgatatttaccgggaaattgccgctaatatcgccgctcaaatgtactggcagggagaaaaaatcccgacggaaatttctttccgggcagtttgatatcaggcgttggatgaaattaatccccggaagcatagataaccgtatgtttataaaaacggtgactggggtgagcgagagaagccaacaaagaggcaacttcaaagacgaagtatatagacagacttttgtaagggagtctgtctcaacccttttattttttttagcaaactgagtacagcttaatactggccttttcctcaatcatcgtcactgattgatttagcattaaattcttttttcattggtgatttagtcagctccatatccctgatatttttttgtacagcaatggagccgaataaacacaggaaaaaagcaatcccatagaaccctttttcacttggcagtaagtcagcattaaacaaaccaatagcgattaatgctatagaggaaagaaaagcgatgatacaagcaatataataggcttgtgttgttggtatattatcagctttatctctgactgttttttgtattgaaattgaagaaaataaccctaaaatgagtattgcaaaataataccctttttcatttaactgcatatctgaacgccaaagccctgagagataaacaactatcccaccaataacagcaatccaagaaattaagttaaaggcattaaattctgtaaatttattatctaacgaagcgctatccttcacaaaaataatctccataaattaaagttaaactatcctataccaaagtgattaaacttagaaactacttaatgagatttttgtttattatgaaaaagtgtaatgttaataatcctgttaatatcaactttttctgtcagtttactgattgtttttctcttgagcctttaaatatgctacccggttagttgctctattgatgtaatcgttgatagccgggcttatactgataccaccgaatttagcccaaagaagcgtatgtgacataaaaatatccgctaaggtaaaactattacctgtaatccactcaaaaccctcatcaaatttcaactggttgattactttctcggattcttttttaaaataattaactaattctaaagagcgtttttcttcggggataaaaattatttgctttagtaaattccagattggcgattctaagtctgtaagcgcaaaactaagccaggaattgatgattgctctttcttttaaatcagtcgaataaaaactttttttggggtatttctcgcataaataaagacatatagctaatgtttcttctattggtatatcgccatcaatcataaaagggacttttcctcgagagtgaggagatgtaatactaggattatcattaagtaaatcaactctgatcgtatcgtaggacgatacaccaagttcttctaatacccataaaactcttaatgaacggcttttaggaaaggtatatattttcatgtgagctccttaattggatatgtaaaaatagcataaacattctgaagttgagataccaataagactatattggtaacagatagtggtaacagatttacggaatatatttatacacaatggatttcaagatgcatcgcggcggcaagagaaagaatcccccggaacatagataactatgtggttgggggaatgagcgcagctaatgaagaggcaacctgaaaggtgacgtgtatatcctgctagcaaatgacattatttaagcagagtctgtgccttcaaggccatacatttgttgttccagcccgcttgcaatgagtttgaggtcattgccgaccgcaatgaaacgaaacccctgactggcataacggcgagctaactctacactattcgcgaatatacccggtgttttgccatgtttacgacaggcttcaagtacacactcgaatgcttgttccatctcagggctttctacctgtccggcctgccccagatcactggctaaatcgccacttccgatgaataacacatcgatgccatcaacggctgcgatttcatcggcggcagccactgctctggcggattctatttgaacgatggtaagtagtgaatcattggcttctgcaaagtagtctggcagacgtgaaaaataacccgagcagcgtatggggttgatcccccgttttcctttaggcggataataaacgctgtcggcgaccattttagcctcagcggcggattccaccttaggcaccatcaaccccatagctcccgaatccagcgctgcctctatctgctggcggtcattacgtgccacccgagccatacctgtggagcgagatccgttcatcgcttgtaacatttggatcagatcgtgtctgtcagccggtgatgcttccatatcgactaataaccagtcggggccacgtaccgcacaacattctgcgattaaagaacttgctgaaactaaaaacagaccgaaacaggtgaggtttttttccagccggttcttgcagcggttgtgtgcagacagcaggggatggagttcactatcagatcgcatattaaacctccttttgaataacaccggcaagatgacggatttcggttaacacagaagttggcagtgataacgttattgtattttttgcctcgttatggcgggtgaaataaccttcaccgggcatacgtgccggagcttccgggcggcctgagtcacgacaatagttcatgatagcttccgcctcgctccggatcgtatcaatgccccccggcattctggatggatcgataaccaaaaacaggccaccgttgccgggtgcacccggtctggctacatgtccggcacccgcaagtgcaccacagaataattccattgctacggccagcccgtatcctttgtgtccggcaaggttgcctcccagtggctgtatcgttgcccgtggtggtacgtcgtagagactggaagggtcgagtatgtcattctttttggcatcgaccagacagccgggtggcactggtttattctcttggacgtgacgccggataaagccttcagagacagttgaagtgctcatatctaatacaaaaggatcagctgtgttggttgggaaggcgagcaacagggggttagtacataatctcgccagatgacctccagtcggagcaacccgtgctccatttccctgatagttactgaatcctataactgcaaggggctggtcattaaagcctgccagagagcggccgatagccgccagtctgcccaggtgatgggcgtcacgcaggcaggcgatagcgattccatgcttcagagccagtttttgcaatacgagtattaactcttgccgtaccaagacaccaaaggctcgacagccgtctacaatggcgatattaggcatggtcagcgatacagccggaatagcggcaggattaagtacgccagactgaatatcgccaatgtagtccgctagccttaatacaccgtgggaagggtagcttgttaattcattttctagcagatcatccatcaccagagttgccacttccgccggtgtattggcccggatcaatgcagcctgaccaagctcacgcaattcctgaactgcgattttagtcttcatgagttgaccgtcgtttggttactggtgccgatatcgctgagagccgaaacacatagccggaacttgccggtaggggaatcgggcattctgtccagttgttcaaattctatgtgaaacggatacccagcgtgatggtggatgcgttctactatttcgtcacaacgctgccgggaaatgcctgtaggcaccattagccggattcgtaagctctccagactatcctgcaccacctgaaaccactcaatttcctcaaaccgcatgatcaagaaagagaacagataagcatcgatataggcaccgtccggcgtcagtatcaaatcctgctgtcgtcccgcaacatgactcatgcgcggaagcccaagcccggaggtacagttgcctgccatcggtgaggcaagatcactggtttcgtagcgaatcagcggcatggcaaaattattaagtgttgtcagtacgacccggccagtctcacccggttggcaggcactgccatcatcgcgcaggaattcttccgccacattttccacttgaatcagcataccatcgtgatgagggctttcgtgggagacaatattcgtctcgcgtgaaccgtacttatcgtaaacttcgcagcggaatacccgttgcagtcgttcacgaatgattggaggaagtggttctgatgtcccttgtattgcacgtaatgcaggtactcgtatagattcacgctccatttgacgggcaatcaggtgcattgcgttggtgtaagtgctgatcagtaccggattaaaactggcgagattccgggtaaactccccgattaattcaggggataatctaaaagtgttaaattcacgtcggttgctcaaaagattcttcagtcgatcggaaacgctttttaggctccaatagatggaggaaccccacagcaaagcaaatggctcaccaactttccagccggagcaccactgataggttctaagctggtgggcacgcatccatagccggaagttagcatcctgaacaaaacaggcccgtttgcctgtagagccgctgctgtagttggtttgtagcgtggcatggttagcccgtgtcgaaatcaagtcagcctgatgctgtgttaattcctgtctggtcaacaacggtaatttggcgagatctgacaggctgttaaaatcatccggtcttaaacctcgctcgttaaaaactcgggtatagtagggaacgctttcataagcatgagtcagcaatgtgtgcaatttttccatttgcagctttcggcattcccgcagtgacaggtattgagtttcttccagccactgcaatcgttttgcgacttcgcctttaccctgcatcttttcgcttgcccagtatagcttgttggccagacttgtatttagcttcatagtttctctctctgcatagcgtaatagcgattaagcaaatttttgatggatgcgtcgaaagtaagccaatcattttcctgcaatacgcggtgcgctaacgtccaatagtcattttcaaaggttccgttgaaccatgacgcgagcaaggctgaatggctgaacgagctgctggtgtcagtaatgttctgattggaatcccagtcgtaaaacagtactggccctacagaggtcaggtgctgattcaactctcgcagtaatgcttcgggtaccagcttttccagtatgaaaagataagttggcaggtaaattaaaaagcgggcgctaagcaagtccaacagacgatcaccatagacaaacaggctgtctgcgtagcaataatcttttaattgccgacgttcatgatcttcaggccgtttagttggctggccgaggaactggttaaaatcagtgataccatcgacaagttttactccctgccatacggattctacggaccgggccagccgtttaggctgtcccggtacaggaatagagggtgatggccagacatagaaaggattaaaactctcaaacacccgcatgttaacgggtgcccctttgaagctgtctaccatcatatagttcgacgtatcatccagcatggtattaagtgcctcctgtctggaggcaaaaatagcccggtagggcacagtctgagaactcaaacgatacctccatgactaagatgtatcacccggcgttcacttcgcggatgtatatatgctggctatcactatgctcttccagaatccattgtggacgaggctgtttgtatttattttcacgtccccagtcttgtagccggatacccagacggcgcgcctcagctttcaggtagtctggcaggacagggaagggaacaaccacaaagctcacacccgctttggcatacaaagccagttcgtcaagacgggggagatcgcttaggtaaaccgctaaaccgttttcaacgcgattgttactatcgctaccatcgctcaattttgtcagtagtgaagtggcaacatcccagctctctcccatccagtcagctacaatttcgcggttgtctttgactacacaggcaacatagcagtcagggtgttcctctgcctgttgttgcagtggtaacaaccaatcgccatgagtatggaaactccactggtaattcagatcctctttttccagcatcattgttgccatgttgtattgtgtcaatggtgcttcaatctcatcgcgttatacttggaatccctgcttgcgtaaaaacgccaaacgttcctgaatattggacattaataacatattacttatgctgaggaagtgcaagatagctgttaccgattcatatgagcgactatacataggcgcatggaaacgcttataaatttcatcagtatccagattttcattctgacggtagtcataaatg

SEQ ID NO: 2504 - DNA, 18624 bp, Xenorhabdus sp.; identical to SEQ ID NO: 2503
  CDS (889)..(2013)

SEQ ID NO: 2505 - DNA, 18624 bp, Xenorhabdus sp.; identical to SEQ ID NO: 2503
  CDS (11145)..(12269)

SEQ ID NO: 2506 - DNA, 18624 bp, Xenorhabdus sp.
  CDS (15856)..(16578)
catttatgactaccgtcagaatgaaaatctggatactgatgaaatttataagcgtttccatgcgcctatgtatagtcgctcatatgaatcggtaacagctatcttgcacttcctcagcataagtaatatgttattaatgtccaatattcaggaacgtttggcgtttttacgcaagcagggattccaagtataacgcgatgagattgaagcaccattgacacaatacaacatggcaacaatgatgctggaaaaagaggatctgaattaccagtggagtttccatactcatggcgattggttgttaccactgcaacaacaggcagaggaacaccctgactgctatgttgcctgtgtagtcaaagacaaccgcgaaattgtagctgactggatgggagagagctgggatgttgccacttcactactgacaaaattgagcgatggtagcgatagtaacaatcgcgttgaaaacggtttagcggtttacctaagcgatctcccccgtcttgacgaactggctttgtatgccaaagcgggtgtgagctttgtggttgttcccttccctgtcctgccagactacctgaaagctgaggcgcgccgtctgggtatccggctacaagactggggacgtgaaaataaatacaaacagcctcgtccacaatggattctggaagagcatagtgatagccagcatatatacatccgcgaagtgaacgccgggtgatacatcttagtcatggaggtatcgtttgagttctcagactgtgccctaccgggctatttttgcctccagacaggaggcacttaataccatgctggatgatacgtcgaactatatgatggtagacagcttcaaaggggcacccgttaacatgcgggtgtttgagagttttaatcctttctatgtctggccatcaccctctattcctgtaccgggacagcctaaacggctggcccggtccgtagaatccgtatggcagggagtaaaacttgtcgatggtatcactgattttaaccagttcctcggccagccaactaaacggcctgaagatcatgaacgtcggcaattaaaagattattgctacgcagacagcctgtttgtctatggtgatcgtctgttggacttgcttagcgcccgctttttaatttacctgccaacttatcttttcatactggaaaagctggtacccgaagcattactgcgagagttgaatcagcacctgacctctgtagggccagtactgttttacgactgggattccaatcagaacattactgacaccagcagctcgttcagccattcagccttgctcgcgtcatggttcaacggaacctttgaaaatgactattggacgttagcgcaccgcgtattgcaggaaaatgattggcttactttcgacgcatccatcaaaaatttgcttaatcgctattacgctatgcagagagagaaactatgaagctaaatacaagtctggccaacaagctatactgggcaagcgaaaagatgcagggtaaaggcgaagtcgcaaaacgattgcagtggctggaagaaactcaatacctgtcactgcgggaatgccgaaagctgcaaatggaaaaattgcacacattgctgactcatgcttatgaaagcgttccctactatacccgagtttttaacgagcgaggtttaagaccggatgattttaacagcctgtcagatctcgccaaattaccgttgttgaccagacaggaattaacacagcatcaggctgacttgatttcgacacgggctaaccatgccacgctacaaaccaactacagcagcggctctacaggcaaacgggcctgttttgttcaggatgctaacttccggctatggatgcgtgcccaccagcttagaacctatcagtggtgctccggctggaaagttggtgagccatttgctttgctgtggggttcctccatctattggagcctaaaaagcgtttccgatcgactgaagaatcttttgagcaaccgacgtgaatttaacacttttagattatcccctgaattaatcggggagtttacccggaatctcgccagttttaatccggtactgatcagcacttacaccaacgcaatgcacctgattgcccgtcaaatggagcgtgaatctatacgagtacctgcattacgtgcaatacaagggacatcagaaccacttcctccaatcattcgtgaacgactgcaacgggtattccgctgcgaagtttacgataagtacggttcacgcgagacgaatattgtctcccacgaaagccctcatcacgatggtatgctgattcaagtggaaaatgtggcggaagaattcctgcgcgatgatggcagtgcctgccaaccgggtgagactggccgggtcgtactgacaacacttaataattttgccatgccgctgattcgctacgaaaccagtgatcttgcctcaccgatggcaggcaactgtacctccgggcttgggcttccgcgcatgagtcatgttgcgggacgacagcaggatttgatactgacgccggacggtgcctatatcgatgcttatctgttctctttcttgatcatgcggtttgaggaaattgagtggtttcaggtggtgcaggatagtctggagagcttacgaatccggctaatggtgcctacaggcatttcccggcagcgttgtgacgaaatagtagaacgcatccaccatcacgctgggtatccgtttcacatagaatttgaacaactggacagaatgcccgattcccctaccggcaagttccggctatgtgtttcggctctcagcgatatcggcaccagtaaccaaacgacggtcaactcatgaagactaaaatcgcagttcaggaattgcgtgagcttggtcaggctgcattgatccgggccaatacaccggcggaagtggcaactctggtgatggatgatctgctagaaaatgaattaacaagctacccttcccacggtgtattaaggctagcggactacattggcgatattcagtctggcgtacttaatcctgccgctattccggctgtatcgctgaccatgcctaatatcgccattgtagacggctgtcgagcctttggtgtcttggtacggcaagagttaatactcgtattgcaaaaactggctctgaagcatggaatcgctatcgcctgcctgcgtgacgcccatcacctgggcagactggcggctatcggccgctctctggcaggctttaatgaccagccccttgcagttataggattcagtaactatcagggaaatggagcacgggttgctccgactggaggtcatctggcgagattatgtactaaccccctgttgctcgccttcccaaccaacacagctgatccttttgtattagatatgagcacttcaactgtctctgaaggctttatccggcgtcacgtccaagagaataaaccagtgccacccggctgtctggtcgatgccaaaaagaatgacatactcgacccttccagtctctacgacgtaccaccacgggcaacgatacagccactgggaggcaaccttgccggacacaaaggatacgggctggccgtagcaatggaattattctgtggtgcacttgcgggtgccggacatgtagccagaccgggtgcacccggcaacggtggcctgtttttggttatcgatccatccagaatgccggggggcattgatacgatccggagcgaggcggaagctatcatgaactattgtcgtgactcaggccgcccggaagctccggcacgtatgcccggtgaaggttatttcacccgccataacgaggcaaaaaatacaataacgttatcactgccaacttctgtgttaaccgaaatccgtcatcttgccggtgttattcaaaaggaggtttaatatgcgatctgatagtgaactccatcccctgctgtctgcacacaaccgctgcaagaaccggctggaaaaaaacctcacctgtttcggtctgtttttagtttcagcaagttctttaatcgcagaatgttgtgcggtacgtggccccgactggttattagtcgatatggaagcatcaccggctgacagacacgatctgatccaaatgttacaagcgatgaacggatctcgctccacaggtatggctcgggtggcacgtaatgaccgccagcagatagaggcagcgctggattcgggagctatggggttgatggtgcctaaggtggaatccgccgctgaggctaaaatggtcgccgacagcgtttattatccgcctaaaggaaaacgggggatcaaccccatacgctgctcgggttatttttcacgtctgccagactactttgcagaagccaatgattcactacttaccatcgttcaaatagaatccgccagagcagtggctgccgccgatgaaatcgcagccgttgatggcatcgatgtgttattcatcggaagtggcgatttagccagtgatctggggcaggccggacaggtagaaagccctgagatggaacaagcattcgagtgtgtacttgaagcctgtcgtaaacatggcaaaacaccgggtatattcgcgaatagtgtagagttagctcgccgttatgccagtcaggggtttcgtttcattgcggtcggcaatgacctcaaactcattgcaagcgggctggaacaacaaatgtatggccttgaaggcacagactctgcttaaataatgtcatttgctagcaggatatacacgtcacctttcaggttgcctcttcattagctgcgctcattcccccaaccacatagttatctatgttccgggggattctttctcttgccgccgcgatgcatcttgaaatccattgtgtataaatatattccgtaaatctgttaccactatctgttaccaatatagtcttattggtatctcaacttcagaatgtttatgctatttttacatatccaattaaggagctcacatgaaaatatatacctttcctaaaagccgttcattaagagttttatgggtattagaagaacttggtgtatcgtcctacgatacgatcagagttgatttacttaatgataatcctagtattacatctcctcactctcgaggaaaagtcccttttatgattgatggcgatataccaatagaagaaacattagctatatgtctttatttatgcgagaaataccccaaaaaaagtttttattcgactgatttaaaagaaagagcaatcatcaattcctggcttagttttgcgcttacagacttagaatcgccaatctggaatttactaaagcaaataatttttatccccgaagaaaaacgctctttagaattagttaattattttaaaaaagaatccgagaaagtaatcaaccagttgaaatttgatgagggttttgagtggattacaggtaatagttttaccttagcggatatttttatgtcacatacgcttctttgggctaaattcggtggtatcagtataagcccggctatcaacgattacatcaatagagcaactaaccgggtagcatatttaaaggctcaagagaaaaacaatcagtaaactgacagaaaaagttgatattaacaggattattaacattacactttttcataataaacaaaaatctcattaagtagtttctaagtttaatcactttggtataggatagtttaactttaatttatggagattatttttgtgaaggatagcgcttcgttagataataaatttacagaatttaatgcctttaacttaatttcttggattgctgttattggtgggatagttgtttatctctcagggctttggcgttcagatatgcagttaaatgaaaaagggtattattttgcaatactcattttagggttattttcttcaatttcaatacaaaaaacagtcagagataaagctgataatataccaacaacacaagcctattatattgcttgtatcatcgcttttctttcctctatagcattaatcgctattggtttgtttaatgctgacttactgccaagtgaaaaagggttctatgggattgcttttttcctgtgtttattcggctccattgctgtacaaaaaaatatcagggatatggagctgactaaatcaccaatgaaaaaagaatttaatgctaaatcaatcagtgacgatgattgaggaaaaggccagtattaagctgtactcagtttgctaaaaaaaataaaagggttgagacagactcccttacaaaagtctgtctatatacttcgtctttgaagttgcctctttgttggcttctctcgctcaccccagtcaccgtttttataaacatacggttatctatgcttccggggattaatttcatccaacgcctgatatcaaactgcccggaaagaaatttccgtcgggattttttctccctgccagtacatttgagcggcgatattagcggcaatttcccggtaaatatcggcaaactggctatcaggctggctgataaccgtaggctctccgcgatcaaggtctttgcgcagtgaaatatgcagcgggatcttacctaataactggcactcatatttttccgccagtttttcagcgccacccgtgccaaaaatcgcttcatgatgcccacagttattacagatgtgtgtgctcatattttcaataatacccaacaccggcacactgactttctggaacatcacaatacctttcatggcatcaatcagggcaatatcctgtggagtagtaaccactaaagcgccagtcaccggaatattctgcgatagcgttagctgaatatcacccgttcccggtggcatatcaatgaccagatagtccaaatccggccacagggtatcctgtaacatctgcataagcgccttacttgccatcgggccacgccagaccatcgcgttatcatcggtgacaaggtaaccaatagagtttgtcgccataccatgcaccataatgggagccatatgctgaccatcaggtgaggtaggacgttctttggctgttccaagcatactgggaacggatgggccgtaaatatctgcatccaaaatgcctacttttgccccttcctgcgccaatgccagtaccaggttcaccgccgtgctggattttcctactccaccttttcctgaactgaccgccagaatattacggactccattaattcccggcaggttattggcacgacgtaatgtacagatatcatgggaaagccgccattcaacgccttttgcgccagtcgcatctaataagagttgagtagtttcttctttcagtgctccaaaggcccgtttccatacaaacggcatcatgagttcaatatgcagtactccatcaagcacagtgcaatgatgcagagctttcagagtcattaaatcttgttctaatgtaggatgcttaaatgctgtcagtattttcgcaacgctttctttcagcaggtcaggattggtctgctcgggggattgtgagttcatcccggctccttttcattttctttttcaacctcaaactgtctggccatcataacagaagcaaacaacttgcgataaggacacaagcaaaagtgatgaagttctcgcattgttccgaagtctgctaacgttttatgttcatcattgttacttcattgaagagttcgacttaataatcacccgagtctctttcgccctatctctgcgaagaagtcaggcgtttcttgcatttgttgatattggcactcttagttaaacgaagaaccaagcacacaaattaccggtgataaaagtaagtcccgttacacccttagctctggctgtaagtttaacccaaagcacgatgagaaacgaaaaggtggagacaaaacatacccaatgcattccgaataatattgcttaaaattaaggtattatcatggctgaaatatcatcggctcaacaaataaactcgtctaaagtaatgactcatgtgttcttgccttttgcattcgggcacggcatatcatttctgttccgaaatataaatgctgtcctaacaccatttttggtttcagcaatgtcattgtccgcaggacaacttgggatcttatcaagtgcttactttctttcattttccttagctcaactgcctgttggacttgcccttgatcgctatggaccaaaacgagtgcaactgtttcttttagggattgccgtggtaggagctttactatttggtattgggcaggacttcactacattattactagccagaatacttattggactgggattatccgcctgctttatgggttcggtcaaagtgctttccttttgggttcccgacaataaactgccctctatttatgggtacctactggctgttgggggattaggtgtcatgctatcaacattgccggttgcctggctggtaggttttatttcctggcgaacgctattctttgctatggctggtgtaactctgattgttatggtagttaccgcaatatgggttcccaaagatccaattgaacataaaatggtgaagtggccaaggattacctcgctaattgaagtttacaaagatcactcctttcgcaaagtcatcagtttgttattacttcctcatacagttgctttcggactacaaggattgtggatgggaaaatggttacaggatgtagggcattacagcaataaactcacttcggtctatctgtttataggaatgggagcaggcgttgtcggctcactttttgtaggcgctgtcactgaatgggccggtaagttcaatattaaacccatggaagttggcggaataggcatttttttatttctggtgatacaagttttatgtgctttaaacatcctcccgttactaccgctactctctgtcggatttactttgataagcgccattgctggcctggaatattctatcgtggcacagagtgtatcgccagcgatgactgggcgtgcttctacctgccttaacctgcttattctatttggtacgtttctcatacaaactgtgttcggtgtgatcatcggtttttggcctatagatgcagccgggcattatcctcagatcgcatatcaagtagcattcggatttatgatcctgctacagatcccgggttttctaagatggttactcagtgtaattaagcgcggcacatttaaatcagtcagcatataacttcagaataaatgagttcaggatactgtcttaatacagataacttatttcgcatgaaccctaacaatatacatactggcatgatgactcggtataatcttttttagcgaagacagtaataccggacatcatgctgcttaaaatccttcccgaaatgccaacctcccctagcggcaatgctccttatcaggtaacatcgaaagccctttttaatttatggaagtcagatcctaactatgtctcaagtcgcgaaaaaattattggtgacctgtgcgttaccctatgctaacggtccaattcatctcggtcacattttagaacacattcaggctgatatttgggttcgttatcatcgaatgcgcggcaaagaggttcactttgtctgtgctgacgatgcccacggtacaccaatcatgctgaaagctcagcaggccgggatcacgccagaagaaatgatcgacaaagtgcatctggagcatcaacaggattttgctggttttgcgattagttatgataactatcactctacgcacagcgaagaaaacagagctcttgcatccgaaatttatctgaaactaaagaaaaacggttacatcaagaaccggacgatttctcagcttttcgatccggaaaaaagcatgtttctgccggatcgtttcgttaaaggaacctgtccgaaatgtaagtcggaagatcagtatggcgataactgcgaagtgtgcggaacgacttatgcaccgacagagttgatcaacccgcgttcagtggtatccggtgcaacacctgaaatgcgcgagactgagcatttcttcttcgacctgcctgcattcagcgatatgctgcaacagtggactcgttccggcaccctgcaagagcaggtagcgaacaaaatgcaggaatggtttgaatctggtctgcaacagtgggatatcacccgtgatgcgccttatttcggttttgagatccctgatgaaccgggtaaatatttttatgtctggctggatgcgcctatcggttatatgggttcattccagaatctgtgtaacaagcgtgacgacctgaattttgacgaattctggaaaaaagattctaaaactgatctgtaccactttatcggtaaagatatcgtctatttccacagtctgttctggcctgccatgctggaaggcagcaattaccgtaaaccaactaatgtgtttgttcacggttacattactgtcaacggcaccaagatgtccaagtcccgcggaactttcatcaaggcggaaacgtatcttaaacatctggatgcagattgcctgcgttattactacgccgcaaaactctcttcccgtatcgatgatatcgacctgaatctggaagatttcgttcagcgcgttaacagtgacattgtaaacaaagttgttaacctagcttcgcgtaacgctggtttcatcaataaacgttttggcggcaaactggcagataaacttgctgatcctgctttgtaccaaaaatttgtcgatgcagcacagggaattgaagacgatttcaccaatcgcgaatttggtaaggctgtacgcgaaatcatggcgctggctgatctcgccaaccgctatgttgatgaacaggcaccgtgggttatcgcgaagcaagaaggccgtgatgctgaccttcaggctgtctgctcaatgggtattaacctgttccgcgtcctgatgacttacctgaaaccaattcttccgggtctgactgaacgtgcagaagcattcctgaatactgaactgacttgggatggaatttcgcagccactgctgagccataatatttcaccatttaaggcactgtttaaccgtatcgaaatggctaaagttgaagctatggtggcagattccacagaaagtattaagccacaaaaaaccgtgacaggccctctggctgatgatcctattcaggataccatcacatttgatgacttcgccaaagtggatatgcgtatcgcattaattaaacaggctgattttgttgatggttcagataagctgctgagattagttcttgaccttggcggtgaaactcgtcaggtcttctctggtattcgctcagcttacccagatccgaaagcactggaaaatcgcctgacggttatggttgctaaccttgccccacgtaaaatgcgttttggtatttcagaaggtatggtgatggcagcaggtcccggcggaaaagaaattttcctgttaagcccggatagcggtgcacaaccgggcatgcaggttaaataatcaccagcacaatctggcgaaaaattcacactaaaagtaaaaatgcgggcttaaaaaacccgcattttttatgtgacgtgtagcacatttacaatattagtcgtatgataaccctctttatattgaggaattatacgttatgtctttcctgaacgtgttgctgatcggctggcaatatctgcgcgcatttgcattgctctatttatgcctcattgtcggaaacttcacctcagcacacctccccttctctcttcccggcagcattattggcttacttcttctgttctgtttactgtcactccagattgtccccgctcattgggtaaaaccgggctgtaatttattgatgaaaaatatgactctgctctttttgcctatcggggttggtgtcatgcagtattatccacaactcagccaacagatagtcccgattgccctttcctgcattatcagtaccgttattgtcatgattaccgtcgcttacagttctcactatatccatcgcgaacggacgattattggcgcccgtcaggcagatcaacgattacaagaaaagcctctacaaaatcaaccatcacaaacagagctttcacaacaggaaggaaacaaaaaatgctaagccatatctggtggtcactcccattaactctgtctgtcttttatgttgccaaaaaattagccgttcggctcaaattccctattttcaatccattattgatatcaatggcggttattattcctctgctgttgttaacccacacgccttataagcactattttgccggtagcgaaatattgaatgatttattacaacctgccgttgttgctctggcctttccgctgtacgaacaactccaccaaatccgggctcagtggaaatccctcatcagtatctgtttcatcggcagtatcactgcaatgataaccggcacagctatcgctttatgggcaggagccactcctgaaatcgcggcttcaatattaccgaaatcagtcacaacgcctatcgctatggctgtggctcattccattggtggtatcccggcgatcagtgctgcctgtgtaattgctgtcggtattctcggtgccatttttggtcacaatctgtttaatgtattgaagattaaaactaaagcctccagaggtctggcaatggggacagcttcccatgccatcgggacagcacgatgtgcagaaatagatcatgtggaaggggcatatagttcactggcactgatgacttgcggagtgattacttcgctggtggcaccgtttttgtttcctgtgctactacacctgtttagctagtaataatcatcagaaaactcgttcagatagtaaaaatttgacataagttactaaaataatatttttgttacagaaatttcatgaattatatggcatacatcacattacaaacctgagcactcatcctagaataacctttaattaatttggagattattttatgcaagctcgttttcatgctatctggtcagaaatcacgcctgaattgcaaaaggcgttattgccctatattggtaatgacgattttccagctatgctgacagcagagcaggtggagtcaattaagcagacctgtggccttgatgatcatgcactggcactggccctgctaccactcgctgcggcctgtgccatttcccctatctcaaactttcatgttggtgctatagcacggggagagagcggcaacctctattttggcgcgaatatggagtttacaggtgttgcattacagcaaactgttcatgccgaacaatcagccatcactcatgcctggttacgtggcgagaagaaactggtatccatcaccattaattactctccctgtggtcactgccgacagtttatgaatgagttaaacagcggaacacaactggaaatctgtttacctgatcgcccacgcctgacactggccgattatctgccagaagcatttggcccgcgagacttatctgtcactcaatttctgctggataacactcaccacggctatcagctcgatgctgaagatgaactcgttctggccgcattaaatgcggcgaatcagagccatgcaccctatagccagtcccactccggtgttgccctgatagatgaacaagatcgcgtttatactggccgctatgcagaaaatgcggcatttaatccaagcttgccacctttacaggcagcgctaatattaatgaatatgtcaggaagtgattgccattcgatcaagcgggcaatacttgttgaggggcaaaatggtcacctgtcccagtggaatacaaccgaatctactttaaatttcctcggctgcaaacaaacggaacgccacacattctgaccgccctgcaagatttttgggcaaaagtgagaaattaaataacatttaattagccaattctgtatgttatctctcatttttgctcatgataaacatatttaagtaacatttactgtacttatttttttatcttcttaggatctatacacaatggatttcaagatgcatcacagccaacaaagaggcaacttgaaagacgaagtatatgtagccgattttgttattgattagtccaaagagtaagcatcatggaactggaacacgaaagtaaacgtcctctttatattccctacgctggccccatcctgttggagtttcccctgctaaacaaaggcagcgcctttacggaagaagaacgcagcaatttcaatctgcatggcttattgcctcaagcggttgaaacaatcgaagagcaggcagaacgcgcctatcgccaataccgcgattttaaaaatgatgcggataaacatatttatttgaggaatattcaggataccaacgaaactcttttctaccggctccttgacgcacatctcagcgaaatgatgcctatcatttacacaccaacagtcggtgaagcgtgcgaacatttttctgatatttaccgccgtgcccgtggtttgttcatctcctacccgaaccgggcttatattgatgacatgctacaaaatgccaccaaacagaatgttaaagttatcgttgtaaccgacggtgagcgtattctggggcttggcgatcagggaattggtggcatgggtatccctatcggtaaattatcgctatatacctcctgtggcgggatcagtcctgcttataccctgcctgtcgtgttggatgtaggtacaaacaatccgcagcgcctgaacgacccactctatatgggctggcgccatccgcgcattaccggcaaagaatatgatgatttcgtcgatgaattcattcaggcagtaaaacgccgctggccgaatgttctgttgcagttcgaagactttgctcagaacaatgccatgccactgttgacccgctatcgtaatgatctttgctgcttcaatgatgatattcagggtactgctgctgttgctcttggcagtctgattgctgccagccgtgctgcaggccgtcaactgaaagaccagacagtcaccttccttggtgcgggttctgctggttgtggtattgcagagcagattatcgctcagatgaaatcagaaggtttgagtgatgaacaggcccgtgcccgtgtattcatggtcgaccgcttcgggttactcacagataaacaaccaaatctgttggatttccaaagcgtactggttcagaaaagcagcgccctggattcctgggatgtcgacaaagacagcctgtcattaatggatgttgtccgtaacgccaaaccgactgttctgattggtgtttctggtcagtcaggcctgttcactgaagaaattatccgtgaaatgcataagcactgtgagcgcccgattgtcatgccgctgtctaacccgacatcccgcgtagaagcccgtccagaagacattattaactggacggaaggtaaagcgctggttgcaacaggcagcccattctcaccagtacagtatgaaggtcaggaattcccgattgcccagtgtaataactcttatatcttcccgggtatcgggttaggtgttattgcttcaggagccagacgtgtaacagatgacatgttaatggcagcaagccgctcattggcagattgctctcctctggcgcaaaccggctctggcccactactgccattgattgatgatattcaggatgtttcccgcaaaatcgccaaagaagtggcgaaaaaagcccagattcagggtgtcgcaacggtcacgtcagaagacgctttggaagaagcgattgagcgtaatttctggaaaccggaatatcgcatctataaacgcacatcattctgataatcttaatgcctgccagtattttcggcaggcatttatctcacaaagcatatttatattaatgtggttaatccagcacttgcttcaatattccaagtaaagtagcctttaatgacttgttcatggttatataaaaggcaaaaataatgtggaagtatctaattaccagcctaatcctcataatagctgtttttatactatccgctgttatgcttgatcgctggatcagctggaaaacggctccctacatttttgatgacctcagacaacttccggaacgagaagtgggcatggttttgggcacatccaaatattataaagccggcgcatataaccaatattatttctatcgtattcagggagctgttaacgcctataacagtgaaaaagttaaatatctgctattaagcggagataatgcccaacacagctataatgaacccaatacgatgcgaagagatctcattaaagcaggtattccggcctctaaaatcgtgatggattttgcgggattccggacattagattcggttgtcagaactcgcaaggtctttgataccaatgacttcaccattatcacccagcgcttccactgtgaacgtgctctctttattgcgatgcatatgggcatagaagcgcaatgttatgctgtctcttcccctaagaatatgatgacgatacgttttcgtgaagtatttgcccgccttggtgcctgggctgacctgtatatcttaaaacgtgaacctcgttttctggggcctttaacccccattcctagccagcagatctctcctacaggcattgaaggctatccggcggtatcaccagaagaattacagggaatggagacgaggaatcgcagcaaataagagcctattctcggaagataggctcttaatcgtttaaaatctttcttgcagttttctggtcagtacccgccagagtttttcagcaggcccttgctgataacgttttaaccaccagcaggcaaatccgatattacatccccaaataaaagggacgaatattaacaattcccagcgagcaaactgattaaacagccccaaatgataaaaaagtgtggtgcagattaaagtttgcattaaatagcagctcagtgccattttgccaacctgctgtagccagaaaactactcgacaacggaatataaccggccagaacccataaatcagcgccacatacgataatgctataaatggtgtcgctaattcagtgatggtctgtcggacagtccaggcagtgaagtaactataaggatataaatacaatactgacagggccagagactgaatcaacaggccaatgacaaacagccacagagccgcacgacgatagtgatgaaggctgtacatgcccttcagccaaccattacgtaatagcattgcgccgcaaagcatagttcctattatctgccagctatactgcacaatggtcactatcatcacaccgctaatctgatttatacggtgctctatcgccactaacccaccatgggttttccagtaactttcatgcaaaatatcctgctctagcggatgccagaaagtactgttttcctctaccgggaatagccccaatagatagaacatcatcagcccaaataaatataagacaataccctgtttgaataaattgggtctcttattgatccaatgtaataccagaaggccaaccagaccatatgacaataggatatcgccatcccatagcaaaattccgtgcaataaaccaatcacagccagaatcactaacctgcaacgattccagtagtgatcccgctgcctcaataattcaagtgatgcgccaaataacagcgttaaaataaataaaaattttccctgagcaaatgtattcaggacagaccatgttaatacatcagaaaacagaacattggctttataaaagagattagtataagcggcatagggcaacgcaaagcctgagatattcagtaacaatattcccagaacagcgaaaccacgcacgctatcaagcactgcaatcctgtggttcgctgctccactatttaatttactacttgtcatggcaatgcaggttcatcacgataagtgcaaatggcgcacggcacgcaaaaattcctgtcgtgtattttgactggacttaaacaaaccgccaagagatgtggtcgttgtggtactggtagcatcacggataccacgcgcctttacacagtagtgcacagcatcaatagaaacagcaacattatttgtgccaagcagagcctgaagtgcaatcaagatttgctgtgtcaatcgttcctgtacctgtgggcgttgcgcaaaaaactggacaatacggttaattttcgataacccaatcactttatccttaggaatataagctacagtggctttcccatcgatagtcacaaaatggtgttcgcaagtgctggtcagtgtgatatcccgcactgtcaccatctcatcgactttcattttattttctatcagtgtgattttcggaaaatttctgtaatccaaacctgaaaatatttcatccacatacatttttgcaatacgactcggcgtatccgccagactatcatcactcaaatcgaggtttaacagcttcataatttctgtcatgtgttcctcaatgcggacttttcgcacttcaggctctaaagtctgttcacgcagtggggtttcaagaccacgctcaaccagtgccgaatgcaccagcgcggcttctgtacttaaggatgacatcgaattctccaaagataatacttccattacatgatatccattgatgggacatttgctcatattgttaccacgaacaactatatcaacattgaatattgaatagctatacctgccaacattcaaattgtagccttacaggctgtatcctgaactccatcagggcaa

SEQ ID NO: 2507 - DNA, 18624 bp, Xenorhabdus sp.; identical to SEQ ID NO: 2506
  CDS (13997)..(15709)

SEQ ID NO: 2508 - DNA, 18624 bp, Xenorhabdus sp.; identical to SEQ ID NO: 2506
  CDS (12879)..(13763)

SEQ ID NO: 2509 - DNA, 18624 bp, Xenorhabdus sp.; identical to SEQ ID NO: 2506
  CDS (12023)..(12718)

SEQ ID NO: 2510 - DNA, 18624 bp, Xenorhabdus sp.; identical to SEQ ID NO: 2506
  CDS (9380)..(11410)

SEQ ID NO: 2511 - DNA, 18624 bp, Xenorhabdus sp.; identical to SEQ ID NO: 2506
  CDS (5430)..(5555)

SEQ ID NO: 2512 - DNA, 18624 bp, Xenorhabdus sp.; identical to SEQ ID NO: 2506
  CDS (3938)..(4699)

SEQ ID NO: 2513 - DNA, 18624 bp, Xenorhabdus sp.; identical to SEQ ID NO: 2506
  CDS (2836)..(3894)

SEQ ID NO: 2514 - DNA, 18624 bp, Xenorhabdus sp.; identical to SEQ ID NO: 2506
  CDS (1532)..(2839)

SEQ ID NO: 2515 - DNA, 18624 bp, Xenorhabdus sp.; identical to SEQ ID NO: 2506
  CDS (810)..(1454)

SEQ ID NO: 2516 - DNA, 18624 bp, Xenorhabdus sp.; identical to SEQ ID NO: 2506
  CDS (239)..(721)

SEQ ID NO: 2517 - DNA, 18624 bp, Xenorhabdus sp.; identical to SEQ ID NO: 2506
  CDS (5712)..(6089)

SEQ ID NO: 2518 - DNA, 18624 bp, Xenorhabdus sp.; identical to SEQ ID NO: 2506
  CDS (11568)..(11951)

SEQ ID NO: 2519 - DNA, 18187 bp, Xenorhabdus sp.
  CDS (369)..(1274)
gctctaagacggctgtcctcatattgccgccgcatgtattaacaagacgggtgatggtgttgacgatcccggggcgatctacaccaagagctgtgagcactaaaaaatgttgttttgatttcggcaaagcgattttccttatctatggtcgatggctgcgggtacatgtcgctactaaacataaaaaatgatcaagagaaggtcaatggcatttataatagatggagcatgattataatctctgtttaattgtctgcacttgatattaacaaaaatcatcgaaatcatagggtcaaagagtttccttccttatgacaagaaagtaccatgattttcttatttgtagtgtaagactcattttagaggaaatggtaatggagagtggtcacttcgattttacaggcagtatggttgcgataatcacaccgatggattcaactggccgggttgataagagcagtttgaaaaaattgattgattaccatgttgccagtggtacggcatcaattgtttctgtcggaacaaccggggaatgtgccacgcttaaccatgatgaacatgtcgatgttgtactgacaacgctcgaattagctgatggtcgtattcctgttattgccggaacaggtgcgaatgctactgcggaagctatatcgctgacccgatgctttgaaaatacaggtgttgttggttgcctgtctgtgacaccttattataataagccttcgcaggaaggtttgtatcagcactataaagcaatagctgagaataccgacttaccacaaattctgtataatgtaccatcgcgtaccggatgtgatttgctgccaccaactgttgcacgtctggcgaaactgaaaaatattgtcgcaatcaaggaagcaacggggaacttaagtcgtgtcagccagatccaagaactggttaatgatgaaagttttattctgctaagtggtgatgatgcaagttttctcgactttatgtatcttggcggaaaaggaacgatttctgtaacagcgaatgtagcggcagcagaaatggcacaaatttgtcagttggcttctcgtggtgaatttgcgaaagcgcgtagcctgaacagtagtctacaggaattgcatcataaactatttgttgaacctagcccggcaccagctaaatgggcatgtcataaactgggactgattgccagcgacacattgcgtctgccaatggttccgctgacgcaagaagggcaaatttcagttgagaatgccttgaaaatggctgaattactgtaaaatttagggaattttaatggcaacattattgcaaaaatcgaaggtcatgaaggttgctggcctgtcattggtcgtcttgctggcagcctgttccagcgatcagagctataaacatcaagtgagtggtgatgaatcttatcttgataccccccctctgaagttattgaatgttcctgctgggatgaacttacctctgcaaaatggtgaatatgatattccatctgtggatccacaagggaatgtcggaaaatcggttgatatacgcccaccgttgcaggccgtggcgctattagcgggttcccgtgttgaaaatagcgtacaaagcagtaagctgttgcttgaaaatacccctgagtacagcaaattgtggtcacaagtaaatagttttctggcggaaaaaggctatccgattagccagaaagatgatacagcccagacattgacaactgactggattttgtggcctcgatcagatgaaaatgttccttataaggttcgttaccacatttctgtggttcagcagggctaccaaattgttttaacagtttcaggagcaggtctggaacagggtgataaagcggttagtacaccgtcggaaatccagcgttacaacaccttgatgctaaatgcgctgactggttatctgaacgatcaaaaagaagcttcagcgcagcataatacgcaggatgatggcgctttatcggtacaaagtggcggtgataatacaggattgccacaaattatcgtccgtgcaccatataacgtaatctggaacaggctgccttacgcgttggaaagcataggtatgcaggtgaacgatcgtacccgttcgactggtgcgatagaggttacttataaaggtttgtcctcttccggctggaaagcattaggtgtggaagcaccaactatcagcgaaggcaactataagttacaggtgggtgatttggataaccggagcagcctgcaatttatcagcgaaaaaggtaaaccgctgactcagtccgaaaatgatcaaatggtagaggtgctacaagcagcatttagcaaagctacaaataaataatatataaaggggcttcggcccctttatacactttgtctttcaagttgcctctttgttggctgcgtttgctcaccccggtcacatagttatctatgctcccaggggttcactctcttgccgccgcgacgcatcttgaaatccattgtgtatatagttaagtaaattttttgtttaatagtccgtttaaagatgtcatatctctggagtgtaatatgcagaaaaaagctgagttgtatcgtggaaaagcaaaaacagtgtatgccactgataatcctgacttgcttgtgctggaattccgtaatgatacatcagcattggatggtgaacgcattgaacagtttgatcgtaagggaatggtaaacaataaatttaaccacttcattatgagtaagctggaagaggcgggtattccaactcaactggaacagttgctgtcagataatgaatctctggttaagaagcttgatatggtgccggttgaatgtgttatccgcaatcgtgcggctggttcgctggtgaagcgtcttggcgtggaagaaggaatgatactgaatcctcctttgtttgatttgtttctgaaagatgatgataagcatgatccgatggtgaatgagtcttattgcgaaactttcggttgggtcagcaaagagcatttagctgagatgaagcgcctgagctataaagctaatgaagtcttgggtaagttatttgatgatgccggtttaattttggtggactttaagctggaattcggcctgtttaaagggaaagttgtgctaggtgacgaattttcaccagatggcagccggctgtgggacaagcagacaatggataaaatggataaagatcgttttcgccagagtcttggtggcttaattgaagcgtacgaagaggtagctcaccggattggcgttattttggattaatgacgcaaacgattaccttgcttgaatgatggctaattttgtatcaaacatgcgggtataaaaaaacaaaggtgctctgtacattagagcacctttgatttcataaaaagatgatttcagggcggatacccagctatggtaggttacagccagtaatttgttttttgcttccagcctttttgctgcatacaaaaacgatagacctgatttctggaactttcgttaacgtcaatgatataactttcagtcataggaacgctttgcatatatgtgcaatctttaccacaggaatttctgacggttttgaggtgagaagtctgggctacttcatttttcaccgggaattgctgtagagcgtttgattgacactccaaatctgcttcatgaaaaggtgttggattgctccttgctggtatccattgagtagtacaacctgttaataacatactgattgtgattaaaagtgctgattttttcatatttcctgtatgaacgcttcctgttgccgaggaagtgcctcgtgacctttccgcattcaccttgtaaaagcatcaatatctgtcagaaagataatttgaaagattaactacgtattcgcaactattttttataaaatatagtgattcattgaccatatttccactgatattaatatttctacttacatgtctaataattaagttatcattctgcgctatatcaggatgtatatatggaacagaaaatgatgagtcacattgatcctactttactcattttgttagtactggcagggcttggtattatcagtcataacatgacggtaacactcgcaatgttgtttttgcttattgtccgaatcactcccttgaatcaatttttcccctgggttgaaaaatatggtctaacactggggatcttaatactcaccattggtgtcatggctcctatcgcaagtggcaaaatatctgcacaggatatattcagctcattcctaaactggaaatcattgcttgctattgctgtcggcgttcttgtgtcatggctgggaagcaggggagtatccctgatgtcaaatcagccatcgaccgtagccggattattggtcggtacggtgctcggtgttgctttatttaaaggtgttccggttggcccattaattgcagcaggcatattatccattgtgattggaaaatcatgacaggaatggattttgaatggaaaacgttgcaggagcagatgcaacgacaagggcagcgtcgtttactggtgctcagcggagaaaatcagtggagtgaaaagattgttgcctctctgaaaaatcagctacagggagactggataacaatagcatctggtactcccggctatgttgagccgataaaggcagttggtttactggggcgtgaatttttgcacggagtctttgatgccacccgtggctttaatgccgaagcattagcaatactggcggggactctaaaagcaggaagttggttggtgatgcgcgttcctgtctggtcacaatgggttgatttaccggatgaagacagttctcgctggaatgaatctgccggtgtgatcccaacctcccattttattcagcatatccaacaacagctcctcaattctcctgattgtttaatatggcggcagggcaagccttttcaggcatcattattgcctcagacccggtcgtggaagatgcctgatggaaatccgacaacaggccagcaacttattcttgagcaaatgttacaggcttcacaaggggtatgggtagttactgcgccacgcggacgaggcaagtctgcactggcaggaatactggctcgtcagtggcagggaagctgctggttatgtgccccggcaaaaataacgactgaagtcattcggcgctatgctgaatcttttaataataatcttgaagatggccttcagaatagcgacacagtttctggcgcgcagcaaataccattctggtcagttgataatttactgaaatttatccgggagaatgcgtgtcggcaacaaggaaatacagacacacaacagagcaacgctgactggcttttgattgatgaagcggcggcaattccgacaccacagttatctgagttgattcgacattttccgcgtgtactaatgaccactacggtacagggttacgaaggtaccggacggggatttttattgaaattctgtgctgctttgcctgactgtcagattagggagctgaaaacgccaatgcgctggtctgaaaatgatccactggaaaagtggctggataacgttctactatttgatgacagcaatttgttttcatcgtcattacctgatcctaatattgaaaatggtttgttttttcagtctattgatcaggctgagtggttacaacaacctcagttattgcggcagttttacggattactggcaagcgcacattatcgtacgtctcccctcgatttacgtcggttactggatggcaatggaatgacattccttgctgccatgtccagttccgataatgccaatccacaattgattggtgctctatggatggtgaatgaaggcgggttatctccggcattggcacatgaaatatgggctggacgccgtcgcccgagaggtaatctggtagcccagtctctggcagctcatgcaggatttccgcaggcagcagtgatgcgttcacagagagtcagccgcattgctgttcaggcacaataccggcgtatggggattgcacaacgtctgattactcagcagtgtcaggtagcccgaatcaaaaagctggacttcatttccgtcagttttggttataccgctaaactctggtcactttggcaaaaatgcggttttcagttagtgcggatgggaacacaccttgaagcgagtagtggttgttatactgcgatggcgattctgcccttgagtgaacagggggaatggttggcccgagctgcacagcagcagttatcccgtgatgcaagttggctaaagtcgttgactgggtttgcgctgcctgttgagcataatgatgatcatcagctcaatgaaaatgactggcgggagctggctggttttgcatttgctcatcgttccttgtcgtcttcttactttgcgttgcaacgtttgctgttggcaagtgatctggctttaccggcgttgagaaaacatcttcaacagaaaatagagattgagcaatgtgcgtatgaattatcactgaatgggcgtaaagcattgttgaaatgctggcgggaagaaacggcccatgctctggcaaatattgatgaaatacttgccagacaatggaacgattgggttatttcttctgatcatccttttgatgatcactctttttaccattcgcctgaggccagtcgtcctcatcatcccatgaagcattaagatcccgatgaggaggaagtttcggtttgttatccaaaaattttttaggattgaggcggctgagttcttttatcgcgttaataataaccccagcgagtaacagcaggactatccaccaataatctgttaaccagtgcatgattatccttctgttttaacatattttttaaaaacataggaaaggttagctgtcagccagtcaataccggcaatatcacgaccctgccatgcatttaacaaagtctgctcattgaatagacattctgcttcatgagaaagaggccaatagctgatatgccacggttcataggctacacccagtgcacagtcacgggtaaatggacgatagaagtcatagcgggacatattttcggttaaccagttagttaatggctcaaaataaccacccgcttcatattcccatggctccagcagtagctttttaccctgaggcaacaggaaaggatcatagatatccagttctgttccccaatggtggcggcttgctcccggcagggcagaccagcggagaatggcttcacagatttctccttcggtcatttcgctgatatcaagaggctgactatcggcatccagtaccggacgttgcccacgatatttctcattccagatggcctgttggcgggaaaaatcacgaaatgagctggctggttgtaatttaaagccagcattggccgcatcccgttgcatcgcaaggaaggctttagttgcatcaaattgtaaatggtggcctcccgacagtgccattaggtgttctgtcgagagacccgtcaacatttcaggcgacatcatttgataattgctccatgatacgctgataaataaggcttaattcctgtaggtcagagacgctgacacactcattggttttatgaatggttgcgttaataggccccaactctacaacctgagccccggttctggcaataaatcgcccgtcagatgtaccgccgctggttgatagttccggcttgtatccacaataatggctgatagcttcaattgttgcatcaaccagctcccctttgcaggtcaggaagggctgaccggataaccaccactcaatatcatgtttcagattatatttcttcaacatgctttcaactcgctggcggatctcggtatcggtcagttcggtactgaaacggaagttaaactgaacttttaatttacctggtatgacgttattacttcccgtacccgcattaatattgactatttgcatactcgttgcagggaaaaactcattaccatcatcccatttagtattgacgagttcctgtaggaaggggagtgaactatgaattggattatcagcaaattgaggataagcaacatgcccctgaataccattgatggttacagttgccgtcagagagccccgacgaccattcttgatcatatcgccaaggcgcttctggctggagggttcacccaccagacagtaatccagtcgctcatggcgggccattaaggcttcaacgaccttaacagtaccgtttattgcgtgggcttcctcatcggaagtaattaagaaagcaaggcgaccctgatgattagggttttctgcaacaaagcgttctgctgcaaccaccatagcagccagagatcctttcatatccgcagcaccgcgaccatataacatgccatcacgaatagttggttcaaatggcgggctttgccattctgaaatatcacccgctgggacaatatcagtatggcctgccagagcaaacgtagctcctgttccatggtaggcccagaaattcagggtatcaccaaaaggcatccgttcaatggtaaagccagcgttttgcaggcgttggatcataatctcctgacagccctgatcatcggggctgacggaaggccttttaattaattgctgggttaattcaattactggacaagtcattatatacgcccctattaagttggaagatctttctgcctgtcatctttcaggctgcgtttttgtggctacgttttttggcagctccgacgcagcctgaaatttaccggggatatttgtaagagaaattccctacagttttcaagctgtagttttgtcagctttcttttagaaactattggatagaatctcgtgaaaaaaactgttggtactgttcagctttgaagcccagtaagtaactgcctgttttttgcgatgtgttttcttcttgagacgctaatagtggtcgtttaatgatagcgggttgttccagcatcagagccttggctgcttcggcattattgatggctgatttttgctcatcggttaatttgcgccaggttgttccgcgggtattgagtaaagattcccagcctaactgttcaataaatagctgaagtagatcaggtgataagccgtcagcgcgatagtcatggaattgatatgggatctcttgatcttccaaccaacgacgtgcttttttcacagtatcgcaatttttgataccgtacagagtgaatgttttttgaaaggtggtatctgacattatgagatccttaatcctgatttaatccgacatatatacccgttgtttttcaagctgcctcttgctgactgggaaaattcgtttccttatcaccgcaatgcaacacgcaacacatggggtatagctgttactttcaagttgcagtcagttggctgaatcctgaaagggggagagtataatgcgtgaaatttgccattttatccagataacacaaacctacatattgcttcggttgagcggggtttacgttttcatccggctagctatgctcgcaaggtttgatcagtagtcaactaggcacaagttggtttgctttatttaatatcaatagatagttaaaatttacagaatgcaattatctatatatttggtgactcaacaaccaccgactaaagtcggtgggttagtgattaacggactgaaagtccggatacgcatcggctaaacgatgcgtcaattatccagcctgaagtgatcattcgggttcggttcaaaatgatgcgccagataggcctttatcatctcttccgttaactgacctaccgtcgcacaaaaatagcctctgccccaaaaatgctgaccccagtaacgctttttcaagtgagcaaactcttcaaacaacttacttgctgtccttccctttattcgcctcatgatttctgagggcgctaagctcggaggacaactcaccagtatatgtacatggtctttgctcacgaccccttctactatcctgatttcgaacgcttcacaggtctgacgaactaactctctcacccgtaaaccaacttcacctgttagcactttgcgcctgtattttgttacccacacaaaatgatactcaatctgaaataccgtgtggctgccatatctgtaatccatattgcacctctcgtgcaacacagtatcgcagctaaagctgaccgactaaagtcggtggttttaaccttttatatggaaaaataaaactccaggagcatgaacaactatgtgactggagtgtacgcgcattatcaaagaagcaagttgaaagacacaaaaatattaatttaatattcaagggtgagctttatgattaaaaaaaatttaaagcaacaacaactaaataagcatagatactttaacctactatgggcaggccagtctttcagtcttatcggtaatcaatttttagtaatttcccttccattattagcagtacagatcgttggtgcatctgctgctgaggcagcattattaccttttttaatgtttatgccttttttactatttggccttccaataggagctctagttgatagattacccaagcgtaatacaatgatatttatggatattatacaaatggtgatttatattctcattgctgttcttgctatgggtggcctaatttcctttccaattttgatgggattagtattttttgccggtttagctacagagattttccaagttgcatatagttcatttctaccagaaatttaccaaggaaaaacagaattacagaaaggtaatgcaaaactatttttctcagaatcaatagcacggacattagggccagttgcagcaggctctatcataacccttttttccttaccagtagcggtcttactgaatggaatatcttttttgatatcagcattaacacttggtggaattagaaatagcaacaataaatcaatttcctcaggcatacataaacgtttacctctgataacagaaattaaactaggcttaaaatttgttttcagccatcctaagttagagcctgtttttttctgtggcgcaatttatgttctttttttaacgattattgaaacaagcttagttttatattgtaaagatatattacatctttctccagttggtattgggatcgttattggtgccgcagcagctggttttccaattgcaaatttattatcacctaagttagtcaattactttgggatttctcacactttggttattgcgacaacaatatctgtctcaggattattccttattgcagtatctggagctgtgggctctttagctggtcttattgccgcaagtatacttcatggcttaggtgaaggagtttttggccctacatcccttactttaaggcaaactgatacaccaacagagcttttagggagggtaaactctgtccaacgatttatgatatggggcgcaattccattaggcagtctactcacctcattaatcattaaatatattggtcttgaatggacattatggactggaggaattggtactattctttgtttgattccacttattcgaagaggaattttagccgatctacgccaaccctatgcaaaatttagctcaaaatctctcgaaaaataacgaaaggaaattattatgtctaattatgctactggtattaaagaatttattgaacgttgtaattctgtaatgcctcctaatttttatacatttccattacaagaacaacgtaatttatatcaaaagctagcaagtgaatttccctacaaaattcctaaagatattaagtggagtcaatataatataagtactgatggaaaatatttgaaatttcgtatttatgaaccactacatatagataatgacggattaataatttatattcgtggtggcggatttgttgtgggctcgttagattcgcatcatagtgttacagctgaaatagcttcaaaaacacaagtaagagtcatggctgttgattttagattagctccagaaaatccatttcctcattctttggaggattgttataacgctgtgatatatgctcaaaaaaatgcatcatctctggggataaatccaaataatataataattgctggagatagctctggagctaatatggctgtagttattgcgatgatgtgtcgtgatagaaatggtcccaaatttgttggtcaagctttaattagccctgtattggattttacccgatggagaaatggcggaaatgatgcccctctccttacaggaggagaaatggaattttataccgcatgttacgtttctgatcctagtattatttcacacccttatatatcaccccttatctatggtgagtttcacgaactccctactgcttatataatgggggcagaaaaagatcctttagttattgatgctcaagagtatacaaataaactaaattcaaatggtatcgatgtagaattaatcattgagccgggtcttgtacattcagcgatccgtgctagagctttaagcaaaaatgttcaagatgcttgggatcgttattgtatgaaaatacaaatgatattgaagaacgaaaggttatcaagatgaatacaaataattatgtaattattattgatccatactcctcaggaaatcagtttgctgctatttttaatcaattaaattgtaaagttatctctgtacaatctacccctaaacctccggatgtgtatgcatcttcttaccaaccagaagattttgacaaaatctatattgcaaattttgaacatttagaagaattaatatcacaattacgtaaatataatcctctttgtatattgacaggctgtgaatctggagttgagttggctgaaaaacttattccacttattgttcctaaatacactaacattaaggaacttgccttagccagacgtgataaagggctgatggctaaagcagttattgatgctggtataccaatgatgaaacaaatttgctcaagtgattttgctgaagtagagcagtggttacatagttgtaagctaactcataaagatttagttattaaaccccctaaaagtgccagtacagacggagtaaaaaaaatccattatggagaaggacttgaaaaatcattttatgatttactaaataaatataatagactaggtattattaatgatagagttatagttcaagaatatttatatggaacagaatatgtagtagatactttcagttataatagcattcacactatttgtagtatttgcaaatacactaagctgaataatgctaatggaatggcaatttatgaccaaatggaatgggtatcaccagatgaaaatatagttgaaattcttactgcatatgctgaaaaggttcttggtgctctgggtgttgtgtttggtaactctcatatagagattatgctcacaaaagaaggcccaagactaattgagattggagctagaccacatggtggcggtcatccgcggttctgctttattgccacaggcgacagtcaaatacatcgctctgcccgtttttttgccagaaaagaacttccacctaaaaaatataatttacttaaaaatatgactattgtttttttacatgcaatgcagtcatctgtcgtaaaaaatgtaaaaaaactagactatattaataaattacctagtcatcttgaatctaatattaaaattaatgatagacaactggtcccagctacacaagatttattttcaactttagagttagggtttattgttcttatgagtgatgatccacttcaaatacagatggatatagaaaaaattcgacaaatagaaatgaatgttttcgtaacaaactcggagataatatgacaaacacaatatgttttcagcatgccccaggcgcattccataatattagaggaaaaaggctttgggttgaagaagcaggtagtggagaacccctaattcttctatcaggacttggacctgccggttcgcatgtaatatttcatcctcactttgatatactacatactgaatttcgtgttatatacttagatcttttcggaagagggaaatctgatcaaccagaatctctttccgaaataacttttgaagaggatgtacttgatgttgcatatgtaattaacaagttatgtccagatggagcacatgtttttggtttctcatatggtggtttaataagtttaaaacttgctttggattatccaaaattaataaaatccttgctattatgtaatagcctgcatagtccttacatgtggcaaaagaatcacgaaaacataaataaaatcattgaaaatcaattaccagacgtatggagtgaaatatcccaacttcgtcgaaatggatatgcttcaacatcaccagaaatgcaatctctctttgcaaaaggagcttcattaatccgattcttcgaccccaagaactccgaaaaaatatctacggaatctggagctagaaatattgagttatatccaattttttgtggtgaagatgtagattttaatattggcggtcaaattttaatgatccctgattttcgccctaggttaaaagaaatatcaatacctacacacgtcattgctggtcgattcgatagagctctctatccattattacagcttgatttttttcatgaaaatatttcattacaattcctagaacatagtggttcattttcatttattgaagaaaatgaaaaggtaatgaatattatcagaactcattgttcatcataaaacatttgttctgaaattatggaactttcatatcaatggtggtggcataaccacatttaccaatgatgaaaaaattatttacctagggtgtaacactaaagagtgcgaatctttttttataataccttatgatggaatgaatccataaacaataccgaaataaataaccaacagcccgtttgacttatattccttccagtgaaacgggttttcataccagtaaaatcagaatattaaatttcatttgataattaataaaaaatatatatgaaaacgacaaaactcataaatcaaacgcattaatccttcggtaaattaaaattactgaaacaataaatttaagtaatatgaaaattattatattttcaatttagtagaataaaatgtgatccaaaactcaaacaacgtatcttttcatattcaaaattctgaaatctgactaggatgggcgggttattacttcactctatgaattatctcatcataaaagtaatcattctgttagtaccaatttccgttattcactactcctgccatagaaaggagaaaaggcatgaagaaaaaatcaataaatcaaaaggatgttgataatcttattagattagttggaggacaggagaatattgcctccgtaacccactgtatcaccaggctcagatttgttcttaataccccggaaaacgctgatgctaaggccattgaagagttaccaatggtaaaaggctgtttcactaacgccgggcaatttcaggtcgtcatcggaacaaatgtcgatatttattataaagctctgcttgccgcaaccggaaagcagtccgcaaacaaagaagaggttaaacaggctgcacgacaaaatatgaaatggtatgaaaatgctatttcacattttgctgagatcttcttcccattattgccagcccttatcagcggtggtctgatattaggtcttcgaaatctgatcggcggcattccatttagcgacggaaaacctctctccgatatatatccaatctggcaaaccatctatgatttcctctggcttatcggtgaagccatatttttctatctccctgtcgggatctgctggtctgccgttaaaaaaatgggtggaacgcccattctggggattattctggggatcacgttagtctccccacaattaatgaatgcctatcaacttgggcaacaaatcccggaagtctggaatttcggttggtttaccatctccaaagtaggttatcaggcacaggttattccttctctgatggctgggttagccttaggctggattgaaatacgcctgaagaaactggtgccggattatctttatctggtggttgttccggttgtttccctgctgctggccgttttcctcgctcatgcaatcatcggcccgattgggcgttcaatcggtgatggtgtggcctggtgcgtcaaagggctgatgaccggcagttttgcaccaatcggtgctgccttatttggcttcttctatgctcctctggtgattaccggtgtacatcagacgacgctggcgattgacctgcaaatgatccaaagcacgggcggaacccctatctggccgattattgccttatctaatattgctcagggttccgctgttatcggcatcatctgggcaagtaaaaaacaaaatgagcgggagctttccgttcctgcggcaatttcagcctacctcggcgttactgaaccggccatgtatggtattaacctgaaataccgttacccgatgttctgcgcaatgattggtacgagtctggcgggtttgctatgcgggctaaaccacgtgacttccaatggtatcggcgtgggaggtataccgggtattctgtccatcaaacctcaattctgggtgatctaccttctcgctatgctgattgtaattattgtaccaatggcactaactgttctgatgtatcgcaggaacgaacgcaaagcagaattgatcaataatgaagctgcgagttaataggatatagttttataaggtattgttatgactgaacaacaaccgtggtggttagacagcgctatctaccagatttatccaaagagttttcaggatagtacaggaaatggtactggtgatattaacgggatcacccaacgtctggattatttacagcacctcggagtaggtgctatctggattactccgatttatccatctccacaggtggataatggttatgatgttgccgactactgcgcaattaatcctgaatatggcacgatggaagattttgataatttggtggagaatgcccatcgccgtggcattcgcatcattttagatatggttttcaaccatacttcaacggaacatccgtggtttaaagccgcgcaggacgcaaatagcccttaccgtcagttttacatctggaaagagggtggtgggcaggataatccccctaataactggaaatccaagtttggcggcaacgcgtggcaatggcatgcagcgagccaacagtattacctccacctttttgccgtcgaacaggctgatctgaactgggaacatgaacccgttcgctctgaactgaaaaaagtctgtgaattctgggctgaccgcggcgttgatggactgcggctggatgtcattaatcttgtctcaaaacagcaggactatcctgatgatgatcgtggtgatgggcggcgtttttataccgatggcccacgtatacacgagttcttgcaggaaatgagccgtgatgttttccagcctaaagcgttaatgactgtcggtgaaatgtcttctacaagccttgagcattgtgtccgttatagcgcgttaagtgggaatacactctccatgacattcaattttcatcacctgaaagttgattacccgaatggggaaaaatggacacatgcgaaaccagattacattgaactgaaaaagatcttctcagtctggcagcaagggatgcatcagaaagcatggaatgctcttttctggtgtaatcacgatcaaccccgcattgtgtcccgattcggggatgaaaaacaacaccataaaacatctgccaaaatgttagcaatggtgctgcacggaatgcagggaacaccttatatctatcaaggtgaagagcttgggatgaccaatcctcactttaagcgcattgaagaatatcgggatattgaaagcctgaatatgtatcaggaacgcatcgaacaaggtatgtcttcagaagaaatactgacaattctggcgcaaaaatcccgtgataatagccgaacgccaatgcagtgggataacactgacaatgctgggtttacctctggtactccgtggatagcgaccagcgataattatcgtgaaatcaatgcagaatccgtattacaggacaaagattctgtattctactgctatcaggatttaattcagttaagaaaaacacagcccatactgacttatggtgattatctggatcttttacctgagcacccttctctgtggtgttatctgcgacgctggcaggatcagactttattggttattgccaatcttagtgatgaaa

SEQ ID NO: 2520 - DNA, 18187 bp, Xenorhabdus sp.; identical to SEQ ID NO: 2519
  CDS (1288)..(2337)

SEQ ID NO: 2521 - DNA, 18187 bp, Xenorhabdus sp.; identical to SEQ ID NO: 2519
  CDS (2550)..(3263)

SEQ ID NO: 2522 - DNA, 18187 bp, Xenorhabdus sp.; identical to SEQ ID NO: 2519
  CDS (4440)..(6653)

SEQ ID NO: 2523 - DNA, 18187 bp, Xenorhabdus sp.; identical to SEQ ID NO: 2519
  CDS (12607)..(13749)

SEQ ID NO: 2524 - DNA, 18187 bp, Xenorhabdus sp.; identical to SEQ ID NO: 2519
  CDS (15211)..(16632)

SEQ ID NO: 2525 - DNA, 18187 bp, Xenorhabdus sp.; identical to SEQ ID NO: 2519
  CDS (16660)..(18186)

SEQ ID NO: 2526 - DNA, 18187 bp, Xenorhabdus sp.; identical to SEQ ID NO: 408
  CDS (14674)..(14781)

SEQ ID NO: 2527 - DNA, 18187 bp, Xenorhabdus sp.; identical to SEQ ID NO: 408
  CDS (10722)..(11393)

SEQ ID NO: 2528 - DNA, 18187 bp, Xenorhabdus sp.; identical to SEQ ID NO: 408
  CDS (9599)..(10735)

SEQ ID NO: 2529 - DNA, 18187 bp, Xenorhabdus sp.; identical to SEQ ID NO: 408
  CDS (9046)..(9426)

SEQ ID NO: 2530 - DNA, 18187 bp, Xenorhabdus sp.; identical to SEQ ID NO: 2519
  CDS (4051)..(4437)

SEQ ID NO: 2531 - DNA, 18187 bp, Xenorhabdus sp.; identical to SEQ ID NO: 2519
  CDS (11645)..(12391)

SEQ ID NO: 2532 - DNA, 18187 bp, Xenorhabdus sp.; identical to SEQ ID NO: 2519
  CDS (10292)..(11458)

SEQ ID NO: 2533 - DNA, 658 bp, Xenorhabdus sp.
  CDS (3)..(602)
ctttaagaactcgtaccactttgcgtgaagtattgcagcgtcttgctcgtgatggctggttgactattcagcatggaaaaccaacaaaggtcaataatttctgggaaacatcaggtcttaatattctggaaactctggcacgtttagatcatgatcgtgtgcctcagctggtcgataatttactgtcagtgcgtacaaatattgcggccatctttatccgcactgcattcagacataatccggaaaaagcactggaagttctggctgaaaaagataaagcagaagatactgcggagtctttcagttctgtggattatgatattttccgtggcttagcatttgcgtcaggaaatcctatttatgggttgatcattaacggattaaaagggctttatactcgtgtgggccgttattacttttcgaacccagaggcccgtaaactggcgctgaatttctatcaacaactgagcgtactgtgtcgggaagaagcctacgataaaatcatggaatgcgtacgtaattatggtaaagaaagcggaaccatttggcatgaaatgcaaggcattatgttcaatgatttaacagcagcacgtcagaattaatcaaattatatcttatccaattatcaggttgattttttaatcccacctattcttta

SEQ ID NO: 2534 - DNA, 16958 bp, Xenorhabdus sp.
  CDS (8809)..(9042)
ctaaagaactttctcccatcgttagcttagcttccatagtgggaagtgcgcgatacgcgtagttacggttccaatcccaactgcgttttctggaactggagcgatttgtatcatccgaatcgttcttcccggtattagtgtgatcatatctgctctgccagtttgcacggaaacgccacgcgccggcattaatgcctgtcgtaccatttgcactgatttgctggcgcgcattaccatgatctggtttagttgcctgtgcataaaggttgtaatcaaataacaatccgggtacaccttcatcccagcgggaaggaggatcccaattcggggattcatattccagatagattttaggaacaactaaatacagggtataagtggctaaatcccctttaaccaaggttcccggcaggctattcagatcaaggcatttttcattattctgccagactaatttatcggcccattttgattgcaggccgattcttttcactaattcgggtgaaatacaggcttcactgccttttggatcattatccggcacgagaaagtcaataggatacatatcctgcaattcagactgattcacccgaactgccatcatatagttccccggcatgatataacctgcacgggaaaacttctccaaatcaatattggagcgttcattaatatccagcgcatcagtattgaattcaatgggcttagaataagcaaactggataccggacagagaaaatagtatcagggcagaaagtagcttaataccgggcttcgaaggttttgtatttattttattagctattctttgtttattaagcacgtggtttttattaaagattctttttctattactgcgtgtttctttattaacagacgaaaaatcatgattcatagaagctataaaccaagccataacatcctctaagcaatgaatcgttaataattcaatttgaatttaattactgcctgatagtgccaaatccgtatgtatggcagaatgtgtgattttccgaatataggtaactgagaaaacatcaacttcaattaattctgaagaagcttttcaattctcaagccacttaaatcgctttcttatcagttttaaacaccgttattagacacagtgcatgtttaaaataggctcaatagttatgccaggaagcccaaataaaaatcaaaatgacatgggcttcctgacattcagcaattaaaaactagcctctagttttcactattacaggtagttcaaagtaaagtatgcgaatgcatagaagtcacctgttgtcacagtctgaccaggaataactttcaggtttgcatcgaaacgcaggcggttatcaactgcatctacaccagttgtaggtgtgccgaaacgaaccagtcttccgttctcaccgtcatttaagtcgccaatttggatgcctacacctttagctttacctttaatagctaaaagatcgccattagcatcaaccgtatcacctgtgaacgttgtggaaattttctttcctgtgatatcagaacatttgtctaaaataatatcaaaaggtatacgttcggattgaccgtccggattggacttaaacttagaagtccgaacttcgccaaaattaacatcaatatgagaatttttaattgaacaagtcggattaataatagaacctttgaagtgaacgaaaccacgatcattcatgttgtcgtcacttccacctgcatttgcagcgcctgcagttaaagcgacaccaagacctaaaaccattgccaatttattcagtttcataatcgaatttataccttttaattaaaaagtagggatttatattcagggaatgtcctaaacccagaaattaatttctggctcttaggataattgctatttagttttttgacagactgcttaactgttcaactaaatgaaatcgatattatgattctatacaaagcaccctaagtcaaatttcagcggataaaactggcaatgatccctaactgcgtatcggatatgagtttttaccaaaaaccacgcatagacagcaatatattttactgataaacatgtaaatttagattattttcctgaattgcatctcacaaagacgaatagtttagaatcttagtttgcgcgtctttattgagcgattttgtcttttttaaaataaaaaaatactcaattaaactaagataatgataaaaatcagattttaatatcaaaacaaaaggaaaagacaaaatataagcaaaatattcatctattttagaaaattaacacgctaattataatattaaattattactttagttgaatgggtgttttttgttaaaaatattcatttattattttcataataaaatcagcgattgataaaatgaaaacagacaaacaaataaatgagattaattcttaataaaaccatctgaaaaacatattcttttggataataaaaaagcccttctcattatagagaagggcttttattttaataaagtaattaaattacattatttttaattgtcacctaacaaaatagattcaagagcgatttcaatcatgtcattgaaagtagtctgacgctcttcagcagtagtctgttcacctgtacgaatatggtcagaaacagtacaaattgccagtgcttttgcaccaaattcagccgcaacaccgtaaatgccagccgcttccatttcaacgcccaaaatgccgtatttttccatgacatcgaacatttgtgggtctggagtatagaacagatccgcggagaaaatgttaccaacgcgcgcattgatgttttttgctttagctgcatcaaccgcattacggatcaaatcgaagtcagcgattgctgcaaaatcatgatctttaaaacgcagacggttgactttagagtcggtacaagcacccataccaatcactacgtcacgaattttaacgtcttcgcttacggcaccacaggagccaatacggataatctttttgacaccaaattcggtgatcaattctttggcataaatggaacaggatggaatgcccataccatgccccataactgaaatgcgacggcctttataagtaccagtgaagccgagcataccgcgcacatcgttaacctgacgcacatcttccagaaaagtttctgcaatgtattttgcacgcagtggatcgcctggcattaaaacaacatcagcaaaatcgcccatctcagcattaatatgtggggtggccataaatctattccttgtttctattatacccgtcgtttttcgggctgcctttttgttggctgtgctcgctcctcccggtcacatagctacctatgcttcggggattcactcacttgcctacgcaatgcagctcaaaatccatagggtatgggtattaaaaaaatattagcgatcggggaagccaatggctcccccggaaaatcagaacatcactttaccgtaatccattggtgtcaggtcgaaatatttcgccactgtctgaccaatgtcagcaaaggtttcacgatgccctaatgagcccggttttacctttggcccataaaccagtacaggtatatgctcacgggtatgatccgtacccggccaggttggatcacaaccgtggtcagccgtcaggatcagaatgtcatcttctttcacctgctccagcatttccggcaaacggcgatcaaacagttccagcgcagcagcataaccggctacatcacggcgatgaccgtaagatgagtcaaaatcaacaaaattggtgaacacaatcgtattgtcaccggcctgctccatctctaccaatgaagcatcaaacagcgcatcaatgcctgtcgctttcacttttttagtgataccgacattcgcgtagatatcagcaattttaccaatggaaaccacttcaccctgtttctcatcaacgagttttttcagcacagtcggagctgggggttcaacagccaagtcatggcggttgccggtacgctggaagttacccgctttatcaccgacaaacggacgggcaatgacacggccgatgttataaccgccatcagtgagctcttcacgggcgatttcacataattcatacagtttatccagaccgaatgtttcttcatgacaagcaatctggaaaacggaatccgctgaggtatagaaaatcggtttacccgttttcatgtgctcttctcccagcttgtccagaataacggtaccggaagagtggcagttacccagataacccggcaggttggcacgttcaaccaatttatccaataattcctgtgggaagctattttctaactcgtgaaaataaccccagtcgaataaaaccggtacgccggcaatttcccaatgacctgatggtgtgtctttaccagaagaaagttcactcgcataaccataggcaccgataatttcggcatctttatccaaaccaaccgggaaagttccactggattcttccgttgcttttcccagtcccaaacggctcagattcggtaacttcaacaatccctgacgaccgatatcagcttcaccacgagcgcactgttctgcaatatgccctaaagtgttagaccctttgtcaccaaatctttctgcatctgcactcgcaccgataccaaaggaatccaagaccatgatgaatgtacgtttcataattttctcctgtgtcaattcacgctatcaatgcgggaactgccagctgttaaaatctattcaatacttctgttgaattatccaccaatacgacgataaaccatctgggtggcgactttcattccggcatccacttctgctgccgaagtatgtgcctgttgaaaaacaagcgatgcacgcacagcctctgccgccatatgccagtcatcttcattattggcatgaatcaccatcagaggagtatctgtgtttacttctgagccaagcgcaataatatcactcagccccacactgtaattaatcggatcagtcgctttgcggcgaccaccgcctaatgcaacaactgccatccccaatgcacgggtatccatttcagttacaatgctttgttttttaataatattattttcagcaaatacgggtctgctgaaagaagctgtcggtaaataacgatcatagttttcaataaaatcaacaggccctttctgggctgccaccatacgcccgaatatttccgcagccttaccattatcgagtactgcctgtaattgacgatatgcagcatcacgatcttctgccagtttacccgataccaacatttcagcagataatgccatagttacttcaaataaccgggaattgcggtattctcctgtcagaaactgcaccgcttcacgcacttccagcgcattaccggcactggatgctaatacctggttcatatctgtcaacagcgccgttgttttacaaccagcaccattagccaccgcaacaatcgattccgccaactgttctgactgctcataagtcggcataaatgcaccagaaccgactttcacatccataactaaagcgtctaatccttcagccagttttttgcccagaatagaagcggtaatcagcggaatagaatcaacagtagcagtaatatcacgtgttgcataaaaacgtttatccgctggtgccagtgagttagtctgaccgataattgcaacgccaacatcccggataatgtcacggaatcggtgatcatcggggaaaatatcaaacccggggatggattctaatttatccagcgtccctccggtatgacctaatccacgccctgagatcatcggaacataaccaccacatgctgcaaccatcggccccagcatcagggatgttacatcaccaaccccacccgtcgagtgtttatccacgaccgggccgggcagattcagctttttccagtcaagcactgtaccagaatcacgtaccgccaatgttaaggcaatacgctcttccatcgtcatatcccggaaataaatggccatcgccagagctgcaatttgcccttctgataccgtattatcacgcacagcgttaataaagaagcggatttcttcttcgctcagtgaaaaaccatctcgttttttgcggataatttcctgtgccaaaaacaaagctacctcccattatcattgtctgagaagaacagtagtcatgaatcagctctatcttaacgaacattcaaggcattgttattgatcttaaacgtctgttttcatcactactgcattcaataacttctgttactaataactgctgctttgtttttgaccctgatgacccagcgccgtcaataagctacccagcagactggaagcgccaaaacggaagtggcgggaatctgcccatttgtcgcccatgatccggcctgccagtgccagatactgcgcagcttcttctgctgtgcggacgccgcccgccggtttaaacccgacagtctctcccacgtcaatatcacggatgacactcagcatgatctctgcactttccagtgtcgcattaaccggcacttttccggttgatgtcttaataaaatcagcacccgctttaatcgagatttcagaggctttgcggatcagagcagcctctttcagctctccggtttcaataatgactttcagccagacacctgattcagcacaggcctctttacaggctttaaccagatcaaaaccaatttgttcgttacccgccatcaatgcgcgataagggaaaaccacatccacttcatctgcaccataagcaattgctgcacgggtttccgccagggcgatatcaatatcatcattgccatgagggaagttcgtcacagtagcgatccggatatccggagttccctgttcacgtagtaccttacgggcgaggggaataaaacgcggatagatacagatggccgcagtatgccctgccggactgtttgcctgatggcaaagtgctgtcactttctcatcagtatcatcatcattgagtgtagttaaatccatcaagctcagcgcacgctgagcagctgcggttaaatcggtcataaaactctccaacggtatttttattgaatcagttcacatattcttccgaacacttaatcgctaactgttccgaattattaatgtattcatatgttggtgagcggacttggttccttgaagatgttgcaatacgctatctcgcagcgacaatagagttccttctctccgcacaatgttttctccaactttattactcttgtagtcagaaatttttcgatcaagtcattgtattttattatttgaacctataaatggccaaatatttatgtcttttatcacatcaaaagaatataaattgcaataacaaacattttattgtgataaacatcacattaaataggttcagtagcgtaaaaaaacaacctacataacaatagatttaaagttgatatcaatggatttcccttcgatttttacgataacccattcttgcttaccagataaaatttttccccatgacaaaaatgtatcttctccctcagattttccggcaatatactgaccaaaatacgagtattccagaataatttattcgaatagaaaatgctgtttatactcaagcaaatttaatattgctcacacaggtaacaaacccatacatcggataataacagcagcaacactaaacaaaactcaggttaaccacatttctacaggaatttcaatattggtaacttattgttaaaaaataacatagtgataacacattgattttgctaaattgatgtacatattagtagatcagtgatgcaaaagagcatttttttatttttatcaagaaaatcattctctactcactttaaatttatttatatagctttatttacaggatttaaaaagacatttatcagttaacaatgtagaagcacatgtagttattgagcttttatttagtattgttttgactatttctcttttagttatcgtattttatgacactttccattcattttttcaaaaaaacttggcgcatttaatatttggaatactaaataggatattaataaaaatgctaaatgttaaggataatggtgaaaacaccatcatattattacctcaagaaagaaatgccatttattcatcattacaaaaaatccctgacgaatatgatcaggaaaatactcccctagaacttgaaaaactcgcatgtaatattatctctaataatctcaataatgataacctaataaaattattgcagtttgcgaaagataataacattccatttctacatatcaaaaattttctacctttaactgattatcctccaactcctaacaacgatcttagtccaacaaaacaaggttggaaaattcccgccgctgcattattagggctacttcacctgacaggtcacacagctcgatcgtttttagatgaaatgggaggtcggttgtgccatatggtcatgccatcaattaatgatgaaaaaagttatctccgttcaactaaaaaacttaattttcataccgaagtattgaatggttattttcaagaagaaaatcctgttgttggttcaccactttcccccgaatcatttggattaattggtttaagaaacccagataatataccaaccacattattacctctttgtgaggtaatgaaaaatctcaaacagaaagaaattgatgagctaatgaagaaaaacttcactgccagaagccaatcttccttcgataaaaatattgagttaaaaaacatttctatattatctccctgccagaatggagaaataggtatcaggtatagtaatagcaaaatacaaggaaataataaatccgcacaacaagcttatgaagcaatgactgatgtaataaaaaactcagaatgtattcaatatgtatccttagcaccaggggatgtacttattattaataatagaatttgtttgcatggccgtagctctatcactgacaccgcaaaattcaacggagaagatcgctggcttattcgtatttatggatacaaaaaacatagtactgattttatgaaaatacgtcagggtagcgatcatataatggaagtggacatataaaaatcattctaaaaaaacacctattaatgaaaaaaccactaaacataatttatgtcaaatgatactagatatttaactccttaaatcaaaggataaaaaaacatgaaaaataaaaagatcattgattgtatttttaaagctaaaagatcaaaaacacaatacgaaaatatgtttcgtattttagataaagctgatttactttctggtgattcatccgttgtaacagaatatgagacatcgttaaaagaattttttaatgttaaatatgcgattgcggtatcatcgggaactgctgctttgcatgccagtattactcaggtcataaacccaggagatgaagttctagtgcctgcgatttgcgtaccaatgacaatatctgctgttttacaagcgggtggtataccggtcttttatgattgctctagaaactcgttttatcctgaacttgcttctctggaaaaacatactaattcatctacacgtgcgcttatcaccgttgctatgtggggttatagtgcaataaataaagaaataaaagactatgccaaaaagcataaaataacaattattgaagatgcagcacaagcagcaggaactcatgggaaacaaggttatgaaggaacgattggcgatataggttgctttagtacacatgaatttaaacttatcagtactggggaaggcggatttgtccttactaattcggagcagttcgcaaaaaatatacaagaattcacgcatataggattttgcgcagaagccaaaagttttggtcataagaatggtttaaattataaattatcatcatttcaggcagctgtaggtattgaccaattatcaattattgagagtaagattcaggaacgtaacaaaaaggcagaacaatggagagaaaatctaagttctggttctgagttaactttcatgaattcgcattatgatatatctcataatggctatgggttatgcacatttttacattcgaatactaatctcacgggaattgagttagccagacaactgaatgctgtaggtataaacacagatacttatcgatataaaaatacgattgtgtgcaattatccatttttaaaagagttctacctgacaccccggtattcgggcagaaatgagatagattttcctaatgcgacaaatttagtaaaacgaatgctggttttaccctgccatgaccaagtcaccgatagtgctatcgatatagcatcagagcaaatcctatcgttattaaggaaaaattcatctacataaagaaagaggaaagaagaggaatattaagatggtaaagggttatcaactaaacgatatttgattaagacaaagtgctggagccagcactttgtcaataatctgagtaaggtaaacattcttcaccttactcaatctaatacactattcaatgattacaatgcgaggaaaaatccagcaattgtggcactcatcaggttagacagtgaaccagccaatacagctttcagcccgaagcgggcaatatcaccacgacggtttggagccatgccgcctaagcccccaagcaatacagcgacagaagacaaattcgcaaatccacataaagcaaaagagataatggctttagtatgatcagaaagaacctgaagacctgctgccttcacgacatcatctggtttcagatagtcgccaaagtgcatgaatgctacgaattcattaactattattttctgcccgatgaaagaaccagccacggttgcttcatgccacggcacaccaataaggtaagcgattggcgcaaatacccagcccagaatcaattccatagacaattgaggatagctgaaccaaccaccgataccgcctaacataccattcaacaaagcaatcaatgcagtaaatgccaacagcattgcaccaacattcagagccaactgcataccggatgccgcaccagatgctgccgcatcaataatattggccggacggtcctctgctgataccagtgacatcgcatcaacattatcgtgagtggtttcagtttccggcaccatcagctttgcaaataacaggccacccggcgctgccatgaatgaagctgcaatcagatattccagtggaacacccattgatgcgtaacccgccaatacagagccggctaccgatgccagaccaccacacatcaccgcaaacagctctgattgtgtcatggttgaaatataagggcgtacaaccagaggtgcttcagtttgcccaacgaaaatatttgctgttgctgacagggattcagtacgtgatgttcccaatattttttgcaggccaccacctaatattttgatgataagctgcataaggccaatgtaatacaaaacggcaatcagagaagagaagaagacaataactggcagaacgcgcagggcgaagacaaaaccaccgccgccgaacagctcaaacattttgttagataccagcccgccaaagataaaatcaattccctcctgaccgtatccgatgacgttggaaacaccttttgacattccaatcagaatgtctttacctgctggtacataaagcacaaatgcaccaataagcacctgaatcaagaaggcaccaaggacagtgcggattttaatagctttataattactcgagaaaagtactgcgataaaaatcagcactaccatccctatcaggctcataatgagttgcattggaagaatccctgttcactgaatgaatgaaaaatatgtcagttatattgtgagttcctactgacactgtgtgtggaggcgattatacccagtagtaaaaaagaacaagcaactgacatcacaaattaatgcagcaaaaagtaatataaaaacgggaaatgagacttacatcacatataaccattctatttatcagggtttagataattttgcggtaaaaaaggaagaaatgagaagataatgccagttaaatattattaatgtttatttcgaccagaatagcctattttgctcaaccaaaagtagactatttccactgggataaattagctgatcgcaaataatgccatgctattttgataaatttggcgggaaatttcatccggagattcaggacgtaattcacacaatacagaaaaaatctgcgcgattctttcgggtcggtttggctgcccctgaaaaccagctaatggcatatcaggtgcatccgtttccaatactaaagcggaaagaggcagacgagctatggtatcacgcgtttttttcgctctttcgtacgttatcgttcccccgacaccaatataaaaacccagacgtacaaaggcctgtgcctgagataagctacccgcaaagccatgaataacgccggtgcggggtacatgatgttttcgtaacattgccgccagttgatcgtgactttttcgggaatgaagcagcacgggtaattcatattttctggccagcttgagctgagctgccagaacgcttttttgccgctcaaactggggctctgccatatacagatcaagcccaatttcacccacggctacacaatggggaagtttctcttttaatttctgctccagacaatccagatctgtatcatgatgttcattaatatataaaggatgcaatccaaacgcggcatagattgcctgatacttggccgccaaaccagcaaccctctggaaatatacctgactgacagtcggcacaataattttttcaacgcccacttgtctggctcgttctaaacttgcagtttcgtcacccagaaaaggagggaaatcaaaatggcaatgtgtgtcaataaacatctatttatccatatcattcttcgtcatcattattgttcgtcaaaatcgttttcaacattgatcatagttgtaccagtcagtggcaacttctcgctgtcattcacgccggtttcctcagccattcttgccgaagtacctattgcggggggatgctcactacacagaaaactattgcgacggaaacaattacggttagttccatcgtggtttaaaccgctgcgggaaacaccataacttttacgtttttccggcccaaacttaccaccgacaaaagtatgtccgatagtcgccaaaaagtaccgcccacaacgtcgccccagatgataatccgtgttcaatgcttttgttttactccccagagccatagttgccaacggtgcgggtggcctaatttcgaagatttgtacgtcatccggtggattttcaataaaccgttgtgtccggaagtagcttgtagcatgcagcttcaacattctgagcattttttgctgactgctggtttccagccagcgttccactcgcttgaaccactgtgacgtataataaagctgtgaaggcactgtcctgaccacgacaatagtatcagctccccggcgatatgcctcttcaaccggaatcgcatcactaatgccaccatcctgataaacgataccatcgagcgttacaccattgcgataaaatccggggattgcactggaagccttgataatttccatccagttactttcatcaggttgaaaataactggcttcgaaattatcagcacggcaggtgcacatataaaactcacggccatcatcaaaatgatccatcgcaataggaatgtttaagggaatttgttcagagatcatatcaatataccaatccaaatcgataagatgcccaccccggacaaaacgcaatggattgaagaaaatcggattggttgtgtacttgttgatcaccttgcgggcatagcctttttgaccgcagatataagcagaaaggttctgagcaccagccgaggtaccaagaaataattcgaacgggttaaaatttaaccttagaaattcatccaacacacctgcggtaaaaattcccctctgcccaccaccttcacagacaagtgcaatttttcccggttttatccgcgatgtataagctaaaggttctatattacccaacgtaattggaatatgtttccccacatttccccctacaaagtcaatgtcagtttcaaggtgtcatttgaattatgatcatctttcagtaattagtaataatgttatgcaaacaattcctcacccaagtgatttctcatttgagcaatgcatccgtaaagcctgtattaaataatggagattaattcaccaacaggcaagttattaccaataatatgaatagatcttatccgttatattctggaagagataatcgcttaattagattaagttttatttggggaataagccggtagagtgacttattatcagtcactctcaacaaaaaatagattattttttgatagacagggtactgtttacggcctgaacgccttccactttatgagcaagcctgatagctcgttttgccaactcttcgtgtttgacaaaaccagaaagataaaccacgcctttttctgttttcactgaaatattattatcgtgactattaagcccggtatcttccagaaaattttcttttattcgggcagtaataacactatcgtcagaattattatctgcttttttaagggaattctcgatttttttcccactatgatttcttgaatcattaattttctgatttgtattttcctgtgctttaccttctgactgataagttgaagatgtgcctgctgccagtgcgttaccacctattagtaccgagcctaaaacaacagccaggaatgagtttgtgaactttaaatttttcatcctactaccttccttttatctaagccagaatgtcaaaggatgatatatcaataaattacgcaaatggtatgagctttacaataactaacgtatattttcttatacctagaaatgatgcttttaaataaaacagaaagtattaattatggtaggaaaaataaaaaaggccaacgaggtgttggcccataaaaaatatcaatgttcccgtgtcttacggaaaactacctcaggatagcgttcgctggtcaggtttaaattaaccatggttggggcaatgtagctcaggttatcaccaccatcaaaagccaagttttgttcattcttacgtttgaactcttccagctttttgacgtcactacattctacccaacgagcggtagaaacgttgacaggctcatagagtgcttctacgttatattcactcttcagccgggcaacaactacatcaaactgaagaacacccacagcaccaacaatcaaatcattattggtcaatgggcggaatacctgtactgctccctcttccgacaactgaaccagacctttgagcaattgtttctgtttcagaggatcacgcagacgaatgcggcggaacagttcaggagcaaagttaggaataccggtaaatttcagctcctcaccctgagtgaaagtatcaccaatctggatagtaccgtggttatgcagaccaataatatcgcccggatacgcatcttcaacatgagaacgatcaccagccatgaaagtcagtgcatctgagataaccacatcttttttgatacgaacctgacgcagtttcatacctttttcatatttaccggaaacaatacgcaaaaatgctacacggtcacggtgtttcgggtccatattggcctgaattttgaacacaaacccggagaatttttcttcttgtgctgtcacttcacgcgcatcagtctgacgcggcattggtgtcggagcccacttaatcaggccatccagcatatgatcaacaccaaagttacctaacgcagtaccaaagaataccggcgtcagttcaccctgcaaaaaggcatccaaatcaaattcatgtgatgcgcctttaactaactccagctcttcacgcaactgttcggccagctcttctccgacagcagtatccagctcagggttatccagacctttaataacccggacttcctgaatagtatgaccctgaccggattgatacagataaatttcatcctgatagagatggtaaacccctttgaaagacttaccacaaccgataggccatgtgataggacaacaagcgatcttcagctcattttcgacttcatccatcagctccatcggatcacgaatatcacggtcgagcttattcatgaatgtcaggattggcgtgtcacgcaggcgggtaacttccatcagcttacgggtacgatcttcaacaccctttgccgcatcaataaccatcagacagcagtcaaccgctgtcagagtacggtaagtatcttcagagaaatcttcgtgtcccggagtatccagtaggttaaccagacaatcaccataaggaaactgcatcactgaggtggtaatggaaataccacgttgtttttccatttccatccagtctgatttagcatgctgattggaaccccggccttttaccgttcccgctttctgaattgcctgtccgaataacaggactttttcagtaatcgtcgttttacccgcatcgggatgcgaaattattgcaaatgtgcgccgtttcgcaacttcttgcagaaatggagaatttgacatctattgaaatcttctattctgtacgcggatcgataccatattgaggcgccatcagagacccttaatccatccaatccggtatgttaattggagttagcgtttattttcgctgaacttggcgtcataaacaactaatgatacgcaagatgatgatgtagaaaatcatcatgacttcatcagattcaatctacattccctttctcctgaatcgcaaaagttcatatacgggtacgtcactcatactcacccaaacagcggtaacgccataataatggcatcttccttacctgtcgcggtcgggtaataatttttgcggatggaaacttcattgaagcccagatcttcatataaccgaattgcagactggttggaacaccggacttcaagccataacgtatttatctgcttttcaggtaatg

SEQ ID NO: 2535 - DNA, 16958 bp, Xenorhabdus sp.; identical to SEQ ID NO: 2534
  CDS (9199)..(10311)

SEQ ID NO: 2536 - DNA, 16958 bp, Xenorhabdus sp.
  CDS (16064)..(16957)
cattacctgaaaagcagataaatacgttatggcttgaagtccggtgttccaaccagtctgcaattcggttatatgaagatctgggcttcaatgaagtttccatccgcaaaaattattacccgaccgcgacaggtaaggaagatgccattattatggcgttaccgctgtttgggtgagtatgagtgacgtacccgtatatgaacttttgcgattcaggagaaagggaatgtagattgaatctgatgaagtcatgatgattttctacatcatcatcttgcgtatcattagttgtttatgacgccaagttcagcgaaaataaacgctaactccaattaacataccggattggatggattaagggtctctgatggcgcctcaatatggtatcgatccgcgtacagaatagaagatttcaatagatgtcaaattctccatttctgcaagaagttgcgaaacggcgcacatttgcaataatttcgcatcccgatgcgggtaaaacgacgattactgaaaaagtcctgttattcggacaggcaattcagaaagcgggaacggtaaaaggccggggttccaatcagcatgctaaatcagactggatggaaatggaaaaacaacgtggtatttccattaccacctcagtgatgcagtttccttatggtgattgtctggttaacctactggatactccgggacacgaagatttctctgaagatacttaccgtactctgacagcggttgactgctgtctgatggttattgatgcggcaaagggtgttgaagatcgtacccgtaagctgatggaagttacccgcctgcgtgacacgccaatcctgacattcatgaataagctcgaccgtgatattcgtgatccgatggagctgatggatgaagtcgaaaatgagctgaagatcgcttgttgtcctatcacatggcctatcggttgtggtaagtctttcaaaggggtttaccatctctatcaggatgaaatttatctgtatcaatccggtcagggtcatactattcaggaagtccgggttattaaaggtctggataaccctgagctggatactgctgtcggagaagagctggccgaacagttgcgtgaagagctggagttagttaaaggcgcatcacatgaatttgatttggatgcctttttgcagggtgaactgacgccggtattctttggtactgcgttaggtaactttggtgttgatcatatgctggatggcctgattaagtgggctccgacaccaatgccgcgtcagactgatgcgcgtgaagtgacagcacaagaagaaaaattctccgggtttgtgttcaaaattcaggccaatatggacccgaaacaccgtgaccgtgtagcatttttgcgtattgtttccggtaaatatgaaaaaggtatgaaactgcgtcaggttcgtatcaaaaaagatgtggttatctcagatgcactgactttcatggctggtgatcgttctcatgttgaagatgcgtatccgggcgatattattggtctgcataaccacggtactatccagattggtgatactttcactcagggtgaggagctgaaatttaccggtattcctaactttgctcctgaactgttccgccgcattcgtctgcgtgatcctctgaaacagaaacaattgctcaaaggtctggttcagttgtcggaagagggagcagtacaggtattccgcccattgaccaataatgatttgattgttggtgctgtgggtgttcttcagtttgatgtagttgttgcccggctgaagagtgaatataacgtagaagcactctatgagcctgtcaacgtttctaccgctcgttgggtagaatgtagtgacgtcaaaaagctggaagagttcaaacgtaagaatgaacaaaacttggcttttgatggtggtgataacctgagctacattgccccaaccatggttaatttaaacctgaccagcgaacgctatcctgaggtagttttccgtaagacacgggaacattgatattttttatgggccaacacctcgttggccttttttatttttcctaccataattaatactttctgttttatttaaaagcatcatttctaggtataagaaaatatacgttagttattgtaaagctcataccatttgcgtaatttattgatatatcatcctttgacattctggcttagataaaaggaaggtagtaggatgaaaaatttaaagttcacaaactcattcctggctgttgttttaggctcggtactaataggtggtaacgcactggcagcaggcacatcttcaacttatcagtcagaaggtaaagcacaggaaaatacaaatcagaaaattaatgattcaagaaatcatagtgggaaaaaaatcgagaattcccttaaaaaagcagataataattctgacgatagtgttattactgcccgaataaaagaaaattttctggaagataccgggcttaatagtcacgataataatatttcagtgaaaacagaaaaaggcgtggtttatctttctggttttgtcaaacacgaagagttggcaaaacgagctatcaggcttgctcataaagtggaaggcgttcaggccgtaaacagtaccctgtctatcaaaaaataatctattttttgttgagagtgactgataataagtcactctaccggcttattccccaaataaaacttaatctaattaagcgattatctcttccagaatataacggataagatctattcatattattggtaataacttgcctgttggtgaattaatctccattatttaatacaggctttacggatgcattgctcaaatgagaaatcacttgggtgaggaattgtttgcataacattattactaattactgaaagatgatcataattcaaatgacaccttgaaactgacattgactttgtagggggaaatgtggggaaacatattccaattacgttgggtaatatagaacctttagcttatacatcgcggataaaaccgggaaaaattgcacttgtctgtgaaggtggtgggcagaggggaatttttaccgcaggtgtgttggatgaatttctaaggttaaattttaacccgttcgaattatttcttggtacctcggctggtgctcagaacctttctgcttatatctgcggtcaaaaaggctatgcccgcaaggtgatcaacaagtacacaaccaatccgattttcttcaatccattgcgttttgtccggggtgggcatcttatcgatttggattggtatattgatatgatctctgaacaaattcccttaaacattcctattgcgatggatcattttgatgatggccgtgagttttatatgtgcacctgccgtgctgataatttcgaagccagttattttcaacctgatgaaagtaactggatggaaattatcaaggcttccagtgcaatccccggattttatcgcaatggtgtaacgctcgatggtatcgtttatcaggatggtggcattagtgatgcgattccggttgaagaggcatatcgccggggagctgatactattgtcgtggtcaggacagtgccttcacagctttattatacgtcacagtggttcaagcgagtggaacgctggctggaaaccagcagtcagcaaaaaatgctcagaatgttgaagctgcatgctacaagctacttccggacacaacggtttattgaaaatccaccggatgacgtacaaatcttcgaaattaggccacccgcaccgttggcaactatggctctggggagtaaaacaaaagcattgaacacggattatcatctggggcgacgttgtgggcggtactttttggcgactatcggacatacttttgtcggtggtaagtttgggccggaaaaacgtaaaagttatggtgtttcccgcagcggtttaaaccacgatggaactaaccgtaattgtttccgtcgcaatagttttctgtgtagtgagcatccccccgcaataggtacttcggcaagaatggctgaggaaaccggcgtgaatgacagcgagaagttgccactgactggtacaactatgatcaatgttgaaaacgattttgacgaacaataatgatgacgaagaatgatatggataaatagatgtttattgacacacattgccattttgatttccctccttttctgggtgacgaaactgcaagtttagaacgagccagacaagtgggcgttgaaaaaattattgtgccgactgtcagtcaggtatatttccagagggttgctggtttggcggccaagtatcaggcaatctatgccgcgtttggattgcatcctttatatattaatgaacatcatgatacagatctggattgtctggagcagaaattaaaagagaaacttccccattgtgtagccgtgggtgaaattgggcttgatctgtatatggcagagccccagtttgagcggcaaaaaagcgttctggcagctcagctcaagctggccagaaaatatgaattacccgtgctgcttcattcccgaaaaagtcacgatcaactggcggcaatgttacgaaaacatcatgtaccccgcaccggcgttattcatggctttgcgggtagcttatctcaggcacaggcctttgtacgtctgggtttttatattggtgtcgggggaacgataacgtacgaaagagcgaaaaaaacgcgtgataccatagctcgtctgcctctttccgctttagtattggaaacggatgcacctgatatgccattagctggttttcaggggcagccaaaccgacccgaaagaatcgcgcagattttttctgtattgtgtgaattacgtcctgaatctccggatgaaatttcccgccaaatttatcaaaatagcatggcattatttgcgatcagctaatttatcccagtggaaatagtctacttttggttgagcaaaataggctattctggtcgaaataaacattaataatatttaactggcattatcttctcatttcttccttttttaccgcaaaattatctaaaccctgataaatagaatggttatatgtgatgtaagtctcatttcccgtttttatattactttttgctgcattaatttgtgatgtcagttgcttgttcttttttactactgggtataatcgcctccacacacagtgtcagtaggaactcacaatataactgacatatttttcattcattcagtgaacagggattcttccaatgcaactcattatgagcctgatagggatggtagtgctgatttttatcgcagtacttttctcgagtaattataaagctattaaaatccgcactgtccttggtgccttcttgattcaggtgcttattggtgcatttgtgctttatgtaccagcaggtaaagacattctgattggaatgtcaaaaggtgtttccaacgtcatcggatacggtcaggagggaattgattttatctttggcgggctggtatctaacaaaatgtttgagctgttcggcggcggtggttttgtcttcgccctgcgcgttctgccagttattgtcttcttctcttctctgattgccgttttgtattacattggccttatgcagcttatcatcaaaatattaggtggtggcctgcaaaaaatattgggaacatcacgtactgaatccctgtcagcaacagcaaatattttcgttgggcaaactgaagcacctctggttgtacgcccttatatttcaaccatgacacaatcagagctgtttgcggtgatgtgtggtggtctggcatcggtagccggctctgtattggcgggttacgcatcaatgggtgttccactggaatatctgattgcagcttcattcatggcagcgccgggtggcctgttatttgcaaagctgatggtgccggaaactgaaaccactcacgataatgttgatgcgatgtcactggtatcagcagaggaccgtccggccaatattattgatgcggcagcatctggtgcggcatccggtatgcagttggctctgaatgttggtgcaatgctgttggcatttactgcattgattgctttgttgaatggtatgttaggcggtatcggtggttggttcagctatcctcaattgtctatggaattgattctgggctgggtatttgcgccaatcgcttaccttattggtgtgccgtggcatgaagcaaccgtggctggttctttcatcgggcagaaaataatagttaatgaattcgtagcattcatgcactttggcgactatctgaaaccagatgatgtcgtgaaggcagcaggtcttcaggttctttctgatcatactaaagccattatctcttttgctttatgtggatttgcgaatttgtcttctgtcgctgtattgcttgggggcttaggcggcatggctccaaaccgtcgtggtgatattgcccgcttcgggctgaaagctgtattggctggttcactgtctaacctgatgagtgccacaattgctggatttttcctcgcattgtaatcattgaatagtgtattagattgagtaaggtgaagaatgtttaccttactcagattattgacaaagtgctggctccagcactttgtcttaatcaaatatcgtttagttgataaccctttaccatcttaatattcctcttctttcctctttctttatgtagatgaatttttccttaataacgataggatttgctctgatgctatatcgatagcactatcggtgacttggtcatggcagggtaaaaccagcattcgttttactaaatttgtcgcattaggaaaatctatctcatttctgcccgaataccggggtgtcaggtagaactcttttaaaaatggataattgcacacaatcgtatttttatatcgataagtatctgtgtttatacctacagcattcagttgtctggctaactcaattcccgtgagattagtattcgaatgtaaaaatgtgcataacccatagccattatgagatatatcataatgcgaattcatgaaagttaactcagaaccagaacttagattttctctccattgttctgcctttttgttacgttcctgaatcttactctcaataattgataattggtcaatacctacagctgcctgaaatgatgataatttataatttaaaccattcttatgaccaaaacttttggcttctgcgcaaaatcctatatgcgtgaattcttgtatattttttgcgaactgctccgaattagtaaggacaaatccgccttccccagtactgataagtttaaattcatgtgtactaaagcaacctatatcgccaatcgttccttcataaccttgtttcccatgagttcctgctgcttgtgctgcatcttcaataattgttattttatgctttttggcatagtcttttatttctttatttattgcactataaccccacatagcaacggtgataagcgcacgtgtagatgaattagtatgtttttccagagaagcaagttcaggataaaacgagtttctagagcaatcataaaagaccggtataccacccgcttgtaaaacagcagatattgtcattggtacgcaaatcgcaggcactagaacttcatctcctgggtttatgacctgagtaatactggcatgcaaagcagcagttcccgatgataccgcaatcgcatatttaacattaaaaaattcttttaacgatgtctcatattctgttacaacggatgaatcaccagaaagtaaatcagctttatctaaaatacgaaacatattttcgtattgtgtttttgatcttttagctttaaaaatacaatcaatgatctttttatttttcatgtttttttatcctttgatttaaggagttaaatatctagtatcatttgacataaattatgtttagtggttttttcattaataggtgtttttttagaatgatttttatatgtccacttccattatatgatcgctaccctgacgtattttcataaaatcagtactatgttttttgtatccataaatacgaataagccagcgatcttctccgttgaattttgcggtgtcagtgatagagctacggccatgcaaacaaattctattattaataataagtacatcccctggtgctaaggatacatattgaatacattctgagttttttattacatcagtcattgcttcataagcttgttgtgcggatttattatttccttgtattttgctattactatacctgatacctatttctccattctggcagggagataatatagaaatgttttttaactcaatatttttatcgaaggaagattggcttctggcagtgaagtttttcttcattagctcatcaatttctttctgtttgagatttttcattacctcacaaagaggtaataatgtggttggtatattatctgggtttcttaaaccaattaatccaaatgattcgggggaaagtggtgaaccaacaacaggattttcttcttgaaaataaccattcaatacttcggtatgaaaattaagttttttagttgaacggagataacttttttcatcattaattgatggcatgaccatatggcacaaccgacctcccatttcatctaaaaacgatcgagctgtgtgacctgtcaggtgaagtagccctaataatgcagcggcgggaattttccaaccttgttttgttggactaagatcgttgttaggagttggaggataatcagttaaaggtagaaaatttttgatatgtagaaatggaatgttattatctttcgcaaactgcaataattttattaggttatcattattgagattattagagataatattacatgcgagtttttcaagttctaggggagtattttcctgatcatattcgtcagggattttttgtaatgatgaataaatggcatttctttcttgaggtaataatatgatggtgttttcaccattatccttaacatttagcatttttattaatatcctatttagtattccaaatattaaatgcgccaagtttttttgaaaaaatgaatggaaagtgtcataaaatacgataactaaaagagaaatagtcaaaacaatactaaataaaagctcaataactacatgtgcttctacattgttaactgataaatgtctttttaaatcctgtaaataaagctatataaataaatttaaagtgagtagagaatgattttcttgataaaaataaaaaaatgctcttttgcatcactgatctactaatatgtacatcaatttagcaaaatcaatgtgttatcactatgttattttttaacaataagttaccaatattgaaattcctgtagaaatgtggttaacctgagttttgtttagtgttgctgctgttattatccgatgtatgggtttgttacctgtgtgagcaatattaaatttgcttgagtataaacagcattttctattcgaataaattattctggaatactcgtattttggtcagtatattgccggaaaatctgagggagaagatacatttttgtcatggggaaaaattttatctggtaagcaagaatgggttatcgtaaaaatcgaagggaaatccattgatatcaactttaaatctattgttatgtaggttgtttttttacgctactgaacctatttaatgtgatgtttatcacaataaaatgtttgttattgcaatttatattcttttgatgtgataaaagacataaatatttggccatttataggttcaaataataaaatacaatgacttgatcgaaaaatttctgactacaagagtaataaagttggagaaaacattgtgcggagagaaggaactctattgtcgctgcgagatagcgtattgcaacatcttcaaggaaccaagtccgctcaccaacatatgaatacattaataattcggaacagttagcgattaagtgttcggaagaatatgtgaactgattcaataaaaataccgttggagagttttatgaccgatttaaccgcagctgctcagcgtgcgctgagcttgatggatttaactacactcaatgatgatgatactgatgagaaagtgacagcactttgccatcaggcaaacagtccggcagggcatactgcggccatctgtatctatccgcgttttattcccctcgcccgtaaggtactacgtgaacagggaactccggatatccggatcgctactgtgacgaacttccctcatggcaatgatgatattgatatcgccctggcggaaacccgtgcagcaattgcttatggtgcagatgaagtggatgtggttttcccttatcgcgcattgatggcgggtaacgaacaaattggttttgatctggttaaagcctgtaaagaggcctgtgctgaatcaggtgtctggctgaaagtcattattgaaaccggagagctgaaagaggctgctctgatccgcaaagcctctgaaatctcgattaaagcgggtgctgattttattaagacatcaaccggaaaagtgccggttaatgcgacactggaaagtgcagagatcatgctgagtgtcatccgtgatattgacgtgggagagactgtcgggtttaaaccggcgggcggcgtccgcacagcagaagaagctgcgcagtatctggcactggcaggccggatcatgggcgacaaatgggcagattcccgccacttccgttttggcgcttccagtctgctgggtagcttattgacggcgctgggtcatcagggtcaaaaacaaagcagcagttattagtaacagaagttattgaatgcagtagtgatgaaaacagacgtttaagatcaataacaatgccttgaatgttcgttaagatagagctgattcatgactactgttcttctcagacaatgataatgggaggtagctttgtttttggcacaggaaattatccgcaaaaaacgagatggtttttcactgagcgaagaagaaatccgcttctttattaacgctgtgcgtgataatacggtatcagaagggcaaattgcagctctggcgatggccatttatttccgggatatgacgatggaagagcgtattgccttaacattggcggtacgtgattctggtacagtgcttgactggaaaaagctgaatctgcccggcccggtcgtggataaacactcgacgggtggggttggtgatgtaacatccctgatgctggggccgatggttgcagcatgtggtggttatgttccgatgatctcagggcgtggattaggtcataccggagggacgctggataaattagaatccatccccgggtttgatattttccccgatgatcaccgattccgtgacattatccgggatgttggcgttgcaattatcggtcagactaactcactggcaccagcggataaacgtttttatgcaacacgtgatattactgctactgttgattctattccgctgattaccgcttctattctgggcaaaaaactggctgaaggattagacgctttagttatggatgtgaaagtcggttctggtgcatttatgccgacttatgagcagtcagaacagttggcggaatcgattgttgcggtggctaatggtgctggttgtaaaacaacggcgctgttgacagatatgaaccaggtattagcatccagtgccggtaatgcgctggaagtgcgtgaagcggtgcagtttctgacaggagaataccgcaattcccggttatttgaagtaactatggcattatctgctgaaatgttggtatcgggtaaactggcagaagatcgtgatgctgcatatcgtcaattacaggcagtactcgataatggtaaggctgcggaaatattcgggcgtatggtggcagcccagaaagggcctgttgattttattgaaaactatgatcgttatttaccgacagcttctttcagcagacccgtatttgctgaaaataatattattaaaaaacaaagcattgtaactgaaatggatacccgtgcattggggatggcagttgttgcattaggcggtggtcgccgcaaagcgactgatccgattaattacagtgtggggctgagtgatattattgcgcttggctcagaagtaaacacagatactcctctgatggtgattcatgccaataatgaagatgactggcatatggcggcagaggctgtgcgtgcatcgcttgtttttcaacaggcacatacttcggcagcagaagtggatgccggaatgaaagtcgccacccagatggtttatcgtcgtattggtggataattcaacagaagtattgaatagattttaacagctggcagttcccgcattgatagcgtgaattgacacaggagaaaattatgaaacgtacattcatcatggtcttggattcctttggtatcggtgcgagtgcagatgcagaaagatttggtgacaaagggtctaacactttagggcatattgcagaacagtgcgctcgtggtgaagctgatatcggtcgtcagggattgttgaagttaccgaatctgagccgtttgggactgggaaaagcaacggaagaatccagtggaactttcccggttggtttggataaagatgccgaaattatcggtgcctatggttatgcgagtgaactttcttctggtaaagacacaccatcaggtcattgggaaattgccggcgtaccggttttattcgactggggttattttcacgagttagaaaatagcttcccacaggaattattggataaattggttgaacgtgccaacctgccgggttatctgggtaactgccactcttccggtaccgttattctggacaagctgggagaagagcacatgaaaacgggtaaaccgattttctatacctcagcggattccgttttccagattgcttgtcatgaagaaacattcggtctggataaactgtatgaattatgtgaaatcgcccgtgaagagctcactgatggcggttataacatcggccgtgtcattgcccgtccgtttgtcggtgataaagcgggtaacttccagcgtaccggcaaccgccatgacttggctgttgaacccccagctccgactgtgctgaaaaaactcgttgatgagaaacagggtgaagtggtttccattggtaaaattgctgatatctacgcgaatgtcggtatcactaaaaaagtgaaagcgacaggcattgatgcgctgtttgatgcttcattggtagagatggagcaggccggtgacaatacgattgtgttcaccaattttgttgattttgactcatcttacggtcatcgccgtgatgtagccggttatgctgctgcgctggaactgtttgatcgccgtttgccggaaatgctggagcaggtgaaagaagatgacattctgatcctgacggctgaccacggttgtgatccaacctggccgggtacggatcatacccgtgagcatatacctgtactggtttatgggccaaaggtaaaaccgggctcattagggcatcgtgaaacctttgctgacattggtcagacagtggcgaaatatttcgacctgacaccaatggattacggtaaagtgatgttctgattttccgggggagccattggcttccccgatcgctaatatttttttaatacccataccctatggattttgagctgcattgcgtaggcaagtgagtgaatccccgaagcataggtagctatgtgaccgggaggagcgagcacagccaacaaaaaggcagcccgaaaaacgacgggtataatagaaacaaggaatagatttatggccaccccacatattaatgctgagatgggcgattttgctgatgttgttttaatgccaggcgatccactgcgtgcaaaatacattgcagaaacttttctggaagatgtgcgtcaggttaacgatgtgcgcggtatgctcggcttcactggtacttataaaggccgtcgcatttcagttatggggcatggtatgggcattccatcctgttccatttatgccaaagaattgatcaccgaatttggtgtcaaaaagattatccgtattggctcctgtggtgccgtaagcgaagacgttaaaattcgtgacgtagtgattggtatgggtgcttgtaccgactctaaagtcaaccgtctgcgttttaaagatcatgattttgcagcaatcgctgacttcgatttgatccgtaatgcggttgatgcagctaaagcaaaaaacatcaatgcgcgcgttggtaacattttctccgcggatctgttctatactccagacccacaaatgttcgatgtcatggaaaaatacggcattttgggcgttgaaatggaagcggctggcatttacggtgttgcggctgaatttggtgcaaaagcactggcaatttgtactgtttctgaccatattcgtacaggtgaacagactactgctgaagagcgtcagactactttcaatgacatgattgaaatcgctcttgaatctattttgttaggtgacaattaaaaataatgtaatttaattactttattaaaataaaagcccttctctataatgagaagggcttttttattatccaaaagaatatgtttttcagatggttttattaagaattaatctcatttatttgtttgtctgttttcattttatcaatcgctgattttattatgaaaataataaatgaatatttttaacaaaaaacacccattcaactaaagtaataatttaatattataattagcgtgttaattttctaaaatagatgaatattttgcttatattttgtcttttccttttgttttgatattaaaatctgatttttatcattatcttagtttaattgagtatttttttattttaaaaaagacaaaatcgctcaataaagacgcgcaaactaagattctaaactattcgtctttgtgagatgcaattcaggaaaataatctaaatttacatgtttatcagtaaaatatattgctgtctatgcgtggtttttggtaaaaactcatatccgatacgcagttagggatcattgccagttttatccgctgaaatttgacttagggtgctttgtatagaatcataatatcgatttcatttagttgaacagttaagcagtctgtcaaaaaactaaatagcaattatcctaagagccagaaattaatttctgggtttaggacattccctgaatataaatccctactttttaattaaaaggtataaattcgattatgaaactgaataaattggcaatggttttaggtcttggtgtcgctttaactgcaggcgctgcaaatgcaggtggaagtgacgacaacatgaatgatcgtggtttcgttcacttcaaaggttctattattaatccgacttgttcaattaaaaattctcatattgatgttaattttggcgaagttcggacttctaagtttaagtccaatccggacggtcaatccgaacgtataccttttgatattattttagacaaatgttctgatatcacaggaaagaaaatttccacaacgttcacaggtgatacggttgatgctaatggcgatcttttagctattaaaggtaaagctaaaggtgtaggcatccaaattggcgacttaaatgacggtgagaacggaagactggttcgtttcggcacacctacaactggtgtagatgcagttgataaccgcctgcgtttcgatgcaaacctgaaagttattcctggtcagactgtgacaacaggtgacttctatgcattcgcatactttactttgaactacctgtaatagtgaaaactagaggctagtttttaattgctgaatgtcaggaagcccatgtcattttgatttttatttgggcttcctggcataactattgagcctattttaaacatgcactgtgtctaataacggtgtttaaaactgataagaaagcgatttaagtggcttgagaattgaaaagcttcttcagaattaattgaagttgatgttttctcagttacctatattcggaaaatcacacattctgccatacatacggatttggcactatcaggcagtaattaaattcaaattgaattattaacgattcattgcttagaggatgttatggcttggtttatagcttctatgaatcatgatttttcgtctgttaataaagaaacacgcagtaatagaaaaagaatctttaataaaaaccacgtgcttaataaacaaagaatagctaataaaataaatacaaaaccttcgaagcccggtattaagctactttctgccctgatactattttctctgtccggtatccagtttgcttattctaagcccattgaattcaatactgatgcgctggatattaatgaacgctccaatattgatttggagaagttttcccgtgcaggttatatcatgccggggaactatatgatggcagttcgggtgaatcagtctgaattgcaggatatgtatcctattgactttctcgtgccggataatgatccaaaaggcagtgaagcctgtatttcacccgaattagtgaaaagaatcggcctgcaatcaaaatgggccgataaattagtctggcagaataatgaaaaatgccttgatctgaatagcctgccgggaaccttggttaaaggggatttagccacttataccctgtatttagttgttcctaaaatctatctggaatatgaatccccgaattgggatcctccttcccgctgggatgaaggtgtacccggattgttatttgattacaacctttatgcacaggcaactaaaccagatcatggtaatgcgcgccagcaaatcagtgcaaatggtacgacaggcattaatgccggcgcgtggcgtttccgtgcaaactggcagagcagatatgatcacactaataccgggaagaacgattcggatgatacaaatcgctccagttccagaaaacgcagttgggattggaaccgtaactacgcgtatcgcgcacttcccactatggaagctaagctaacgatgggagaaagttctttag

SEQ ID NO: 2537 - DNA, 16958 bp, Xenorhabdus sp.; identical to SEQ ID NO: 2536
  CDS (15176)..(15721)

SEQ ID NO: 2538 - DNA, 16958 bp, Xenorhabdus sp.; identical to SEQ ID NO: 2536
  CDS (13734)..(14450)

SEQ ID NO: 2539 - DNA, 16958 bp, Xenorhabdus sp.; identical to SEQ ID NO: 2536
  CDS (12312)..(13535)

SEQ ID NO: 2540 - DNA, 16958 bp, Xenorhabdus sp.; identical to SEQ ID NO: 2536
  CDS (10867)..(12234)

SEQ ID NO: 2541 - DNA, 16958 bp, Xenorhabdus sp.; identical to SEQ ID NO: 2536
  CDS (9955)..(10734)

SEQ ID NO: 2542 - DNA, 16958 bp, Xenorhabdus sp.; identical to SEQ ID NO: 2536
  CDS (5218)..(6495)

SEQ ID NO: 2543 - DNA, 16958 bp, Xenorhabdus sp.; identical to SEQ ID NO: 2536
  CDS (4124)..(4891)

SEQ ID NO: 2544 - DNA, 16958 bp, Xenorhabdus sp.; identical to SEQ ID NO: 2536
  CDS (2934)..(4091)

SEQ ID NO: 2545 - DNA, 16958 bp, Xenorhabdus sp.; identical to SEQ ID NO: 2536
  CDS (2493)..(2627)

SEQ ID NO: 2546 - DNA, 16958 bp, Xenorhabdus sp.; identical to SEQ ID NO: 2536
  CDS (420)..(2009)

SEQ ID NO: 2547 - DNA, 12757 bp, Xenorhabdus sp.
  CDS (17)..(1009)
tgtgccctaaagtcttatgctggtaaaaaccagcgtcttcggtgtgaaagtattactgatattccggcgacttaactatttgcactttcacaagataaaaaaaataaaaaaactttttagtcactttctggataaaaatgggcgtgctgaagctatcttattcccattcactgctaacccttggttaaaggtatggagtgttgcaccgaaaaagccgatttccagtattgaagttacccacccgtataactatccattttctgataatatccctgttcaaatatctcaactcattaaacagataacccatgataatccgagtctcacgcctatattttcccatcttcaatacgcagtgatgctaggttattttttagctgccggaaatgatatctggggctggagcaaaaatttactgttatatgttaagccaacaacattacgtgttactgcaaatggttatgctatattaaccagccgtagtaatattcaaaaagttctccatctcttttattcccagtggcaatccttaatgcaggaataccagaatcagggtaaattccctgtcaacggaccaattgagatccgggttacagcactggatgaaccttctgacgtcgtgcaggaaaatgctgtagtaccgagtctatctgctattcgcccgcgtcaggatcgtccggagtgggatgtcgccatttggctcgatgtgttaacccatccagacacccaatatgctgctgaattttatagcaggcttgaagcatggatgtttaaagaatttgatgacacttacgcgtctattcgtgttgaatggagtaaaggctggggatacagcacaaagggtgcatgggctaatgaggatatactgacccaaaaaatcccggcctcatttacggatggattacctgctgataataattggcattcggcaattaataccttacagaaatttgatccgcataatctgttcagatcgccattattagagaagttaatttcttccaaataaaagcgaatactctatattagttatctatatatatctcacgggatgaataattcagcccgtttaagaatcttttctgatttggatggcaattatcgggctgagtttctttaaaatgcgcaataaaaatacgaattatcaatattccttgatacactaccgcttgtattcaaaacaataacctccgccctatcgctcttaaatgcagggtatattacctttgaggaattttatgtctttgtatcaagataatcaggcactttcccaacttactctcggcaaaccaacttcatactgtgatacgtatgaacctgcattactacaggccgttcctcgcagtatgaaccgtgagccacttggactgtatcctgataatctaccgttttacggcgcagacatctggacaatgtacgaactgtcatggctcaattcgcgtggtgttcctcaggttgccattgggcatgttagtctgaacgctgccagtgaaaatcttatcgagtcaaaaagtttcaagctctatctgaatagctttaaccaaacccgcttcgctgattgggagaccgtccagcaaacgctgcaacgggatttgtctgcctgtgccaacggtgaaattgacgttgttttatatcctctgcatgatttcaatcaacagccaattgccgattttgaaggtaaatgtattgataatcaggatattgaaattgatgattatcaattcaatcgcgattatcttaatggggcagcgacagggcctgttgttgatgaagttttggtcagtcatctattaaaatcaaattgtctgatcacaaaccagcctgattggggttcagtacaaattcgctataaaggcccgaaaatcgatcaggaaaaattattgcgttatctggtttctttccgtcatcacaatgagttccacgagcaatgtgttgaacgtattttcaatgatttaatgcagttatgtgcgccggaaaaactcactgtttatgcgcgttatacccgcaggggtggcttggatatcaatccgtggcgcagtaatgacgcatttgtgccgccaatcggcaggctagcccgtcagtaatcgctgaatccacaccgatggcatacccccgtatgccatccggcaacctaacgggctgacttaaaccagatacattcaattatacacaatggatttcaagatgcgtcacggcggcaagcgagtaacaaattcgtcgggaacgaatttgcccagccaaaagctggcctccggtgagaggcaggagcctctcagtaatccccgggagcatggataaccgtatgtttataaaaacggtgaccggggtgaacgagcgcagccaacaaagaggcaacttgaaagacgaagtgtatagtccctacaaatttcaggtagaaccattatgagaaaccccctattggggtataaaggagtcattcttgattacacatgtcagcccgttagggtcaatggatttactctctcagcttgaggtggatacccttaaacgcacagcaagcagtgatctgtaccgccttttccgcaattgctcactcgccgtgctcaattctggcagccagactgataacagcaaagaactactctcgaagcataaagattttgatattaacgtcctgcgcagagagcggggagttaagctggagctggtcaatccaccggaagaagcgtttgttgatggcaaaattatccgttctctgcgggcaaatttattcgcagtattgcgggatattctgtttgttcatgcgcagattaccgatgcccaaaaagccgactctctgaatctgaaaaatggtatgcatattaccaataccgttttttccatcctgcgcaatgccaaagcgctgcatcttgctgaaaacccgaatatgatcgtctgttggggcgggcattctatcaatgagcaagaatatctgtatgcccgtaaagtcggtaatgagcttggtttacgggagctgaatatttgtaccggctgcggagcgggcgcaatggaagcaccgatgaaaggtgcagcggtcggtcatgcgcaacagcgctataagaatagccgttttattggtattacagagccttccattattgcagctgagccacctaacccactggttaatgaactgatcatcatgccagatatcgaaaaacggctggaagcctttgttcgtattgctcacggtattatcatcttccccggaggtgtgggaacagcagaagagctgctttatctgctggggatcctgatgcaccctgaaaatgagaatcaggtattgcctctggtcttaaccgggccaaaagagagtgctgattattttcatgttctggatgaatttattgtcaacactctgggtgaacaggctcgccgccactaccagattattgtggatgatccattagaagtggcccgagtgatgaagactgcaatgccactggtcaaggaaaatcgccgctcaaccggtgatgcttacagttttaactgggcaataaaaatccctcatgatttgcagtatccctttgaccctaaccatgaaaacatggcgaatctggatttacatctggatcagtcaacggaaaaactggcagcagcactgagacgggtattttctggtatcgtggcgggtaatgtgaaagagttcggcattcaggctatcgaaaaacacggggtgttcgagattcacggtgacgcagaaattatgcgccggatggatagcctgctggaagattttgtgaagcagaatcgcatgaaacttccgggtggcacagcttatgagccatgttataaaatcatcagataaataatggcagattacctgcctcatcaaaacccagtgaggcagtcgccagggaataagtccacggatggaataagaaactatgatacaccttttgattgtagacgccctgaatttgctccgacgtatccatgctgtgcagggaacgccttgcgttgccgcctgtgagcatgcgttgaagcaattaatctctcactcttctccaacccatgccgtagcggtatttgacgaagatgatcgctaccatagctggcgccatcagttacttcccaattacaaagccgggcgttcggctatgccggaagatttacagcaggaaatgccgctgattaaacaggcattcaatgcgctgggtgtggccagctggcatgctgaagggcatgaagcagacgatttagccgcaacgctggcaaccaaagttgctactacagggcatcgggttaccattgtttcgacggataaaggctattgccagctactttctccgaatatccaaatccgtgattatttccagaaacgctggctggatctgccttttgtacagcaggagtttggcgtttctcctgcccaattacccgattactgggggctggcggggatcagcagcagcaaaattccgggagttcagggcattggtcccaaaacagccgttactttgctgcaacaggctggttcgttagataacctcttccgggatctggaaactcagccggataaatggcgtaataaattggcgtctgacaaagaaatggcctatatctgccgtgaagttgcttcgttaaaaaccgatttatccctgcatggtaacttgcaacaactccggctgaaccgtctctgaatcaaactcgtgtaacggattcaaccaaaataatgagaaagcagctgaatatgttcgctatttagctgccctgattcattcaataagccaatccaggatttcatataatcatattttgcctgagaaagctcacgacgggcggtatagagttgctgctctgcattcagtacatccacatttacccgctgtcccaacaggacgcttttttccgttgcatgcacctgcaattcagcggcttttaccgcctcttcataagcacgtatccgcttctgcccattaacacacccgttataatggcgacgcagtgcattgaggatttccccagcctgcgcatccatttcatactttgtcttatcataattagccgccgactgacgctcagatgccaatgttccattgccgttatagagattcatggaaacacgaacgccaatagaatctgtacgatatttctgattgatggtgttgtcagtaccggatttattttcactatgagaagcgtataactccagtttcggcaaataacctgcctgactacgtttaatttcctgatatgccacatcaattttctggcgagcgaccgctaattgaggattttggcgcaatgcagcctgttcccaatcggcataaccttcaaacatcagatttattgtattgaaatgctcaacattcgataaacgcgtcacagggatatctgccggtaatggcgttcctactaacaactgcaagtcacgaattgccgcatccagctcatcccgcacagtcaactcatccgcctgaacctgactgtaacgggcctgagtttccgctatatccgtgcgagttccttcaccggaaatgaataatttctgattcatttccaactgtttttcataggccatacgccgctgcacaatctgcgccagcctgtcctgctcatacgcgacagcaacatagctattcacgactctgacagccagttgctgactgtcagcccgaaaacgggcatcactcatcagcgcataagccttacgggtctgatagcgtgaccaggcttcgatatcaaacaatggctgagtcaggagcaatacgccgctgtagctgtcatactgccgatcaaaacgctctttaacctgatgaccccttttattcgtagagctggattccatctgctgccagttctttggagcattctgatagctaatggataacttaggtaataactctgcccgaccgagcgctttttcttcctgcccggcttcctgctcttttatcgcggcctgaaacgttggatcatgatgtaacgccagagcataagcctccgtcagggaaagtgccctgaccggagctgaatgtaatattgcgggagcagtgattaaaaataacgacaggagcacagaacgtttccttgtatttttccctgtagtttgatgatgcctgaacatttccactactcctcgatcagcgatgttgatgctctatctaccagcggcttgaataaataactcagcagtgagcgtgaccctgttttgacaaaaacttcaaccggcattccgggtttgatatgtaaatccgtcagcttcgccatgccttctggtgtcacccgtattcggatttggtaataggattctcgggtcacatcatccactaaacggtcggcggaaataaccaacaatttcccggccactttaggtgtgcggttctggtttaacgccgtgaacatcagatcaacgttctgaccgatctcaactttatcaatcagatgtaccatcagacgcgcttcaacttccagtgcactctgttcaggcaggatttccatcagtttttccccagatgcaacaacgcctccctgagtaaaaaccttcagtccgactaccgttccctcaacaggagccgcaatcgaggtatgggataaatcaaactgcgcggtttccagtttattgtgcagttcattggcctgaacctgtacatcagcaagctggctacgaacttcgcgctgataatccgcctgtcgctgaataatccgctgttgcgtttcctgctgctgtttttcaagcagcccgatccgtccaaccatctcagccatactgccgcttaactcaatctgattgcgctgtagttccagataacggttacggggaaaatagccctcttctgtcaatgggcgcaggtttgtgatttgttctttaagtgaagccttctgctgctgtttatttgccattgcctcccgcaatcctttgatctgaacaatcacgccttcttctgactgcttcatgccggccagatcacttttcagcatctcccgccgggaaagaaaaagctgtttctgtaacgccagaatattgtcaatccgtggttctgaagacttggcctgtaaagactctggaaaaatcagttcatctgcaccttgctgttcagctagtaaacgcgcttccgttgccagcatggtatgccactgctgtttcagagaatcaatctgggcattaacctgaacctgactgagctgaatcaatatctgtcctgctctgacatgttctccttctgccactaaaatctgcctgatgatgccattagtcggggattgaacagtcttacggttaccgtccaccacgaccatgccggaagaagcgacacccttatcgagcggagcaaatgctgcccatattagaaaccccagaatgccaataccaataaccagccagcccaattgcagataacggcttgcatccagcggcagtaatgcggattcattatgttgagtctgttttatgttggtctgttcggacattttagctcccagacaaattcatattactggcaggtttcgcctgtacaggtgttgtctgtactgatgctgactgtgccaatgccgccataacctgctgagatgggccaaatagtttcgtttttccctgtactaacaacaaaactttatttgtttgggagagcaacgccggacgatgggtaatcaccactaccgtttttccctgttgacgtaattggttaatcgcccggctcagtgctttttccccgatatcatccagattggaattaggttcatccaacacaatcaacgatggattaccataaagcgcccgagccaacccgatccgctgtttctgcccgccggataatcccatacctcctgcaccaatcggcgtgtcataaccctgttcaagattgagcaccaagtcatgtacaccagccttctctgccgcttcgatgactttttccgcatcaatatcattaaaacgggcaatattctccgcaatggttccggcaaataattcaatatcctgtggtaaatagccgatgtgagaacccagctcatccttgttccactggtaaatatccgcaccatcaagccgcaccacaccttcctgagcttgccagacaccaaccagcaaacgtgccagagtggattttcctgatgcgctgggcccaataacaccgaggatatccccggcttcaagggaaaaattgatgtcctgcaaaacaggcttattcttttcagtagatttagcggctttaatttttccgggcggagaagcaaacactttttctaacaacagcgttccgttaggagcaggtaacgtcattccgcttttccgctcaggctgtgctttcagcaaattatccagcctctgccatgacagacgggcagcattccagcttttccatgcctgtattaactgttcaatcggggatagcgcccgccccatcaggattgagccggcaatcatcattccgggcgtgatattgccttcaattgccagccagcctcctaaaccaaggatcaaggactgtagtgccatacgcactgttttagtgatagctgtaatcgatgcagatctttcactggcgatacgctgaaagttaaggaaacgctcatgcaggccaaaccagcgccggcgtaacgccggtaacatgcctaatgcttcaataacttccgcgttacgtaaattggtgctggcaaggttggccgagcgcagggaaaggtgactggcctgtgccagaggagaatgagataaccactgattcagaacagccagcgcaatcaggataagcgccccaaccagtgccagtaatcctaaataggggctgaacaggaaaataacgcccagataaaccggaaaccagggcgcatcaaaaaaagcaaacagtgcgcttcccgtcaggaactggcgaatggtcgataagtcattcagcatttgtcccgcatctgtcgagccattttttagattagattcatacgatgcggtatatacgcgctgattcaggcacatatcaaactgactgccgatacggataacaacctgactccgaatatattccagtccaccgatgatggcgtacatacccagcgtaatcagcgttaacatcagcaaagtcattgtgttactggacggtaggactcgatcatatatctgaagcatataaatggagggaaccagcatcagtaagttaataaatgctgtaaataaaccgattgtccagaatactttgctgcgtgcacggataatatccgtcatttcaccttttgaatggcgtaatttcacagaaatcccttcattatcagaagactttattatcagaaaaaagtcgcttatttatgttcttatctttatcttgttttcactatccccagcaggtttcagtttcctgaaaaacactttactgaaaagcactggggatattgttttcttaattttgtttattctttactttttaatgtcataaccagctctcggccatcgacaagataagcaacccactcttcagaaccatgactaaaaaaagccagaccataacccattgcatccgtcagagtgataccatcaggtgttgctcgccagcctgtcaccgggtttcctatcatttttgtcagacagtcatcgcttttcagcgcccagatagaaccttccggcaaacgcacatctgtcagttcgatactgcatacctgatgtttatccgtaacctgccagatgcctgtcagttcagttggttcagggagattcaaactacttgccatacatcctccaatgaaaaataaagataccgttatcgatagagtgaaaaacttcaataaattagacagtctattgatattgaaggaaaccagatgttgttgtatcacagctcaccctataaatggctgctgcctcaaaagagacagcagcctatccgattaaacgatgaaatccatttcaggcgatggctgaccaataattttcaccagaaaatcatttccagctaattctcctccgagactgatagacatatctgttacatctgttaactcgttataattcagtaaaacttcacctgctttacctgagaatgagttaacaaacttgagatcacctttgcttccgaagttaaattgcgacaggtcgattttgtcttcacctgagacaaaatcgtggatccagtccggattacttttcagtgattccttgccatccagatagacaaaagtatccttgcctgaaccgccccaaagatgatcagcgcccagaccgccataaatgacatcattgcctgcaccacctttcaggatattatctgcgctgttgccgacgatgatgtcgtcaccactgccaccaatcgcattctcaataaccacgccacgagcaatcgaaacattacctttcaggccgcccacatcagagaacgcgccttcattcagattaatacgctgattctgggtaaaaccggagaaatcaaatgtatcttctccgcccgcatcccagacgctgaatagcagttcgctgttagcatctgttgctgtcataaaatcgcggtcggtattggagttgaagccatatacggtatcacctttacgggtttccatattggcgccgtacagagcctgaatagcagtaatatcattcaataatggcgctgatgagtaattcccctgaaaatcctgaccggtgaatttttcactgaaataactcattacggtataagcgcggctatcttcgaaatattgaccgacattgggataagttggccttacagcatcagaagcatcataatcagcaggatgttccagacctaaagtatgcccgatttcatgaacaaacgtctgtcgcccgtagccatttacaccgatatcattcgttttgaaagtatggttttgcgcgttgtaccaagaatacgttgtattttgtcctcttggtaaagtggcaaaagcataatcgccactcgcactataatcaaagaaaccaaaagtgatattggcatcggaaagtttgctgacttccgtaaattttatattggcaacatcagaccaggattgtaatgaaagtttggctgcttctttttgttccgaattaaaagcctggaagtctgaaatatcaaacctcggcataatagacggtgctgtttttaaaaaatgataagttaattctaatgtgccggaagatccgactttattattcccccagtggaagttagtccgcaaaagctcatcaggagccttatcccctaaaggcttatgaataacgcggatatttagatcagagtttggaacgtaggctgataatagtgatgtcacatcctgtacagagtgagagttagagtcggacaaccccgtataggtatattttttctttgaggtcatataaatctcctgtaaaaaaagactcatagtttatgctccgcaatttcaataatagcgggtatataagtttattattcttcctaagcaagttattagaagcaaaactcttggataaaataacgtcagtttccggctgtgtaaaaatgattgttacatcattttaagttatacattaaacatatttaatttccatgtctaattattaatttgaaaataaacgattgcgttaacaaaaaagaatctttctttatttattagaaaatacatctttgtatatatgaaattaattcaaataaagagttaacttaggtgaaatttcttgtggttttaaatttagaacaaagaaaaataaaaaatgccccggttatgtaaaaaatcaaataaccggggcattttcagattatttaagaggtaactaccggaaaataggacgtgttcaatcaaaaatcacgatacattgcataagcagaccaaatacgacgaacgtgtaccgtgatttcttcacgatcatgatataagtgttttgcctgaatctgggcattaaccccactttctttcaattgaatctcaattttttccagaatatgagccacttcttcataacgttttttcatcggcaatttaaggttgaaaattgcttcacggcaccagcttttcgccagccagtcagtcataagctgggcaactttcgctggtttctccaccatatcgcagactaaccaataaatattttttaccgatggttcaaacttgaagccatccacacgatggtgtttaacctgaccggtatccatcaggctttcagccattggcccgttatctacggcatgaacgatcatgctgcgtttcactagctggtaagtccagcctcccggacaggctcccaagtccacagcatacaaaccactatcaagacgctcttcccattcgtcataagggataaacatatggaaagcttcttccagtttcagcgtcgagcggcttggtgcgtctgacgggaatttcaggcgcgggatacccatgtaaaaacgcgagttattattactgtaagaataccccacataacaacatccgggggcaatgaaaaaaacatgaatgaccggacgaccaggattttcttttgccagcagaagcttttcctgtcgcatcgcattacgcaaaggaaccgtaaacttacggcaaaatttcatcaattccttactttcattggtatccggtacttctacgcgcaattcgccagcacgttcaataacaccgctcagcatgccaatgataggcgtgatacgatcttcctgaggtaaatctttcagcaactcccccacaaccagcatctggcgggcaaaaatgaactcacggaatggaatttcacggatcaggcgatcggcatcatcatgctgataacactcgaacagcacataaccactgttttctttcactcgggcaaaaccgtagatttctttctgcccggctttatgcgtaatttctgccgcgcactctttttcgaacc

SEQ ID NO: 2548 - DNA, 12757 bp, Xenorhabdus sp.; identical to SEQ ID NO: 2547
  CDS (1239)..(2084)

SEQ ID NO: 2549 - DNA, 12757 bp, Xenorhabdus sp.; identical to SEQ ID NO: 2547
  CDS (2441)..(3808)

SEQ ID NO: 2550 - DNA, 12757 bp, Xenorhabdus sp.; identical to SEQ ID NO: 2547
  CDS (3891)..(4643)

SEQ ID NO: 2551 - DNA, 12757 bp, Xenorhabdus sp.
  CDS (6784)..(8094)
ggttcgaaaaagagtgcgcggcagaaattacgcataaagccgggcagaaagaaatctacggttttgcccgagtgaaagaaaacagtggttatgtgctgttcgagtgttatcagcatgatgatgccgatcgcctgatccgtgaaattccattccgtgagttcatttttgcccgccagatgctggttgtgggggagttgctgaaagatttacctcaggaagatcgtatcacgcctatcattggcatgctgagcggtgttattgaacgtgctggcgaattgcgcgtagaagtaccggataccaatgaaagtaaggaattgatgaaattttgccgtaagtttacggttcctttgcgtaatgcgatgcgacaggaaaagcttctgctggcaaaagaaaatcctggtcgtccggtcattcatgtttttttcattgcccccggatgttgttatgtggggtattcttacagtaataataactcgcgtttttacatgggtatcccgcgcctgaaattcccgtcagacgcaccaagccgctcgacgctgaaactggaagaagctttccatatgtttatcccttatgacgaatgggaagagcgtcttgatagtggtttgtatgctgtggacttgggagcctgtccgggaggctggacttaccagctagtgaaacgcagcatgatcgttcatgccgtagataacgggccaatggctgaaagcctgatggataccggtcaggttaaacaccatcgtgtggatggcttcaagtttgaaccatcggtaaaaaatatttattggttagtctgcgatatggtggagaaaccagcgaaagttgcccagcttatgactgactggctggcgaaaagctggtgccgtgaagcaattttcaaccttaaattgccgatgaaaaaacgttatgaagaagtggctcatattctggaaaaaattgagattcaattgaaagaaagtggggttaatgcccagattcaggcaaaacacttatatcatgatcgtgaagaaatcacggtacacgttcgtcgtatttggtctgcttatgcaatgtatcgtgatttttgattgaacacgtcctattttccggtagttacctcttaaataatctgaaaatgccccggttatttgattttttacataaccggggcattttttatttttctttgttctaaatttaaaaccacaagaaatttcacctaagttaactctttatttgaattaatttcatatatacaaagatgtattttctaataaataaagaaagattcttttttgttaacgcaatcgtttattttcaaattaataattagacatggaaattaaatatgtttaatgtataacttaaaatgatgtaacaatcatttttacacagccggaaactgacgttattttatccaagagttttgcttctaataacttgcttaggaagaataataaacttatatacccgctattattgaaattgcggagcataaactatgagtctttttttacaggagatttatatgacctcaaagaaaaaatatacctatacggggttgtccgactctaactctcactctgtacaggatgtgacatcactattatcagcctacgttccaaactctgatctaaatatccgcgttattcataagcctttaggggataaggctcctgatgagcttttgcggactaacttccactgggggaataataaagtcggatcttccggcacattagaattaacttatcattttttaaaaacagcaccgtctattatgccgaggtttgatatttcagacttccaggcttttaattcggaacaaaaagaagcagccaaactttcattacaatcctggtctgatgttgccaatataaaatttacggaagtcagcaaactttccgatgccaatatcacttttggtttctttgattatagtgcgagtggcgattatgcttttgccactttaccaagaggacaaaatacaacgtattcttggtacaacgcgcaaaaccatactttcaaaacgaatgatatcggtgtaaatggctacgggcgacagacgtttgttcatgaaatcgggcatactttaggtctggaacatcctgctgattatgatgcttctgatgctgtaaggccaacttatcccaatgtcggtcaatatttcgaagatagccgcgcttataccgtaatgagttatttcagtgaaaaattcaccggtcaggattttcaggggaattactcatcagcgccattattgaatgatattactgctattcaggctctgtacggcgccaatatggaaacccgtaaaggtgataccgtatatggcttcaactccaataccgaccgcgattttatgacagcaacagatgctaacagcgaactgctattcagcgtctgggatgcgggcggagaagatacatttgatttctccggttttacccagaatcagcgtattaatctgaatgaaggcgcgttctctgatgtgggcggcctgaaaggtaatgtttcgattgctcgtggcgtggttattgagaatgcgattggtggcagtggtgacgacatcatcgtcggcaacagcgcagataatatcctgaaaggtggtgcaggcaatgatgtcatttatggcggtctgggcgctgatcatctttggggcggttcaggcaaggatacttttgtctatctggatggcaaggaatcactgaaaagtaatccggactggatccacgattttgtctcaggtgaagacaaaatcgacctgtcgcaatttaacttcggaagcaaaggtgatctcaagtttgttaactcattctcaggtaaagcaggtgaagttttactgaattataacgagttaacagatgtaacagatatgtctatcagtctcggaggagaattagctggaaatgattttctggtgaaaattattggtcagccatcgcctgaaatggatttcatcgtttaatcggataggctgctgtctcttttgaggcagcagccatttatagggtgagctgtgatacaacaacatctggtttccttcaatatcaatagactgtctaatttattgaagtttttcactctatcgataacggtatctttatttttcattggaggatgtatggcaagtagtttgaatctccctgaaccaactgaactgacaggcatctggcaggttacggataaacatcaggtatgcagtatcgaactgacagatgtgcgtttgccggaaggttctatctgggcgctgaaaagcgatgactgtctgacaaaaatgataggaaacccggtgacaggctggcgagcaacacctgatggtatcactctgacggatgcaatgggttatggtctggctttttttagtcatggttctgaagagtgggttgcttatcttgtcgatggccgagagctggttatgacattaaaaagtaaagaataaacaaaattaagaaaacaatatccccagtgcttttcagtaaagtgtttttcaggaaactgaaacctgctggggatagtgaaaacaagataaagataagaacataaataagcgacttttttctgataataaagtcttctgataatgaagggatttctgtgaaattacgccattcaaaaggtgaaatgacggatattatccgtgcacgcagcaaagtattctggacaatcggtttatttacagcatttattaacttactgatgctggttccctccatttatatgcttcagatatatgatcgagtcctaccgtccagtaacacaatgactttgctgatgttaacgctgattacgctgggtatgtacgccatcatcggtggactggaatatattcggagtcaggttgttatccgtatcggcagtcagtttgatatgtgcctgaatcagcgcgtatataccgcatcgtatgaatctaatctaaaaaatggctcgacagatgcgggacaaatgctgaatgacttatcgaccattcgccagttcctgacgggaagcgcactgtttgctttttttgatgcgccctggtttccggtttatctgggcgttattttcctgttcagcccctatttaggattactggcactggttggggcgcttatcctgattgcgctggctgttctgaatcagtggttatctcattctcctctggcacaggccagtcacctttccctgcgctcggccaaccttgccagcaccaatttacgtaacgcggaagttattgaagcattaggcatgttaccggcgttacgccggcgctggtttggcctgcatgagcgtttccttaactttcagcgtatcgccagtgaaagatctgcatcgattacagctatcactaaaacagtgcgtatggcactacagtccttgatccttggtttaggaggctggctggcaattgaaggcaatatcacgcccggaatgatgattgccggctcaatcctgatggggcgggcgctatccccgattgaacagttaatacaggcatggaaaagctggaatgctgcccgtctgtcatggcagaggctggataatttgctgaaagcacagcctgagcggaaaagcggaatgacgttacctgctcctaacggaacgctgttgttagaaaaagtgtttgcttctccgcccggaaaaattaaagccgctaaatctactgaaaagaataagcctgttttgcaggacatcaatttttcccttgaagccggggatatcctcggtgttattgggcccagcgcatcaggaaaatccactctggcacgtttgctggttggtgtctggcaagctcaggaaggtgtggtgcggcttgatggtgcggatatttaccagtggaacaaggatgagctgggttctcacatcggctatttaccacaggatattgaattatttgccggaaccattgcggagaatattgcccgttttaatgatattgatgcggaaaaagtcatcgaagcggcagagaaggctggtgtacatgacttggtgctcaatcttgaacagggttatgacacgccgattggtgcaggaggtatgggattatccggcgggcagaaacagcggatcgggttggctcgggcgctttatggtaatccatcgttgattgtgttggatgaacctaattccaatctggatgatatcggggaaaaagcactgagccgggcgattaaccaattacgtcaacagggaaaaacggtagtggtgattacccatcgtccggcgttgctctcccaaacaaataaagttttgttgttagtacagggaaaaacgaaactatttggcccatctcagcaggttatggcggcattggcacagtcagcatcagtacagacaacacctgtacaggcgaaacctgccagtaatatgaatttgtctgggagctaaaatgtccgaacagaccaacataaaacagactcaacataatgaatccgcattactgccgctggatgcaagccgttatctgcaattgggctggctggttattggtattggcattctggggtttctaatatgggcagcatttgctccgctcgataagggtgtcgcttcttccggcatggtcgtggtggacggtaaccgtaagactgttcaatccccgactaatggcatcatcaggcagattttagtggcagaaggagaacatgtcagagcaggacagatattgattcagctcagtcaggttcaggttaatgcccagattgattctctgaaacagcagtggcataccatgctggcaacggaagcgcgtttactagctgaacagcaaggtgcagatgaactgatttttccagagtctttacaggccaagtcttcagaaccacggattgacaatattctggcgttacagaaacagctttttctttcccggcgggagatgctgaaaagtgatctggccggcatgaagcagtcagaagaaggcgtgattgttcagatcaaaggattgcgggaggcaatggcaaataaacagcagcagaaggcttcacttaaagaacaaatcacaaacctgcgcccattgacagaagagggctattttccccgtaaccgttatctggaactacagcgcaatcagattgagttaagcggcagtatggctgagatggttggacggatcgggctgcttgaaaaacagcagcaggaaacgcaacagcggattattcagcgacaggcggattatcagcgcgaagttcgtagccagcttgctgatgtacaggttcaggccaatgaactgcacaataaactggaaaccgcgcagtttgatttatcccatacctcgattgcggctcctgttgagggaacggtagtcggactgaaggtttttactcagggaggcgttgttgcatctggggaaaaactgatggaaatcctgcctgaacagagtgcactggaagttgaagcgcgtctgatggtacatctgattgataaagttgagatcggtcagaacgttgatctgatgttcacggcgttaaaccagaaccgcacacctaaagtggccgggaaattgttggttatttccgccgaccgtttagtggatgatgtgacccgagaatcctattaccaaatccgaatacgggtgacaccagaaggcatggcgaagctgacggatttacatatcaaacccggaatgccggttgaagtttttgtcaaaacagggtcacgctcactgctgagttatttattcaagccgctggtagatagagcatcaacatcgctgatcgaggagtagtggaaatgttcaggcatcatcaaactacagggaaaaatacaaggaaacgttctgtgctcctgtcgttatttttaatcactgctcccgcaatattacattcagctccggtcagggcactttccctgacggaggcttatgctctggcgttacatcatgatccaacgtttcaggccgcgataaaagagcaggaagccgggcaggaagaaaaagcgctcggtcgggcagagttattacctaagttatccattagctatcagaatgctccaaagaactggcagcagatggaatccagctctacgaataaaaggggtcatcaggttaaagagcgttttgatcggcagtatgacagctacagcggcgtattgctcctgactcagccattgtttgatatcgaagcctggtcacgctatcagacccgtaaggcttatgcgctgatgagtgatgcccgttttcgggctgacagtcagcaactggctgtcagagtcgtgaatagctatgttgctgtcgcgtatgagcaggacaggctggcgcagattgtgcagcggcgtatggcctatgaaaaacagttggaaatgaatcagaaattattcatttccggtgaaggaactcgcacggatatagcggaaactcaggcccgttacagtcaggttcaggcggatgagttgactgtgcgggatgagctggatgcggcaattcgtgacttgcagttgttagtaggaacgccattaccggcagatatccctgtgacgcgtttatcgaatgttgagcatttcaatacaataaatctgatgtttgaaggttatgccgattgggaacaggctgcattgcgccaaaatcctcaattagcggtcgctcgccagaaaattgatgtggcatatcaggaaattaaacgtagtcaggcaggttatttgccgaaactggagttatacgcttctcatagtgaaaataaatccggtactgacaacaccatcaatcagaaatatcgtacagattctattggcgttcgtgtttccatgaatctctataacggcaatggaacattggcatctgagcgtcagtcggcggctaattatgataagacaaagtatgaaatggatgcgcaggctggggaaatcctcaatgcactgcgtcgccattataacgggtgtgttaatgggcagaagcggatacgtgcttatgaagaggcggtaaaagccgctgaattgcaggtgcatgcaacggaaaaaagcgtcctgttgggacagcgggtaaatgtggatgtactgaatgcagagcagcaactctataccgcccgtcgtgagctttctcaggcaaaatatgattatatgaaatcctggattggcttattgaatgaatcagggcagctaaatagcgaacatattcagctgctttctcattattttggttgaatccgttacacgagtttgattcagagacggttcagccggagttgttgcaagttaccatgcagggataaatcggtttttaacgaagcaacttcacggcagatataggccatttctttgtcagacgccaatttattacgccatttatccggctgagtttccagatcccggaagaggttatctaacgaaccagcctgttgcagcaaagtaacggctgttttgggaccaatgccctgaactcccggaattttgctgctgctgatccccgccagcccccagtaatcgggtaattgggcaggagaaacgccaaactcctgctgtacaaaaggcagatccagccagcgtttctggaaataatcacggatttggatattcggagaaagtagctggcaatagcctttatccgtcgaaacaatggtaacccgatgccctgtagtagcaactttggttgccagcgttgcggctaaatcgtctgcttcatgcccttcagcatgccagctggccacacccagcgcattgaatgcctgtttaatcagcggcatttcctgctgtaaatcttccggcatagccgaacgcccggctttgtaattgggaagtaactgatggcgccagctatggtagcgatcatcttcgtcaaataccgctacggcatgggttggagaagagtgagagattaattgcttcaacgcatgctcacaggcggcaacgcaaggcgttccctgcacagcatggatacgtcggagcaaattcagggcgtctacaatcaaaaggtgtatcatagtttcttattccatccgtggacttattccctggcgactgcctcactgggttttgatgaggcaggtaatctgccattatttatctgatgattttataacatggctcataagctgtgccacccggaagtttcatgcgattctgcttcacaaaatcttccagcaggctatccatccggcgcataatttctgcgtcaccgtgaatctcgaacaccccgtgtttttcgatagcctgaatgccgaactctttcacattacccgccacgataccagaaaatacccgtctcagtgctgctgccagtttttccgttgactgatccagatgtaaatccagattcgccatgttttcatggttagggtcaaagggatactgcaaatcatgagggatttttattgcccagttaaaactgtaagcatcaccggttgagcggcgattttccttgaccagtggcattgcagtcttcatcactcgggccacttctaatggatcatccacaataatctggtagtggcggcgagcctgttcacccagagtgttgacaataaattcatccagaacatgaaaataatcagcactctcttttggcccggttaagaccagaggcaatacctgattctcattttcagggtgcatcaggatccccagcagataaagcagctcttctgctgttcccacacctccggggaagatgataataccgtgagcaatacgaacaaaggcttccagccgtttttcgatatctggcatgatgatcagttcattaaccagtgggttaggtggctcagctgcaataatggaaggctctgtaataccaataaaacggctattcttatagcgctgttgcgcatgaccgaccgctgcacctttcatcggtgcttccattgcgcccgctccgcagccggtacaaatattcagctcccgtaaaccaagctcattaccgactttacgggcatacagatattcttgctcattgatagaatgcccgccccaacagacgatcatattcgggttttcagcaagatgcagcgctttggcattgcgcaggatggaaaaaacggtattggtaatatgcataccatttttcagattcagagagtcggctttttgggcatcggtaatctgcgcatgaacaaacagaatatcccgcaatactgcgaataaatttgcccgcagagaacggataattttgccatcaacaaacgcttcttccggtggattgaccagctccagcttaactccccgctctctgcgcaggacgttaatatcaaaatctttatgcttcgagagtagttctttgctgttatcagtctggctgccagaattgagcacggcgagtgagcaattgcggaaaaggcggtacagatcactgcttgctgtgcgtttaagggtatccacctcaagctgagagagtaaatccattgaccctaacgggctgacatgtgtaatcaagaatgactcctttataccccaatagggggtttctcataatggttctacctgaaatttgtagggactatacacttcgtctttcaagttgcctctttgttggctgcgctcgttcaccccggtcaccgtttttataaacatacggttatccatgctcccggggattactgagaggctcctgcctctcaccggaggccagcttttggctgggcaaattcgttcccgacgaatttgttactcgcttgccgccgtgacgcatcttgaaatccattgtgtataattgaatgtatctggtttaagtcagcccgttaggttgccggatggcatacgggggtatgccatcggtgtggattcagcgattactgacgggctagcctgccgattggcggcacaaatgcgtcattactgcgccacggattgatatccaagccacccctgcgggtataacgcgcataaacagtgagtttttccggcgcacataactgcattaaatcattgaaaatacgttcaacacattgctcgtggaactcattgtgatgacggaaagaaaccagataacgcaataatttttcctgatcgattttcgggcctttatagcgaatttgtactgaaccccaatcaggctggtttgtgatcagacaatttgattttaatagatgactgaccaaaacttcatcaacaacaggccctgtcgctgccccattaagataatcgcgattgaattgataatcatcaatttcaatatcctgattatcaatacatttaccttcaaaatcggcaattggctgttgattgaaatcatgcagaggatataaaacaacgtcaatttcaccgttggcacaggcagacaaatcccgttgcagcgtttgctggacggtctcccaatcagcgaagcgggtttggttaaagctattcagatagagcttgaaactttttgactcgataagattttcactggcagcgttcagactaacatgcccaatggcaacctgaggaacaccacgcgaattgagccatgacagttcgtacattgtccagatgtctgcgccgtaaaacggtagattatcaggatacagtccaagtggctcacggttcatactgcgaggaacggcctgtagtaatgcaggttcatacgtatcacagtatgaagttggtttgccgagagtaagttgggaaagtgcctgattatcttgatacaaagacataaaattcctcaaaggtaatataccctgcatttaagagcgatagggcggaggttattgttttgaatacaagcggtagtgtatcaaggaatattgataattcgtatttttattgcgcattttaaagaaactcagcccgataattgccatccaaatcagaaaagattcttaaacgggctgaattattcatcccgtgagatatatatagataactaatatagagtattcgcttttatttggaagaaattaacttctctaataatggcgatctgaacagattatgcggatcaaatttctgtaaggtattaattgccgaatgccaattattatcagcaggtaatccatccgtaaatgaggccgggattttttgggtcagtatatcctcattagcccatgcaccctttgtgctgtatccccagcctttactccattcaacacgaatagacgcgtaagtgtcatcaaattctttaaacatccatgcttcaagcctgctataaaattcagcagcatattgggtgtctggatgggttaacacatcgagccaaatggcgacatcccactccggacgatcctgacgcgggcgaatagcagatagactcggtactacagcattttcctgcacgacgtcagaaggttcatccagtgctgtaacccggatctcaattggtccgttgacagggaatttaccctgattctggtattcctgcattaaggattgccactgggaataaaagagatggagaactttttgaatattactacggctggttaatatagcataaccatttgcagtaacacgtaatgttgttggcttaacatataacagtaaatttttgctccagccccagatatcatttccggcagctaaaaaataacctagcatcactgcgtattgaagatgggaaaatataggcgtgagactcggattatcatgggttatctgtttaatgagttgagatatttgaacagggatattatcagaaaatggatagttatacgggtgggtaacttcaatactggaaatcggctttttcggtgcaacactccatacctttaaccaagggttagcagtgaatgggaataagatagcttcagcacgcccatttttatccagaaagtgactaaaaagtttttttattttttttatcttgtgaaagtgcaaatagttaagtcgccggaatatcagtaatactttcacaccgaagacgctggtttttaccagcataagactttagggcaca

SEQ ID NO: 2552 - DNA, 12757 bp, Xenorhabdus sp.; identical to SEQ ID NO: 2551
  CDS (5348)..(6685)

SEQ ID NO: 2553 - DNA, 12757 bp, Xenorhabdus sp.; identical to SEQ ID NO: 2551
  CDS (3577)..(5346)

SEQ ID NO: 2554 - DNA, 12757 bp, Xenorhabdus sp.; identical to SEQ ID NO: 2551
  CDS (3104)..(3421)

SEQ ID NO: 2555 - DNA, 12757 bp, Xenorhabdus sp.; identical to SEQ ID NO: 2551
  CDS (1508)..(2947)

SEQ ID NO: 2556 - DNA, 12757 bp, Xenorhabdus sp.; identical to SEQ ID NO: 2551
  CDS (3)..(1067)

SEQ ID NO: 2557 - DNA, 12692 bp, Xenorhabdus sp.
  CDS (313)..(549)
ctaaagcatggcatcaatagtgatagtggaccctgcaatatccagcaaggccagaagcttagggatcgccgtaatttcgtttgatttatccgatactttcatctggccaaaacaaagttgattcgccaccgcccaagcactgactaaatggatagccggagagccgttggctttgtcgagtgtgcctctcattgttttgccatccaatgcaataatgtcggtggagattttggctaacttattcacccatgcgataaaagcctccccgaattcttggggattcagccggtttatcacatcgttaaaggtatcatggctggggatcccattggggagttccagaaattgtctgaaccagtcctccttggattttccgtattcttcaatcgcattgaaactctcacaaccgcagataaccgcacaaatcgagatggtgagaatgtcgatcaacaaatgctgtttcgtacgattaagccggggatcagtgaggtgtccaaaggtattgctgagggtggttgctttcatgacggtttctacggttatcattgacagaaaacggattgtaaatcacaaacgatcatcaatgttcctacctttatgtactgaaggcacatcactgaactaactgttcaatttagacccgtttgccctatagataaaggagatagggtttgtagcgcatttaaggttagggtatactgctttcccgtcctgttatattcatcatccttttaaacctaaactttcaggttcagcatgaaaactaattatatttttgtgaccggcggggtcgtatcctctctgggtaaaggcattgccgcagcctctttggcggccatactcgaagcccgtggactcaatgtcaccattatgaaactggacccgtacatcaacgttgatccaggtacaatgagcccaacccaacacggggaagttttcgtaaccgaagatggcgctgaaactgatctcgatttaggtcattacgaacgtttcattcgaaccaaaatgacacgtcgcaataactttacgacgggtcgtgtttattccgaagttctgcgcaaagaacgccgtggcgattatctgggcgcaaccattcaggttattcctcatatcactaacgaaatcaaagaccgcatcatccgtggcgcagaaggttatgatgttgtgctggtggaaatcggcggtactgtcggtgatatcgaatccctgccattccttgaagccattcgtcagatggcagtagaagtaggccgtgagaacacgctgtttatgcacctgactctggtgccttatatggcagcagccggtgaagtgaaaaccaagcctactcagcattcagtgaaagaactgctttccattggtatccagcctgatgttttgatctgccgttcagatcgcattattccggccaacgagcgggcaaaaattgctctgttctgtaacgtaccagagaaagcagttatctctttaaaagatgttgattctatttataaaatcccagccctcttgaaatctcagggcttagatgattatatttgtaatcgattcagcatcgaacgcccggaagcggatctgtccgaatgggaacaggtcatttatgaagaagctaatccgtcgggcgaagtgaccatcggtatggtgggcaaatatatcgaattgccggatgcttataagtccgtgattgaagcactgaaacacgctggtctgaaaaatcgtctgaccgtcaacatcaaactgatcgattctcaggatgttgaaacccgtagtgttgaagtactgaaaggtctggatgccattctggtgccgggcggcttcggtggccgtggtatcgaaggcaagattatgacagcacgttatgcccgtgaaaacaaaatcccttatctgggaatttgtctgggaatgcaggttgctctgattgaatttgcgcgcaatgttgcgggtatggaaggagcgaactcgactgagtttgaacctgaatgtaagctaccggttgtaggtctgatcaccgaatggcgtgatgagaacggcaacgttgaagtacgtagcgaagagagtgatctcggcggaacgatgcgtgttggtggccagctgtgccgtctgactgaaaacagtctggtgcgtaacctgtatggtcaggacgatattatcgaacgtcaccgccatcgttacgaagtgaacaacttattgttgaaacgcattgaagatgcaggcctgcgtattgctggtcgttcaatcgataataagctggtggaaattattgagaacccgaatcacccgtggtttgtggcatgtcagttccatcctgaattcacttcaacgcctcgcgatggccatccgttatttgccggtttcgttgaagccgcaggcaaataccagaaaagccagttgaaataagatatagggcgattgatggagttttgctctaccttttgagtaaccatcaattgcccggaatttaacttgtactgaggaaaacctaatgtccaaaatcgttaaagtgctcggccgtgaaatcatcgattcccgtggtaacccaacggtagaagcggaagtacatctggaaggcggctttgtaggtctggctgcggcaccatcaggtgcatcaacaggctcccgtgaagcattggaactgcgtgatggtgataaatcacgtttcatgggtaaaggtgtactgaaggcaattgctgcggtaaatggcccgattgcgcaggctctggctggtcaggatgcgaaagatcaggcgaatatcgacaaaatcatgatcgagctggatggaactgaaaacaaatccaatttcggtgctaacgcgattttggctgtttctcttgcaaatgctaaagcggcagcagcgtcaaagggtatgcctctgtacgagcacattgctgaactgaacggtactccgggtcgattctctatgcctctgccaatgatgaacatcatcaacggtggtgagcacgctgataacaacgtagacattcaggaattcatgatccagccagtaggtgcgagcacgctgaaagaagcggtacgcatcggttctgaagttttccataatctggcaaaagttctgaaagcaaaaggcatgaacactgcggtgggtgatgaaggtggttatgcaccaaatctggaatccaacgcagctgctctggccgctatcaaagaagcggtagaacaagcgggttatgtactgggtaaagacatcactctggcgatggactgtgcagcttctgaattctataacgaagaaacgggtaactatgaactgaaaggcgaaggtaagactttcacttctcaggagttcactcactatctggaaggtctgaccaaagagtatccaatcgtttctatcgaagatggcctgaacgaatctgactgggacggcttcgcttaccagactaaagttctgggtgataaaatccagctggttggtgacgatctgttcgtaactaataccaagatcctgaaagaaggtatcgaaaaaggtatcgctaactccattctgattaaattcaaccagatcggttctctgaccgaaactctggctgcaatcaaaatggcaaaagaagcaggttacacagcggttatctctcaccgctcaggtgaaactgaagatgcaaccattgctgatctggcagtaggtactgcggcgggtcaaatcaaaacaggttcaatgagccgttctgaccgtgttgctaaatacaatcagttgatccgtatcgaagaagcgctgggcaaccgtgctcctttcaatggtctgcaagaagttaaaggtcaggcataattgctgatttacttcaataaatagtaatttttatttatgatttggcgaaagagttataccctttcgccttattcttcttttctttcgctgccggataatagataattattcaggcaattcgaaaaccagaaatgtgacataactccataaaatatgctgtttttttgctcttttaattattaattaagcaaatctcgcgtagcagatcccaaaatcgcacacctcgtattttatttatcgttcagactccttattatttcacatgtaatgtaattctttaacatttagagcaatgattcattaattattatttatacattacggagttatgtttcattgttgtatggagtcttcatggacgcttcagaatctttaaccccagcggtcgggccgatgccctcaaataaaagaggctttattattcttgcgctggatatcatcttgctgattgctttgctgaagtttttgccttatagcgaaaaagcaaatgcaggtttggcattgatggcatttgtcggtgtgttatggcttaccgaagctattcacgtcacaattaccgcactgtgtattccaattctggcggttggaatgggattgatgaataccggtgacgcgctgaaatcttttgcaaacccaattatattcttattttttggtgggtttgcactggcgacagcgctacatatccaaggtctggacagactgatagccaaccgtcttctgctgattgcccgtggacgtttgtctgtggcggtgatgctgatatttggtatcacggctctactttcaatgtggatcagcaacacggcaactgctgcaatgatgttgccgcttattctgggtattctggctaatctggatgtacgtaccgaacgtaatacatttgtctttgtgttactgggtgtagcgtatagcgccagtattggcggtttgggtactttggtcggcagcccgcctaacgcaattgctgcggcacagctgggcatggattttatgacatggatgaaatatggcgtaccaatggtgattattctgttgccggttatggtcatgctgatgtacatcatgttgcgtccgaatctgaatcataaatttgatctggaacttgagcatctggaatggaattgtaaacgtgttatcgccatgtttattttcctgctgacagttgtgtgctggatttccagctctatcatcagtgatgctctgggtggtattaaagatttggataccatcattgcggtgagtgcggctattctgattggtatcacaggcgtatcaacatggtcacagatccaaaataacactgaatggggcgtgttgatgctgtttggcggcggcctgacattaagtgctgtcctgaaaaactctggcgccagcgaagtgatggcaaatggtatggcggcaacatttggttcaagtccgtggtttgtgatcattgttgctatcgcagcattcattatcttcctgacggaatttaccagtaatacagccagtgcagcgctgcttgttcctatttttgccacagttgcagaagctttgggaatgccagtgattgtgctgactatgattattggtattggtgcatcctgtgcattcatgctgcctgtagcaacacctccgaatgcgattgtttatggctccggctatatcaagcagactgaaatggtacgtgtgggtatcgtattgaacttggcatgtatcgcaattatctctgtcgttgcttggttcttctggatttaatttatattcatagcaagaaaaatgaggatgccggttggcatcctcttaaccctaacaagggatgttatggcatagcttaatcttctttggtactgatgtagatatttttaacttcagtataggcatccagaatcattttatgtgtttcccgcccaagtcctgatttcttatagccgccaaatggtgtgtgagccggaagttcatgataggtattgatccatatacggcctgcctcaatggctttggcgacacgcagggcgcggttgatatcctgtgtccagactgctcccgccagaccatattctgaatcgttagccatttccacaacttcctcttcattactgaaaggaatgacacaaagcactggcccgaaaatttcctcctgagctacccgcatattattagtgacattggtaaggatcgttggctggacaaagaagccatcgtcataacctgcaccagtaatgcgtttcccgccggtaagaatggtcgcaccttcctgtttagcgaggtcaatatagcccagaatcgtattcatctgctcttcactgacctgacagctcatctcagtggccggatccatcgggtcaccgacgcggatagattcaaagacggtttttaatgattgcaggaatgaatcatagatatctttatgcaggaatagacgagcaccagactcacaagcctgtccctgattcagcaaaatagcgtgggctgcacatttgaccgctttttttatattggcatcagggaaaacgatattggcagatttgcctcccagctcgagcgtcgcaggaataagccttttagcggcggcagcggcaacgttgtagccgacttctgttgagcctgtaaaggctaccttgtcaatgccttcatgatcgaggatcgcctgaccaacagcagagccacgacctgtgacgatattgacaacgcccgcaggaagaacctgattaatgatacggcctagttctagcagtgtgataggcgtcaggctggccgggttgataacgatagtattacccgccgccagagcaggagcaattttccaggctgccatcagcagagggaagttccagggaataatttgaccaatgacacctattggttctctgataaccagactgagagtattttcatcaatgacatcagatgcatcagagtgagcacggatcacaccagcaaaataacggaaatgatcgatagcgaatgggatatcaaaattacggcataaagattgagttttacccccatctaaggtttccagggtgataaaacgttctgcttcagcttccagtaaatcggcaattttcagtaggagggattgctttttttcggctgaagtttttcgccatgccggtaaagctttttttgccgcccggacagccagttcaacatcctgagcatttcctgctgcatattcagtcagtagttctccggttgccggattatagctcttcatggtttcttttgaagtgctatctacccattcgccaccaatcagcattctataagatttggcaggtaataattctgttgcgatatcatgtaacttcttcattatattctccagatactttgatttttggtatgctaaaccatatattcaaaaaaattattgagcctattcttaattttggatttaaatatataagacctgtatcaataaataagagggtgatgtttatgttttaacagagtaataaacgttgtaaataaattcagagaatgattattgatgtggttttgttattattttttaagaggttctgttgcggttttaatataaatcttcgattttttatgaaatcataaatagattttttaattattatcctgccaattttattatcaatataatttgttattgctatcaacttatattatgggtttttcaggtatctattgaaaaatattacagaataaaaacagcttaatataaaaacacaagatgatagtaaacaatttttaaatgtgccttatttaataataattttttcagttaagtgagtttatttttatcgccctctgctattattacactacagataattgggcggggttgattatgagaaaattgttagtaatttgtttattgggttttacattagcagggtgtgagaagccgctgaagattgatggaacgaatggaatagcggtaaaaacatccatcgaaaagatcagggatactctacctgaagataaaaaactaaaatttgatgactcattgaatattgttatgtttcacaatatcaattttgatgaactgtttaagaacaacaagcagggaaaaataaaatatgatgctatggaaagcctggaaaaaagtttttaccaatcattgaatgggaaaaccgctgatcagattattaatgaagcagaaaaaattaagaaaaataataaagcgccctgatttcggggcattttagctgttattgagtcttatctggtttattttttcccaaaagcgttaatcgttccccacattgtcggcagacatagcagcttttacctttgagcaccttattatgttgtctgatgcttaattcgtgctgctggcagtgacagccatagatgaatatcttgctgcaaacggattgtactgaaaattgatgggttcggttggcaggtactttaaacacggtttccataatataacgccattctttgccgtgaggagcgactttgccaaactgatgataaaccagtagatgagctaattcgtgggggatgacttcatcaataaacgactgctcgttttcaataagcaaaattgggttaagacgaatttcccaatcttgtaaacgagcacttcctgcaattgtccctctttgctggtaggtcacacagggttcaggaaacgtttgctgaaggaattcactggcctgaatcattttttgccgtaaagcgcgcatgactgcttgctgtagtggaagaggaatcttaacggatttcataaacagcgataattctgtggtaacttaattggaatagtaacttaacacaaaaaaagcccgcttgttatgagcgggctttttaatattgtgggattatttcagcccggctgcatcacgcaggatttcagctttatctgttgcttcccacgggaactgctcacgaccgaaatgaccgtatgccgcagtatcacgatagattggatgcagtagatccagcattttgatcaatccataaggacgcagatcgaagaactcgcgtaccagctgaaccagtgttgatgttggtactttttcagttccaaacgtttcaaccatgatagaagttggttcagcaacaccgatagcataagaaacctgaatctcacagcggtcagccagacctgcggcaacgatatttttagccacgtaacgtgccgcgtaagccgcagaacggtcaactttagatggatcttttcctgagaatgctccacccccgtgacgggccataccaccgtacgtatcaacaatgatcttacggccggtcagaccacagtcacccattgggccaccaatcacgaaacggcctgttgggttgatgaagtatttagtcatcggagtgagccattctgccggtaaaacaggcttgatgatctcatccataactgcttcttgcagctctttctgaccgatttcttctgaatgctgagtagaaagtacaatagcatcaatgccgacaattttgccgttgtcatactggaatgtaacctgacttttggcatccggacgcaaccaaggcagtgttttgttcttacgtacatgcgcctgacgctcaaccagacggtgagcataggtaataggtgctggcataagaacatcggtttcattggttgcataaccaaacatcaatccctgatcacctgctccttgttccagagggtcagctcggtctacaccctgattgatatcaggagattgcttaccaatcgcgctgattactgcacaggaattagcatcaaagcccatttctgaactggtgtagccaatctcacgtactgtactgcgggtaatttcttcgatatcaacccaggcgctggtagtgatttcaccaccaaccataaccatgccggttttcacataagtttcgcaggctacacgagccttaggatcttgttctagaattgcatcaagaacagcgtcggaaatttggtcggcaattttatctggatgaccttctgaaacagattcagaagtaaaaaggtgtgtagtcattatatttcgataccttaaatataatcttggtttaagggtggatgttttaccatctagacggctagtctaagtcagtatcactaaatataccagtttttttggtttcaaataccttctgttgcgtgacattttggatttcttatctgtcattccttgaaatatgcagtttaaagaaatctaacttcttgagcgttatctctttgtatgttgttgatggggccagtttgttcttttgtgccttaatatctcccggaattgacggaatacaaaaaataactattttctttattttcaaattgttattttgttggtggggtttatttatccaaatgaatagtgatggaagtgttttatattagtaagagattgtttactttctataaagataacgatggaaatttatcggatatgcttatctataatctgttaggcatcaataaatttcattttgcaattttgtaggattacaggtataaacagcgccctataactgataggttttttatacttcaagttataggcgtttgccggatacgttttatgcgtgttctgcgtctcatcaattgagaaacggctttcgtaaagccatgtggggtgaatggggttatgaaccattatttgctgcttgttaacaaccgacagccacattatgccattgatgtatccacatcttgttcctttcttatcaatataaattcattccgatgttacctgaaacattcgagtagacaggtcgcttcggacagaagccgtattaccaaaccgtaaatatacatattgtttagcttcctctaaacgtttttataatttaagagcatgctattccctgacatttataaatgcgcaagatacgcacactaaatatagtgtcttgggttattgactacaggtgaaggtaaacctctactccatgaaggagactgccatgaatgataatatcgctcgtaaaatgcgccagacttacaatattgcatactggggcggcaactattactacgtcaatgatctgggtaatgtcagtgtttgtccaaatcctgatttgccggaagctcaggttgagattgttgatctggtaaagaaagttcaacaagagaaaaaacaattacagctgccagcattgttctgttttcctcagatcctgcaacatcgtttgcgttccattaatgcagcctttaaacgtgcgcgtgaatcctatggttataaaggtgattactttctggtttatccgattaaggtgaaccagcagcgtcgcgtgattgaatcactggctaattctggcgaacctgtcggtctggaggctggctccaaggctgagctgatggctgtactggctcatgcaggtatgacacggactgtaattgtctgtaatggttataaagatcgtgagtatattcgtctggcactgatcggtgaaaaactgggacataaagtgtatctggtcatcgagaaaatgtctgagattgcaatggtgctggaagaagcggaacgtatcaatgtcgtacctcgtcttggtgtacgggcgcgtcttgcttcacagggagcgggtaaatggcagtccagtggcggggagaaatccaaatttggtctggcggcagcacaggttctacaactggttgaaactcttcgagcagccggaaaactggatagcctacaattgttgcatttccatctgggttcccagctggcaaatatccgtgatatagcaacaggtgtgcgcgaatcagcccgtttttatgtcgagctgcataaactgggtgtcaacattcagtgttttgatgtgggaggaggactgggtgttgattatgaaggtacacgttcccagtcagaatgttccgttaactatggcctgaatgaatacgcgaacaacgttatctggggaatcggggatgcctgcgaggaaaatggcctgccacacccaactgtcatcacagaatctggtcgtgcattgacggctcatcataccgttttagtctccaatgttattggagcggaatgtaatgaattcaccgagacgacaccaccggcagaagatgctgcacgtcctctgacaagtttgtgggatacatggctggaaatgcaggatgatggctacaagcgttctttgcgtgaatggctgcatgatagtcagtttgatctgtacgatgttcatacccagtatgcccacgggattttgagtctctccgagcgagcttgggcagaagaattatatttaaatatctgccgccgtattcagcaggatcttgatccaagtaaccgtgctcatcgtccgatcattgatgaattacaggagcgcatggctgataaactctatgtgaacttttccctgttccagtccatgccggatgcctgggggatcgatcagctgttcccggttctgccacttgaagggctggacaaaccgctggatcgccgtgctgttttgctggatatcacttgtgactctgacggcattatcgatcattatgttgaaggtgatggtgtggcgacaacaatgccaatgcctgcctatgatccggaaaatccgccactgatcggtttctttatggtcggagcctatcaggaaattctgggtaatatgcataacctctttggtgatactgcggctgttgatgtctacgttaccgaaaatggtgaagtgacttatcagcagagtgaagagggtgatacaattgccaatatgctgcaatatgtgaaactggagcctcaggtactgctgacccgcttccgtgatcaggtgaaatcgactgatttggctgaaaatctacaggaacagttcctgcaagagtttgaaagtggcctgtatggttatacttatttagaagatgagtaattctaataatcagtaggtgctatatcctcatggatcttggattctattgaagtggtaaaggagtgaatccaacaaagaggagcgtgggtaattttattcagaatggaagcgcctttcaggcgcttctcaatcttta

SEQ ID NO: 2558 - DNA, 12692 bp, Xenorhabdus sp.; identical to SEQ ID NO: 2557
  CDS (757)..(2394)

SEQ ID NO: 2559 - DNA, 12692 bp, Xenorhabdus sp.; identical to SEQ ID NO: 2557
  CDS (2480)..(3781)

SEQ ID NO: 2560 - DNA, 12692 bp, Xenorhabdus sp.; identical to SEQ ID NO: 2557
  CDS (4247)..(5521)

SEQ ID NO: 2561 - DNA, 12692 bp, Xenorhabdus sp.; identical to SEQ ID NO: 2557
  CDS (7830)..(7934)

SEQ ID NO: 2562 - DNA, 12692 bp, Xenorhabdus sp.; identical to SEQ ID NO: 2557
  CDS (10628)..(12556)

SEQ ID NO: 2563 - DNA, 12692 bp, Xenorhabdus sp.
  CDS (12447)..(12692)
taaagattgagaagcgcctgaaaggcgcttccattctgaataaaattacccacgctcctctttgttggattcactcctttaccacttcaatagaatccaagatccatgaggatatagcacctactgattattagaattactcatcttctaaataagtataaccatacaggccactttcaaactcttgcaggaactgttcctgtagattttcagccaaatcagtcgatttcacctgatcacggaagcgggtcagcagtacctgaggctccagtttcacatattgcagcatattggcaattgtatcaccctcttcactctgctgataagtcacttcaccattttcggtaacgtagacatcaacagccgcagtatcaccaaagaggttatgcatattacccagaatttcctgataggctccgaccataaagaaaccgatcagtggcggattttccggatcataggcaggcattggcattgttgtcgccacaccatcaccttcaacataatgatcgataatgccgtcagagtcacaagtgatatccagcaaaacagcacggcgatccagcggtttgtccagcccttcaagtggcagaaccgggaacagctgatcgatcccccaggcatccggcatggactggaacagggaaaagttcacatagagtttatcagccatgcgctcctgtaattcatcaatgatcggacgatgagcacggttacttggatcaagatcctgctgaatacggcggcagatatttaaatataattcttctgcccaagctcgctcggagagactcaaaatcccgtgggcatactgggtatgaacatcgtacagatcaaactgactatcatgcagccattcacgcaaagaacgcttgtagccatcatcctgcatttccagccatgtatcccacaaacttgtcagaggacgtgcagcatcttctgccggtggtgtcgtctcggtgaattcattacattccgctccaataacattggagactaaaacggtatgatgagccgtcaatgcacgaccagattctgtgatgacagttgggtgtggcaggccattttcctcgcaggcatccccgattccccagataacgttgttcgcgtattcattcaggccatagttaacggaacattctgactgggaacgtgtaccttcataatcaacacccagtcctcctcccacatcaaaacactgaatgttgacacccagtttatgcagctcgacataaaaacgggctgattcgcgcacacctgttgctatatcacggatatttgccagctgggaacccagatggaaatgcaacaattgtaggctatccagttttccggctgctcgaagagtttcaaccagttgtagaacctgtgctgccgccagaccaaatttggatttctccccgccactggactgccatttacccgctccctgtgaagcaagacgcgcccgtacaccaagacgaggtacgacattgatacgttccgcttcttccagcaccattgcaatctcagacattttctcgatgaccagatacactttatgtcccagtttttcaccgatcagtgccagacgaatatactcacgatctttataaccattacagacaattacagtccgtgtcatacctgcatgagccagtacagccatcagctcagccttggagccagcctccagaccgacaggttcgccagaattagccagtgattcaatcacgcgacgctgctggttcaccttaatcggataaaccagaaagtaatcacctttataaccataggattcacgcgcacgtttaaaggctgcattaatggaacgcaaacgatgttgcaggatctgaggaaaacagaacaatgctggcagctgtaattgttttttctcttgttgaactttctttaccagatcaacaatctcaacctgagcttccggcaaatcaggatttggacaaacactgacattacccagatcattgacgtagtaatagttgccgccccagtatgcaatattgtaagtctggcgcattttacgagcgatattatcattcatggcagtctccttcatggagtagaggtttaccttcacctgtagtcaataacccaagacactatatttagtgtgcgtatcttgcgcatttataaatgtcagggaatagcatgctcttaaattataaaaacgtttagaggaagctaaacaatatgtatatttacggtttggtaatacggcttctgtccgaagcgacctgtctactcgaatgtttcaggtaacatcggaatgaatttatattgataagaaaggaacaagatgtggatacatcaatggcataatgtggctgtcggttgttaacaagcagcaaataatggttcataaccccattcaccccacatggctttacgaaagccgtttctcaattgatgagacgcagaacacgcataaaacgtatccggcaaacgcctataacttgaagtataaaaaacctatcagttatagggcgctgtttatacctgtaatcctacaaaattgcaaaatgaaatttattgatgcctaacagattatagataagcatatccgataaatttccatcgttatctttatagaaagtaaacaatctcttactaatataaaacacttccatcactattcatttggataaataaaccccaccaacaaaataacaatttgaaaataaagaaaatagttattttttgtattccgtcaattccgggagatattaaggcacaaaagaacaaactggccccatcaacaacatacaaagagataacgctcaagaagttagatttctttaaactgcatatttcaaggaatgacagataagaaatccaaaatgtcacgcaacagaaggtatttgaaaccaaaaaaactggtatatttagtgatactgacttagactagccgtctagatggtaaaacatccacccttaaaccaagattatatttaaggtatcgaaatataatgactacacacctttttacttctgaatctgtttcagaaggtcatccagataaaattgccgaccaaatttccgacgctgttcttgatgcaattctagaacaagatcctaaggctcgtgtagcctgcgaaacttatgtgaaaaccggcatggttatggttggtggtgaaatcactaccagcgcctgggttgatatcgaagaaattacccgcagtacagtacgtgagattggctacaccagttcagaaatgggctttgatgctaattcctgtgcagtaatcagcgcgattggtaagcaatctcctgatatcaatcagggtgtagaccgagctgaccctctggaacaaggagcaggtgatcagggattgatgtttggttatgcaaccaatgaaaccgatgttcttatgccagcacctattacctatgctcaccgtctggttgagcgtcaggcgcatgtacgtaagaacaaaacactgccttggttgcgtccggatgccaaaagtcaggttacattccagtatgacaacggcaaaattgtcggcattgatgctattgtactttctactcagcattcagaagaaatcggtcagaaagagctgcaagaagcagttatggatgagatcatcaagcctgttttaccggcagaatggctcactccgatgactaaatacttcatcaacccaacaggccgtttcgtgattggtggcccaatgggtgactgtggtctgaccggccgtaagatcattgttgatacgtacggtggtatggcccgtcacgggggtggagcattctcaggaaaagatccatctaaagttgaccgttctgcggcttacgcggcacgttacgtggctaaaaatatcgttgccgcaggtctggctgaccgctgtgagattcaggtttcttatgctatcggtgttgctgaaccaacttctatcatggttgaaacgtttggaactgaaaaagtaccaacatcaacactggttcagctggtacgcgagttcttcgatctgcgtccttatggattgatcaaaatgctggatctactgcatccaatctatcgtgatactgcggcatacggtcatttcggtcgtgagcagttcccgtgggaagcaacagataaagctgaaatcctgcgtgatgcagccgggctgaaataatcccacaatattaaaaagcccgctcataacaagcgggctttttttgtgttaagttactattccaattaagttaccacagaattatcgctgtttatgaaatccgttaagattcctcttccactacagcaagcagtcatgcgcgctttacggcaaaaaatgattcaggccagtgaattccttcagcaaacgtttcctgaaccctgtgtgacctaccagcaaagagggacaattgcaggaagtgctcgtttacaagattgggaaattcgtcttaacccaattttgcttattgaaaacgagcagtcgtttattgatgaagtcatcccccacgaattagctcatctactggtttatcatcagtttggcaaagtcgctcctcacggcaaagaatggcgttatattatggaaaccgtgtttaaagtacctgccaaccgaacccatcaattttcagtacaatccgtttgcagcaagatattcatctatggctgtcactgccagcagcacgaattaagcatcagacaacataataaggtgctcaaaggtaaaagctgctatgtctgccgacaatgtggggaacgattaacgcttttgggaaaaaataaaccagataagactcaataacagctaaaatgccccgaaatcagggcgctttattatttttcttaattttttctgcttcattaataatctgatcagcggttttcccattcaatgattggtaaaaacttttttccaggctttccatagcatcatattttatttttccctgcttgttgttcttaaacagttcatcaaaattgatattgtgaaacataacaatattcaatgagtcatcaaattttagttttttatcttcaggtagagtatccctgatcttttcgatggatgtttttaccgctattccattcgttccatcaatcttcagcggcttctcacaccctgctaatgtaaaacccaataaacaaattactaacaattttctcataatcaaccccgcccaattatctgtagtgtaataatagcagagggcgataaaaataaactcacttaactgaaaaaattattattaaataaggcacatttaaaaattgtttactatcatcttgtgtttttatattaagctgtttttattctgtaatatttttcaatagatacctgaaaaacccataatataagttgatagcaataacaaattatattgataataaaattggcaggataataattaaaaaatctatttatgatttcataaaaaatcgaagatttatattaaaaccgcaacagaacctcttaaaaaataataacaaaaccacatcaataatcattctctgaatttatttacaacgtttattactctgttaaaacataaacatcaccctcttatttattgatacaggtcttatatatttaaatccaaaattaagaataggctcaataatttttttgaatatatggtttagcataccaaaaatcaaagtatctggagaatataatgaagaagttacatgatatcgcaacagaattattacctgccaaatcttatagaatgctgattggtggcgaatgggtagatagcacttcaaaagaaaccatgaagagctataatccggcaaccggagaactactgactgaatatgcagcaggaaatgctcaggatgttgaactggctgtccgggcggcaaaaaaagctttaccggcatggcgaaaaacttcagccgaaaaaaagcaatccctcctactgaaaattgccgatttactggaagctgaagcagaacgttttatcaccctggaaaccttagatgggggtaaaactcaatctttatgccgtaattttgatatcccattcgctatcgatcatttccgttattttgctggtgtgatccgtgctcactctgatgcatctgatgtcattgatgaaaatactctcagtctggttatcagagaaccaataggtgtcattggtcaaattattccctggaacttccctctgctgatggcagcctggaaaattgctcctgctctggcggcgggtaatactatcgttatcaacccggccagcctgacgcctatcacactgctagaactaggccgtatcattaatcaggttcttcctgcgggcgttgtcaatatcgtcacaggtcgtggctctgctgttggtcaggcgatcctcgatcatgaaggcattgacaaggtagcctttacaggctcaacagaagtcggctacaacgttgccgctgccgccgctaaaaggcttattcctgcgacgctcgagctgggaggcaaatctgccaatatcgttttccctgatgccaatataaaaaaagcggtcaaatgtgcagcccacgctattttgctgaatcagggacaggcttgtgagtctggtgctcgtctattcctgcataaagatatctatgattcattcctgcaatcattaaaaaccgtctttgaatctatccgcgtcggtgacccgatggatccggccactgagatgagctgtcaggtcagtgaagagcagatgaatacgattctgggctatattgacctcgctaaacaggaaggtgcgaccattcttaccggcgggaaacgcattactggtgcaggttatgacgatggcttctttgtccagccaacgatccttaccaatgtcactaataatatgcgggtagctcaggaggaaattttcgggccagtgctttgtgtcattcctttcagtaatgaagaggaagttgtggaaatggctaacgattcagaatatggtctggcgggagcagtctggacacaggatatcaaccgcgccctgcgtgtcgccaaagccattgaggcaggccgtatatggatcaatacctatcatgaacttccggctcacacaccatttggcggctataagaaatcaggacttgggcgggaaacacataaaatgattctggatgcctatactgaagttaaaaatatctacatcagtaccaaagaagattaagctatgccataacatcccttgttagggttaagaggatgccaaccggcatcctcatttttcttgctatgaatataaattaaatccagaagaaccaagcaacgacagagataattgcgatacatgccaagttcaatacgatacccacacgtaccatttcagtctgcttgatatagccggagccataaacaatcgcattcggaggtgttgctacaggcagcatgaatgcacaggatgcaccaataccaataatcatagtcagcacaatcactggcattcccaaagcttctgcaactgtggcaaaaataggaacaagcagcgctgcactggctgtattactggtaaattccgtcaggaagataatgaatgctgcgatagcaacaatgatcacaaaccacggacttgaaccaaatgttgccgccataccatttgccatcacttcgctggcgccagagtttttcaggacagcacttaatgtcaggccgccgccaaacagcatcaacacgccccattcagtgttattttggatctgtgaccatgttgatacgcctgtgataccaatcagaatagccgcactcaccgcaatgatggtatccaaatctttaataccacccagagcatcactgatgatagagctggaaatccagcacacaactgtcagcaggaaaataaacatggcgataacacgtttacaattccattccagatgctcaagttccagatcaaatttatgattcagattcggacgcaacatgatgtacatcagcatgaccataaccggcaacagaataatcaccattggtacgccatatttcatccatgtcataaaatccatgcccagctgtgccgcagcaattgcgttaggcgggctgccgaccaaagtacccaaaccgccaatactggcgctatacgctacacccagtaacacaaagacaaatgtattacgttcggtacgtacatccagattagccagaatacccagaataagcggcaacatcattgcagcagttgccgtgttgctgatccacattgaaagtagagccgtgataccaaatatcagcatcaccgccacagacaaacgtccacgggcaatcagcagaagacggttggctatcagtctgtccagaccttggatatgtagcgctgtcgccagtgcaaacccaccaaaaaataagaatataattgggtttgcaaaagatttcagcgcgtcaccggtattcatcaatcccattccaaccgccagaattggaatacacagtgcggtaattgtgacgtgaatagcttcggtaagccataacacaccgacaaatgccatcaatgccaaacctgcatttgctttttcgctataaggcaaaaacttcagcaaagcaatcagcaagatgatatccagcgcaagaataataaagcctcttttatttgagggcatcggcccgaccgctggggttaaagattctgaagcgtccatgaagactccatacaacaatgaaacataactccgtaatgtataaataataattaatgaatcattgctctaaatgttaaagaattacattacatgtgaaataataaggagtctgaacgataaataaaatacgaggtgtgcgattttgggatctgctacgcgagatttgcttaattaataattaaaagagcaaaaaaacagcatattttatggagttatgtcacatttctggttttcgaattgcctgaataattatctattatccggcagcgaaagaaaagaagaataaggcgaaagggtataactctttcgccaaatcataaataaaaattactatttattgaagtaaatcagcaattatgcctgacctttaacttcttgcagaccattgaaaggagcacggttgcccagcgcttcttcgatacggatcaactgattgtatttagcaacacggtcagaacggctcattgaacctgttttgatttgacccgccgcagtacctactgccagatcagcaatggttgcatcttcagtttcacctgagcggtgagagataaccgctgtgtaacctgcttcttttgccattttgattgcagccagagtttcggtcagagaaccgatctggttgaatttaatcagaatggagttagcgatacctttttcgataccttctttcaggatcttggtattagttacgaacagatcgtcaccaaccagctggattttatcacccagaactttagtctggtaagcgaagccgtcccagtcagattcgttcaggccatcttcgatagaaacgattggatactctttggtcagaccttccagatagtgagtgaactcctgagaagtgaaagtcttaccttcgcctttcagttcatagttacccgtttcttcgttatagaattcagaagctgcacagtccatcgccagagtgatgtctttacccagtacataacccgcttgttctaccgcttctttgatagcggccagagcagctgcgttggattccagatttggtgcataaccaccttcatcacccaccgcagtgttcatgccttttgctttcagaacttttgccagattatggaaaacttcagaaccgatgcgtaccgcttctttcagcgtgctcgcacctactggctggatcatgaattcctgaatgtctacgttgttatcagcgtgctcaccaccgttgatgatgttcatcattggcagaggcatagagaatcgacccggagtaccgttcagttcagcaatgtgctcgtacagaggcataccctttgacgctgctgccgctttagcatttgcaagagaaacagccaaaatcgcgttagcaccgaaattggatttgttttcagttccatccagctcgatcatgattttgtcgatattcgcctgatctttcgcatcctgaccagccagagcctgcgcaatcgggccatttaccgcagcaattgccttcagtacacctttacccatgaaacgtgatttatcaccatcacgcagttccaatgcttcacgggagcctgttgatgcacctgatggtgccgcagccagacctacaaagccgccttccagatgtacttccgcttctaccgttgggttaccacgggaatcgatgatttcacggccgagcactttaacgattttggacattaggttttcctcagtacaagttaaattccgggcaattgatggttactcaaaaggtagagcaaaactccatcaatcgccctatatcttatttcaactggcttttctggtatttgcctgcggcttcaacgaaaccggcaaataacggatggccatcgcgaggcgttgaagtgaattcaggatggaactgacatgccacaaaccacgggtgattcgggttctcaataatttccaccagcttattatcgattgaacgaccagcaatacgcaggcctgcatcttcaatgcgtttcaacaataagttgttcacttcgtaacgatggcggtgacgttcgataatatcgtcctgaccatacaggttacgcaccagactgttttcagtcagacggcacagctggccaccaacacgcatcgttccgccgagatcactctcttcgctacgtacttcaacgttgccgttctcatcacgccattcggtgatcagacctacaaccggtagcttacattcaggttcaaactcagtcgagttcgctccttccatacccgcaacattgcgcgcaaattcaatcagagcaacctgcattcccagacaaattcccagataagggattttgttttcacgggcataacgtgctgtcataatcttgccttcgataccacggccaccgaagccgcccggcaccagaatggcatccagacctttcagtacttcaacactacgggtttcaacatcctgagaatcgatcagtttgatgttgacggtcagacgatttttcagaccagcgtgtttcagtgcttcaatcacggacttataagcatccggcaattcgatatatttgcccaccataccgatggtcacttcgcccgacggattagcttcttcataaatgacctgttcccattcggacagatccgcttccgggcgttcgatgctgaatcgattacaaatataatcatctaagccctgagatttcaagagggctgggattttataaatagaatcaacatcttttaaagagataactgctttctctggtacgttacagaacagagcaatttttgcccgctcgttggccggaataatgcgatctgaacggcagatcaaaacatcaggctggataccaatggaaagcagttctttcactgaatgctgagtaggcttggttttcacttcaccggctgctgccatataaggcaccagagtcaggtgcataaacagcgtgttctcacggcctacttctactgccatctgacgaatggcttcaaggaatggcagggattcgatatcaccgacagtaccgccgatttccaccagcacaacatcataaccttctgcgccacggatgatgcggtctttgatttcgttagtgatatgaggaataacctgaatggttgcgcccagataatcgccacggcgttctttgcgcagaacttcggaataaacacgacccgtcgtaaagttattgcgacgtgtcattttggttcgaatgaaacgttcgtaatgacctaaatcgagatcagtttcagcgccatcttcggttacgaaaacttccccgtgttgggttgggctcattgtacctggatcaacgttgatgtacgggtccagtttcataatggtgacattgagtccacgggcttcgagtatggccgccaaagaggctgcggcaatgcctttacccagagaggatacgaccccgccggtcacaaaaatataattagttttcatgctgaacctgaaagtttaggtttaaaaggatgatgaatataacaggacgggaaagcagtataccctaaccttaaatgcgctacaaaccctatctcctttatctatagggcaaacgggtctaaattgaacagttagttcagtgatgtgccttcagtacataaaggtaggaacattgatgatcgtttgtgatttacaatccgttttctgtcaatgataaccgtagaaaccgtcatgaaagcaaccaccctcagcaatacctttggacacctcactgatccccggcttaatcgtacgaaacagcatttgttgatcgacattctcaccatctcgatttgtgcggttatctgcggttgtgagagtttcaatgcgattgaagaatacggaaaatccaaggaggactggttcagacaatttctggaactccccaatgggatccccagccatgatacctttaacgatgtgataaaccggctgaatccccaagaattcggggaggcttttatcgcatgggtgaataagttagccaaaatctccaccgacattattgcattggatggcaaaacaatgagaggcacactcgacaaagccaacggctctccggctatccatttagtcagtgcttgggcggtggcgaatcaactttgttttggccagatgaaagtatcggataaatcaaacgaaattacggcgatccctaagcttctggccttgctggatattgcagggtccactatcactattgatgccatgctttag

SEQ ID NO: 2564 - DNA, 12692 bp, Xenorhabdus sp.; identical to SEQ ID NO: 2563
  CDS (5653)..(7095)

SEQ ID NO: 2565 - DNA, 12692 bp, Xenorhabdus sp.; identical to SEQ ID NO: 2563
  CDS (4257)..(4739)

SEQ ID NO: 2566 - DNA, 12692 bp, Xenorhabdus sp.; identical to SEQ ID NO: 2563
  CDS (2967)..(4121)

SEQ ID NO: 2567 - DNA, 19910 bp, Xenorhabdus sp.
  CDS (1)..(747)
ctttcactctacctttcccggcgcatgcatgacggcgttgtcagcacactacaaaacattgccagtgttgcccatgatgtccgccagcggcgggcattttctcagcgggttccttccgcccaaattgcagaactacatgaactcagtcaggtttttaaccacctgctggaagaactggaagagtggcagcatcatttacaaactgaaaaagctgctttgacgtggcaggcacaacacgattctctcacgacattacccaaccgggcgacttttgagcgtgttctgtccacagtaatgaatgacaagttcatgcgggagagtgctgccattttatttattgacggtaatcgactcaaatatgtcaatgatgtttatgggcatgcagcaggcgatcacgtcctgatcacaattgcaaatacgttaaaaacgaaagtccggaaaacagatactgtcgctcgcctcggtggcgatgaatttgccattttattaccttcagccagtttagaagatgctgaaaggatcgctaaaaatatcattcatgcgatggataccccgattcagcttcccagcggccaacagctacgtatcacgctcagcattggcattgctctgtcaaatggtgcgttaacagcagaacagttgctatctgaagcggatgccgccatgtatcacatcaaacaacgtggcgggggctggcactccgctgacacaacaaaagtaaactacttatcgagaaattcatcatgataaaaaaacgcgcttttatattaatgatttcattgattggcccttttcttctcagcgcctgccaacattcgggcaaactgacaacggaacaaatcaaagtcctcaaacaacaaggatttcagcaaacagatgaagggtggctatttggtctgtcagaaaaagtcctcttcggtaacaaccaatttcacttgcaacctgcaggggaagaaaaattgaaaaagctggcagctattttatccaaaacaggcattgaacatgcacgccttgatggtcatacggataactacggtgaattaagctataacaaccagctttcgctaagacgggctaacacagttgcagatgccctgacacggggaggaatgaacagatccagcttagaaacccgtggattggggccaagccagcctattgcggataatcgcagttcaaaaggaagggcagaaaaccgtcgagtagcgattgtgattacatcacaataaatttccaatagattttaaggtataacttaaaatacgagaggaataaataaaagaaggaataatctggcgaaagattgacattaatcaataaaataatttaattgtttcaccaaggatggaaacaataatctgtttattttaattactgccgccgattacgtaatttgttgttcaattcttgctgtataaatatatatatagttcctgtattcaatatcttcctgtaagatagccagcgttatttttcatataaacagtcatttttttatcagcagcaagctctcgggggggtacaaatccaggcagtaagactactgttggataatgggctttatcaaaaaggagaaatgatggggctgaattttaaatcataccgaacgttgtatcgggcatttgtggtactattcatcgccatcactctgagtgctggtaatctattatggaaagtattttctgattatcggaataatatcaggcctgatatagaattaaagtgggttttgctaacactagcaatgctcatatttttatacgccgtcgttttatataaacacaccaaaactgttattattccagattatcaatttaaaaaagccattaaaaacaaacaatttattccttatgttcagcccattatcagtagtaagaataacacccttatcgggtgtgaaatccttgttcgctggcaacatccaaaacaagggttaatagagcctaaaaattttatctcacaaattgagagatcagacctcatcattccattaacacataacttaattactcaagtgcgtgatttttttgcctctttcgcctatcagctaccgccaaattttcactttaatttcaatatcagtgcaaaacattataaagatagtggtttaattgaagattgccgcgactttctacaggcatttcctgaagatgcaatccatctgatattagaaattactgagagagaattacttgagccggatgcacacacaatcgaactatttaataaattagataaattaggtgtattaatcgctttagatgattttggcacaggtcattctaatcatgcttatttacaaaaactgaacgttaatgtggtaaaaataggccataatttcattagtaaaatgaacagtgataggttttcaaagcatattgttgaaaatattattgacctcgctttgcggcttaatttagaaattgtcgcagaaggggttgaagatcaaaaacaggtaaaccagctgaaaaactattcggttaattacctacaaggttattactttgatcgccctatatcaccggaagattttgttaataaatggttaaaataaatcatataactacacttaaaaccgtgaacttgaaactcatagaaaatagatttttatcatacttttactgaaattactttcttttcattctcactaatcagaatgggcaattgatgtaaaaaaatataaccgtcatgttgaaactcaatgagtgtttttttagcaggagaaataaaaaaagcatctccattgaagaaacattctgagtttttatttaaataatcattcacaaatgactcgacatatctgacatccataaaataaacttcatcttttatataagagttatcattaattataaagatatcatctgaaaggtatcttttaaaattcatggccgttaatattttggtatcggattgattttcccaatcatctattttgcccagaaacttaaatctaccctccagtgaaaaactgatataacttaataagataagctcaccaccaatgataggctgtaacattctatccgctttatccattgtgtattttttatagatttccattttattattctttattccgtcaaatttaccataaatcacaatacataaaatcactctactcttctaccttgtttaaaggcatttttggcctcatttaaactcatagaattagcacttccgtgcaaggttaggatgtttattttgcaccggatcatcttcccaatgacaaatatcacaaatgatatattcacctggaagaactgagatctcattttcacagcatgggcaagggattttttgatccaagttttatcctttgtctgttttattcactgattggcttgaaatataatttcaaaatttattactaagaaaagtgaaagtaaaaaaataaaataatacaattaggttgttaaatatgattttcagcaattaaatctacttaactctaacgttaacataaagtaacaaacttgttgataacacaataaaattgtcgttttttctatttcatggtaaataggtctgtttatctatacacggcttaaggaactggcatgataaaaaaattcttcgacattatttctattttcgggaaaaaagacgtctctgccacagaaaactatctacaagaagctctattacctcttactacatttgagcaaacacttcctaaaaaagcacttgattatattctgacaggtcaagatcctaacgtactttacgaattaaacaagatagatgctatcaaagcagctgttctgttcaataaaccaggaacattagattggtggtatagcggaaatgtgaatactggccaatatgacaaagtaatgtcccaatcaatcaaagcccgtcatcaattatatgccaaagtcggaggagaatttactgctgaacaaaccgtccgttttgctaaagtgatcgctgcagcttgccaggatattaatatcaaaatgacaacaacagaactcccatcatgggtactgtacctgttaggcgatgcattccataccacctatgaaaatgtcagcaatcttaacatcgcattacgtaatgggtggacaatggccttgattgctaaaatgattaatgaaggaacagagaaaacaggcccgaacgctctatttgcaatatttgatcgcaaggatatcgcagataatcatacgaaaaatctgaatagactttataaaataactgatttaaaaaattttattatcgaacatcaaaattttgttcgccagacattagtagaaaaattatcagcaaatggacaagtcgagttagttaattatctaaataataataacgaactacgtgatcattttgctgatgtaatcgtattattgtctactagcacacataaatctgttcgtaaaattgcagagccaatcctgaatacgttaccgtctgaaatagtaaaacagtatttaagccatacattatttaatggtaccccaaaacagcgcatacaagccgcagacctgttcgcacgtcagggtgataatcgcaatgttctggaagatgcgctaaaaatcgaaaaaagcaaatctgttatcaagggtattgaaagcgctttattacgttttactgtaatagatgaagctattaatcaggaaaagttagaattaccctcttttacaccattggaagacactccactaccagaaagtgccagagaaattctggtaactaatttccatgagatgctggctaacgcattagaaagagctgaatatgaaatagaagataataaaacctctaattactcatctaattgggctcaacgccagtataaagatttgcgtaaactaagcgatgagaagtgccgtgcattactcgataaactcaatggtgaaaaaggttattttaattcagaagaagttcaggtaattaagcataaaaatagaatcacaaaccttcctgaatttactttattccatgctgttcgtctggctacccataatagtgagcatgaccggagttttagtggttatcattttactggaagtataccagaaagaataattgctaatcttgaactacgccatgtcgaagacgtcttagcacaatgtcattttaataattccgcaagaaccactgctgaattttgtctggaatcctccgttggtcatcgcctttttccacatcctgagaaaatatggccattctattatcaaaacccggattttatcgctgaagcattaggcttaatgcctaataaaagtcaaaaccgttataggatgttcgaagtttcatgtgctattgatgttctcgccacctatccggcattaccaacacaatttattcctcgcattatggaattagctttaggtcaaaataaaactcatcgagtttctgcccagcaactgttggaaagaataacaaatattcatgaaacagttcaggaagggttaaaatcgaccaagcaagaaatccgcattacaacgatcgagtggctgactcgcataaaaaatccggcttccattccccatctttatgcgctactaaaaaaagagaaacgggaaattgtttgtgcagcactacttacggcattagaagaatttggtgaaaatatctctggatacctgtcaccagagatattattagaagaagcgcaaaaagggctgaaaggaaaaatacctgcaagtctaagttggtttaatttcaatgcattgccagcactcacctggaagaataaacaacccgtcgaccccgctattttccattggtgggtagttcttgctgttaaactgaaaatgccatcgggcaatgcactactgcagcgttatatcgatctattatccctcgaaagccaacaaaaaataggcagttttatcttacacagcttcgttgctcaggatgttaaaggcccatccttagaggaggctatggatgaagcgcagcgtgaagcaccatcacgcttaaacaattataagtcttgggtaaagcgctacccggaacactacagcaaatatgaaaatttcaccttagagcaagtaatagaagaaattaaaaacgaagttttgcggcgttattgcggttcagcaatcagtgacaaaggaatgttggccctcatttgcaacattgaaggacacgttgcaatccctgttttacgtaactacatgcgtgatcattaccaacgccgtgcccagattgaagccattctgactgcaatatccatcagcaatgacccgctgattattcaacttttactatcactttctcgccgttatcgtaccagttcaatacaggaaacagcgcgtgaattagtcactcaaatcgcagagcgtaacggttggagtgccgatgaacttgctgacagaactattccaagcgcaggattgaacgaaacaggtacgctggtacttgaatatggagaacgtactttcactgctcgtctgaatactaaacaaaaattagccttgtttaatccagaagggaaagagatcaaagctctgccagcggctcgtaataatgagagtgaagaacagattaaagaaacgaagaaactatttactgccagcaagaaagagttgaaacaagttatagaattacaggcggctcgtctctatgaagccatgtgtgctcaacgtcaatggcaaagcagtgattggctggagtatattctcactcatccagttatgcataaattaatcgagcaacttgtatggcaagaagtgagagatggagagatcatcaaccaattccgcccttctgacgatggctgcttactgaatctagacgatgatgaaattgttttacgaaatgattcaagtatccagcttgcacattcagcactagtcagcgaagaagatcgcaaagcgtggcttgctcacttcaaagattacaaggtgaagttccttttctcacaaatggaaaacaaaatccctgagctggatttgacgaaaaacgaaattgaagatcgtaaaggctgggttactgataccttcactctgcgtggcattctaacaaaaatgggctatcaacgtggtccaatacaagatgcaggatcattcgatcattattataaacatttctccagcctgaattactacgtcaatattgaattcagtggtagttatgtacctgaagaaaatattcctgcggtattgtttaacttaagtttcagcaagaatcacctgtattactgggagaaaaacaatattacgcttaaagatgttccacctatcttactggcagaaagttattcagattacctgaagcttgctgaagcctgtgtaggatttgaccctgaatgggaaaagaaaacaccttggtaataataagtgggatgccattcattggcatccattgatgaataattttagggaaaacataggtaaaaaatgctacctgaacaaaaaattatccgtgaaagtactgaaattcactttgctgatgaattggaacgtctaactaaagcggataaaaataatcctaaaccacaaggctggctacgttcacctcgggcagtgcgtcagtttattcttggtgatgaagaactcaatattacagcaaaatttttcggtgatgatgcgttggtagaccgtgccattgtaaccctgcttggaaagcaaggcttaatgctggtcggcgaaccgggaacagcaaaatccatgttatccgagctcttcgctgctgcaatttgcggagactctggattaaccattcagggcacagcaggaacaacagaagatcatattaaatattcgtggaattacgctttactattagcggaagggccaacagaaagagcattgataggttcaccactttatcagggcatgctacagggaaaaatagtccgttttgaagaaatcacccgttgcccaccggaaattcaggatgtattagtttcgctgatgtccgaaaaacaactaatgatacctgaaatgggagaaggtgcccgtatcaatgctaaacaaggctttaatctgattggcacagccaatttacgtgatcggggtgttcatgaaatgtcttcggcacttaaacgtcgtttcaattttgaaaccgtcaagccaattcaggatccagcatttgaaatttccctcattcattcacaattagaaagagaactgggtgatcttgctgcttctgtaactattcccaccaatgtcattgaattgctggtcaccacttttcaggagttacgttcaggaaatactcaggatggtggcaatatcaaaacaccagacgccgttatgtctactgcggaagcagtaaatatcgcttatgcctgcgcactggaagcacactatctgggaaataatgtactaaatggtggcgcaattgcccggcagttgatcggcgttgttttaaaagataatcctgatgatatcaaacggatgcgttactacatggataacattgcaagagaacgggccaaacaggatgaagattggagagcattttttaatgcttcccgtgaattttggcagtaacagaatggcagagcatgctctgccttctgatgaacaaaaggaattattatcgtgagtatttcttcaatacctttgccttcatatctgcccgagcgtattgataacgccctagaaaaatgggtatcactacaacaacagaatatctatttcgcacctatccgtcatcacagccctgcttgtgcctacggtgtactatcactgattgaatccgtaaaaccagattatattctcattgagggaccggatagttttaactctcttcttcccgggttgttacacaaagacactcgccctcctgttgctatcatggctcaggcagaacaacaaataactgctgatgagaatggtaatgcagaaaaacaccattgcaccgcatatttcccattttgtgaatattcaccagagtggcaagctctacatataggacacagtcatcaagctaaactactattcatagatctcccttgggcggcgcaatggaaagatgaagataaccgcgatattcaaagccggagcttacagaaagagcgctaccttgcacatagccaatttatcgctcggttagctaaaaaatgccattgtcgtgatcatgatgatgtttgggaacatttgtttgagctgcgctcaatagagtcgctcacagactggcaacaactcttttatgatacttttatctggtgtgctttcgcccgactggattatgaacctcaggtactggaagcagaaggatcattacagcgtgaagcacatatgctgatgcatatcctggcagttaaacagcataaacctaatgcaaaaattctgattgttacaggtggatttcatacactggcgcttgtagaggaacttgcgaaattctctgaaacacaattcattccttcggatgcccaacaaaaacaatttgataagatgctcaagtttcgggagaaagatagctcatggctgattcgttatagttttgatcgtcttgatgcactcaatggctacgcttcaggcataccttcacccgcattttatcagcgcagttggcagagcctgctgaaacaacgacaggacagagaagccagtcaccaatcctcagatcaaccaacacaaatttaccgcaataaaacgggagtggcatttttaactgatgttgctgaagccatacggaaaaagacatttgataatccccccagctatctcaccgtaaagcatgctgcggagcagagtctgcggctggcagcactcagaggtcacgcaggtccgggacgctatgatttacttgatggattacaaagtagctttattaaaggcagtcttgatgacagccagaatgaattatggagtgaaatcaaaagatgcttctctggttatctgcttggctctatcccaacaggtacaaccactccacctttagtcgcagaatcctatgaaaaagcgaaagcttttcgtttcaaacttgatgacacactgataaaaatcaccaaactagatatctaccgtaatccacaacatcgtttacgaagccgctttctacatttactggcattcctggagatccatttcgctcaccggactaacggacctgattttctctccggacatcagcttgacctcttatttgaagagtggcaatacgcatggacaccagcggttgaaggtgagcttattgctctttcggaaaaaggcagccaactagaagcaattgcactcagcaaactattgatgctggaaaagcgattagaagaacaggggcaaagccgctctagccagagcgttacctcattactgactcaagcggtgatgattgggctgcatcaacgtattccgatacttctccaattacttgatagctatatccaacaggattttcgtctggactccctaatcacctgtggtcatcagttaatacacttatggcgtggacgaacattctttgatattacagatcaatccatactggagaacagattatatcaggttatacctcaggcatttttctgtctggatcaaatcgctcagggtgatgaacaacagcaggaaacccatctgcaagctcttttatcattgcgagaactgatcgaatttatgcctatgatcagtcaaatacaaaacagtacccattcatatcaaagcgatttttaccaacaacttaaccgactggatggaaaactggatgaggtccccctgcttaaaggagcaattgatgcactgcgttatctgggcgatcaggtagatgaaaatctgctgactgataatctggagaaaatattcagtacgggaagtgatcctgaaaaagcaatcggctatttcgtcggtattatgcgtactgctcctgagttagtaatcaaaacaccaatattgattgatcatctaaatcaactattaagtcagtgggatgatcaacgttttatccaaatacttcccgatttacgtttcgcattcagccagctaaccccgaaacaaaatgaagaattgtctcgctatatcgctggagagatcggtctgtcaagacaggaactgtctctatggcaaaccgaattcagtgaaaaagagatgctggaggctactgggttaaatcagaagttacatacccgtttatcagaacagcaattgcttggatggtttaataccgataaagggaaatataaatgagccaacatgatgatatgcctgatgacaaaaagcagcaggcaaaacgctggcgccttgtgttcgggcaatatgcggataatgctctgggacaagcttcatttaatacagaagattttaaaatcgaacgaactctcgattttctctatcgcagagaatatcaacgcagggggctacgtcaggaacgaggacgtcatggttcactggatgcttcgcaactggccgccgtaaactggctcaatcaggcccgtaaacttttcccgaacagtacgttcgaacgtatgcaatcacaggcaatagaacgttatgaaatcaatagctttttgaatgaaccacaagctttgaaagcaatggaaccaacaaaagcactagcaaaagcgctgatgagtctacgcgggaaaatgaatgaagaaacccgggaagcggtaaggcaaattatccgtcaagtagtggaagatattctacgccagatacgcaataacttccgccagtctctgacgggacgcagaaatcgctttcgtcgttctcttatccccaatagccgtaattttgactggagagcaactattgccgctaacctgaaaaattatgataccagtaataaacggttattgattgaaacaccttacttcaattcccggatgcaacagcatatgccatgggatgtcattctctgtgtcgatcagagcggctcaatggccaactcgattatgtatgctgcaatttgtgccagcattctcgcctcattacctacaataaacgtttccctagtggtatttgatactcaggtagttgatctgagccatcttgcccatgatcccgttgaagtactgatgactgtacaattgggtggaggaactgatattgcaggtgcaatgcaatattgtgagacattagtcaaaaaccctaaacgcactattgtttcattgattagcgacttcgaagaaggaggttccttagctaggttactgaattgtacccagcgcctgcacagccaacagattaagttactagggctcgcagctctggatgatgaagcaatgcctgcatatgactcaaccatagctcagaaactggcagacaggggcatgcacgtcgcagcgttaacaccggaacactttgcacaatggctcgcggaggtgatgcaatgagttggcagacaatttatctccactatgatgaagatgccttggcagtcttcgccaacatgggattattacggcgagcacgtaaagatgttgataatggtaaagttgcattaatagatccgcaaggtggtatttttaacagcgatgggcaacaggttattttagatgctcaaggcgtacaaaaagcacaatgcgattgtcccgcatcagattgttgtaaacatattttggcaactgttctgtggctacaagcaaacagtacagaacaagcatcagaagaagaaccgataaatgaaactatgcctcaatcttctgaatcgctgatatctgaattactttccctctcccctgaggaattaattaaactaacaggtaaagttaattgccgcctggcaatacgtttgttacagcaatgggaacaagatcagaaacaaatacgtacagaagatatcaattcccagctgaagatctatctgcctgagtttgaggaacctatcattttcctaaagaaaagcggttataaaggtatgctttcttctctgcctgaaaaccagcgtaaggctcttcatcttgctgcgatagtaaaactgtttaaacaataccagcaatcctgggtatggccggatgagttaaatgttataccaagtgaaaaacagccgctcagcaaggatgaaaaaaacctcatagcgattattagtcagttcatggaagaactattacgacaaggcttatcccatatcagtcgtagcagtgccactcaacttcatctactgaacatgtctgccaaagcagaaggattgccattgttagcttcttatttaagaggattaagcggacaagtaaaactgctggcagataaacatttcactatggacgaaggaagggttttacactttttagcccagctttctgcttatctgtatcaactgactcacgcagcaccagaccagttaatgaaactgcgcggaattctacgcaaacaatatgatgaaaaaaatactaccttatcattaattcctatcagtgccgactggtggacaacaaacagtggcgcactaggtgcaacttttactttctggaacgacgaagagaaacaattattacaaagtactcaggcaagagccaatcgccacgatcctcactttaactgtcatggagtctggtcaacattatctgtctggaaacaaactgctgataagcttatgcgccggcctttcatacttcatttcccaagaatatcggatgaaggaaaattagcgaccagtggtgacagttacgcaacaagtcagaacacacctttcaatctgaagcaatatcaatcattacaaactcactttggtatacaggattggaatgaattgccagattatttttcacgacaacctgatgattttttctcgccattattactgcatatagagaattatcagccattattctggtatgaaattgagcaatgtataatatgggaagtaaatgattctaagggtaactccgctttcttacggctttactgggaagacgcaatacacaatcacattgaagagcttcgctatattacgaaaaaagagttggaaatcattggagtcagtgtgcagcccactcgaagggaacaacgtattgatcttatcccaactacattgtggctaaaaaaaggtgatgatatcacgtggttttatcttgattttgattttcacccacgtaagaaacaacgctctacatttatcagtcatatccaggaatatatggcaaagaaaaaacgacagaacgcagcacattactcagaacctacattatcgcaaaaactgtgccgtccaattctatcggtattagaagcacaagcttgtacaggcaggcaatccctttcaatttcacagaaagagcagctggatcttagccgacaaactgcggaagatttgggtatggacttactggcaaattgtttgcgtgattacctaatactaaataaacaggatgcaacggaatcactattacggctgacatggctatgtaaccaattacaacagttacagagtcagttaccaatacagctgagatagaagatccagaaatatgtagcttctgaagcaagaaaggagcgtgctaaattttttaacagatacaattatcaccagccgggtttgataaaaaggctaactccctttaccggctggcttttgattgaagagaaattacttccaaaggttcgggcaaaatcaacggacaatcagccccagtaaaatccccactgcactaaaatcagcatcgctaaatgtggtattggcgatgccgatatcgccaagtacaggcagcaggaataccggcaggaatgtaattaacaggccttgagcaaaagcaccgaggattgctccccttcttcctcccgttgcattaccaaaaacacccgcagttgcgccaacaaagaagtgaggaacaacgccgggtataatcaccgtcatattcaaccaatagagtaaaaacatgccgatgactccagcaataaaactgctcaggaaaccaatcagcaccgcattgggtgcatagggaaaaaccaccgggcaatccagtgcgggtttggagttcgggactaatttgtcggagatacccttaaatgcaggcacaatttcggcaatgaccatcctgactccctgtaaaatgatataaacccctgctgcaaatgtgatcgattgcatcagagagtacatgatgctgttttttccaccactgatctgccgcacaaattcctgatcagcaaacaggcaggtgagaagaaagataatcgccattgttagagagatggaaacagaggtatcacgcagaaataacaggctctttggtacgttcatttcttctgtggaatgatccctattccccagtttactgccaataaacccagccagaacataagagagcgtggaaaagtgcccaatggctacatcgtcagaaccggtcacttttttcatgtaaggatgagctattgccggaaaaaagaccattgaaacaccaacaacaattgaccccgtcgcaacaagtgccacaccatgaatcccggcgacagaaagaataacagccaccatcatcgacataaataatgtgtgatggccggtcaggaatatgaatttccacggagtaaagcgggcaatcagaatattaatcaccattgcgaaaaacataatcatcgccatctctttgccaaaacttttctgcgcgattgatacgatagcttcgttattcggcacaacaccctgaataccaaaagtatgttgaaaaataacggcgaatccactcaatgaagaaacgataactccagcaccagcgcccaggataacaaacccgagcagggtttttactgtacctttaatacactcagtcacaggttttttctgtaataccaagccaatcagggaaatcaatccaactaaaacagcaggctctgccaatacgtcattcatcagaaagcggaaaaaatccatatgcgtctccggttacaatctgccaagatcttgcaatgccgcagacaagcgtaatttcattgcagatttatcgagcatattttctaatacaacaatttttccatttacctgctgctcagccagttgttctgcaatatcttttgtcgcaacaaaaatatcgctctttattccttttgctgaacctaaatctgtatgtccgacactggcttcaacacctaattcctgcaaaatacttttaatactcatttccattattaggctggtgcccaaaccatgaccgcaaacaacggttatattcatcttattttcctgttaactaaaagtagtggttaatacccctgaataatggaaaaagcttcatcctgatttttagcctgcattaatcgattaattttttcctgatcatcaaataacccagccagttcagcaatgacttctatatggctgtaattacttgttgtagcaaatacaaacaataatttaaccggatcattttctgctgacccaaatctgacaccctgttttattaatgtcaggctcagggcaagccgattaacgccctgttctggtctggcgtgtggtattgctatacctgaacccacaacgtaataaggaccaaatttttcatgggactcataaatcgcctcgacataactgggttgaatcgctccattattaatcagtggctgacaggcgatttcaatggcctcgtgccaatctctgacatcaggaaaccattggatgacatcgcgggttaataaggttcgcagcattgaatttccccgtatacttttcgtctttcaaattacctctttgtggcggaattttgaaatccatccagtatatttcgttaacaagcggttatttccataaagggcatcgatgattaaaagaatagccagtgcaaatcaaacctactgacggaaagaaataaaaatcacaataatacggagtaaatcacattatggggaaacaatgaggaggtacgtaaaaaaatccccgaatctaaaattcggggattagcgggttatgttaacgaataatcattgtcggctaacggactaaatgcaaaaagtgaatgtgtttttcgtattgatccaaaatatcgtggatgatctgctcctgcgtccatcccatcaggtcgtaatcctgaccgccttctttgaggtaaacctccgcacgataatatttttgttcttcaattttttcttcatcttccagaccggcaagagcaaatgcaggctgaatataaccccgtaaacggacttcataaacgaagctaatattttcaccaaagtctacttccagatgaatgcgatcttcagcttcatcattaatcaaaactgttttattttgtttttccagctctccggcaaccatactcattgactgctggataacttcgctcataaaacgttttacctgtgatcgcttaggataatagacaatatttcttaacctacgctgccacggtatcgggttacggctggccgtaggcgctatcgtcgtcatctgctggctatctttcttataggcatcaatccgcaatgctttaagcaagccatatatcgaaattaataacacaattgaaaaaggaagcgcgctggcaatggttaccgtttgcagagccgataatcctcctgcaaccagtagggaaatagccacaacgcccattaatcccgcccagaaaattctttgccagacaggtgtatgatgagcaccaccggatgccagtgtatcaactaccattgctccggaatctgctgaggtgacaaaaaacatcaccaccatcaccattgcaataaatgataaaacagtcggcagagggaaatattccaggaaattaaacagggccagagaaacatctgtctgtacgacattagctaattctttggcccctttattggcaatcagatcaatagcgctattaccgaatgccgtcatccacatcagggtaaaaccactgggtacaaacagaacaccagttacaaattccctgattgtccgcccccgggaaactctggcgataaacattccaacaaacggagaccaggataaccaccatccccaatacagtaatgtccatccccccagccagttactggacttaggttcataggcatacaagttaaatgttttgctgacaatctcagaaaagtatccgccggtgttttccacaaaggatttcaacaacagcacggttggccctaaagcgacgaccaacacaagcaaaagcacagccagacctaaattcacttcggataaaatccggatgcctttatccagaccggaaacaacagaaatagtcgccagagcagtgatcgcaatgatcagtataacttgtatcgtttcattaataggcaggccaaatagatggttaaggcctgcattcacctgaagaacgccgtatccaagagatgtcgcaacaccaaataccgtcccgataacggcaaaaatatctaccgtgtgaccaatcggtccataaattttatcgccgataatcgggtacagcgctgaacgcagggttaaaggcaatccatgacgataactaaaaaatgccagaattaaagccacaatggcatagatcgcccaggcatgtagtccccagtggaagaaagttaattgcatagcctgtttagctgcggcaatactttcaggagtacccaccggtggtgacagatagtgcatcaccggctcagcaacaccaaagaacatcagcccgatacccatacccgcagaaaacaacatggcaaaccaggaaaaataactgaaatccggttcagcatgatcggggccaagcttgatattgccgtatctggataaccccagataggtaactgaaagtaaaatcaacgcaacggcaaggatataaaaccaactagcattaacaaacaagtcttgctgcaaagatttaaaccacctatcggcaagctctggtttcaaaccagcaaatgcgaccaatgcaatgatcaaaaatgccgagaagaaaaagactggtgggttaatgtaagttttcgtttctacctgtccagtattatcttgactcatactcatccttcaaaaattagtgtccgacactatctcctatatcattcaaaaaaattttgtcgaaattttaataaaattaaataaccccatcaggagttacccatcacgcaaacattttgtgtgcataattcactcaatttttacgttcatgatcaccttaacataaaaatcagaccaactgtacttatagagagttatacaaaaaatgtcattaacaaattaataacatcaatagctaataagttaaaaacaaaaaacattaacctcatttttcgtgtaattcattaatagtatttaactgatcgtgcaacgatttctcattcaggttaataactaacataaggaagttaacgtcatgttaaacgcgttaaacagaccaaatgggttaaaaggcaagcgagttgtagttacaggtggtggacgtgattttgggcaggctatttctgtctggctggcacgggaaggtgcccatgttgatctctgtgctcgccaattaaaaaatgctgaagcgacctgtgaaattattcagagtgaaggaggagtcgcaagaagctatcagtgcgataccagtgatgcacaatcagtacgcgattttgccgatcagttactacaggacagtaagcccatcgatatactgatattaagtgctgcgcagtggctggagggtgatctgagtgagaataatagtgatgaagatattatcagcacgataaattctggggcgacaggttccatgttattgaccaaaatgctattaccaagcctgcgccagtctcagggagctgatattattgcgatggtatcagtttgtggtatcccgaacttcacccgctctgtcgcccatccggctttttttgcagccaaacatgctatgagtggtttctgcaacacgatttcacaccagttaagtaaagataatgttcgtgtgacaggaatataccctcccgactttgaacttaatggatttgatgaaattctggatgatcacacaacaatgggtaaacaaatgttgaatggccgttcggtatgggaatccatacggtttgttctgacccagccccgcagttgccatgtcagtgcaatttattttcagggaccgacttttgaagatatgaaacagttatagtcgttcagaataatttattattcatattctt

SEQ ID NO: 2568 - DNA, 19910 bp, Xenorhabdus sp.; identical to SEQ ID NO: 2567
  CDS (795)..(1229)

SEQ ID NO: 2569 - DNA, 19910 bp, Xenorhabdus sp.; identical to SEQ ID NO: 2567
  CDS (1727)..(2554)

SEQ ID NO: 2570 - DNA, 19910 bp, Xenorhabdus sp.; identical to SEQ ID NO: 2567
  CDS (3837)..(7286)

SEQ ID NO: 2571 - DNA, 19910 bp, Xenorhabdus sp.; identical to SEQ ID NO: 2567
  CDS (7353)..(8450)

SEQ ID NO: 2572 - DNA, 19910 bp, Xenorhabdus sp.; identical to SEQ ID NO: 2567
  CDS (8607)..(11087)

SEQ ID NO: 2573 - DNA, 19910 bp, Xenorhabdus sp.; identical to SEQ ID NO: 2567
  CDS (11084)..(12235)

SEQ ID NO: 2574 - DNA, 19910 bp, Xenorhabdus sp.; identical to SEQ ID NO: 2567
  CDS (12232)..(14292)

SEQ ID NO: 2575 - DNA, 19910 bp, Xenorhabdus sp.; identical to SEQ ID NO: 2567
  CDS (19178)..(19879)

SEQ ID NO: 2576 - DNA, 19910 bp, Xenorhabdus sp.
  CDS (3960)..(4193)
aagaatatgaataataaattattctgaacgactataactgtttcatatcttcaaaagtcggtccctgaaaataaattgcactgacatggcaactgcggggctgggtcagaacaaaccgtatggattcccataccgaacggccattcaacatttgtttacccattgttgtgtgatcatccagaatttcatcaaatccattaagttcaaagtcgggagggtatattcctgtcacacgaacattatctttacttaactggtgtgaaatcgtgttgcagaaaccactcatagcatgtttggctgcaaaaaaagccggatgggcgacagagcgggtgaagttcgggataccacaaactgataccatcgcaataatatcagctccctgagactggcgcaggcttggtaatagcattttggtcaataacatggaacctgtcgccccagaatttatcgtgctgataatatcttcatcactattattctcactcagatcaccctccagccactgcgcagcacttaatatcagtatatcgatgggcttactgtcctgtagtaactgatcggcaaaatcgcgtactgattgtgcatcactggtatcgcactgatagcttcttgcgactcctccttcactctgaataatttcacaggtcgcttcagcattttttaattggcgagcacagagatcaacatgggcaccttcccgtgccagccagacagaaatagcctgcccaaaatcacgtccaccacctgtaactacaactcgcttgccttttaacccatttggtctgtttaacgcgtttaacatgacgttaacttccttatgttagttattaacctgaatgagaaatcgttgcacgatcagttaaatactattaatgaattacacgaaaaatgaggttaatgttttttgtttttaacttattagctattgatgttattaatttgttaatgacattttttgtataactctctataagtacagttggtctgatttttatgttaaggtgatcatgaacgtaaaaattgagtgaattatgcacacaaaatgtttgcgtgatgggtaactcctgatggggttatttaattttattaaaatttcgacaaaatttttttgaatgatataggagatagtgtcggacactaatttttgaaggatgagtatgagtcaagataatactggacaggtagaaacgaaaacttacattaacccaccagtctttttcttctcggcatttttgatcattgcattggtcgcatttgctggtttgaaaccagagcttgccgataggtggtttaaatctttgcagcaagacttgtttgttaatgctagttggttttatatccttgccgttgcgttgattttactttcagttacctatctggggttatccagatacggcaatatcaagcttggccccgatcatgctgaaccggatttcagttatttttcctggtttgccatgttgttttctgcgggtatgggtatcgggctgatgttctttggtgttgctgagccggtgatgcactatctgtcaccaccggtgggtactcctgaaagtattgccgcagctaaacaggctatgcaattaactttcttccactggggactacatgcctgggcgatctatgccattgtggctttaattctggcattttttagttatcgtcatggattgcctttaaccctgcgttcagcgctgtacccgattatcggcgataaaatttatggaccgattggtcacacggtagatatttttgccgttatcgggacggtatttggtgttgcgacatctcttggatacggcgttcttcaggtgaatgcaggccttaaccatctatttggcctgcctattaatgaaacgatacaagttatactgatcattgcgatcactgctctggcgactatttctgttgtttccggtctggataaaggcatccggattttatccgaagtgaatttaggtctggctgtgcttttgcttgtgttggtcgtcgctttagggccaaccgtgctgttgttgaaatcctttgtggaaaacaccggcggatacttttctgagattgtcagcaaaacatttaacttgtatgcctatgaacctaagtccagtaactggctggggggatggacattactgtattggggatggtggttatcctggtctccgtttgttggaatgtttatcgccagagtttcccgggggcggacaatcagggaatttgtaactggtgttctgtttgtacccagtggttttaccctgatgtggatgacggcattcggtaatagcgctattgatctgattgccaataaaggggccaaagaattagctaatgtcgtacagacagatgtttctctggccctgtttaatttcctggaatatttccctctgccgactgttttatcatttattgcaatggtgatggtggtgatgttttttgtcacctcagcagattccggagcaatggtagttgatacactggcatccggtggtgctcatcatacacctgtctggcaaagaattttctgggcgggattaatgggcgttgtggctatttccctactggttgcaggaggattatcggctctgcaaacggtaaccattgccagcgcgcttcctttttcaattgtgttattaatttcgatatatggcttgcttaaagcattgcggattgatgcctataagaaagatagccagcagatgacgacgatagcgcctacggccagccgtaacccgataccgtggcagcgtaggttaagaaatattgtctattatcctaagcgatcacaggtaaaacgttttatgagcgaagttatccagcagtcaatgagtatggttgccggagagctggaaaaacaaaataaaacagttttgattaatgatgaagctgaagatcgcattcatctggaagtagactttggtgaaaatattagcttcgtttatgaagtccgtttacggggttatattcagcctgcatttgctcttgccggtctggaagatgaagaaaaaattgaagaacaaaaatattatcgtgcggaggtttacctcaaagaaggcggtcaggattacgacctgatgggatggacgcaggagcagatcatccacgatattttggatcaatacgaaaaacacattcactttttgcatttagtccgttagccgacaatgattattcgttaacataacccgctaatccccgaattttagattcggggatttttttacgtacctcctcattgtttccccataatgtgatttactccgtattattgtgatttttatttctttccgtcagtaggtttgatttgcactggctattcttttaatcatcgatgccctttatggaaataaccgcttgttaacgaaatatactggatggatttcaaaattccgccacaaagaggtaatttgaaagacgaaaagtatacggggaaattcaatgctgcgaaccttattaacccgcgatgtcatccaatggtttcctgatgtcagagattggcacgaggccattgaaatcgcctgtcagccactgattaataatggagcgattcaacccagttatgtcgaggcgatttatgagtcccatgaaaaatttggtccttattacgttgtgggttcaggtatagcaataccacacgccagaccagaacagggcgttaatcggcttgccctgagcctgacattaataaaacagggtgtcagatttgggtcagcagaaaatgatccggttaaattattgtttgtatttgctacaacaagtaattacagccatatagaagtcattgctgaactggctgggttatttgatgatcaggaaaaaattaatcgattaatgcaggctaaaaatcaggatgaagctttttccattattcaggggtattaaccactacttttagttaacaggaaaataagatgaatataaccgttgtttgcggtcatggtttgggcaccagcctaataatggaaatgagtattaaaagtattttgcaggaattaggtgttgaagccagtgtcggacatacagatttaggttcagcaaaaggaataaagagcgatatttttgttgcgacaaaagatattgcagaacaactggctgagcagcaggtaaatggaaaaattgttgtattagaaaatatgctcgataaatctgcaatgaaattacgcttgtctgcggcattgcaagatcttggcagattgtaaccggagacgcatatggattttttccgctttctgatgaatgacgtattggcagagcctgctgttttagttggattgatttccctgattggcttggtattacagaaaaaacctgtgactgagtgtattaaaggtacagtaaaaaccctgctcgggtttgttatcctgggcgctggtgctggagttatcgtttcttcattgagtggattcgccgttatttttcaacatacttttggtattcagggtgttgtgccgaataacgaagctatcgtatcaatcgcgcagaaaagttttggcaaagagatggcgatgattatgtttttcgcaatggtgattaatattctgattgcccgctttactccgtggaaattcatattcctgaccggccatcacacattatttatgtcgatgatggtggctgttattctttctgtcgccgggattcatggtgtggcacttgttgcgacggggtcaattgttgttggtgtttcaatggtcttttttccggcaatagctcatccttacatgaaaaaagtgaccggttctgacgatgtagccattgggcacttttccacgctctcttatgttctggctgggtttattggcagtaaactggggaatagggatcattccacagaagaaatgaacgtaccaaagagcctgttatttctgcgtgatacctctgtttccatctctctaacaatggcgattatctttcttctcacctgcctgtttgctgatcaggaatttgtgcggcagatcagtggtggaaaaaacagcatcatgtactctctgatgcaatcgatcacatttgcagcaggggtttatatcattttacagggagtcaggatggtcattgccgaaattgtgcctgcatttaagggtatctccgacaaattagtcccgaactccaaacccgcactggattgcccggtggtttttccctatgcacccaatgcggtgctgattggtttcctgagcagttttattgctggagtcatcggcatgtttttactctattggttgaatatgacggtgattatacccggcgttgttcctcacttctttgttggcgcaactgcgggtgtttttggtaatgcaacgggaggaagaaggggagcaatcctcggtgcttttgctcaaggcctgttaattacattcctgccggtattcctgctgcctgtacttggcgatatcggcatcgccaataccacatttagcgatgctgattttagtgcagtggggattttactggggctgattgtccgttgattttgcccgaacctttggaagtaatttctcttcaatcaaaagccagccggtaaagggagttagcctttttatcaaacccggctggtgataattgtatctgttaaaaaatttagcacgctcctttcttgcttcagaagctacatatttctggatcttctatctcagctgtattggtaactgactctgtaactgttgtaattggttacatagccatgtcagccgtaatagtgattccgttgcatcctgtttatttagtattaggtaatcacgcaaacaatttgccagtaagtccatacccaaatcttccgcagtttgtcggctaagatccagctgctctttctgtgaaattgaaagggattgcctgcctgtacaagcttgtgcttctaataccgatagaattggacggcacagtttttgcgataatgtaggttctgagtaatgtgctgcgttctgtcgttttttctttgccatatattcctggatatgactgataaatgtagagcgttgtttcttacgtgggtgaaaatcaaaatcaagataaaaccacgtgatatcatcacctttttttagccacaatgtagttgggataagatcaatacgttgttcccttcgagtgggctgcacactgactccaatgatttccaactcttttttcgtaatatagcgaagctcttcaatgtgattgtgtattgcgtcttcccagtaaagccgtaagaaagcggagttacccttagaatcatttacttcccatattatacattgctcaatttcataccagaataatggctgataattctctatatgcagtaataatggcgagaaaaaatcatcaggttgtcgtgaaaaataatctggcaattcattccaatcctgtataccaaagtgagtttgtaatgattgatattgcttcagattgaaaggtgtgttctgacttgttgcgtaactgtcaccactggtcgctaattttccttcatccgatattcttgggaaatgaagtatgaaaggccggcgcataagcttatcagcagtttgtttccagacagataatgttgaccagactccatgacagttaaagtgaggatcgtggcgattggctcttgcctgagtactttgtaataattgtttctcttcgtcgttccagaaagtaaaagttgcacctagtgcgccactgtttgttgtccaccagtcggcactgataggaattaatgataaggtagtatttttttcatcatattgtttgcgtagaattccgcgcagtttcattaactggtctggtgctgcgtgagtcagttgatacagataagcagaaagctgggctaaaaagtgtaaaacccttccttcgtccatagtgaaatgtttatctgccagcagttttacttgtccgcttaatcctcttaaataagaagctaacaatggcaatccttctgctttggcagacatgttcagtagatgaagttgagtggcactgctacgactgatatgggataagccttgtcgtaatagttcttccatgaactgactaataatcgctatgaggtttttttcatccttgctgagcggctgtttttcacttggtataacatttaactcatccggccatacccaggattgctggtattgtttaaacagttttactatcgcagcaagatgaagagccttacgctggttttcaggcagagaagaaagcatacctttataaccgcttttctttaggaaaatgataggttcctcaaactcaggcagatagatcttcagctgggaattgatatcttctgtacgtatttgtttctgatcttgttcccattgctgtaacaaacgtattgccaggcggcaattaactttacctgttagtttaattaattcctcaggggagagggaaagtaattcagatatcagcgattcagaagattgaggcatagtttcatttatcggttcttcttctgatgcttgttctgtactgtttgcttgtagccacagaacagttgccaaaatatgtttacaacaatctgatgcgggacaatcgcattgtgctttttgtacgccttgagcatctaaaataacctgttgcccatcgctgttaaaaataccaccttgcggatctattaatgcaactttaccattatcaacatctttacgtgctcgccgtaataatcccatgttggcgaagactgccaaggcatcttcatcatagtggagataaattgtctgccaactcattgcatcacctccgcgagccattgtgcaaagtgttccggtgttaacgctgcgacgtgcatgcccctgtctgccagtttctgagctatggttgagtcatatgcaggcattgcttcatcatccagagctgcgagccctagtaacttaatctgttggctgtgcaggcgctgggtacaattcagtaacctagctaaggaacctccttcttcgaagtcgctaatcaatgaaacaatagtgcgtttagggtttttgactaatgtctcacaatattgcattgcacctgcaatatcagttcctccacccaattgtacagtcatcagtacttcaacgggatcatgggcaagatggctcagatcaactacctgagtatcaaataccactagggaaacgtttattgtaggtaatgaggcgagaatgctggcacaaattgcagcatacataatcgagttggccattgagccgctctgatcgacacagagaatgacatcccatggcatatgctgttgcatccgggaattgaagtaaggtgtttcaatcaataaccgtttattactggtatcataatttttcaggttagcggcaatagttgctctccagtcaaaattacggctattggggataagagaacgacgaaagcgatttctgcgtcccgtcagagactggcggaagttattgcgtatctggcgtagaatatcttccactacttgacggataatttgccttaccgcttcccgggtttcttcattcattttcccgcgtagactcatcagcgcttttgctagtgcttttgttggttccattgctttcaaagcttgtggttcattcaaaaagctattgatttcataacgttctattgcctgtgattgcatacgttcgaacgtactgttcgggaaaagtttacgggcctgattgagccagtttacggcggccagttgcgaagcatccagtgaaccatgacgtcctcgttcctgacgtagccccctgcgttgatattctctgcgatagagaaaatcgagagttcgttcgattttaaaatcttctgtattaaatgaagcttgtcccagagcattatccgcatattgcccgaacacaaggcgccagcgttttgcctgctgctttttgtcatcaggcatatcatcatgttggctcatttatatttccctttatcggtattaaaccatccaagcaattgctgttctgataaacgggtatgtaacttctgatttaacccagtagcctccagcatctctttttcactgaattcggtttgccatagagacagttcctgtcttgacagaccgatctctccagcgatatagcgagacaattcttcattttgtttcggggttagctggctgaatgcgaaacgtaaatcgggaagtatttggataaaacgttgatcatcccactgacttaatagttgatttagatgatcaatcaatattggtgttttgattactaactcaggagcagtacgcataataccgacgaaatagccgattgctttttcaggatcacttcccgtactgaatattttctccagattatcagtcagcagattttcatctacctgatcgcccagataacgcagtgcatcaattgctcctttaagcagggggacctcatccagttttccatccagtcggttaagttgttggtaaaaatcgctttgatatgaatgggtactgttttgtatttgactgatcataggcataaattcgatcagttctcgcaatgataaaagagcttgcagatgggtttcctgctgttgttcatcaccctgagcgatttgatccagacagaaaaatgcctgaggtataacctgatataatctgttctccagtatggattgatctgtaatatcaaagaatgttcgtccacgccataagtgtattaactgatgaccacaggtgattagggagtccagacgaaaatcctgttggatatagctatcaagtaattggagaagtatcggaatacgttgatgcagcccaatcatcaccgcttgagtcagtaatgaggtaacgctctggctagagcggctttgcccctgttcttctaatcgcttttccagcatcaatagtttgctgagtgcaattgcttctagttggctgcctttttccgaaagagcaataagctcaccttcaaccgctggtgtccatgcgtattgccactcttcaaataagaggtcaagctgatgtccggagagaaaatcaggtccgttagtccggtgagcgaaatggatctccaggaatgccagtaaatgtagaaagcggcttcgtaaacgatgttgtggattacggtagatatctagtttggtgatttttatcagtgtgtcatcaagtttgaaacgaaaagctttcgctttttcataggattctgcgactaaaggtggagtggttgtacctgttgggatagagccaagcagataaccagagaagcatcttttgatttcactccataattcattctggctgtcatcaagactgcctttaataaagctactttgtaatccatcaagtaaatcatagcgtcccggacctgcgtgacctctgagtgctgccagccgcagactctgctccgcagcatgctttacggtgagatagctggggggattatcaaatgtctttttccgtatggcttcagcaacatcagttaaaaatgccactcccgttttattgcggtaaatttgtgttggttgatctgaggattggtgactggcttctctgtcctgtcgttgtttcagcaggctctgccaactgcgctgataaaatgcgggtgaaggtatgcctgaagcgtagccattgagtgcatcaagacgatcaaaactataacgaatcagccatgagctatctttctcccgaaacttgagcatcttatcaaattgtttttgttgggcatccgaaggaatgaattgtgtttcagagaatttcgcaagttcctctacaagcgccagtgtatgaaatccacctgtaacaatcagaatttttgcattaggtttatgctgtttaactgccaggatatgcatcagcatatgtgcttcacgctgtaatgatccttctgcttccagtacctgaggttcataatccagtcgggcgaaagcacaccagataaaagtatcataaaagagttgttgccagtctgtgagcgactctattgagcgcagctcaaacaaatgttcccaaacatcatcatgatcacgacaatggcattttttagctaaccgagcgataaattggctatgtgcaaggtagcgctctttctgtaagctccggctttgaatatcgcggttatcttcatctttccattgcgccgcccaagggagatctatgaatagtagtttagcttgatgactgtgtcctatatgtagagcttgccactctggtgaatattcacaaaatgggaaatatgcggtgcaatggtgtttttctgcattaccattctcatcagcagttatttgttgttctgcctgagccatgatagcaacaggagggcgagtgtctttgtgtaacaacccgggaagaagagagttaaaactatccggtccctcaatgagaatataatctggttttacggattcaatcagtgatagtacaccgtaggcacaagcagggctgtgatgacggataggtgcgaaatagatattctgttgttgtagtgatacccatttttctagggcgttatcaatacgctcgggcagatatgaaggcaaaggtattgaagaaatactcacgataataattccttttgttcatcagaaggcagagcatgctctgccattctgttactgccaaaattcacgggaagcattaaaaaatgctctccaatcttcatcctgtttggcccgttctcttgcaatgttatccatgtagtaacgcatccgtttgatatcatcaggattatcttttaaaacaacgccgatcaactgccgggcaattgcgccaccatttagtacattatttcccagatagtgtgcttccagtgcgcaggcataagcgatatttactgcttccgcagtagacataacggcgtctggtgttttgatattgccaccatcctgagtatttcctgaacgtaactcctgaaaagtggtgaccagcaattcaatgacattggtgggaatagttacagaagcagcaagatcacccagttctctttctaattgtgaatgaatgagggaaatttcaaatgctggatcctgaattggcttgacggtttcaaaattgaaacgacgtttaagtgccgaagacatttcatgaacaccccgatcacgtaaattggctgtgccaatcagattaaagccttgtttagcattgatacgggcaccttctcccatttcaggtatcattagttgtttttcggacatcagcgaaactaatacatcctgaatttccggtgggcaacgggtgatttcttcaaaacggactatttttccctgtagcatgccctgataaagtggtgaacctatcaatgctctttctgttggcccttccgctaatagtaaagcgtaattccacgaatatttaatatgatcttctgttgttcctgctgtgccctgaatggttaatccagagtctccgcaaattgcagcagcgaagagctcggataacatggattttgctgttcccggttcgccgaccagcattaagccttgctttccaagcagggttacaatggcacggtctaccaacgcatcatcaccgaaaaattttgctgtaatattgagttcttcatcaccaagaataaactgacgcactgcccgaggtgaacgtagccagccttgtggtttaggattatttttatccgctttagttagacgttccaattcatcagcaaagtgaatttcagtactttcacggataattttttgttcaggtagcattttttacctatgttttccctaaaattattcatcaatggatgccaatgaatggcatcccacttattattaccaaggtgttttcttttcccattcagggtcaaatcctacacaggcttcagcaagcttcaggtaatctgaataactttctgccagtaagataggtggaacatctttaagcgtaatattgtttttctcccagtaatacaggtgattcttgctgaaacttaagttaaacaataccgcaggaatattttcttcaggtacataactaccactgaattcaatattgacgtagtaattcaggctggagaaatgtttataataatgatcgaatgatcctgcatcttgtattggaccacgttgatagcccatttttgttagaatgccacgcagagtgaaggtatcagtaacccagcctttacgatcttcaatttcgtttttcgtcaaatccagctcagggattttgttttccatttgtgagaaaaggaacttcaccttgtaatctttgaagtgagcaagccacgctttgcgatcttcttcgctgactagtgctgaatgtgcaagctggatacttgaatcatttcgtaaaacaatttcatcatcgtctagattcagtaagcagccatcgtcagaagggcggaattggttgatgatctctccatctctcacttcttgccatacaagttgctcgattaatttatgcataactggatgagtgagaatatactccagccaatcactgctttgccattgacgttgagcacacatggcttcatagagacgagccgcctgtaattctataacttgtttcaactctttcttgctggcagtaaatagtttcttcgtttctttaatctgttcttcactctcattattacgagccgctggcagagctttgatctctttcccttctggattaaacaaggctaatttttgtttagtattcagacgagcagtgaaagtacgttctccatattcaagtaccagcgtacctgtttcgttcaatcctgcgcttggaatagttctgtcagcaagttcatcggcactccaaccgttacgctctgcgatttgagtgactaattcacgcgctgtttcctgtattgaactggtacgataacggcgagaaagtgatagtaaaagttgaataatcagcgggtcattgctgatggatattgcagtcagaatggcttcaatctgggcacggcgttggtaatgatcacgcatgtagttacgtaaaacagggattgcaacgtgtccttcaatgttgcaaatgagggccaacattcctttgtcactgattgctgaaccgcaataacgccgcaaaacttcgtttttaatttcttctattacttgctctaaggtgaaattttcatatttgctgtagtgttccgggtagcgctttacccaagacttataattgtttaagcgtgatggtgcttcacgctgcgcttcatccatagcctcctctaaggatgggcctttaacatcctgagcaacgaagctgtgtaagataaaactgcctattttttgttggctttcgagggataatagatcgatataacgctgcagtagtgcattgcccgatggcattttcagtttaacagcaagaactacccaccaatggaaaatagcggggtcgacgggttgtttattcttccaggtgagtgctggcaatgcattgaaattaaaccaacttagacttgcaggtatttttcctttcagccctttttgcgcttcttctaataatatctctggtgacaggtatccagagatattttcaccaaattcttctaatgccgtaagtagtgctgcacaaacaatttcccgtttctctttttttagtagcgcataaagatggggaatggaagccggattttttatgcgagtcagccactcgatcgttgtaatgcggatttcttgcttggtcgattttaacccttcctgaactgtttcatgaatatttgttattctttccaacagttgctgggcagaaactcgatgagttttattttgacctaaagctaattccataatgcgaggaataaattgtgttggtaatgccggataggtggcgagaacatcaatagcacatgaaacttcgaacatcctataacggttttgacttttattaggcattaagcctaatgcttcagcgataaaatccgggttttgataatagaatggccatattttctcaggatgtggaaaaaggcgatgaccaacggaggattccagacaaaattcagcagtggttcttgcggaattattaaaatgacattgtgctaagacgtcttcgacatggcgtagttcaagattagcaattattctttctggtatacttccagtaaaatgataaccactaaaactccggtcatgctcactattatgggtagccagacgaacagcatggaataaagtaaattcaggaaggtttgtgattctatttttatgcttaattacctgaacttcttctgaattaaaataacctttttcaccattgagtttatcgagtaatgcacggcacttctcatcgcttagtttacgcaaatctttatactggcgttgagcccaattagatgagtaattagaggttttattatcttctatttcatattcagctctttctaatgcgttagccagcatctcatggaaattagttaccagaatttctctggcactttctggtagtggagtgtcttccaatggtgtaaaagagggtaattctaacttttcctgattaatagcttcatctattacagtaaaacgtaataaagcgctttcaatacccttgataacagatttgcttttttcgatttttagcgcatcttccagaacattgcgattatcaccctgacgtgcgaacaggtctgcggcttgtatgcgctgttttggggtaccattaaataatgtatggcttaaatactgttttactatttcagacggtaacgtattcaggattggctctgcaattttacgaacagatttatgtgtgctagtagacaataatacgattacatcagcaaaatgatcacgtagttcgttattattatttagataattaactaactcgacttgtccatttgctgataatttttctactaatgtctggcgaacaaaattttgatgttcgataataaaattttttaaatcagttattttataaagtctattcagatttttcgtatgattatctgcgatatccttgcgatcaaatattgcaaatagagcgttcgggcctgttttctctgttccttcattaatcattttagcaatcaaggccattgtccacccattacgtaatgcgatgttaagattgctgacattttcataggtggtatggaatgcatcgcctaacaggtacagtacccatgatgggagttctgttgttgtcattttgatattaatatcctggcaagctgcagcgatcactttagcaaaacggacggtttgttcagcagtaaattctcctccgactttggcatataattgatgacgggctttgattgattgggacattactttgtcatattggccagtattcacatttccgctataccaccaatctaatgttcctggtttattgaacagaacagctgctttgatagcatctatcttgtttaattcgtaaagtacgttaggatcttgacctgtcagaatataatcaagtgcttttttaggaagtgtttgctcaaatgtagtaagaggtaatagagcttcttgtagatagttttctgtggcagagacgtcttttttcccgaaaatagaaataatgtcgaagaatttttttatcatgccagttccttaagccgtgtatagataaacagacctatttaccatgaaatagaaaaaacgacaattttattgtgttatcaacaagtttgttactttatgttaacgttagagttaagtagatttaattgctgaaaatcatatttaacaacctaattgtattattttatttttttactttcacttttcttagtaataaattttgaaattatatttcaagccaatcagtgaataaaacagacaaaggataaaacttggatcaaaaaatcccttgcccatgctgtgaaaatgagatctcagttcttccaggtgaatatatcatttgtgatatttgtcattgggaagatgatccggtgcaaaataaacatcctaaccttgcacggaagtgctaattctatgagtttaaatgaggccaaaaatgcctttaaacaaggtagaagagtagagtgattttatgtattgtgatttatggtaaatttgacggaataaagaataataaaatggaaatctataaaaaatacacaatggataaagcggatagaatgttacagcctatcattggtggtgagcttatcttattaagttatatcagtttttcactggagggtagatttaagtttctgggcaaaatagatgattgggaaaatcaatccgataccaaaatattaacggccatgaattttaaaagatacctttcagatgatatctttataattaatgataactcttatataaaagatgaagtttattttatggatgtcagatatgtcgagtcatttgtgaatgattatttaaataaaaactcagaatgtttcttcaatggagatgctttttttatttctcctgctaaaaaaacactcattgagtttcaacatgacggttatatttttttacatcaattgcccattctgattagtgagaatgaaaagaaagtaatttcagtaaaagtatgataaaaatctattttctatgagtttcaagttcacggttttaagtgtagttatatgatttattttaaccatttattaacaaaatcttccggtgatatagggcgatcaaagtaataaccttgtaggtaattaaccgaatagtttttcagctggtttacctgtttttgatcttcaaccccttctgcgacaatttctaaattaagccgcaaagcgaggtcaataatattttcaacaatatgctttgaaaacctatcactgttcattttactaatgaaattatggcctatttttaccacattaacgttcagtttttgtaaataagcatgattagaatgacctgtgccaaaatcatctaaagcgattaatacacctaatttatctaatttattaaatagttcgattgtgtgtgcatccggctcaagtaattctctctcagtaatttctaatatcagatggattgcatcttcaggaaatgcctgtagaaagtcgcggcaatcttcaattaaaccactatctttataatgttttgcactgatattgaaattaaagtgaaaatttggcggtagctgataggcgaaagaggcaaaaaaatcacgcacttgagtaattaagttatgtgttaatggaatgatgaggtctgatctctcaatttgtgagataaaatttttaggctctattaacccttgttttggatgttgccagcgaacaaggatttcacacccgataagggtgttattcttactactgataatgggctgaacataaggaataaattgtttgtttttaatggcttttttaaattgataatctggaataataacagttttggtgtgtttatataaaacgacggcgtataaaaatatgagcattgctagtgttagcaaaacccactttaattctatatcaggcctgatattattccgataatcagaaaatactttccataatagattaccagcactcagagtgatggcgatgaatagtaccacaaatgcccgatacaacgttcggtatgatttaaaattcagccccatcatttctcctttttgataaagcccattatccaacagtagtcttactgcctggatttgtacccccccgagagcttgctgctgataaaaaaatgactgtttatatgaaaaataacgctggctatcttacaggaagatattgaatacaggaactatatatatatttatacagcaagaattgaacaacaaattacgtaatcggcggcagtaattaaaataaacagattattgtttccatccttggtgaaacaattaaattattttattgattaatgtcaatctttcgccagattattccttcttttatttattcctctcgtattttaagttataccttaaaatctattggaaatttattgtgatgtaatcacaatcgctactcgacggttttctgcccttccttttgaactgcgattatccgcaataggctggcttggccccaatccacgggtttctaagctggatctgttcattcctccccgtgtcagggcatctgcaactgtgttagcccgtcttagcgaaagctggttgttatagcttaattcaccgtagttatccgtatgaccatcaaggcgtgcatgttcaatgcctgttttggataaaatagctgccagctttttcaatttttcttcccctgcaggttgcaagtgaaattggttgttaccgaagaggactttttctgacagaccaaatagccacccttcatctgtttgctgaaatccttgttgtttgaggactttgatttgttccgttgtcagtttgcccgaatgttggcaggcgctgagaagaaaagggccaatcaatgaaatcattaatataaaagcgcgtttttttatcatgatgaatttctcgataagtagtttacttttgttgtgtcagcggagtgccagcccccgccacgttgtttgatgtgatacatggcggcatccgcttcagatagcaactgttctgctgttaacgcaccatttgacagagcaatgccaatgctgagcgtgatacgtagctgttggccgctgggaagctgaatcggggtatccatcgcatgaatgatatttttagcgatcctttcagcatcttctaaactggctgaaggtaataaaatggcaaattcatcgccaccgaggcgagcgacagtatctgttttccggactttcgtttttaacgtatttgcaattgtgatcaggacgtgatcgcctgctgcatgcccataaacatcattgacatatttgagtcgattaccgtcaataaataaaatggcagcactctcccgcatgaacttgtcattcattactgtggacagaacacgctcaaaagtcgcccggttgggtaatgtcgtgagagaatcgtgttgtgcctgccacgtcaaagcagctttttcagtttgtaaatgatgctgccactcttccagttcttccagcaggtggttaaaaacctgactgagttcatgtagttctgcaatttgggcggaaggaacccgctgagaaaatgcccgccgctggcggacatcatgggcaacactggcaatgttttgtagtgtgctgacaacgccgtcatgcatgcgccgggaaaggtagagtgaaag

SEQ ID NO: 2577 - DNA, 19910 bp, Xenorhabdus sp.; identical to SEQ ID NO: 2576
  CDS (3433)..(3876)

SEQ ID NO: 2578 - DNA, 19910 bp, Xenorhabdus sp.; identical to SEQ ID NO: 2576
  CDS (1158)..(3152)

SEQ ID NO: 2579 - DNA, 19910 bp, Xenorhabdus sp.; identical to SEQ ID NO: 2576
  CDS (4206)..(5453)

SEQ ID NO: 2580 - DNA, 9001 bp, Xenorhabdus sp.; identical to SEQ ID NO: 409
  CDS (5008)..(5517)

SEQ ID NO: 2581 - DNA, 9001 bp, Xenorhabdus sp.; identical to SEQ ID NO: 409
  CDS (5831)..(5974)

SEQ ID NO: 2582 - DNA, 9001 bp, Xenorhabdus sp.; identical to SEQ ID NO: 409
  CDS (6369)..(7427)

SEQ ID NO: 2583 - DNA, 9001 bp, Xenorhabdus sp.; identical to SEQ ID NO: 409
  CDS (8702)..(8992)

SEQ ID NO: 2584 - DNA, 9001 bp, Xenorhabdus sp.
  CDS (5743)..(6813)
agtgtcgctctaaagcttattgtgctgcttaggcacggggatcaacgtggcatcaatgatttgccctcctctgggaatgaatccctgtgctgacagctgatgcttcgcctcttcaaataacgctctggcaccttcctgcccaatccgtttttcgaaacaccaaatcgtgttacggtctggaatattaatgacatcggtcaagcgacaaaaacgttgccagctcattcggtcaagcaattgatattccattttttcatcggaaagattatggaaatgtttcaggataatgatgcgaaccatcacctccgtcgggaatggcgggcgtccccctttgggggaaataatacgtgggacgatacggtctagggtgtcagccagtgccgagaaatcaacatatttatcaagaacaagcagcggatcacctaattcatcgatttttcgacggtgatattcggatgcctgtttgtctttttttaaagcagaacgaggcggtatcatgatggcgctaccttgcagagaggtactgtgcctacattttactcaattttgtggctgtgaaaagtttttagaggttccctaaaatccaaaattttttaagtttaaccatcttattatttctccttttagtatgattaattatatagtatcatgcgttttttattaacctgttgctattcagtgactattcttgagataatagataaaatttcgactatgataaaatcatatagtatttttatacaatggaatgcagattttattgttataatatgagtatgaagccataggatacttcgtctgaaacaaatttaacatactaagaaacatgggtaagttgtaggatctcaataattatgctcatagtgcatcgtgaaaaataatacctaaagtatgacgtcgtccgtggtggattgtactgacaccatgtttcatattaacgcgataaattcttttagttccttgaacaggacgatgttgtacagtaaaaataacagcttctcctttctgcaaattgagtactattggacgagtttgtttatgtggtctttgttctgtcatgataaactctcctccacaaaaatctttttcatactcagataataagaatgctatttgaaatggaaattttagatcgccatataaatcctgatgtaagcaattatagtcaccttgtttgtattttaataataaaggtgttgggcgatattggcctactgaatggcaaatatctaggtaatttttgagtgtattaggatattttatgttaatgtttagcttctgattccaatcattggcaattgccaccaacttagagtataagatatcacgtaattcagaaactagattaggtaaaggataattgaaatatttatattcacccttaccaaaactatgtttttcaaggtggatatgtgtacggaataattccttttttgagtataattccaccagtgaatcgcactccttttctgttaagattttattcaggtgactataaccaaaggtatttaattgattaatggtatttacccaatttatattcatcagtcgatttgtaatatcaatatctgtactcattgttttttggcctctctcattaataattctcgcttgcgctcaatcccccaacgatatccagataaacttccatcattcctgactaccctatgacatggaatcgcaaccgccagcatattggctgcacatgcattcgctacggcacgtatggcttttggtgaaccaatgcgcttggcaatttcagcataactgatagtggttcctatcggaatttctcgtaaagctagccaaacacgttgctgaaaagccgtaccgcgaatatctaatggtagtttcagttcagctttcggagtctcaataaacccgacaacttgagcgataatttgttcaaactggggatcgctgccaataaattctgcctgcgggaatttgtcttgcacctcctgtaaaagtttattgggatcatttcccagtaaaatagcacaaataccctttttactttgtgcaactaaaatatgacctaatgaacaaatacccaatgcaaagtaaatttgcactccctttccaccggcgcgccaagttttcggtgtcatacctaataagtcggatgaaatttcatagaatctgctgctggaattaaagcctgcatctaaaatagcttcagtaacactatgtttttgttctaaattactcctcaggcgctgaccacggtaagcatctgcataggcttttggcgtcagacctatttttgccttgaataatcgatggaagtaaaatgggctcattcctatgtgattggcgatattttccagggtaagatggccttcattttgttctatgtaacggcaggcttgcgctattttagcaaggttgccagcttcctgttcaggctggtttcctggtaaacgcttacttggacgataaccttgctgtttagcatcactttcattgtcaaaaaagatcacattttcccgttttggcaggcgggcagtactggaaggtaaacaatatattcctgtagtacgcactgcgtatacgaaatgactatctgcatccttatcacgttcaacaatggcttgccaacgtttctcattggttttccataaattttttttactcatatatcacctatcatggttggttgatgagcacctaaatattaatagattggtagataatggcagaaaaatcatcctgtctcttgcttttttaattttttaaagaatatatattagggtcatatagatgctactatcttttatcaaataaaagggcgtccgatattccctaccggacgccagatacaattaacgagtaacaagattaataaatatttgtgctccaactagcaggtagtcatcgtcaataaaataagcattggaatgtgggtagttatctattaatcaataatgcgacacatctcgcgaatggcatccagccctttttgtagtgttgaaccgtagaaatccagagttcatgtcgttccccatgaagtgagagtaccgcttgtcagaggatagtacctgtatcctcagcaccatcgttatgcagggcatagacttcactgacaccgtccatgcaccccagctcaaccattttatctgcgcccggaatacgcatattttcttctgctatctggaagataaagcgcacgttgacgttcatctcatgctgatgttgtgacaggtaattggcggctgtcagggcaactgtcatatgagtgtcgtgaccacagttatgcgcatagccttcatgaacagaactgtggtcattattggtcagatctagggaaatattgtcatatatgatggctggaacaacagcgtatcaacacgaacactgactgtaagaaagatcgtgttgatctggatgagagggcagtcaaggatctttaatgctgagagtacaaccgatcctgaatttataaaagatcggcttcctgtaatggatcaaaatatcattcagtttatgctgttggtttgatatccataatagtttcaatcgcgccactacttaagagacgctgtttattaggaacagcctcaatcaaatggttgactggcaagactcggatacctgagcccaaaaagaccggcaccgtggtaagaaatagttgttgtaattctccggcatcggcaaagaatgctgccgtttctccaccaccaatgatccatacatctttatctttagcggcggcccgagctttagctgcaatttcactggcagaatcatgagtgataacagcattaatttctgccggaacgggtaaatttctggaagagagaataaaagaagggatattttgatatggccagtgaccagctgtattcttcataatccattcataagttccggcccctataatggctgctccaataccctgataaaaggtttcataaggagtggcgtcatcgctgagagcaaatgtctccagccagcctaactcatgattctctgtagcgatataaccatccattgttgcagcaacataataaatgagctttgacatatctttcctcattttactttttaggatttatgaatatttggaaaacccagttggtgttgagataattttttttgttacattattaataactctatcaggggaatcgaaaatggattagctttttaaagtaatattttagagcagcatgtttaaaattgatgttggtcacataactttttgaaataaagagtttgtctatgaatttttatgtattaactgtcacaactactacaaattttaaataaagcaggatgaataaattgatttgtaaccatgttgcatggttgctttaatcatccgttttttatcgataatatatttattaatcaatcacattaaattcacgttaaggataaatgatggctattggatacttcttagttgttggggataagacaacatgtggtggtgcaattttaacgggcagtagtacagtcactttttacggtaagccgtctgctcttgaaggttcagaggtcagttgtggcagatttgccggtaaataccggattatcggcggtgtcagtggttttatcaattatcagcaaagaatggcaggaacgctggatagccagagcagttgcccttgtcagtctggcttgattcagtctattcctgattcctatgctaaataatgacggcttatgactaattatgccattgtaaatattttcaatggcatttaagagataagataaataatttacgttattgataattatcttttaaaatataaaggttattatcaaaaataagaggtgtcttattggattgttgtttaatttgtttataggattactcttattgaataagatagggcaaaaaaacggatttaaccagaataaaaaggataacaaatgatgtctagatttattgttacgcggaataacggaaaagcgcttctcggaactgagtttcatctaactccgggtaatacactgacattaaagattgatggcttaaacctcaataccagaaagcaccttaagtttctgtcagagaatggtttggtaactatttttcagcgtgataatcctcagatgagagagcaaacattgcaaataacagcgattaatataggggtaagtaaagttaaggcagttgatacaaatattgatttctgtcctaattttgctcagggtgttgctgaggactgctttccacatttaacaattaatatcgtgcctaaaatatcgatccccactgatcttactgccgagcagagagcaatgctgatggtgttgttggcagaaacaacatcaccagatacaatcggtggaaagtatgatgaaaaagaagctaaagacactatgcagtatatgcatgatgtattattaaacagagttaagtctcctaaatcacatgagcttgatgttccaaaacacggaaataaattaattggattaatttcaggccttagaacaataaaaggttttagtcaatatcccaacattgaatcaggtataaaaaatagaattaatggtatgttagttactgcaaatgatggaactcacgataattttttagcttatcgtcgattaattacaaatgctatcagcatcagggcgagatctcacatttttcataaggttatttaggtcaaataaaagtcaatatacggacttttataagcatttctctccttaaaacgttaagatcacgctattccataaacagtgtgcttaataatgaatatttttaattttatcagaaaaatagatgacccacgttctgacatcaataaaaaacatgaattgatggatgtcatttttttggccttttctgctgtgttatgtggcgcttctggctggaaatcgattcaagaatttggtgagttacaaatagagtggcttaaacaatatacctcatttactcacggcattcctcgtcgtcactgtgtggctaatattatcaaaatgatagatcaagacgcattggtcgaagccttttatggctggatcaaccagcgccgggttacggcgggcaaaagtctcatcgcgattgatggaaaaacgctgagaggaacctgcaaagggacattgtttgaagctttgcatgtggtcagtgcttatgatgttgaatcgggaatagccctttatcatcgtgccgccgaaagcaaaggaaaagaaggcccggttgccagacaattgattgaattacttgctcttgatgaggccattgtcacaatggatgccctgcattgccagaaagaaacccttgagttgattaagcagcggggcggggattttattgttggactcaagggcaatcaaaaaacactctatgagtttgtcaaatcgcgtttttccgctcattatgaccatgatgaactcgttgaatttacggagaaaaatagcggtcatggacgaaaagaatgtcaccatgtcatgcaaattcaagcggcattgcctgaagagcttcagcaacagtggccttcaatacagagtgtgattgaagtggtcagtgaacgcagcacgaaaggtcagcctgcccaccgcgactcacgctggtatgtcagctctctcccgttagatgcagaaaccgcagctaaggcaataagaagacattgggcggtggaaaatgagctgcattgggtattagatgtggcctttcgggaagataacatctcactcaaagaccctgatggggctgcgcaaatggcgctttttaaccgaattgcgttaaatgtgattaaacagaataccagtataaaggatagtcaagcggctaaacgccgaagagccacatggtctggggaattccgcagtcagcttatctttgattaaattaaagacaaagtggaatcccgccctgggggaattgatgattttgacatgtgctggatcagatttagcatgattattataatgatcagtgactgtatatgtaacgtcatagctgccatcaggtatctcagtgaaaggtattgtcacatgaatactatcaggcaggggatattcaacatgaaaagtcctaaacacaatcccccccacagatataaccacaatatctttggggtgttcatgtggaaagttattaataacaatcagcataaagctttctacttggcctacgtcaataacaccctttactgcctgaggaagttcaggttttgcataattagaattcattttaatgatgttcattatttttctccgttggtatccgcgttagaagggttaggataaaaaacagaaaaattttctttatattttttggactcaacaaccaccgactaaagtcggtgggttagtgattaacggactgaaagtccggatacgcatcggctaaacgatgcgtcaattatccagcctgaagtgatcattcgggttcggttcaaaatgatgcgccagataggcctttatcatctcttccgttaactgacctaccgtcgcacaaaaatagcctctgccccaaaaatgctgaccccagtaacgctttttcaagtgagcaaactcttcaaacaacttacttgctgtccttccctttattcgcctcatgatttctgagggcgctaagctcggaggacaactcaccagtatatgtacatggtctttgctcacgaccccttctactatcctgatttcgaacgcttcacaggtctgacgaactaactctctcacccgtaaaccaacttcacctgttagcactttgcgcctgtattttgttacccacacaaaatgatactcaatctgaaataccgtgtggctgccatatctgtaatccatattgcacctctcgtgcaacacagtatcgcagctaaagctgaccgactaaagtcggtggttttaaccttttatatggaaaaataactgtgatttaatgatatggcgtaacgtcattaatacctgttaaattctccggcataccaacctcggaaagagattggatataaatatcatcgcattctgcacacagaaaaccgatgaatgattttattcaaacattaaataaaagagaggtaatccatggctaattatttaatccgcgttgaaatctatggtgcaggcccaagagaaattaatgctcttaacgaatcacttaaaacaattaactttaataataaagtggtattttcaaatggcaatgttatggccttacctgccggcacttatgttggttattcattaaacactgccgctgaaataagagataaagtatataaattagcatctccactttcagcgagaaacccgtcaatatttgtttgccaatataatgaatggtctgcatatctttatcctgcatccatcaatgcatctgcatctgaatcctaattaaaaaattaggtaatttaattctccagtcaaccgattggctggagaatcgtttttttgcaaaaaattttatattcactatcatctatctcgttatataaattagaaaaaacattaaaaaaaataaaaataaaattacccatccaaaatatcccctacaaaaacaaccgattgaaaattacaattcatttaattcatcattaaaaacaagataaattaacataatttttattaaacattaataattagaataatcaaaaatatatactattatttaaaatatactaaaacaaacaactaccattggctaatggaacgtttcctttagaaaggttgattttttatttacttattaatgagcaaggagcggttatgaaaatcataaatttaatttatcatagaatgtttaattttattattatgatgttacttactaccacatcaatttcagcattctcttctgggtatcacccaataaccattgataatagaacaaattatacaatcactgtctatgcaccatctgtctattctgtttgcacatatcagccaacacaaggcaatcccgtggtgataacagtggggccgggaaagaaaggaacttttacttgggaagataaaaactctctcagctgttttctctccgaaaaaataacagggtttaaatttattactcaggataataaattattatggt

SEQ ID NO: 2585 - DNA, 9001 bp, Xenorhabdus sp.; identical to SEQ ID NO: 409
  CDS (7637)..(8137)

SEQ ID NO: 2586 - DNA, 25590 bp, Xenorhabdus sp.; identical to SEQ ID NO: 92
  CDS (17824)..(18015)
  unsure (1)..(25590): unsure at all n locations

SEQ ID NO: 2587 - DNA, 25590 bp, Xenorhabdus sp.; identical to SEQ ID NO: 92
  CDS (24473)..(24751)
  unsure (1)..(25590): unsure at all n locations

SEQ ID NO: 2588 - DNA, 25590 bp, Xenorhabdus sp.; identical to SEQ ID NO: 132
  CDS (8989)..(10590)
  unsure (1)..(25590): unsure at all n locations

SEQ ID NO: 2589 - DNA, 25590 bp, Xenorhabdus sp.; identical to SEQ ID NO: 132
  CDS (5695)..(7428)
  unsure (1)..(25590): unsure at all n locations

SEQ ID NO: 2590 - DNA, 25590 bp, Xenorhabdus sp.; identical to SEQ ID NO: 132
  CDS (4076)..(5317)
  unsure (1)..(25590): unsure at all n locations

SEQ ID NO: 2591 - DNA, 25590 bp, Xenorhabdus sp.; identical to SEQ ID NO: 132
  CDS (2115)..(3206)
  unsure (1)..(25590): unsure at all n locations

SEQ ID NO: 2592 - DNA, 25590 bp, Xenorhabdus sp.; identical to SEQ ID NO: 132
  CDS (1389)..(1970)
  unsure (1)..(25590): unsure at all n locations

SEQ ID NO: 2593 - DNA, 25590 bp, Xenorhabdus sp.; identical to SEQ ID NO: 132
  CDS (1)..(699)
  unsure (1)..(25590): unsure at all n locations

SEQ ID NO: 2594 - DNA, 19492 bp, Xenorhabdus sp.; identical to SEQ ID NO: 93
  CDS (22)..(510)
  unsure (1)..(19492): unsure at all n locations

SEQ ID NO: 2595 - DNA, 19492 bp, Xenorhabdus sp.; identical to SEQ ID NO: 93
  CDS (526)..(1200)
  unsure (1)..(19492): unsure at all n locations

SEQ ID NO: 2596 - DNA, 19492 bp, Xenorhabdus sp.; identical to SEQ ID NO: 93
  CDS (1314)..(3113)
  unsure (1)..(19492): unsure at all n locations

SEQ ID NO: 2597 - DNA, 19492 bp, Xenorhabdus sp.; identical to SEQ ID NO: 93
  CDS (3116)..(3661)
  unsure (1)..(19492): unsure at all n locations

SEQ ID NO: 2598 - DNA, 19492 bp, Xenorhabdus sp.; identical to SEQ ID NO: 93
  CDS (3676)..(5022)
  unsure (1)..(19492): unsure at all n locations

SEQ ID NO: 2599 - DNA, 19492 bp, Xenorhabdus sp.; identical to SEQ ID NO: 93
  CDS (5063)..(6271)
  unsure (1)..(19492): unsure at all n locations

SEQ ID NO: 2600 - DNA, 19492 bp, Xenorhabdus sp.; identical to SEQ ID NO: 93
  CDS (6243)..(7802)
  unsure (1)..(19492): unsure at all n locations

SEQ ID NO: 2601 - DNA, 19492 bp, Xenorhabdus sp.; identical to SEQ ID NO: 93
  CDS (7895)..(8779)
  unsure (1)..(19492): unsure at all n locations

SEQ ID NO: 2602 - DNA, 19492 bp, Xenorhabdus sp.; identical to SEQ ID NO: 93
  CDS (9184)..(9336)
  unsure (1)..(19492): unsure at all n locations

SEQ ID NO: 2603 - DNA, 19492 bp, Xenorhabdus sp.; identical to SEQ ID NO: 93
  CDS (9349)..(9876)
  unsure (1)..(19492): unsure at all n locations

SEQ ID NO: 2604 - DNA, 19492 bp, Xenorhabdus sp.; identical to SEQ ID NO: 93
  CDS (9885)..(10178)
  unsure (1)..(19492): unsure at all n locations

SEQ ID NO: 2605 - DNA, 19492 bp, Xenorhabdus sp.; identical to SEQ ID NO: 93
  CDS (10229)..(12022)
  unsure (1)..(19492): unsure at all n locations

SEQ ID NO: 2606 - DNA, 19492 bp, Xenorhabdus sp.; identical to SEQ ID NO: 93
  CDS (12042)..(13562)
  unsure (1)..(19492): unsure at all n locations

SEQ ID NO: 2607 - DNA, 19492 bp, Xenorhabdus sp.; identical to SEQ ID NO: 93
  CDS (13569)..(15026)
  unsure (1)..(19492): unsure at all n locations

SEQ ID NO: 2608 - DNA, 19492 bp, Xenorhabdus sp.; identical to SEQ ID NO: 93
  CDS (17727)..(17918)
  unsure (1)..(19492): unsure at all n locations

SEQ ID NO: 2609 - DNA, 19492 bp, Xenorhabdus sp.
  CDS (1416)..(2918)
  unsure (1)..(19492): unsure at all n locations
cgacagatgttcaatacgtaccgtaacattatcatcactaccgttgcgggaataatggatatcactggcaatagttccagaaaaacaactagcagcagctaaacaacaaccacccgaaacagcaaccgatgaatgaacatttttgggagtaagatatctgatgctgatatcacctccatttacaggaggagcaataatcgctattttgggctgagttatagatttttttaaatcatcctcattcattaatttcctatcatgcttaataattcccattttactccccatccctgctcttattgccaaaattttttcttgtaataatgtattattttcaatttccttgacactttcataaccagtgatccctaaatcttttgcattgataactatcatgggtacaacaacatcgatacaagtaagaggaatattattaaatatatcaattaaatttcctgtaggaaaaatcgatgatgtttttgaacaggctggagactcaaataaaacatgaacttccggaaaatccccaataataccggggatagatgttaattgatattcaggagacacattagccattgaacataaaatatttttacgcgtattagtgttataaatatttagcctaccatcaggcattagcaatttctcttcaggtaaacctcttatcaccaatggtattgatgaagtcatatttccacaattaacttcccatgataccgtattgctatctttttcaagctgggcaaaggtactaataacttttttagatttatcatctatatcaatgataaatgctttgttgctggtaatcactcttcggcctaatccatgtgattgggtattgtctttaacggtacctagcaaaggaacacccattatgtgcctaagaatctcttcctttaattctcttttttctggcaaatatttttgtaatacaaccacacctgtagaagtcccgcctctgacgtaataaagtggaattttaattggaatagatcgttttttcataaagctatcactatcaataaattgaaaatcatattgcattaacaataaacaaaaactcaatgaaacaacatgcaataaatataaatgcatataacaccagataacaatttaatatttagtgagttaagcacatggctaaaaaacacatcttgtaaaaaaaccaccattgatgaagttaacgactttcacagcaaatatttcaataaaatcaaaaccatttaaaaacatcgaatttattgttgtatgattattgaaaaacatgatatacagctcaatgtatcttgactgatagaatataggaataacaaactccccaaccaaagtttgatttttaaaataagaagaatatgcatctcactattaaacaatagatttattgtctcttattaaaattaggagtagtcatgaaggataaagaacctgaccaactacgtcgcctgttagtaaaagctccgctactgattcccttattaacaacacttcctgcttccgcaaaagaaaaactgatgtcatctttcatcggagataaatcccccgatgcgatcccaaccgccggaaaaacgctattgctgaaaaacgctgacgtggttgtaactatggataaagataagcgtgaaatcaaaagaagctgcgtttttattaaaggaaataacattatcgctgtcgggacggaaagcgaagtaccgcagacggccgatagaattatcgatctcaaagggcatatcgtaattccgggcctgattaatactcaccatcatatgtaccagagcctgacccgcgtcgtgccatcggcacaagatggcgagctgtttacctggctgaccgcactatatccgatctgggaaaaactgactccggagatgatgaaagtggcaaccaaaacagcaatggctgaattgatgctttctggctgtaccacttccagcgatcaccagtatatctattcgaacggcatcaaacttgatcacagtattgaggcggcacaggaaatggggatgcgtttccacgcctgccgcggcagcatgagtatggggaaaaaacagggcggcctgccaccagactcccttgttgagaatgagaaatttatcctgaaagacacccagcgtgtgattgagcagttccatgacgcaaagcgcggtgcgatgatccgcatcgtggttgcaccttgtgctccgttctcagtaagtgaagtattaatgcgtgaatcagcaaaacttgcccgggcgcactgcgtttcactgcatacccacttggcagaaaacatcagtgatatcgattacagcaaaaaaaacttcaacaaaaccccggctcagtatgtggaagatcttgaatgggttggtcacgatgtgtggcacgcacattgtgtgaaactcgacgactacggcataaagctgtttgcccgtaccggcaccggcgtagcacactgcccttgttccaacatgcgtctgggttccggtatcgcaccagtgcggcatatgctagatgccggaatgcatgtgggactgggagtcgatggctccgcctctaatgacagttcagatatgatggcagaagtacgtcaggcgctgctattacaacgtgtaggtttcggcccggaagcattaactgcccgtgaaacactggaaatcgcaacacttgggggcgcaaaaaacctcaaccgtgatgatataggtgcgctggctccgggcatgatggcagatattgctgtgtttagcctcaaaggcattggccttgcaggcgcacagcacgatccggtctcagcgctggtgttctgtaacccgggtaaagtagcgtacaacatcattaacggccgcatcgtagtcgaagacggtaaagtaactaccgtggacgttcctgtcattattgaacagcataatcgccttgcctaccaactggttgagggttaaaccataaaaaacttattgaggcttatattgagagaactaagctcacgctccgtatctggataaagagactgaatcaaaaaacgatagttattccaaaaccgaagaaatacacgataaagtaatagtaacgcccattgagcgtgaatacgatatttcacaagcaatctaatcattagaattataactatttttctagattggcgcgtgagactaattaaaacagccttttatctctttcctttataaatatcaatttgttatttttattctgcttctgttatatataaaatgatattgaagttaaaataccatacttcttccaacaattaaaatatcaaataaacctcaaacataaaacttccaaacattaccccaaatctttacaataaatagaatttattaagcacatagaaaataaataacaatataaactctaatgttaattattactaacaaaaaccctcaaggagtatacatttaatgatgtaatatattacacttatgtaaacagagagaaaaaagaatcgttagtaatgatataaattgtattttaaaataggagaaaaaaatggcatggatttatgaagtaaacaaaagagcattttatcataacgaaaaatttcagttttatgcactgtatgcgggtgcaccagggtacaagaataatagtgaacatgaatgcgtttcaaataaagggcctcttccaagaggaagatataaaattggagcacctttcaaacatccacattctggtcgttatactctaaggctaactcctcatgagactaattatatgtgtggaagggctggatttctgattcatggtgataatggccgcggtactgcttcgaatggttgcattgtcgctcatccaagttacagacaaaaaatttgggaaagtggggatagggagcttattataaaatgaaattatttccatttatcgcattaatatcaactttcaccagcatttctagtttcgcaaaagtgttaccgactaattgtatcagcattaatgaaacagttggtattgatatgactaactttatgttaaatgactttaaagtaaaaaaagaagatattattttagaaaaaacaaaatccgaactattatattcaaattctgtaggaataccattatctacctattatggagagcaggaaaagaaatctgaaggagtaaatagtgaagatactacaaccataagtgaatatgcacatacatttcgggaaaataacgcaaaaaatatcatcataaaattcacttacgaaaacatagagcataagcataatgtttttctggcttcagcattagtaaatgatcatgattgcgctgttagatttaatggatatatcgttgtaaaaagagaattttgataaaacttttagctaaaatcattgccggatattgtgatgaagttatccagatatatagcagaatcatattaatatgattgtgctatatcttttcgaacaagctgctgcaacccaataaactcaaaagccccggtcagtcataaccggggctttattgcttgagagtaaaccctacatcacgcttttcgcctgctggacgatctcaatcaatggctgtggccagacaccgaggagcaagaccagtaatgcagtgagcagtaccacaataccaccagaagttcgggcccagtttcttggggtatcacggttcagtgcttttggtgctggcaggtataaactcaccatcacacgcaggtagaagtaaaggccaatcgcacttcccaatactacagcgccagtcaaccaccacagtctggcttcaacacctgttgcgataacatagaatttaccgataaaaccaaatgtcagcggtatacctgccagtgacaacatcataatagtcatgacagcggataaaattggcctgtgccagaacaaaccacggtaggagaacagtgattccgcatcagggcctctgtatgggctggacatcaggctgaccacgccaaatgcgccaatgctggcaagcagataacccgccagataaaccccggcggtttcttctgccagtttgtgatctttaatggctatcaagaccaccagcaaatatcccagatgtgcaatggatgaataaccaagcaggcgtttgatattactctgcgtcagtgccagcaggttaccaaacaggattgaggcaattgcaatcaccgtgagtacaatacgcagagtttcactgtctgttacaggtgcctgtacaaacaagcgcatcacaacagcaaagattgccactttactcgccgttgccagaaaggtcgatacaggtgctggcgcgccctgatacacatccggcgtccaaagctggaagggaacgagggaaagtttgaaacccagcccgacaatcatcatccccagcccagccagaaccagcggctcatggagtttgctgtcgctcaggcttctgcccagtgatgcgaaggataaatcgcctgattcagcatacagcagagcaataccgaacaacaggaacgaggatgccgccgcagacagcagcatatatttgatactcgcttccagtgagcgtttctggcggaatgcataaccaatcaagccaaacagtggcagagtgattaactcaataccgataaacaacgatgccatgtgattagctgcagaaagcagaatgcccccagcagctgcaatcaacaccagcaggtaaaactcttctttgttatcgggataattttccagccacgaataggcaaatgtcgtcgttgcaaggctcgcaatcagcaccagtgctgtatagaacatggcaaagcgatccacatggagcaacggagtgacatccatcggttcctgttgcccgacaaaatagagagaaagcagtgccagattcaggccaattaccgtcagggtgacgttggtgaaatgatcgcgtcgccatgcaatggacagcatcacaaccaccaccgtcaatccgacgattaatagcggcaacagtgcgatcaattgttcagaagttattgtcatggcaaattacggccttgtagttaaaagtgaagctgaataccaattctggatgttgctcattgccgctgccgaagtatcaagaatcggttgtggataaaaaccaagaataaccagcagggcacccagcagtagcaaaatggaaatttctcgtgcatccatccgtggcaatggatcatcagattttggcgtaccatagtgagctttctgcatcaggtacagagcatatacggaggcgaaaaccagaccaaagacagataccgtagcaatcagggtaaatttaccgaaactgccgaacaggatcataatctcacccacaaagttaccggtgcccggcatacctaatgttgctaccgcaaagaacagagatatggccggcaacagctgaattcgtccccataggccacccatctgacgcaaatcacgggtatgcaggcgttcatagagctgaccacacagaataaacagcccggccgctgacagaccgtgggcaatcatctggataactgcaccctgataagccagttggctgccggtatagatagcgatcaaaacgaagcccatatgcgaaacactggtgtaagcaatcaggcgtttgatatcggtctggctgaaagccatccatgcaccgtagaagataccaatgacacccagccacatcgcgattggtgcaaattccgcagaagcctgaggaaacagaggcagaccaaaacgcagcaagccatatgccgctgttttcaacaaaatccccgcgaggtcaacagaacctgccgttggtgcctgactgtgagcatccggcaaccaaccatgcaaaggtacaacaggcattttcacagcgaacgcgataaagaatcccagcatcagcagatactgaacagtatgtgacatcggggtatccagcagtttttcatagctgaatgaccactcaccggttgcatcgtggtaaatgaatgccagtgccagaatcgaaatcagcatcaccagaccgctggcctgagtataaatgaagaatttcgtcgctgccgtaatacgggttttgccctgtgatcctctgtgaccccaaagtgcaatcaggaagtacatcggaaccagcatcacttcccagaagaagaagaacaggaacaggtcaatggcaaggaagactcccattacgccaccgaggatccacagcaggttcagatggaagaaaccctgatacggctggttttcgttccacgaacagagaatcgccattaaacccagtagcgcagtcaggacgaccatcaagagtgacagaccatccaaagccaaatgaatggagatgccaaagcgcggtatccacggcatcataaattctgattgccactgtggaatgccttgtgggttggtcagcgtatagcctccctgcatccagaggtacagagaaagcagcagagtcagccccatcgcaagagacgctatccaacgcggcacacaggtgccgaagcgctctgcctgccaacacagcaggcctccgatgaagggcagaagaattagccaaggtagtagcatggcgcaatgtgtcccttaattaaaccaaaagcagcagagctaaaaccagcactgcacccaaccctatagaggtagcgtaccaacgaacctgtccgttctcactcaaacccagtcccttattgccccagcgtgacaatattgcagggatattcatcagtgagttcagagggtcattccgtaacagctgtgtaatacctttgaatggtttcacaaatacccagtcatacagagcatcaaaaccccaggcatggaaccaccatgtcgagaagaaacgccccggagcactgttggcaattgcattgaccaaactacgtttaccaaggtacaacgcggcagccagcaaaatacccagcacagcaaccacaccggaaacaatctccagcgtcatcttgccatcatgcccttgcgcaccattacccggcagaatacctgtcagcggttgttcaatcaaagcaccaacaaatgtggacagtaccagcagcactgacaacggcagcgtatgagtaatacctttaactgaatgcgctttcgtattctctttcccgtggaacacaatgaagatcatacggaaggtatacaaagaggtcatcaatgcacctatcagacctgccagcatcaggttcatatgaccatttgccagcgcgccccacaggatttcgtctttactgtagaagcctgctgtcagcaacggcagggcagacaaggccgaaccacccaccaggaagcagagatagacaaacggaatacgtttgctcagcccacccattttgaagatgttctgctcatgatgacaggcaagaatgaccgagccggaagcaaggaacagcagagccttgaagaaagcatgagtcatcaggtggaaaatcgccgcatcccatgcctgtacacccaatgccagaaacatgtaaccaatctggctcatggtggaataggcaagtacgcgcttgatatccgtctgtaccagtgccgcaaaacccgccagcagcagggtaacggcaccaataatccccaccagatgcagaatatctggcgccatcaggaacagagcatggctgcgggcaatcagatagacaccggctgttaccatcgttgcggcgtggatcagagcagagaccggcgtcgggccagccatcgcatctgccagccatgtctgcaatggcaactgggcagatttacccactgcaccacccagaatcattagggttgcccatgtgattgctgtggaaccggcttcaatatgctgcggtgccagtaccgccagttcgcggaagctcagcgtacccagctggtcgtagaggataaacataccgatggcaaggaatacgtcacccacgcgggttacgataaaggctttcattgccgcagcaccgttggcaggcgttttgtaataaaagccaatcagaaggtaactgcacagccctaccccttcccaaccaaggtacatcagcagcatgttatctgccagaaccagaaccaccatgctggcgataaacaggttggtataagcgaagaaacgggaatagccttcttcaccacgcatataccatgaagcataagtgtggatcagaaaaccgactccggtgaccacactcagcatggttaatgacaggccatccaataccagattgaccggaatactgaagctgtctacgctcatccagttccataatgtctggctatagacaaacccgccagcttcattctgagtatggaaatccatcccgacccaaagagtcaccaatgcggccagcccgacagaactgattcctacggtcgctgacaggttttcagaccagcggccgcgggagaatgccagcagcaaaaatcccagcagtggcaacagaattgttaaatagagtaagttcatccgcgcatctcactgactatatcaatattcaggttctggcgacgacggtatagctgtagtaacagagccagaccgatactcgcctcggcggctgccagtgtaatggccagaatgtacatcacctgaccatcgggctggagccaatagcttccggcaacaataaatgccagcgctgaagcattgatcatgatttccagcccgatcagcataaatagcagattacgacggataatcaggcaagtgaaacccaatgcaaacagaatagccgccagaatcagaccatgttccataggtatcattattggtcctccacacgattgctgagtacttcaccctgacggctttcacgaccaacgtggtaagccaccacaagccctgccagtaatagcagggatgccagctcgactgccagtacgtaaggaccgaacagactgatacccacttctttggcactgaccacttcgccactgattgcagcttcaggcaggctgtgaatagcaaagatcaggataaccagtaaaatggacgaaaggattacaggcccaatccaggctctcggcttcagccattgtctttcctgatcagcgactgatttaccaaggttcagcatcatcacaacaaagacgaacaacaccatgatcgccccggcataaacgatgatttccagtgcaccggcaaaataagcgcccagagaaaagaacacgactgaaagcgccagcagggaaataatcaggtacagcaacgcatgtacgggattggtgtgcgttattaccctgagtgttgccagaatggcaatcaaccctgcgatataaaatgcaaattccatgaatatcgctccttatggcaacaggcttttaacgtcgataggtttggcttcattgtcggcttcgcctttgtctttgccatcaatcgccatacctgacttacggtaaaagttatagtcagggtatttacccggcccggaaatcagcaggtcttctttttcatacaccaaatcctgacggttgaattcacccagttccaaatccggtgtcaactggatagccgtatcgggcaggcttcttcacacagtccgcaaaaaatgcagcgtgagaagttgacacggaaaaactccggataccagcgaccatctttatgttcggctttttgcagggagatacaccccaccggacagacggctgcacacaggttacaggcaacacaacgctcttcaccgtcagggtcacgcgtcagaacgatgcgcccacggtaacggggtggcaaataaaccggttcttccggatacatttttgtttcgcgtttatggaaggcatgaagccctatcatccaaatactgcgtacctgggtggcgaaaccaaccaataactcttttaatgtcatggtttaatcacccctttattgagcgttgtacaaaatcactgcggcagtcgccagcaggttgagtaaagttaacggcaagcaaattttccagccaaatgacatcacctggtcataacgcggacgcggtaacgcagcacggatcagaatgaacatcatcatgaaaaatgctgttttcagcgcaaaccagacgaatggaggcaggaaaggcccatgccagccaccaaagaagagtgtgacgattaaagcggacaccgtcacaataccgatatattcacccacaaagaacataccgaacttcatgccggaatattcaatatgataaccatctgccagctcctgctctgcttccggctggtcaaaggggtggcggtgacatactgcaaccgccgcaatggcgaatgtcaggaagccaaagaactgcgggataatattccacaggtgctgctgggagttcacaatctccaccatattgaaggagccagcctgtgcgacgactcccatcatggacagaccaatgaaaacttcataactcagtgtctgtgctgatgcccgcattgcgcctaacagcgagtatttgttgttactcgaccatccggcgaacaataccgcataaacagccagacccgccatcatcatgaaaaacaggataccgatgttcagatctgccgccatccatgtcgggctgaccggtacaatggcaaaagccagtaacagagagcagaaaccaacgataggagccagagtaaagatcatccggtctgagaaacgtggtgcccagtcttctttgaagaacattttgatcatgtcagcgacaagctgtaatgagccgccccaccccacacggtttggcccatagcgattctggaacaagccgagaagacgacgttcgccgaaactcatgaatgctccgcagaccaccacaaccagcaggatgacaactgctttaagaacagaaatcaaaacctcagtcaattcgggagtcagccagttcattatgcaacctcccgtaagttattgactgctctgcctgccagaaccggcggaatacccggcattcccaatggcaggccaatctgaccctgagcaagattgctgctcaggcgcaccgctaagcgcaattgctgccccgaacaatcaaattccatcatggaaccttctttcacattaagatgttcagcatcctgacggttcatcattacatacggttcaggcatacgctcctgaatgacatctgcccgctgggatagctcctcactaccaaacagatggaaataaggtgcgatgtaccattcatttttctgcgcactaaaggctgccggaatgctgtcaaagtagttcagaccaccatccactgtctcaatcaggcgtacaccgggatcgccgaaacgcagcttaccgcccacttccgcctggaatttattccaggcctgtggtgagttccatcccggtgcccatgcaaacgggatttgctgacgatccgcaaacgggctgttgtttccttccattgagaaggcaaacgccgtatcaatatcttgcggctggcgctgttcatgaacactgacattggcaagcatggctgtacggccactgtaacgatgaggtgaacgggccagtttttgaccacggatacggaatgtggcatccggtgcagcattaacgatgcccttgaattgcggcatttctttgacacaagcttcaatcacatggtcaagctgagtccagtccgtctgacgctgtgtataggttgtatgcagagagtgcatccagcgccagctttccagcataacaacggatttatcatagaatgcaggctcatatacctggaagtatcgctgcgcacgaccttcctgattcaccagtgtgccatcgctttctgcgaaactggaagcagagaggatcagatgggctttatccataatggcggtatgctgatgatcaacaacaatcaggtttttcaggctacccagtgcactgtcaatcttatcagcaggagcatgacggtagagatcgttttccatcacgatagccgtgtctgaatcacctttagcaatacgctgtaaagcaacatccagcgactgtgcctccatcatcgccagaccaaggctgttcgcataggcggctacataggaaagaccgacattggctccgctgtctttcagtgcccatgcgatattagccgcagcctgaatcagggtatcactgcctgcattactgccactgataatcagtggttttttcgctccacgcagtgcctgagcaacgatttctactttcgctttcagttcatccggcaggtcatcgacagcaggggcaatgctattcagggcatgtgccacggcaaagccgaaccgggcctgatcatcaacgggtgcacgataattccacgctgcgatatcatccagacgggtatcatcaacgctggtcaggaacagcggatatttggcatgttgaccaatattcatcactgccgcaatttgccagtccgctactttttgagctgccgccatttcacgggctttacccttaactgcctgacgtaccgacagcgccatgcgggcacctgtctgtgtcaaaatcttcacccaacactaatacagcgtcgtaatcttcgatctcccgcaaagatggtgtataaaccccaccctgttgcagaatttccagcatcatatcgagacggtgctgctcttctgctgaaataccgctatagaaattctccgcacctactaactcgcgcagtgcaaagttactttcgatactggcacgcggcgagccgataccaatcgcgtttttcgcctgacgtagaatatctgccccaccctgcattacctggagaggattcagtganatccactgatcaccacgaagctgttgtggctggcgagggcgatcaccacgattgacatagccataaccaaagcggccacggtcacacatgaaatagtggttaaccgtgccgttatagcggttttcaatggggcgtaattttccgtaacgttttccgggattggtattacagccgatactgcattgctggcagatactcggcgcgaactgcatatcccatttacggttataacgttcagagtgcgttttatcggtaaatacccctgtcgggcaaacttcgactaagttaccggaaaactcactttccagcgtgccatcttcagggcggccaaagtagatattgtcatgtgcaccataaacacccaaatccgtgccatccgcataatctttgtagtagcggacacaacggtaacaggcgatacagcggttcatttcatgagcaataaatggccccagttcctgattcttgtgtgtgcgtttggtaaaacggtatttacggaatgaatgccccgtcatcaccgtcatatcctgcaaatggcagttaccaccttcttcacagacaggacagtcatgaggatggttagtcatcagccattccaccacacttgcgcggaactgttttgcttcttcatcattaatggagatatacgtaccatctgaggccggcgtcatacaggacatcaccagacgaccacgtgtatcttccgcgttctgatattgcttaaccgcacactggcggcaagcgccaacgcttcccagcgctggatgccagcaaaaataagggatatcaagccccagcgagaggcaggcttgtaacaggttatcagccccgtttacatcataatttttgccgtctacatgtatcgtagccatagtcagcatgcttcccaatggcctgccgtggcaggcgttaatcaaaaattcttctctaccaacgctgcttaagcaggtttggctggatgcctgcaatcaggctggtattcccgtaatctctggtgacaatccccgcctcaaattcttcgcggaagtacttgattgcactttgcaaaggttctacggcaccgggagcatgagcacagaaagttttgccggggccgaggaagcgacagagctgctccagtgtttcgatatcaccgggctggcctttcccttcttcaatggcacggaggattttgacactccagggcagaccatcacggcatggcgtacaccagccacaggattcacgggcgaaaaattcttcaagattacgggtcagggaaaccatattgatctcatgatcaactgccattgccagcgcggtgcctaaacgacttccggctttggcgatgtgttcgaaatccatcggcagatcaagatgttcttcagtcagaaagtcggttcctgctccccccggctgccaggctttaaatttaagcccgtcacgcataccaccagcataatcttcgagaatttcgcgggcagtggtgccaaatggcagttcccataagcccgggtttttgacccggccggagaaccccatcagtttagtgcctgcatctttacttttgccttcacttaaaccgatgtaccactctttaccgtgttcaagaatagccggaacattacacagggtttctacgttattgacgcaggttggttttccccagacacctgctgttgccgggaatggtggcttggaacgagggttggcacgacgcccttcaagggagttaatcagtgcggtttcttcaccacagatataacgtcccgcgccggtatgcacaaacagctcaaaatcaaaaccactgcccagaatatttttgccaagtaaccctgctgctttcgcttcttcaatggctttacgcagatgaacagcagcttcaacatattcaccgcgcaggaagatatagccgcgatatgctttcagcgcgaaagcacttatcagcattccttccaccagcaaatgcggcaattgctccatcagaagacggtctttataagttcccggctccatttcatcggcattacacaacagatagcgaatgttcatgctttcatctttcggcatcaggctccacttcaaccccgtggaaaagcccgctccaccgcgccctttcaggccagcatctttcaccagtgtggtaatttcatcaggagccatgcccttcagtgctctttcggctcccttgtaaccatttttactacggtattcatccagccagacaggttgttgatcatcacgcaaccgccatgtcaggggatgagcttccgctgtgcggataatttctttcactcctgaatgcgttgtcattgatactgctccagcaatttttcaatttcttcgggtttcacataactatgggtatcatcgtcgatcatcatggtcggccccttgtcacagttacccagacaacaggttggcaataatgtgaaacgaccatctgtcgtggtttgacccggacggatgctcaaatgcttttcaattgccgcctgaaccccctgaaagcccgtaatgtgacaaacaacactgtcacagtaacgaatgatatggcggcctaccggctgacgataaatctggctgtagaatgtcgccacgccttccacatcactggcgggaatgcctaagacttctgcaatggctgaaattgcaccatccggcacccagccacgctgtttctgtacaattttcagtgcttcgattgacgctgcacgcggatcttcgtagtggtgtttttcctgctcgatagcatcacgttccccggcactcagtacaaactcatccggtatctgagtgtctgtcacgttgaccacatcaaggcgtgcctgcttgtttgcgttaaattcactttgcatcgttagcgatccacatcagacataacaaaatcgatactacccagataaacgatcaggtcggaaaccagactgccgcggatcaccgaagggatctgttgtaaatgtgcgaaactcggtgtgcggatacgggtacggtaactcatggtgctaccatcactggtcaggtagtagctgttgatacccttagtcgcctcaatcatctggaatgattcattggctggcatgaccggcccccatgacacttgcaggaagtggttaatcatggtttcgatatgttgcagggtgcgctctcttggcggcggcgtggtcagtggatgatcagccttgaacgggccttccggcatatgtttcagacactgctcaaggatgcgcatactctgacggatctcttccactttcagcatcacgcggtcataacaatcgccgttgtaaccaaccggtacttcaaagtcgaaattttcataaccggaataaggacgccatttgcgcacatcaaactcaatgccggttgcacgcagacccgcgcctgtcacgccccagtccagtgcctgcttcgcattgtaggcagcgacaccgacagagcgccctttcaggacactgtttttcagcgccgccttgacataggaattcaaacgtttcggcaaccagttcagcaagtcacgcagcagtttatcccagccccgcggcaggtcatgagcaacaccaccgatacggaaccaggccggatgcatacggaagccggtaatggcttcaacaacatcgtaaaccttctgacggtcggtaaaggcgaagaacacaggggtcatcgcaccaacgtcctgaataaaggtactgatatacagcagatggctgttgatgcggaacagttcagacagcatgacgcggatagctttcacacgctcagacacctcaatacctgccagtttttcaactgcaagtacataaggcatttcgtttacgcatccccccagatattcaatccggtcggtataagggatgtaactgtgccatgactgacgctcacccattttttccgcaccgcggtggtgatagccgatgtcagggacacaatcaacgatctcctcaccatcaagctgaagaatgatgcggaatgcaccatgcgctgacgggtggtttggcccgaggttaaggaacatgaagtcctcattttcggttccacgtttcatgccccactcttctggcttgaaagtcagggcttccatttccagatcttctttctgtttggtcagcatgaaaggatcgaattccgtggcgcgagctgaatactctttacgcaacggatgaccttcccaggtaggtggcatcaggatacgacgtaaattcggatgaccattaaatgtaatgccgaacatttcccacgtttcacgttcgtaccaattggcattcgggaaaattgacgtgatagtcgggatattcaggtctctctcatcaagtgcaactttcaacataatgtcacggttacgctcgatggaaagcaggtgataaaacaccgaaaaatctgccgccggcagaccttcccggtgagaacgctgacgctcatcaacgccatgcaaatcaaacagcatgacataaggtttgggcaactttctcaggaacgtgattacttccgttaaccgttcccgcttaatccagacaaccggcataccagtgcgggtaggctggacagtaaacgcatcagggccaaattggcgattaagctcacttacgaccggatcatcaatgtgatctctggtttcccaagcaggccgtacgctttcttgcgctatctgatctgtcatcattcttcaccacaacgcttgatcagggtttaatgtgatcgcaacataatcttgagttacgacattgctctggttatttttatggctaaaaagccttaaaatagcggctaaaagccttaaatctcatctggggtacgcaggtttttcactgcgatacgttcaccacgcttccgttctctttctgattgcatatttgcgcggtaaaccccctgatcaccaacgacccacgacagcggacggcgctctttgccaatagactcctgcaataacagcagtgcctgcatataggcttcaggacgcggtggacagccgggaatgtagacatcgacgggaataaatttatcaactccctgcacgacagaataaatgtcgtacatcccgcctgagtttgcacaggctcccatcgaaataacccacttaggctccagcatctggtcatataagcgctggatcacaggtgccatcttgacaaagcatgtacctgagataaccatgaaatcagcctgacggggagatgcccgcagtacttcagcgccgaaacgggcaacgtcatgaactgcggtaaaagaagtcaccatttctacataacaacaggaaaggccaaagttataaggccacagggaattctttcttccccagttcaccatgtcatgcagagcatgttctaatttacccatatagacactacggtggacgtgctgctccagaggatcgctgacaagctcctgcttttgcagggggtaacggtcattctcaccgttcggatctatgcgggtgagcgtataatccatctttatgcctcgctattactgcatttgactgttgttggtattaacattggtggtattagcattagtggtactgacatcagcggtatgaacatcagcactgggatggctaacctgacgtcttgaacgtgcgggtgtccagttcagtgctccgatgcgagccagataaaccaggccggctaataagaccaaaatgaaaatacttgcttcggcaaagcccagccagccactctctttgatagagactgaccacgcgtataagtacagggcttcaacatcgaagatgacaaaaaacatggcaaccagataaaatttcgccgacagacgaagacgggcactgccgacagaatcgatacccgattcataagggacgtgttttgctctggcttttgctctgcccccaagaaagtacgctcccagtaacatgaacgcagtcaatccaagagcacctatcaagaaaatcgcaaatgcccagttatgggccaaaactccagtagatgtagacatactcgttgcttactcatcaaa

SEQ ID NO: 2610 - DNA, 19289 bp, Xenorhabdus sp.; identical to SEQ ID NO: 476
  CDS (5168)..(5539)

SEQ ID NO: 2611 - DNA, 19289 bp, Xenorhabdus sp.; identical to SEQ ID NO: 476
  CDS (8445)..(9269)

SEQ ID NO: 2612 - DNA, 19289 bp, Xenorhabdus sp.; identical to SEQ ID NO: 476
  CDS (9467)..(9973)

SEQ ID NO: 2613 - DNA, 19289 bp, Xenorhabdus sp.; identical to SEQ ID NO: 476
  CDS (10274)..(10495)

SEQ ID NO: 2614 - DNA, 19289 bp, Xenorhabdus sp.; identical to SEQ ID NO: 476
  CDS (13201)..(14043)

SEQ ID NO: 2615 - DNA, 19289 bp, Xenorhabdus sp.
  CDS (17942)..(19060)
tgaattacctttaaaactaagccatcctgatgtaaagatgacataaatttacctatgcttcatgctgtatgaaaaaacatatatggtataatgccgcacctatggtgcattgcagtttatgtaatttctaagcgttttatcgcgtcttttctcttcccataaaactgcccctgaattgatatcaggaatggtgaagtctggagtatttcttatttatgaattttgagtcactcggcttgaaggctgatattttgcgtgccattgaagaacaaggatacgcagagcctacccctattcagcaacaggcgattcctgttgtgttgtccggtaaagatctactggcgagtgcccagaccggaacggggaaaacggcaggttttactttgcctatcttacagttattgagtgaatctcccattcaatctaaagggcgtcgcccagtcagggctttgatcctgacgccaacccgtgaactggcggcacaagtaggggaaaatgtccacaattacagcaaatatctccggctacgttcctttgtggtatttggaggggtaagtatcaacccgcaaatgatgaaattgcgtggtggagtcgatattttagtcgcaacaccagggcgtttgctggatctggaacaccaaaatgccgtagacctatcccacgtggaaatgctggtcctggatgaagcggatcgcatgttggatatgggttttattcatgacattcgtcgggtactgaataaactgccagccaaacgtcagaatctgctgttttcagcaacattctcggatgagatcaaaaatctggctaataaattgctgcgtgatccggccagtgtagaagttgcccgtcgtaattcagcttctgagcaaattgaacaggctgttcattttgtagataagaaacgcaaaggggaattgctttcttatatgattggcagccagaactggcagcaggtactggtatttacccgtacgaaacatggcgcaaaccgtttggcagaacagctcaataaagatggtgttactgcggcagcgattcatggcaataagagccagggggccagaacccgtgcattggctgattttaaaagtggtcagatacgggcattagttgcaacggatatcgcggcgcgtgggttggatatcgaccagctacctcatgttgttaactatgaattgccgaatgttgcagaagattatgtgcatcgtatcggtcgtaccggtcgtgccgaagcaacagggcaggcaatatctctggtatgtgttgatgaacataagttattgaaagatattgagcgcttgctgaagcgggaaattccgcgtattaccactcccggctatgaacctgatccttcgattaaagcagaacctattcagaatggtcgtaacgggcgcagcaatcagccccgagctcagcgcaccggtgataaacagggcgctacccggcaaaatcatggccattcacgcaacaagaatgtatggccaaagaatgcttcatcacagaaacctcgcaatcgcagatcagttaaagcggtagcaggagagtaataccatgcgcgttttgctggctccgatggaaggagttctggattcactggtcagggaattgcttagtgaggtcaatgattacgatctctgtattacggaattcctgcggatcgtggatagcttattgccggtaaggtctttttaccgtttgtgtcctgagctgcatcgccagagcaggacgccatcgggaacaccggtcaggatacagcttttagggcaagatccgtcatggctggctgaaaatgcagtcagagcggtggaattgggttcgtggggagttgatttaaattgtggctgcccttccaaaaccgtcaatggtaatggtggcggggctacattactgaaagatcccgaacttatctaccgaggagccaaagccatgcggcaagctgtaccggcagaattgccggttacagtcaaagtacgtctgggatgggattccgatgcccggcagtttgaaattgcagatgctgttcagcaggcaggtgcaactgaactggtagtgcatggacgtactaaggaagatggctataaagcagaacgcataaactggcaggcgattggcgagatccgccgtcgccttgccataccggttattgcaaatggagaaatatgggactggcaaagtgcacaggagtgtctcaaagtcaccggatgtgattcagtgatgattggccgtggtgcgctgcatgtgccgaatttaagccgtgtgattaaatttaatgaaccgaaaatgtcgtggcatggtgtgctccggctattacagaaatacaccctgttggaaaaacaaggggataccggtttatatcatgttgcccgcattaagcaatggcttggttatctacgcagagaatacagtgaagctgaggagttatttatgcaagtcagggcattaaaaacatcttcggctatagctgaagtgatttctcaagttgtagagaacgacatgtatttgattgataatgcattggtttagttaacgtatcttcagtttcctctcagtttctatgatgataatgatgttatttttatcgttattgttctctattctgaaagatgctatacacttcgtttttcaggttgcgtctttgctgattgcgcttgttcccccctgtcaccgtttttataaacatacggttatctatgttctttgggggaggggggggggaactcccttgctgctgcgatgtagcctgaaatacattgtgtatacatattgagaatttcataagcaaattgtctgaattgaccacttcagtcagttggattgtcacaaacttgatcatttgttccgtgagacacttcttcatgttttgctgatgttattcatcatcggatgctgaagcgggcctgagaaatgtctatttcattatgaccttacttgtaattcaatgaaggaaatgccaatgaaattagaaacactgtccatccatgccggttactctcctgatcctacaactaaagcggttgccgtcccaatttatcaaacaacgtcctatgcctttgatgattcgcagcatggggctgatttatttgatttaaaagttgaaggcaacatttacacccgcattatgaacccgactaatgatgtgctggaaaaacgtattgctgctttagaggggggagtgggtgcacttgctgttgcttctggcatggcagcaatcacctatgctattcagacaattactggcctgggagataacattgtttctgtagcaaaattgtatggcggaacttataacttgatgacacataatttccaaaatattgggattgaagtccgttttattgatcatgacgatcttgctgctcttgaatcgatgattgatgaaagaaccaaagccgttttttgtgaaacgatcactaatccaagcgggaatattgctgatatccgcgcattcgctgatattgctcatcggcacggtattccacttatcgtcgataataccgttgcaacaccttatttgtgtcgtccgtttgaacatggtgccgatattatcgtacattccctgaccaagtatattggtggtcatggaaattccatgggcggaatggtgattgattcaggcaatttcccctgggcagatcataaggatcgttttgctgttttgaatacgccagatccttcctatcatggtataaattatctcgaacattttggtgtagcagcatttattgcccgctgtcgtgttgggcagctgcgtagtactggtgcatccctttctccttttaatgcctttttgattttacagggccttgaaacactcgctcttcgtatggaacgtcatactgaaaatgccttgaaagttgctcagtatctggaacaacatcctctggtatcctgggttaaatacgccggactaccaactcaccctgaatatgatttggctgtacgttatatgggagggaaaccttctgctattctatctttcggtattaaaggagaggaaaaagcagcaacacgttttattgatgctctgcaactgattacacgtttggttaatattggtgatgctaaatcattggcttgtcatcctgcatctacaactcatcgtcaattaaatgaaaaagagttgataaaagctggcgcatcacgagatctgatccgtttgtctattggcattgagcacagtgatgacattattgcagaccttgcacaggcattggatatggcaaaataattgaaatataccaacgaattgcaagttatattgtagtggcgaaggaatgacaaattcatcaggaacgaatttgtccagccaaaagctggcctctggtgagaggcaggagcctctcagtaatcctgcaaaatacagactattctatattcataaccacataccgagggtgagcggctatatttacatttacctccccagtgacacacgcacatctgcacttcttttttatcgggtatatagaattcatataattataacgtccggactattttgtgtttaattaatcaaaaacaacaatgatattaaattaattaacgacatattttgatttaactgaaccctataattccttatgattattcataaactgacagctttctactatttgcaatttttttagttagtgtcttaaattaggaaatgtagttaagacattctcagtaaaatctcatcagggcgttagctcttattgatacccaatatacccagagtttcgagctgcatcgcggcgtcaagggcgttggttcccgagagcatagataattatgcggtcagagaaaatgaagccagccaaaaaagaggtggtttgagatagggtaggtatatctaatcgaatcagggggttgagtatgggtattctgtcatggatcatcttcggtttaattgccgggatcatcgcgaagtggattatgccgggtgataatagtagcggtatcattatgacggtgattttagggattattggtgcagttgttggtggctatataagtacattttttggtatgggaaaagtagatggatttaatttgggaagttttgctattgctgttattggtgcactggttgtcctgtttatatatcacaaagtctctaattaatttatttatccttattaatcttaataatagatttaagatgagtgatagagaaagggcatgataatttgatgcccttgtatcttttaaattgttttttgccactgtgaaacagctcaaccacttaagtacattattatttatttttctgatgggagattatcatcagctccccattcagcccatgacccatcgtataatgctgcttttttatgaccaattatatcaagccctagaactaaaacggccgctgtcattccagagccacaactagtgataatgggttgccctaaatcgacaccttgttgtttaaagatacgtttaatttcatctggcgatttgtaatgtccattttcaagtagcgctgtccacgggacattttttgaaccgggaacatggcccattcttaaacccgggcgtggctcaggtgctctggcctgaaaacgctctactgatctggcatcgacaacttgtgttttctcctcttcattatggagaatatcaaggatctgttgccgggaaatgacatgttcgggagaaaaatggatattgaatacctgtgcatggtggctgacttctcccgattcagttgggtaaccagcccgttgccagccttgtaagccaccttcaagaatacggatgttttttgcgccaaaagttttaaatgtccaccacgcccgtggagccgaaaacatatttccctgatcgtaaatgacaatcagatgattttcactgattcccatttcgctaacggctttttggaaagtttccggagcagggagcatatgtggtaatggactctgaagatcagctattttatcaagatcaaaaaagccggagcccggtatatgtttctccagccatttctgctgataatcaatggattcagttggcatgggagcactggcatcaataacaacaacattctcatcattgagatgttcgcttagccattgtggaataacaaaatattgactgttcataagcctccccgtcattggatattccgtgcgttatactactaaattgggtactgcaataaatctgagggtatatcggctattactgttgcccggattgtccgttttcctgatgtaccgtttcttgctgtacttgttgtgtctcttctgctgaggcggttgaacggttatacatgttcattcctgctaaaataatgcctccgatagagccgagggtgaatagtacgataataacaagcaggatctttttcatctttgttcccgataaaattcttagtcatgtaggaggttatacccaatggatttccagttgcatcgcagccaataacaaagagacaacttgaaagacaacgggtatagaagtatatcggcttctacactccagacaagcaataagcgactttctggttttttctgtaaaaaagctggaaagctgttcccaataatcgtgatatcaggctgatctgagggtaactctgtgggagaatggggtgataattctcatgcagcaaaacatatggcactttccagttcaataaaaaatcaaatcagtcaatggtataaggcgttatccacccacattgatggcttcataccaagagctccccaacgtcagatgattgcagaagtggcgaaaacactggcagatgatgaaggacggcatttggttatagaagcacccaccggagtaggaaaaacattatcctaccttattcctggtattgcagtcagtcgggctgagcagaaactattagtagtgagtactgctaatgtggctttacaggatcagatttacagtaaggatctaccgctattacgaaaaatcatcccagatttgaaattcaccggggcttttggtcgcgcgcgttatgtttgcccgcgtaatctggaagctatttgcgccgcagagggggagcaaattgatttaatgctgctggtggaagatcagactgctgtagcaaatagtgaagaacgagaactgtgtcgcaggttacgcaatgattactctacttttggctgggatggtttgcgggatcatcatcagctggcattgtcggattcgctatggtcaaaggtcagtactgataagatgaactgtctggcccgtaactgccagttttatcaccgttgtccattctttctggcccgaaggcagattgaagattctgatgttgtcgttgccaatcattctttggtgatggcggcattggaaagtgaatccgttctgcctgaagctaaaaatatgttgctggttctggatgaaggccaccatatcccggatgttgcaagggattcactggaggtggaaggagagattacgctatttcagctaaatgggcagcttgattcctttgttcgtcatgtcgagcaatatttgcttcagttccgtccgacaaaaccgcctgctttggctgagataacccgtttacaggctcattgtgaaaaaattcgtgagtgtttcagggagctggctgatatcacacaggcattattgcccgaacgaggggatgcggaagaatacctgtttgaactgggaaaattaccggataatttgctgctgtgctgtcagacactatttaagctgacagatggcctgcgtagcttatctgaagcgattctgaatgatcttaccgatcaaaccgcgaaacaggatattgtcaggttgcatcgggctatcttgctgactagcaggacactgggttatttcgaaaatatggcaaagctgtggcggttggcttcgcaggaagaatcctcccatgctcctatctcaaagtggctgacacgccgttatgagaagaatcagtcacatctttactttcactgcgcgggtattcgggtcagtgaacaattaactcagttattgtggcgaaacattcctcatattgtcgtaacatctgcgacattgcgctctcttaacagcttttcccgtattcaggagctgacgggattgcatgaaaattatgatgatcgctttgttaccttgacatcctcttttgaacatgtgcgccaagggcgtctgattattccgcgaatgacgctggagcctacaatccataatgaaatgcaacaccttgaggaaatggcgcgttatttccgttcgcaaatattgttgggtgctcatcagggaatgttagtactgtttagcagccaacgcgcgatggagggttttctccaatttgtaaaagatttacggctgatgttactggtgcagggggatcagccacgatatcggctggtggaaacccattgcaaacgtattgacgaagggcaacccagtgttctggttgggttgcagtcttttgctgaaggactggatttgaaaggtaattacctttcacaggtacacatccataaaattgcttttccgcctgtcacaaaccccgtcattatcactgaaagtgagtggcttaaatccctgaaacgctacccttttgaagtgcagagtttgccgagtgcttctttcagtcttattcaacaagtgggaagactcatacgcagtcatgagtgtcatggtgatgtggtaatttatgacaaaaggctgctgaccaagcgttatggatctcgtttgctggatgcattgcctgtttttccgattgaacaaccggatataccttcggaagaaatattactgaaaatgaaaaaaggataaataatataaaagttaatattatttatccttaaggtaaagttaggctgataactgttatttatccgatttttttcaggaaacaagttttcagtactaaccctttgattttatcaacattacattcgatttcgtcttcacggtgggtaaggcgaatatttttaattaatgtgccacgtttcagtgtcttagaggtgcctttgactttcaggtctttgataacttgtactgaatcaccatcattcagcagtgcaccgttggaatctttaacttcgatatccattgtatattgtcctcatgtttatttttaaagcagacgggattatagagagaaaaatgaattttttaaaggttagtctgattttttaggttataacttctattttagatgttttttataataaaaaaggccgtaataacggcctatacactttgtctttcaaatcactttgtctttcaaattatctctttggtggttgcgctcgttcaccccagttacatagctctacgcttctggggatgaacttccttgcggcagcgatgtatcatgaaatccagtgtgtatgatgatggtgtttttatcttagtgctcaatattggcttcaagaaaccataaaaacttatcgagatcacgggaagcagctgtgaacatatctgctgtatcttcatcttccgcatcaccaatagcctgacggatatcattagcaacaatagcataacgatcagccagtgcttttaagtgatcctgtacatcatgaatacccgtcgggtaactttccagctgagttcctttgtgaacttcctgaagtgtacctaacgctactccacctagctgcacgactcgctcggcaaaggtatcgagatgatcaacgagcgcagtacggaagtcatccagcattttatggatggcgatgaagtttctgccgcggatattccagtgtgcctgcttagtcatcagagacaggtcagtaaactggatgaccatatgatttagtgcataaattgaactttgtttgactccctcactgatattattacgggtataaatcagtttggaggaactttttctgacaaattttgcagtactcatttgtaatgctcccttaatttaaactaatgacatgggatacattaaaaatagctgaacattgagcagacgtcatatcgttttatgctattgaattgatagctaataaaaacatcggtaattaatcccggtaatagtaaaaaccgaaaggtactgatacctttcggttttcatagatagcttaagttaacatacagtctttattggattttttctatttttgttttctgtttcatggttgtagtagagccaattgaagcacaaatgatgcacagaagggcgagccattgtgttgtggttaaatgctcattcaggaaaatgataccggataaggcacccaatgctggttccagactcattaacgtaccgaatgttttggcgggcaaacgtgtaagggcgatcatttccaatgtatagggaagtgcggtcgataagatagcgatgcccagagcaataggcagtaatgaggcatcaaacagaagttccgggccggtttggattaatcccaccggaaagaaaataacagcagcaattaatgagccgatagaaactgtagctgcaccataacctgccccagcgcgttgaccaaagataatataaagtgcccagaaaacgcccgctcccagtgcatataaaatgccgacaggatcaagagtactgacgtcatcaccgataggtaacagaaaacctaatccggcaatatccaatacgatccagagaaaatccacggggcggcgtgaggaaaacatagcgacagccagtgggccggtaaattcaagtgcaacggcaataccaaggggaattttggataatgccatgtaaaacagataattcattccaccgagtgaaatgccgtaagcaaggagaggagtgagagatgaacgcgtaaatttcagacgccagggtttaaaaatcagaaataaaataagggttcccagcgcaagtctcagggcagtcacaccaggtgcaccaatgacatgaaatactgttttagctaatgatgcgccagcctgaattgatgtcattgaaattaataacaaaaatatcggaagcagagaaaaagacgcagcccgatgtttagaaaaggacatttacagaaaacctcaattacaacatgttattttagaagtgccatcttcgcagtgaaatagacagaatacaacatgattatgtcttatgatcactaggctgacgtataaaagaataagcatgaagtatagtcattaattcctcttaattcacatattatgaaagcgatatcctcgtataaaagcagggtggtagaattcgttgatgattttatcggctttgattattatgctatttcttaaatataaatagaccatgattttcaggagaaatgatatgttaataagggcagcttctgggcaggatcttgatgctattttattactttatacaacattattcagagaaatggctgagttgcagcctgaaagactgaaaaaggttgaacaggacagggcatttattatttccactcttagtgatgataactttaatttattagtagcagacgataataatggaaatataaaaggtttttgcatcgcacaaaaaaaacagacaccaccatttaattgccttgttcagagaaaatatggttatgttattgatttgtttgtcagccaagatgtaagaaatcagggagtcggccagaagctattagcagaaatgaaaaagtgggcgaaggaaaataattttactcatctggagctgaccgtgttatctgaaaatatttcggcaacaaaattttatgaaagggaaggttataaagaagtcaataaattaatggctattacattgtgattatggagttaaatgtgaaggtttctttaatagatataaataaaaataactatcgcgaagtgatgtctctcgaagttgaatctggacaggagcagtttgttgtaccaaattcagagtcaattgcagaatcaaagtttaatcaatattgtaggccaagagtaatttgttttggcgaagaaattgttggttttgctatgtatgaacgttgtgttaatgaaggaaaaccaaatgagtataatctttatcggatgatgattgacaaatctcatcagaataaaggaattggcagtcttgcgatgaaattattactggatgaaatgaaacaatacgctgattgctacaaaatatctgtctgttatgatgaaacaagtcaacgtcatagccagttttatcagcgttttggttttaccgaagtaggttattgcgatgagtatgaggaaatgctggcggaaataattatagaaaataaaattcgttaactgtgagcttctctttaaaaatgaacagagagttatcgtatagtgaacatttgtagtggaagttatatgctcttcgtctttcaagttgcctctttgtgggctgcactcactcatcccgatcacatagttgtctatgctcccgggaatgagttcccctgccgccgcgatgcatcttgaaatccattgagtatagataagttaattctctgtaagcttgctaaatgaaggtttgtctgccagaatttaaacgaattatgcagtaagtttatttggtatatcctcaaactttttaattaaaaatacgataagccttcaaacttctgtggtgaaataatgaatatagggaaacactttaataatagctttatcttcaaattattgctctttatcatgattgcaggattgggattgagagtaccaatatcttatatcccgccaatgtctcaggaaattattgacgatttaaacataaactattctacctttgggttaataacatccctgtcaccgctgtgttttttctttttttctcctttaacaccttattttgaaagaagaatagggttgtataaaaccttattaatgacatttgtggttgctattgttgcttacatcctgaggttaaatagttctctgatattgctgttggcttctacagttatgtttgggtttgctattgcactgggaaatattgcgttaccttcattcttcaaaagtttgggtagtaacagggttgctcttctgtcatcttcctatacggcatctttgtatctggggccagcaatggcgaccggcctgacgttaccgattaagcatatgctgggtttttcctggaatgaagtttcctgggtttgggtgctcatacccctattttcagtgctccttatcctgttcttttccgataaaaaacaaaaaaattcagttagtaacccaaatgcccgtaatgattatgacgagaaacctgtgaaggtgattaacccgtggtcaagcatttcatgctggatgatggctgtctatttctctgttttatcgtttaacttttatattattactgcctggttccctgaaattatcagttcttatggcatggggctgactgaagcagcatcttatgctgcactcttctcattagtagcaataccttttgcaacattgactgctttttatatctataaaataaaaagacaagaattcatatttgttattaaccctattattggcatgctggggattattttatttatttatggtcaaaaacatttaattcctgttgctgtcatgatcatggggattggggcaggtatttgtaccggagttgcattcttgttaccactgttgcgttttaatcatacgactaatattacgaaagcaaactcaatgatgcagtcaatcggctatttgattgcattttgtgggccacttatttctggttatattcatgactttacctcttcctggactcttgttctgtggttgcttttcctcgttctggcaatccaagggattttgggaataataatcggtaaaaatgaaaaacttgatgcggcttaatgttaaaaagcgtctaaaaatcataaccacccgtataacgggtggtttgctcttgccctataagggcttgttaccgactgcgcctaaatgacgctgctttctcttcgttcaaactaagtgtctttgctgctttggcccaccccttgaaggggtctacatgctctttactactcaatttatccgagattaaatccgacttttcttgctctctgatatacttttgaattgtcgcttcatttagccctaccgtactgacatagaacccttccgcccaaaactttctgttgccaaatttatattttaaattggcgtgtctatcaaagatcatcagcgaacttttacccttcaaatatcccataaagcttgaaacgcttagctttggtggaatactcaccaacatatgaacatgatctggcatgagatgaccttcgattatttccacacctttatacttacaaaggtctctgaggatctctcccacacttgaacgaatattattaaaaatcactttccgtctatatttcggcgaaaagacgatatggtatttacacagccactttgtatgcgctgagctttgtgctttaatgcccataaacacctttccttatttgagttacgaatattagcttgaacatctatatcgtaacggaaaggtgtttttcttggtataacctttgaactccacccgcaaagcgggtggttttatgtttaagacgctaacgcgacttaaactggctaaagccataaataagacaggcctccctaaaaagagggaggcctgctactgcaatgcggttcgaaatagattggataaaagataacgacaggtgaataccccgttttattaccgatcgccaaggcaactcagtaatgatttcatccactgatgtcctttatctctgttcattgaagcatgccatattaaataacacggacgggaaacactattattaggtaatgatacagtacggatatttaactgcccggaatagtgctcaaccatccatttaggcgcgatggcaaccaggtaagtctgagatacgatgttaagaacactatttaaatcagttccctgataagagacagaatctattaattcactgttttcatagtaaggtttgctgaaggaatctgaattatctaatgctacaattgcatgccgttcatcctgcaattgctgctgactgatacattcaccaattctgggatggctttgagaaacagccagaaccaactcgtcatcaaataatgggaaatgctgaaaatcaggatgttcaaattgggtataactgataacaaattcgatttcttgatattttaatttcttctcaatattgtcgtttatttgtgttttaatcacgacatcgatattgggagaatgcctttttatttcaccaacaatttgagctgctaaacggatatcaagtggactacagatagaaagattaaatgttcttacactattatcgggatcaaaccctgctccgggtaactcattatgtacaatctgaagtgcctgcctaagtggcccgaaaagttgttttgcccttgccgttggctgaataccacgcccatgccgcacaaataattcatcatcaaacatcgtttttaagcgagctactgcgttactgaccgccggttgtgacatacctaatgcctgagctgcacgtgtaatattctgcatttgcataacagcatcaaaaacagtcagcaaattgagatctacactacgcaattgaacttcacatggttctttttttcctgtgtttaccaggttgcatccagccattatttaatttcactccactatatttattgcggcgatcttattattaataaatgaatatagactgccttaccatgtaagtttcaacattttaaagagctacttcaaataataagatcatttatctcaatcaatgacaatttaattgagattcttccttgtataaaaacaattatatattattaaaaataatcaaaaataaattattaacccataactctgaattagaataatccttatgaatttatttatataaattttccagcaggattaaattgttatgttaactatggctggttatttttcagcgcacagaaacaaacttattcatatgatgaataaatgtttttcattaatatatttatatttaatatggttattgattagtaagccaagaacaccatagtgagtattcattctatccctgtcccgttagtaaacatctttataacattataagcattatatttattatccattagggccggattttacttcatatatagatatgaaaaatagataaaaacatcgttaaaaatgtaaaaaatagtcactccggctacgaaaaggtcaaaaaaaaacctattaatgcacattattcattcccggcctaaatttgtactgcttgacaatgtttttcagatgacgtatcaataattatatcgaaacggtaatactcaattaacagattttcaaaggttgacttacatgattcacaatattcgtctactaagcctactactaaacgcctttaatgtgcgcggtatgctggtagattgaattcagagttaatctttaccagagataaaaacccgcgctaacgcgggtttttttatacctgctcggcgccctaaaaaaactaaaacatgacaacccattgacaggagcacaactatgagccagcaagttattattttcgataccacattgagagatggcgaacaggcattacaggccagcctgagtgtcaaagaaaaactgcaaattgcttatgcactggaaagggctgggcgttgatattattgaagcgggtttccccgtttcttcccccggcgattttgaatcagtccagactatcgctcgcgagatcaaaaacagccgtatctgtgccctgtcccgttgtgttgataatgatatcgatgtttcagcggaggctctgagtgttgcagaagctttccgcctgcatatggtgttggcgacttccaacctgcatgttgaacataaattaaaaaaagggtttgatgatatcgtcgaaatggcggttcgctccatcaaacgggcgcgcaggtataccgatgatgtggaattctcctgtgaagatgcaggacgctcagatatcgataacttgtgccgcatcgtcgagcaggccataaaagcaggcgcaacgaccatcaatattcctgataccgtcggttatacaactccctaccaatttggcggtattattaaaacattatttaatcgcgtacctaatattgataaggcaattatttctgtccattgccatgacgatttggggatgtcagtcgctaattccattactgccgttcaggcgggtgccagacaagttgaaggaaccattaacggtctgggtgaacgagccggaaactgttcactggaagaagtgattatggcgataaaaacccgccagcaaatgttgggggttcataccaatattaaccataaagaaatttatcgtaccagccagttagtcagtcaaatttgtaatactccaattccggcccataaagcggttgtgggcagcaatgctttcgcccattcatccggcattcatcaggatggtgttctgaaaaaccgtgaaacctacgaaatcatgacgccagattccatcggcctgaaagatacccaactgaatctgacttcccgttctggccgctctgccgtaaaacatcgcatgactgaaatgggctatcaggagaaagattatgatctggatgccctgtatgaagccttcctgaaactggctgataaaaaaggtcaggtctttgattacgatctggaagcgctggtattcattaaccaacaacaacaggaagatgaacactatcgtctggattacttcagtattcagtccggaaccagcatagtatcaacagcaacagtgcgtctggcttgcggtgatgaaattaaatctgaagcagcaaccggaaacgggactgtcgatgctatctatcatgctatgaaccggattacgggctatccgataaaattactttcctatcaattatccggcaaaggacatgggaaagacgcacttggtcaggtcaatattatcgtagagtgctttggtcgccgttttcatggcgtggggttagagacagatgtgattgagtcttctgctaaagcaatgatccacgcgctgaacaatatctggcaggcagaacaggtcaaaaaagaaaaacaacgcatacaagacaatatttccaaaagcacaacaaaggaaactaaataacaatgtctacccactctattacaaaacaacaggaacctgcttaccatattgcggtgttgcccggtgacggtattggcccggaagtcatgaagcaagcctataaagtactggatgctattcgtcgtcgtttttctattcgcatcacaaccagtgaatatgatgttggagggattgccattgataggcatggttgtcctttacctgaagccactgttgctggttgtgaaaaagcagatgcaattctgtttggctctgtcggtggccctaaatgggagcatttacccccggccagccagccagaacgcggagcattgttgccactgcgcaagcacttcaagctattcagtaacctacgtccggcacatttatataccagtctgacgtctttttgcccgctgcgtcatgatattgcggaaaaaggtttcgatattttatgtgtgcgtgaactgacaggcgggatctatttcggtcagcccaaaggacgggaaggtgaaggaagatacgaacgtgctttcgacacggaagtctaccatcggtttgaaatagaaagaattgcccgcattgctttcgaatcagcccgtaagcgtcggcataaagtgacttcgattgataaagccaatgttttgcaaagttctgttctgtggcgtgaaattgtcagtgaaattgcgaaagaatatcccgacgttgaaatcaatcacatgtatatcgacaacgccacgatgcagctcatcaaagcaccgtctcagtttgatgtattgctttgctccaatatctttggtgatattctgtctgatgaatgtgccatgataaccggttcaatgggtatgctgccttctgccagcctgaatgagaaaggatttggtttatatgaacctgccgggggttctgctccggatatcgcaggaaaaaatattgctaatccaatcgcccagatcctatccaccgctctcttgcttcgttacagcattaaacgtgatgatattgcagatgccattgaaacagcagtcaatgctgcactggaacagggttatagaaccgctgatttggcgggtaacggagaggctatcagcactgatgaaatgggtgacattattgctcaaaatatcatcggtaaaaattaatccagcataaaagaaaataggccagtaagtcgccttactggctggtaaaaataccattactcaaaaaatcgggagtcaataagtgataactttccacttataaatgactttaaatctgacttattatcggcttaatataaggaaataaaaattgatggaaaaatcagtggagttcctcttttatgccgaaccctcgcctgcaacaacagttcattcagttaggcagttt

SEQ ID NO: 2616 - DNA, 19289 bp, Xenorhabdus sp.; identical to SEQ ID NO: 2615
  CDS (16437)..(17939)

SEQ ID NO: 2617 - DNA, 19289 bp, Xenorhabdus sp.; identical to SEQ ID NO: 2615
  CDS (11845)..(12129)

SEQ ID NO: 2618 - DNA, 19289 bp, Xenorhabdus sp.; identical to SEQ ID NO: 2615
  CDS (11258)..(11650)

SEQ ID NO: 2619 - DNA, 19289 bp, Xenorhabdus sp.; identical to SEQ ID NO: 2615
  CDS (6604)..(8736)

SEQ ID NO: 2620 - DNA, 19289 bp, Xenorhabdus sp.; identical to SEQ ID NO: 2615
  CDS (2957)..(4231)

SEQ ID NO: 2621 - DNA, 19289 bp, Xenorhabdus sp.; identical to SEQ ID NO: 2615
  CDS (1555)..(2526)

SEQ ID NO: 2622 - DNA, 19289 bp, Xenorhabdus sp.; identical to SEQ ID NO: 2615
  CDS (216)..(1550)

SEQ ID NO: 2623 - DNA, 14946 bp, Xenorhabdus sp.; identical to SEQ ID NO: 336
  CDS (2130)..(3347)

SEQ ID NO: 2624 - DNA, 14946 bp, Xenorhabdus sp.; identical to SEQ ID NO: 336
  CDS (3644)..(4222)

SEQ ID NO: 2625 - DNA, 14946 bp, Xenorhabdus sp.; identical to SEQ ID NO: 336
  CDS (9288)..(10490)

SEQ ID NO: 2626 - DNA, 14946 bp, Xenorhabdus sp.; identical to SEQ ID NO: 336
  CDS (10567)..(12711)

SEQ ID NO: 2627 - DNA, 14946 bp, Xenorhabdus sp.
  CDS (13618)..(14592)
gtccagtgtgtatacaggcacggtatcaggcagtttgtcgcgctgcgcggcctgagtcagtaacacgaccggaacggcatcgtccagtatattcgccaaccgttcggtcggataagccggatcaaggggcacataagccccccagcttttaggatacccaacaggcagacgatgaaggccggactgcgctcgatacacacggcgacccgatcatcaggttgaacccccaagacaatcagagcatgtgccagttgattggcgcgttgattcagttcgttatagctgaacgtctgtgtttcgccgacgacagcaatcgcctccggtgccagtatgacctgttgttcaaagagcgtttggataagagcggattgcgggaaatcggcctgtgtggcattgaagtccaccagcaccttttgtcgctcttcttcgggcaaaataggcaaattgattatcggcgtatccggtgaagtcagggctgcatcaagcaggacagcaagacgggagcggagagccgtcacttccgtggcagtcagatattcaccagagtatttgaactcaatggtggcagactgaaaagtatcttcgggagccgcagtatctataaattgcttgattctgacggaaaggggataaggatttctattttgtgtattaacacaggtaacgcgggtgtcctctccttccagatgtagattggcttcaaacggttcgagtgacagggtgatatcgaataattgagttatttctgttttctgctgaatatgaatgtgccggttaagctctgcaatcgggaaacggtgatgtttatagcaacttttcacctccgcggctgttttgttcataatgtcacggaacgtatcttctggagaaatggtcacttttatcgggaacacggatgcaaaaagcccgatggtgtgtttttgtcgggtatttttgcggttgtgtataggcatcccgatgacgatttcattcacatccgttgtccgggcaaaatagcacaccagagcggaatgtataatgtacaagaaggacgatttctgttcggtggcaatgtttttgatacggttaaaaagtgtctggtcaattgaccagaaaataggttcagttggactgtgctgcattccatactgcatcgtgcgattggatttcaccgggtggagcaaaggagatggcggattttcatagcgttccagccagaattgcaggtcatccgcgtagtttggtgaggccagataagccagatcatctgtaataaaatcaaggtaagaagggacaactttgttcagaggttctcccttcattagccggttataacgatcaataacctcctcaagtagtatgaacgctccaatcccatcaatgattatgtggtgacagcaaaactgccagtatcgacgtgtatgactcactttgaataattcggaatgccagagcgtttcatttaagtgaaacggttgcataaatcgggtatcgagatattgccttgctttggtttctgcatctgaatgcgatgaaaaatcatagatggggacggatacagggcaatgatcagccactgtctgaaccggaagagtatgggtattggtgagctgtaaacgtagggcatcatactgctcaacaaccgtttcaaaggcgtgaataaactgggtttcgtccagaacgccttcaatacagataaaaagaccaacattgtagttggattgatctggttggctgacttgatcgaaccagatagcctgctgtggtgagctgagaggataggaaatcagatcggaacttgtaatggctaaggaactttcagaggtacggttgtgattgtatggcatacctatttctcctaatagcaattcaaaatagttattgaaactaaaattttcactttatttttatatggttagcgttatttccttttgcctttacagacaaatcaaagatgtcagaaaaatccgatccctgatgagatgatttgtgctcaaaagcgttgtgactggcaaaaataataaatcaacaaaactatatctatgcaaattttttttatggtgattaagtgagcgccagaacgtatgtgatcagggtttgtgggtatgaaatgtgcgttgtgaaatggctaatcgacaaagatcactatctgaaacaggataatgtcgaactgcaagggggatgtgtagctgtggttttataaacaatcccggcaatttgccgggattgttcagataagaataacgcggcaggaaattacgcgttttcttgctgagtagcctgaatagccgtcagtgcaacggtataaacgatgtcatcaaccagtgcgccacgagacaggtcgttaacaggtttgcgcataccttgcagcattggcccgatagagaccagatccgcagagcgctgtaccgctttataagtggtgttaccggtgttcagatccgggaagatgaacacggtagcctggccagcaactggtgagtttggtgctttggattttgctacgtctgccatgattgccgcatcgtactgcaatggaccatcgatgattagatcagggcgtttttcctgcgccagacgggttgcttcgcgtactttctcaacatcactgcccgcacctgagttaccggtggagtaagagatcatggcaacgcgaggatcgataccaaatgcttttgcagagtctgcggactgaatggcgatttcagacagttgctctgcggttggatccgggttgattgcgcagtcaccgtaaaccagtacttgttctggcagcagcataaagaacacggaagaaaccagagaactgtttggcgcggttttgattaactgcaatggcggacgaatggtgtttgccgttgtatgaactgcaccggaaaccagaccatcaacttcgttttgttccagcatcatggtgccgagaacaacgttgtcttccagttgctcgcgagccacaacttcagtcatgcctttatttttacgcagttcaaccagacgtggaacataacgttcacgtacagttgccgggttaacgatttcaatacctgcacccagttcaacaccctgagccgctgcaacacggcgaatttcttctggatcacccagcagaacacattccgcaatgccacgttcagcacagatagccgcagctttaacggtacgtggctcatcaccttctggcagaacaacacgtttgccagcctgacgtgctagttcagtcaactggtagcggaatgctggtggtgacaggcggtttggacgttcagaagtggctgccagagaatcgatccattcgttgctgatatgctgcgcaacatagttttgcagtttctcaatacgctcgtgatcatccgcaggaacttccaggctgaagctttgcaggttcagggaagtctgccaggtgttagtattcacagtgaaaactggcaggccagtattgaatgcacgctcacacagttcacgaatagaatcatcaattttgtagccgccggtcagcagaactgcgccaacttcaatgccgttcatcgctgccagacaagcagtgatcagaacgtcaggacggtctgcggaagtcaccagcagggaacccggacggaagtactccagcatgttagggatgctgcgagcacagaaagtcacagatttgatacgacgggtctggatagcgccttcgttaacgatctcagctttcaggtgttttgccatgtcaatcgcacgggttgcgatcagctcgaaactccatggaatgcagccgagaattggcagagggctgtttttgaatacggttgcctgatcgacattggcaacagttgcttttgttgcttcgtcgaagatttcagacagatccggacgggtacgaccttggtcatcaaccggcgcattcagcttattgataataacaccgatgatgtttttgtttttgttgccaccgtattctgcacggctcagttcaatctgctcttttaattgctctggagtgtgagtacccagtgcagtgacgaacacgatttctgcattcagtgttttggcaatttcatagttcagagactgggcaaacggatgtttgcgggtcggaaccagaccttcgatcaaaaccacttcagcgtttttggtgttagcgtggtagttagccacgatttcttccatcaacacatcttttttattcgtggccagcagggattctacatgagccatagccagcggttcagcagcgtgaatactggtgtgggagcggatgatcgttgtggttctgtcttggaagccgctgttacgtggctgggcgataggtttgaagacactcaggcgaacgcctttttgctccatggagcggattacacccaggctgacactggttaaaccaacgctggtgccagtagggatcaacataattgtacgggacacggaaacctctttaacggttgctggtcagtcaagcaataaccgccagcatggctggcggctaccggaaatctattacttatgcagtcaggcgagctgaatcctgagcgatcaccaattcttcattggttgggatcaccagagcaggacggctgttatcagttgtgatcacaccgtctttaccgaaacgtgctgcaaggttgcgatcgtgatcgtactcgaagcccagcagagcaattttcttcagggtcagttcacgaaccagtgcagagttctcaccgataccgccggtaaatacgattgcatccagacggccttccatcagtgcgctgtaagcaccaatgtatttagccagacgatggcagtaaacatccattgcacgcttagcgtcagctttggtttcgtagttgtcttcaacgtaacggcagtcgctggtcacttcagtcaggcccagtaagccagactctttggtcagcagagtgttgatctggtcaatgctcatgcccatagcgtcgtacagatggaatacgatagctggatcgatgtcaccactacgagtacccattaccagaccttccagtggagtcagacccattgaagtgtcaacacactgaccgttaacaatcgcagaaacagaaccaccgttgcccagatggcaaatgatggtattcagttcttctgctggcttgttcagcatttttgctgcttcacgggaaacgaagaagtggctggtaccgtgtgcgccgtaacgacggattccgtgctctttatacaggttgtatggcagagcgtacaggtaagcttcttcaggcatagtctggtggaaagcagtatcgaatacggcaatgtttttctcaaccagatgagggaacgcttttttcgcttcagcgataccgatcaggtgtgcagggttgtgtaatggtgcgaatgggatcgcagcttcgatgccttcgataacttcatcagtgataatgacagacgaagtgaatttttcaccgccgtgaacgatacgatgaccgatggctgaaatttgtgcagaaagttctggcttttcagacagaatagtattaacaatgaagttcagcgcttcactgtgtgctgcgccggcacctaaagcagcttcgtttttcgcgccatcaattttccatttgatacgagcttcaggcagaccgaaacactcagccaaaccagaaagatattcttcaccattagcaggatcgatgatagcgaatttcagagaggagctaccgcagttaagaaccagtaccagcttacttgacatggaattacctattatcttgttgtgatctaatcttaaataagaaaaatgttaaaaaaagaagcaatttattaacaaacggaaccaaagtgttgcgaaaacaggcgggttttctgttttgttgctgcaaccacacaaaagtctgtgtaggataccgtttgccagcattaaagacaaaatatacttaatgctattaatactacaaaaaagattttatcttttgtaggtattttttaaaaactatacctttaattgattgaggtcatgatgaatacgatgccacctgccaaccacggttggttcaaaaaagtccagctggggcaacaatatctgaagacgtggccactggaaaaacagcttgctcctgtgtttcctgaaaatcgcatcattaaagcgacccgctttggcatccgttttatgcctccattggcgatttttaccctgacatggcaaatcgcactgggcgggcagctagggccatctatcgcaaccgctctgtttgcctgtagcctgccattgcaagggctttggtggctgggaaaacgtgcggcgacgcctttaccggaaagcttgctgaaatggttttacgaaattcgtgaaaaatttgctgaagcagggatcgcaatgatgccagttgaaaacacaccaacgtatttatcgctggctgaactgctgaaacgtgcgttcaaacagctggataactcatttcttgatgatatttaaaccgttagtgtggattctgacagtttttgtatcggttgactgataaatttcccgtccaataaatttaatacggatttttagataggtttttcatagccagaaaaatatatcttatcccgatatatccctgaatttttattgatgagctggcatttattatgctctttcattctttatactacccgtatcctttatctttcaggttgcttctctgtgggccgcgaggtaactcgaaattcatagggtatagatgataaatattgattgtgctgcataaataaatgtaatcgcatttacctgtggatattgctattttgttaaagactttattatgaatttttaatattgactaacattcattaatggtttttgtgaaggttttagttaaatttcttttattctctcatttgattttttaaggaaaaaagaagatattaagaataaaggcagaaaaaaataacgaggtagatgatttaaatttaattggttgctctttttgttctaatgtttttaattgaagtgtgattgttttaaattagtgcctgcgtgaataataaaagtcttgttgtatttttatcagggaaggaatgcgctgaatttattttcgatagtggtattgaatcttactctgtaaaactaatttcataaaattcttggtttatattaatgtgagggaattgttatgatgaaattatattctatgatttttttattatagtatcattatttcaatatgctaatgcgactgacgttatcaaagggagttttggtcgttttgaaaatttcacattaaaatttaaaaataactcttcagatagaacgttaacaatagataacgtacaacctaactgtatgtttggagaagataaacaacctattactttgaaagctggcgataaacataatgagatctttagtgatagtaattcaggtgactgcataggtaagaataaggctatagaatggaatatagagtctgatgatggggattcttgttctattgagttggatcattactataatgatactggctggtgtgtttattttcataaaaaaagcacatgtgaatattttgatgttaatgctacatgcaatgaatcaaactgtttagattacacagttcgtttttaccctgatactgattcgattaacattgcccttaatatcataaaaaacgatccacctgcgtctcattgttataattgttttgatcctcctcggtgccctcatgggtggaaagttggtggttttggcggtggggggtgttgccctagccatgtaatatgctagattttttctttacaatgatattgttgaattagagggaaataaaatttaattaagttgtcactgagaattctttttttattaaagagttttttagtggcaacttttagagtttattggggcagaatattattatattgcatatgtacgattttatttggtttttaaagttatgttttaaattcgcagaatgcgataaaagataaatggaattggtgctttgatttttttatcttcgccagtactatctgaacttagttgggattacactgattattaacacataactgcatttaaaggagttgggtttggagctgaaatgtagaggttttttatttgatttggatggtacgctgatcgattcactgcctgccgttgaacgggcatggattaagttcgcagataagctgggtattgatcgcgatgaagtactgaactatgtgcatggcacaccagcattattatcaatacgccattttatgcctgatgccacagaagaagagattatcagtacttttaagtggattgaaaaaatcgaaacagaagatatggaaggtattactgccttgcccggtgctattgctctgattgataaactgaatgcgctggagatcccgtgggccattgtcacatcaggaacaatcccgcttgcttctgcccgccataaagaagctgaattaccagagccagcccattgggtgacagccgaatcggtcaaaaatggtaaaccaaatcctgagccttatttgctgggagcacaaaaattagggctgctgccggaagagtgtgtggtttttgaagatgcagcagcgggtatccatgccggattagatgcgggctgtcaggttgtggttgttcatgatgaaccgggaatttcccgtcgtgacgaaattcatatgactgttaccaacctggaagatatcgaaattgttaaatccggcggttatgtaacgatttatcaaatgaatcagatagattgttgatctgagccgaagaattattcatataaaacaggtttaatgctcccagtataggttcttgttgataatctccggcctgcctgtcagcaggccgtcttttctgatagaggctgtattgaatactgaactgttgtgggtattggccctgttattagtcgcaattgtcctttttactactaataaagtcagaatggatgtcgtggctttactggttattactgcttttgtcctgagtggtacgctttccttaaatgaagccactatcggtttcagcgatcctaacgttttattgattgcagcactgtttgtcattggtgaagggctggtgagaacgggtgtggcctatcagatgggagactggttggttagggtggcgggtaacagtgaaactaagatgctggctttactgatgttatccgttgccgggctgggtgctttcatgagttccacgggcgttgtggccatttttattccggtcgttttaagtgtggcagccagaatgcagacttcatccgggcgattaatgatgccattagggtttgccggtcttatcagcggtatgatgacgctggttgcaacaccaccgaatatggtggtgaatagcgaactggtgcgtgaagggctgcaaggttttggtttcttttccattacacccatcggaattttaattttactggcgggaattatttatatgttactcgtccgccgttggctgggaagtaaaacaccggcaagacctgatgagcgctaccatcgatcatttcgcgatcttatccgtgattataaattatcagggcgtgcccggcgtcttgctgtccggcagaattcaccgttaataggccatactctggatgagttagggctacgtgcacgttatggggcgaacgtaattggcattgaacgctggcgaaaatttcgccgggttatggttgctgcaaccggcgagacagaactgcgtcaacaggatgtattactggtggatatgtccgacagtgatatagatttacggcaattctgtagtgagcaacagttagaacccatgatattacgcggtgaatatttttctgatcaatcccgggaagtcggaatggcagaaatctccgtgatccctgaatcggatttattggggcaatcactgcgtagtatgagattccgtacccgctatggattaaatgtggtaggtattcggcgcagtggtaaggctctggctggtaagttgttcgatgagcctttgctgctgggtgatactttattggtaatcggtgattggaagctggtgcgtgagctgagaactaaagcaccggactttattatgctgaatttacctgttgaagtagaaagtgctgcaccagccgcatctcaggctcctcatgccttgttttgccttgcgttaatggtggcgatgatgctgaccaatgaagttccgaattttattgccgctttgatcgcctgcttgctgatggggcaatttcgctgtattgatatggtgagtgcttatcgtgccattcactggccaagtattatcctgattgttggtatgatgccatttgcactggcgctacaaaaaaccggcgggattgatttgattgtcagcggattaatggatattgccggtaatatgggcccacgtgccatgttggtctgtttatttattctgtgcgcggttattgggctatttatttccaatacagccactgcggtattaatggcacccattgcgattgcagcagccaaacagatggcagtatctcctctcccttttgcaatgattattggagtcgcggcttcggcagcgtttatgacgccggtttcttctccggttaatacgctgatattggggccgggtggatatcgttttgccgattttctgaaattgggtgtgccttttaccttggttgtcttagctattagtgtggctgttgtgcctgttctttttcctttctgagtatttttgttggctaagtatcttgaaatctaatgaataataattacgtgatgcattttgaaatagattgaacagatatcaggcagcttaataagaatgttaagctgcctgatttttgcagatctgactgtttttatagactaatttcatcaagagagaggctaaaactcggaacaaatacggttatgaaataatccatttcctgactgtggcgtttttctaatgttttttctaacctgattttggcctgattaaattcagaattaccagcggataattcttccagacattttaaataagcgcatattgcatcagcctgtttaataatattagcttcttcttcagtatgatattgatcatctaaaatagaacgaaaatcattttgtaattcaatcggtaacatatctaataatttatgttgggcgattttttctatttttttatattcatgagcaatttgaggattgtagtattttattggggttggcaaatccccggtaataacttcactggcatcatgatacattgctaatattgcaattcgttctgcgttgatatttccattaaatttacggttttttattattgctaaggcatgggcaacaaaagcaacctgtaaactatgttctgaaacattttctgtgcgtacgttacgcataagaggccagcgattaatcagtttaaggcgggataactgggcgaaaaaatggctcataatcttctcttacaatgaaacagggtgattatgattgtgggcgttggttgggaggaagtaaacccaccagccttcaagctgcagctttattggctgcatcctgaagggtatgaaatatataactaatttatttttccatatgacaggttaaaaccaccgtctttagacggtgactttgactttaatgttttgacctacgcgcgtttacgaggtgcgtggttcgacgactttcagtcgtcagcaccgaagtgcgctaacccacctacttcagtaggtggtagttaagttttatattatttttgccggtaattgccaaggaagcgtgcaaatttttcaatggccatttgcaggtctgcggtatgtggcagtgtgacaatacggaagtgatccggttccggccagttaaaagctgttccctgaactaataatactttttcctgtaataagagatccaaaaccatcttctggtcatcataaatattgaaacgttttgtatcaattttagggaacatatagagagcacccatcggcttcacacaggaaactccggggatctggttaattaattcccaggcatggttgcgctgctcataaagacgcccgcccggaagaatgaattcactgatactttgataaccaccgagtgcggtttgaatagcgtgctgcatcggcacattagcgcaaaggcgcatagatgccagcatttccagcccttcgatataacctttcgcctgttttttcgggccgtttagtaccatccatccctgacggaaacccgcaacacggtaggttttagacagtccattaaaggtgacggtaaaaagatccggtgccagtgcagcgatggaatggtgctgggcttcatcgtacaggatcttgtcgtaaatttcgtccgcgaaaataatcaggttatgctggcgggcaatttccacgatttccagcaggagttctttactatataccgcgccagtcgggttattcgggttaatgatgacgataccacgggtacgaggggtgattttacggcggatgtcatctaaatcagggaaccagccttgttgctcatcacataaataatggacagttttaccactggagagagagacggcagcagtccagagcgggtagtcaggagccggaaccagcatttcatcaccggtatttagcaaggcctgcatagactgaacaataagttcagaaacaccattaccgataaagatatcttcaacggtaacatccagcatattccgcgcctgataatgttgcatgatcgctttacgcgctgagtacaggcctttcgaatcagaatagccctgggcagttggcagattgcggataacatcaactaaaatttcatcaggtgcttcgaaaccaaatggtgccggattaccaatgtttaatttcagtactttattcccttcctcttcaagccgtttggcttctttaagggcgttacctcgaatgtcatagcagacattatctaatttgctggatttattaatggaaaacataggatgccttaacctttttcttggcaaaagtggattttatccggcttacaaaaaatctaatgttcaatgtactcctctctgtcaatcttttgaagagcccatgatatctttggttaaaacggttgttttaaagtctaatggataagtctgctatctaaaaacatgtgtttatttggtttatagttctagttgtttttaatatgttggaatttaattccatataatgaggtgtttttagttgacgaactgttaaaagataaggaatgatgctgatttttagtttaaatcataaaggcaggctgaattgtcaataaaagtaagataatttgtataatgtattcttataatttatctttgccgacataaaattaattaaggtttttatcttagatacttcgagaatctttttgaatttttacccgtaacattttcatgacttttcaataaaagtattaattcattaaaaatactaatattgtttgctttgattaagttttgcgaattgaagttatgttattctttgaagcaagtcagaaaaagactatttgtactggaaattggtggttatgtaaggtaaataggtttttacttagccattaattcagtgattgcataaattttgttaagaaaggagaaaataaaacccatgatgatataagtagtaaaaaaatgcagtaaacctttgccctctttaatagagtagagtagtgtcagaattggtattattttatttgatactgctgaagtaaaaacaccaggttagttagtaattaaaatcaaaaaaaagtgatgaataaacaatgataaatgcaaatcgtcagataataaacctcgatctcgatctgctaagaactttcgttgccgttgctgacttaaatacttttgcagcagcagcagcagcagtttgtagaacgcaatcggctgttagtcagcaaatgcaacgtttggagcatttagtggggagagaattatttgctcgccacgggcgtaataagctccttaccgagcacgggcttcaacttcttggttatgcacgccaaattctgcgtgctaatgacgatgctaccgcatcattgacatataatgatgcagacggtgaactcagaataggagcgtctgacgatacagtcgatactctgcttcctttcctgttaaaccgtattgcttctgtctatccacgtattgctgttgatgtgcgtattaaacgtagtcaatttattgaaagtatgctggataaccatgaaattgatttagcattaaccacagcaaaaattaatcatcatcctagtactgtacttcgttcttcaccggtattgtggcactgtgcacctgacttccagttacaggtgaatgagccggttcccctggttgtgatggacgaaacgaacactttccgtcaaatcgcacttgatactcttgatatgagtggtattccgtggcgtattgcctatgaagctgcatccttatccgctgttcgctctgctgttaatgcagaggttggtattactgcccgtcctttggaaatgcagaatgctgacttaagaattttgggtgagagcgaagggctgccgcgtttgccagaaatacaattcttcttgtatcggaacagtaatgaacaaaatgaatcagttctgacagtttttgatgctatagaaaataagaaaacaccttataccgtgacatccattgaatcagatgaaacagatgatattgatgaatctgatgactctcttgaatccattgaagaatcctcagtcgaaaatataaacgagtaatattacgtgtgttttataggctaatatttccattttatttgtggaaatattagcctgtttctaaatatatattaataaccttttcctgtttccattctaattgctgatatttactgtcagaaatatcccttattaattttattatcctttctaattttagttaatgtaatgtttatttgttaacaactttcattttttaaactgataaaatagatctattttcaaaaatagtcgtgtaattaaactcaaattgtttcttttagaaacagtccattaatggttgaatgaaaaattgtctggtgttgaatgtttttcaatgaaactgtgcacttgatcataaaaatattcccccct

SEQ ID NO: 2628 - DNA, 14946 bp, Xenorhabdus sp.; identical to SEQ ID NO: 2627
  CDS (8816)..(10591)

SEQ ID NO: 2629 - DNA, 14946 bp, Xenorhabdus sp.; identical to SEQ ID NO: 2627
  CDS (7987)..(8649)

SEQ ID NO: 2630 - DNA, 14946 bp, Xenorhabdus sp.; identical to SEQ ID NO: 2627
  CDS (5924)..(6379)

SEQ ID NO: 2631 - DNA, 16532 bp, Xenorhabdus sp.
  CDS (8188)..(8766)
taaagatcgtttagccgatgcgtatccggactttcagtccgttaatcactaccccaccgattttattcgggggttgtggagttaaaatataataattctcataaaatatttatctcaacagaaattaacttttatgataatacattcacttgcaataagttttcttttacttctttcaacttaggatcattaacattcaacattactctggaaaaatattcttcatactcagcgctatctatcaataatgctttaaaatatttatgttcataaaacatcaaattcaccgtaacgccataaagtgcaaatgcaaccaagtcattcctatgtgttaatttaaatctctcagtcgccacctgaaataatccttcaatctccatgctgatttttttacgttctttaacatcataaattggtggcatttttgccagcacctgattaatcataccaattctatgaattcggctaatctgaatgttcgcgggtgcaatctgataaggttcttcctgcgagaatgaaagcgtattccatttatcggccaaataaaatgtccaatgcttaatagcatcaactgataattggtgacggaaggtattgatatcccatatccatgataaattaaataaaactctgggatcgtaatagcgcaagataaatccttttcttgatttatcctgaatatataacccatgtaccaaccgctttttcatttcttccggtggtaattcactgtcaaaaaataaggaaaccatcggttgtctctgttcttctatcgatttattgatagcggaaaatagatttacccattgcgtcggtgacagttcatgcatagaaattagccatgggtataattctgcctgcggagctaataaaggtgagacaacttcgataaccggtaattcatcatcaagttcaggaaataatgccctgtcaattagggcatatcggtggttttccagaggaagggattctggtagataagttgcgtacatagtcataccttagcttaagggaacagttgcatcaccacggcctgctgcttctgatgacagagtttcacaggcggtaaaattagggtgtggcacactgattgttgctggccctgcgtagtcgaagtttgcactctgtactttgaaatcgccttctgtgccactttctatcttagtcggatcaatcgtgatataagagccaccgcactcaaatgtgattttctttttggctgagataataatttcatcatcggtactcgtaatactgatatttttcttggctgtgatttccagcgcatcagtctgagcctgaatctgaagttttcctgccactgcgactaatttcatacctaattcatgggccagaatagaaaccgcttttttggctgctattgcaatgcgtttcagggcagaaatttcggtatttctgcctgatgtcatcacaatgttgttgttggcactgtgttgaatgtggttaggtgttgataatgcaattccccccggcgcacttgctgcaatcacaggctcattgatgccatcaatgtaaccttccaaaaagcgttcctgattgctggtatctaatggctctatttgcgccattcgcataatatttgacaatgactcagccatatctagagcatcagctaactgctgttttatctgggtcagatctagttgttcaccaaatgctcgctcctgttcgtctgcactgataaacaaccctctccccgcccgaattgcgccccagctatcggtacgtagttcaaaaccgtcaccccgtttcttctcatttgagtcaacaagatgccccagattaagctgacttttaccaccatattccgtgctcagcttgatatgttcctgaccacggcgatcttccattcgcagtttgttatttgtcggggtacgaatgacgttgcgtgtacggttacgggcggtaatgtgatccgggtggtaggagtcatgcagcgcatgggcaatatacggccgatcaggatcgccttcgtggaaagctattgctacttccgtgccctgaatcagaggaaagtgaaaaccgtatgtatcgccgccataaggtttcgccaacctcactggcatgctttcataacctttctttttctgatcactgtctgcatcgaatttaacccagtacaatccatccaaattctggtgagcatagggatcattggctatggggctggttacgcgagcagtcagtgtgccactgataaccggacgcggttttaatgacggacgccagcacaggccctcggtgtacggtactgctgtgattttaactagtaacgcttctgcccggctgccagtgaaacgcagttgagtcattaagattttggattggaacgcggctggcaaggtagatggcaaggttctgtcttcaatttccagaacttgtcccgccatcaaagttggatccgtactctgcccgtacagcagggtctgacgtgacaggaaacgctcgtggtcaagctgtgcccaaaagttagcggtttctggttcaggtgaaagtttatcccctgtcgtcagatggcgaagtttatagtaattgacatcaccataggtgattttttcaccgtcgccacgggtcatatcagcctgtgccgaattcagaatatgctgtgcggtacgaaagttataatctttggtctgaacagaatgttcaactacctgatggcgctgggtcagcccccaaatggaagcctcattgttatcattcatccctgacgggctattcaacggtagtgttttaccgtattcataacatcgctgtttatcaccaaaatgcataacttctgtttgtgtatccggttgtaaacggaaggtgtagaaaattcccagctccgatagcaagcgttcgataaactcccgatcactttcattgacctgattgatttgttcccgtttcgggtaggtgtttttcaggttaaattcaaattcccatcccttgaaattatgttcccgtaaaatttcttcgacgatttccggtacggatttattcaggaagaaacggtaagaacgtttttgattgcgtagcagagcaaatttcggctccagaatgatctggtactgtgcttcatcacgggagcctcccaatcgtttaaaatccgttacaacaccatgcactacacgctgtgtctttggtggcgtgttgataccaaagacagtttcgcccagtgttcgcagggtgaatgtagcactgcgacgcaacatctgttgtggctgaatatcctgctctgagctggtgaaggcaatgcggtagcgataggtatcgctcatggcttcacgtccggtaaaatcctctacatccagtacagcatcacagccctgaattcccagagtgtagcggttcagggtatttgccaacactgttcctgcttttttagcagtatctaataaattcatgacctatcctcccctgataagatctctttatcaaatgtcagcgtgatgccttcttcgtcataacccagcgttaatgtattagctgtctgttgagtagcctgacgcatcagcagttgttggctcattaccggcaggatttgctggttcagcaggctatcgatattacgtgcgcctgtatccggtagcaggcaggcttccaccagcgtgttatacagagattcttctactacacagtccagtcggtaatgcagtttcagacgttttgctacctgtgccagtttcatctccacgatggtacgcagcgcttgtgctcccagcggacggtaaattacagtttgaaaacgtgctaataatgctggctggaagtgatcacgtagtatcggccgcaacaattcatgcagtgtgctatccgtcgattctggttgttcgtccagtaactgcatcaaatgatcactaccgagattagaagtcattacgataacggtattacgaaaatcaatttcctgaccttctccgtcacgcataaaaccacgatcaaaaacttgataaaacaggttcatcacatcacgatgcgctttttctacttcatccaacaacactacgctgtaaggtcgtttacgtaccgcctcggtcagaattcctccctgaccataacccacataacccggtggtgaacctttgagctggctgactgtatgcggttcctgatactccgataggttgatcgttatcagcgatttttcgccaccgaacagactgtctgccagcgccagggctgtctcggttttgccaattccactcgaccccaccagcaaaaatacacccaacggcccgttttccgatgccagcccggttttcgcagcccgcaagcgttgggccatactttccaaggcagcagattggccaacaacccgtttttccagatgctgttccagtgacaatagatcggcctgttcatctttcatcagactggatagtggaacgcccgtccagtcagcaataacagtagcaaccgtgcgcacatctacatccagccccagtaacggtgctccgttctgaatttctgccagttgttgttgcagccgggcattttctccggcgttactccctgactgacgacaatccagtaactgttcagtcagcgctttttcttgctggtattgtgcttcagtcaattgaagttggttttcaagtgcttctcgttgttgggtgatatcaatcaggcgactgacttccaccgcattaccgacaaagtgatcttcctgcaaggcttccgcttctaaatccagtgctgccagcgatgaacgtaaccgtaccagttcatctggctgggtatcgaggctcattctgaccctcgcactagcggtatccagcagatcaaccgctttatccggtaactggcgacccgtcaagtagcggcgggataaagtcactgcggcttttaatgcatcgtcggtaatatgcactccatgatatttggcataacgaggtttcaggcctcgcagcatcaggctggctttttcatcatccggttcatctactttaacaatctggaatcgacgttccagtgcggcatcccgctcaaagtactgtttatattccgaccatgtggttgctgcgatagtgcgtagttcaccacgagctaaggctggtttcagcaggttggcagcatccgccccaccggcctgattacctgcaccgataatggtatgagcttcatcgataaacagcagaattggcgtcggggattgttgaacagcatcaatgatatttttcagccgttgttcaaattccccttttactcccgctcctgcttgtaataatcctaaatccagagtacgcaggctgaccgttttcaggctttcaggaacattaccctcggtaatgcgcaaggctaatccttccaccagcgctgttttaccgactcccggctctcccaccagtatcgggttatttttacgacggcgggatagaatgtcgatcatctggcggatttcatcatcacgaccaaaaacggggtcaatattgccgactttagctttcgcagtgacatctaaggtgaatttatccagtacagccagtagtgcatcggataacggtttgtcggtcagcggagtggttctctcgggagaagtggttggggaatccggagagaatgtcgtgttatcatgtcctagcattgcttgttgctgtacttccgggcgctcttcaaactgggcatccagcactgggcgcagccgttgtagctgagaagttcctactgtcagcaaaggccatgcaccttcgcaactcactaatgaaggcgtttccagcagagcaaaaagtaaatggatgctacggatatgcccttctccttcttccagtgaagcagataaccaggcattttttatcaaagttaataatggggaagaaagttggggacggctgtgaacagttcggggataagcatcgatatgatctaacagagactgccacaacgcccccatatcccactcataacggcgagccagcactgtgatatcactttcaccccgctcaagaattttgagcaaccagtgctcgacggtgatttcagcatgtgcccgtgtctggcacagagaggctgcggcttccagtgcctgtgcgcagtatggatttaaccgacgcaataacattgcagatgaattttccatagttcttttctcattggcttacttgtcacgcttattgggcttgtcgaatgcgcttcccgatattccggcacgctaccgccataaccgttaaccgaggcccatagggtgactaagattgattgttgctccctttgccaaacctccgcgtctgaaattttgcaaaaacagaggattggcaaaatagccgctaagagaaactgtgttctgataaaagtgtgatgataaaagtaatcataaccacccgtataacgggtggtttgctcttgccctataagggcttgttaccgactgcgcctaaatgacgctgctttctcttcgttcaagctaagtgtctttgctgctttggcctaccccttgaaggggtctacatgctctttactactcaatttatccgagattaaatccgacttttcttgctctctgatatacttttgaattgtcgcttcatttagccctaccgtactgacatagaacccttccgcccaaaactttctgttgccaaatttatattttaaattggcgtgtctatcaaagatcatcaacgaacttttacccttcaaatatcccataaagcttgaaacgcttagctttggtggaatactcaccaacatatgaacatgatctggcatgagatgaccttcgattatttccacacctttatacttacaaaggtctctgaggatctctcccacacttgaacgaatattattaaaaatcactttccgtctatatttcgacgaaaagacgatatggtatttacacagccactttgtatgcgctgagctttgtgctttaatgcccataaacacctttccttatttgagttacgaatattagcttgtacatctatatcgtaacggaaaggtgtttttcttggtataacctttgaactccacccgcaaagcgggtggttatgatgtcaagactctttggctactgaaactgtgtagaggcattacaaatatctcttgatttcaacatcatactgtattttatcttatttttgtgatctgagtgatatttgtacttaaaatgctgtcagtacaggcttttttatgtttaaaaaaagagcaatcgtaaactaaaaatgatcagattggtatctttttaataactagtattcacatataattaataaatttggcataactatgatctaaatcaactaatagtggaagatgagtgcctacctacattatcacgaaacaaattttaataagattttgataatttggctaaaggtaggattttttcttgttattttaaatttataagtttaatagatcgtataaaacaaaaaacagtctctaatatttttatttaaataatttaacttattaattgtggactattttgtcttttcagttgcttgaatagttaatgagctagaatcataataaaaaatgtaagttttgtgatgtatgtcacatagtatttaaaatgacatatattctccgttgtataagttgatgattcaggagtaaagttaattagtattaagaatattcttaatcaattgtggcaagttcattatccagatgacgcaataatacttttacaatccattaccgaaatattttagaaattgggcgatcccaagagtaatacaaaggacagttactgctctggctaaagatgtatatttcagttatgtcggagattattgaatctcatgctactggtaattttgtcgtgagtgattctttgatcacttaattgattttttcatgtaatcggacgggatatatagaaatgagtacggttgaattgctcaaacatatttatgacataaatttatcgtatttgcttttagcacaacggctaattaaccatgagaaagcgtctgcgatgttccgtttaggtattagtgaatcgatggctgatacgttggccgagctgacattgcctcagttagtaaaattagctgaaaccaaccaactgatttgccattttcggtttgaagatcacgaaaccgtacagcagctgacgaaggaatcgcgggtggacgatctacaacaaattcatacaggtattttgttgtccactcatctttttcagcagttgtccgcgcaggatgacacttcaatgaagaaaagagcataaagatggctgaaaaaagtattgtccaagaagctaaagatattcagctggcaatggagctcatcactttaggcgcacgcttacagatgcttgaaagtgaaacgcagttaagcagaggaaggttgatcaggctgtataaagagttgcggggaagccccccgcctaaagggatgcttcccttttcaacggattggtttatgacgtgggaacagaatattcattcttccatgttctataatgcttaccgtttcctgttgaaaagtgggcactgtgcaggtgttgaggctgtagttaagtcttataggctttatcttgagcaatgccctccgtctgacggagatgcgcccgttttagctctgacccgggcctggacacttattcgttttgtcgatagtgggatgttgcaaccaactgagtgtcgctgttgtggtgggacttttatcacacacgcacatcagccggtcaacagctttgtttgtagtctttgccaaccgccttcaagggcggtaaaaaaacgtaaactttccgcgcaacctgccgatactaattcacaactgctggatggatttgctcagcaagctatgtgaatttaaatgggaaagtgaaaacttaggttacaggttttggtcattctggcctgtaatctacaatcctcctcttcatttattaattctccctgttcaaatcccatctgctcaccaacttagctaaaggatatcgcgtgttagtacttttaggatatatcgtggtttttggtgcggtgattggaggctatctgcttgtcggtggccacatgggcgcactttatcagccagcggaatttttgattatcgcaggtgcgggtattggggcttttatcgtgggcaacaatggtaaggcgataaaggcgacattgcgtgttttaccaaaaatattgcgtagatcaaaatacaataaagcgatgtacatggatctgatggctttgcagttccgtcttttatccaaatcccgccagcatgggcttttgtctcttgagcgtgatattgagaatccgcaacaaagtgacatcttcacacagtatccccgtttattacaagatccttacctgatgaacttcatcacggattatatgcgcttgatcgtcagcggcaatatgaatccacatgagatcgaagccctgatggatgaagagatcgagacttatgagcaggaaagtgaagtccctgcgaccagtctggcaatggtgggggattcattaccagcattcggtatcgttgcagctgtgatgggggttgttaatgcactgggttcggcagacagaccagcaggtgaacttggcgtattgattgctcacgcaatggtagggacattcctcgggatcttgctggcctacggttttgtgtctccactggcaacgttgttacgtcagcgcagcagcgagcagataaaaatgatgcagtgtatcaaagtgactctgctttccagcctgaatggttatgctccacaaattgcggttgagtttggtcgcaaaacattattcctcacagatcgtccttcatttacagaacttgaagagcatgttcgcagggttaaagcccccgtacaacaagaagctgaagaataattatgagagcgaataatgttactgtcgtcagagtaaaaaagcgcaaaaaacatggccagccccatcatggtgggtcatggaaaattgcctatgctgattttatgactgcaatgatggcattttttctggtcatgtggctgatatcgattgccagcccgcaggaattaaccagcattgccgaatattttcgtactcccttgcaggttgcaataaacaagggtcagcaaagtagtgatacaacaaatccgatcccggggggaggggatgatgttttccagcaggatggagaagtcttccgccaaaccaaacaggttgaagtcagtgaagatcgccgtcgtctggatcggttacgtcagcaactcgatcagttgatcatcaccgatcctcgtcttaaagcactacgtcctcatttattgattgacatgatggatgaaggtttacgtattcagatcatcgaccgggaaaatcgtccgatgttcatgattggtagtgcgaaagtcgaaaaccacatgagtgatattttgcaggcaattgcgccgatcttaaatagcattccaaataaggtcagcttgtcgggtcatactgataatctgcaatatatcagtggacagcgtggttacagtaactgggaactgtcttcagacagggcgaatgcgtcaagacgggagttgctaattggtggtctggatgaatccaaaattatgcgagttgttggaatggcatccaccgtcagtatgcagaagggaattcccgctgatgctcctgtcaatcgccgtatcagtattattgttctgaataaagaagcagaacaacggattgagcaggaaaacagtggcggcaacgccatgaccgctaacagtagtatggatatacaagaagtcatcagaatggattcgaatgagggaacgccttctcagcaacccaccggacaatccaatgaaatcactgtgccggagcagacaaatactgaaccggcaagtgatcctaataaggtgacagagtaagtaacgatggatattaccgcgttttatcagactttttttgatgaggcagatgaactattggcggatatggagcagcatttattgctgctcgatgccgatgagcctgaccatgaacagctgaatgccatttttcgcagcgcccactcgattaaagggggcgctgcgacttttggtttttccaaactgcaacaaaccacgcatgttttagagaatctgctggatagtgccagacgtgacgaaatacgcctgacaactgacattatcaacctgtttttagaagcgaaagatattatgcagcaacaactggatgcctataaaagttctcaggagccagatgaagatacatttaattatatctgcgaaacattgcgccaacttgcattagagttacaggaagagcagcagaatatcgctgattctgctgaatcatctgaatttgaacctgtaacggaagagattattcagcatgtggcagaaattcaggaaaagcaggaagaacacgtaacacctgtagagcagcctgaagaaaaaaatcttccgacgacaacttcagccacagaacagggacggatccgtgttcacctatccgggctgaaagagcgtgaagttgctttgatgaaagatgagttggggcatcttggtgaaatttatgatgtcgaacaaacaacagacagccttgaagcctctttaattacctctgcaacagaagatgatatcaccgcagtattgtgttttgtggttgagccagaacaaataaccttcttgcctgtagtggagtctcagcaggttgaagtaaaaacagaagaaaatacgactcagcctacggtacaggaaacttcggtaacggctaatgcaacagattccacttctgatgtggaaaagggattggctcaattgccagcgtcaccgtcggctgataccaggaaaaaaactgatgtttctgaagctggtcgtccggcaccgcgtccgatggcgggttctccgcgtcagcgtgtagagtcttccagtattcgtgtagccgttgagaaagtcgatcagcttattaatctggtgggtgagttagttattacccaatctatgctggcacagcactgtgatgctctggaaccgacaatacacagcgaattgctgagttgtatgggcgcaattgcagcgaaattcccgtgatttgcaggaatctgttatgtcgatccggatgatgccgatggaatatgtattcagtcgttatccacgtctggtgcgggatcttgcgggtaagctgaacaaaaaagtggaactggcattaattggtagttccactgaactggataagagcctgatcgaacgcattatcgacccactgacgcatctagtccgtaatagccttgatcatggtatcgaaacgccggaaaaacgtctcgccgcgggtaaatcggaaacaggtaatctgacactggctgctgaacatcagggcggcaatatctgtattgaagttattgacgatggtgcgggactgaatcgcgagaagatcttagccaaagctcagtctcacgggttggcggtcaatgaaaacatgagtaatgaagaagttgccatgctgatcttcgcacctggcttttctaccgcagaaattgtcacagatgtttctgggcgtggtgtgggtatggatgtggttaaacgcaacattcaggatatgggcggacagatccaaattaattttcaggaagggaaggggacagttatccgtattttgctgccactgaccttggcgatattggatggcatgtctgtcaaagtgaatgatgaagtcttcattttacctctgagtgctgtggtcagttctttacagccgcaggaggaagatatttatccgctggcgggagatgaaaaactattgcaggtacgtggtgaatatctgccattactggaactgtatcggatatttgacattccgggcgcagaaacggcaccgacgaaaggcattgcggtgattgtgcagagtgcgggacgccgttatgcattgctggtcgataagctggttgggcagcatcaggttgttgttaaaaatatcgaaagcaactatcgcaaagtaccgggtatttccgctgccacgattatgggcgatggcagtgttgctctgatcattgatattcctgctttgcagaaactgaaccatgaacagttggccgtgcgtaaggcagaatttgcaaacaaaaaataacccttttttgtcatacccgatggatatatatccaaagatttaagtcacacacaatagatagaaggtaacacaatggcagccatagacgaattcagtaagttatcaggagaaacagccggaaaggaatatctggttttcactctgggtgatgaagagtatggaattgaaatactgaaagtgcaggaaatccgtggttatgatcaggtcacccgcattgccaatacgcctgcttttatcaaaggtatcaccaacctgcgtggtgtaattgtacctattattgacttgcggattaaattttctcaggaagatgtgacttacaatgatagcaccgtggtcatcatcctgaatctgcttaaccgcgttgtcgggattgttgttgatggtgtatctgatgtgctttctctgaaagatgatcaaatctgtcctgccccggaatttgccgtcacattgtcaacagagtatctgaccggactgggctccattgaagagcgtatgctgattttggtcgatattgaaaaactgctcaacagtgaagaaatggcgctggtggattctgtcgccaaagagtgatatttcagggctgccattctcttatcacataaagagagtcacggaaaataacagcgtgaaaaggcagcccgtttttgttgtagatcaaaaaaatgcagtaaaaactcaattttttgtattacgcataaagttccctttaaggatgccgataacactggcatagcaatttattacacaagggaagtcatgtttaaccgaatgaaaatagtgacggggctaatctcagtcataatcttatttggtgctctgcaatttatgtctagcggcctgttttttaattccataaaaaatgataccaaggcctttgatacgctggatgaactgcggcagcggcaaaaattacttgatgaaagctggatcaatctgttgcaggcccgtaataacctgaaccgtgttggcatcgtctacatcatgcaaataaacggtggtgagagcgaatacaaaattgatgatattttagcagaggctaaggttaatttatcccgtgcagaactccgttttcagcaatttgaacaaatgccgaacttgtctatacgcgatccagagcgtatgcagcgtttgaaacaaactcatagtgtctatatcaatgcacttaaagagctggatgtattgctggcaaaaaaagagtttaaagcattttttgcccaaccaacgaccatgtatcagaacgcatttgatactgaatatatcttctatctgggtcagaatgaaaagctatatgagcaggtatcagatgaagctgatatagcctaccgtaacgtcattattagcctgatttttgtctttgtgctgttaatcggtgtaatgaccgtgagttggattggtttacgcaaagcattaatcgatccgctgaataacctgttggattcgattaaagccttctcaagaggtgacttgaccagaacgattgatgtctccggtaataatgaaatgggggtattgtcagttggtcttaagcacatgcaggaagagctaatcaataccgtcagaagtgttcatcacagcaccgaaaccatctataccggcaccagcgaaattgctgcgggtaacaatgatctctctgcccgtactgagcagcaggttgcttcactggaagaaactgcggccagcatggaagaactcaccgcaaccgtaaaacagaatgctgataacgcccgtcaggccagtaatcttgctgataatgcctccgaaattgcccgtaagggtggcaaagtggtggcgaacgttgtgcaaaccatgcacgaaattgctgacagttcgcgtaaaatttcagatatcaccggtgtgattgatgccatcgctttccagaccaatattcttgctcttaacgcagcggtagaagccgcccgtgcaggtgaacacggacgggggtttgccgtagttgccggagaagtccgcaatctggcacagcgtagtgccgaagctgcaaaagagatcaaatcactgattgaagactctgtcagccgtactgatacagggtctgagctggtggaaagtgcgggtgagacaatgaacaacattgtcaactcagtgacccgtgtaactgacattatgggtgaaattgcctcagcatctgatgagcagagcaggggaatcacccaggttggtgttgctatctctgaaatggacagagtgacacagcagaacgcatcattggtcgaacagtctgcggcagccgcagcagctctggaagagcaggccatgatcctgaccaaagccgtggcaatatttcagttaccggagcaggcagacaggaagctgcctgaaaaaagaaaacatgaagttttatcgacgagaaaatcgccgacccctccagctaataaaacgaatcctcccgtgctgaagaaaggcagtgacgtggaagacccatctaattgggaaacattctaaaaaataatagcgataactacggctgcataatgcagccgttcaacgaggtgattacatgttaggcaggcttcgcatatcaaccagtttgtatctattactgatgatgttttgtattatgcaaatgatttccagtggtctatcgctgggaattatttatacagatcagtcatatatcgaaagaattgatttgggaactcagcgcagggatagcctgggcgtgagttggactgcattattgcaaacgcgtaacactctgaacaaaatcgcaattgctcaaaaagtagggcaacccaaagaacaaatcgatgcaatggaagcattgctcaaacattcattaagtgaagcagaaagaagctttaatcaatttaattctttacctcaggtaggaaagaatgaaagaagggatggtctattaactgaccttgatcgcgcttatagggactatttcagtgctctgaaagagatgaaagagtttctttatggcggcgattttcaggcttttcttgaccagccgacagaagaatatcagctcaaaatggagctggcatataaacattatatgcagtacctcaacaagaatattgaagatacggtagagaatgcagcgttctactataaagttgctattgccatgttctttggttccattctgatggtgtttattgttgctatcgcagctcactggtggctgaaacgtaacctgctcaggccttttgacaatatgagagcctgttttcaggatgtggcagaagggcggctggataaagaagttgctgttaccactgacgatgaaatcggcgatatattcagaaaattacgcgatatgcaaagatcgctgattaagtccatatcatcagtgcgggataatactaatcagatgtatgtcggcattcaggaaattacgcagggtaacactgatttatcctcacgtactgaagaacaggccgcctctctggaagaaacagcagccagtatggaacagctgaccgtcaccgttaaacagaacgcagaacatgcccgtcaggccagtgctcttgctgttgccgcttctcagaccgcaaccaaaggcggagaacagacttt

SEQ ID NO: 2632 - DNA, 16532 bp, Xenorhabdus sp.; identical to SEQ ID NO: 2631
  CDS (7835)..(8185)

SEQ ID NO: 2633 - DNA, 16532 bp, Xenorhabdus sp.; identical to SEQ ID NO: 2631
  CDS (8904)..(9785)

SEQ ID NO: 2634 - DNA, 16532 bp, Xenorhabdus sp.; identical to SEQ ID NO: 2631
  CDS (9788)..(10789)

SEQ ID NO: 2635 - DNA, 16532 bp, Xenorhabdus sp.; identical to SEQ ID NO: 2631
  CDS (10796)..(11956)

SEQ ID NO: 2636 - DNA, 16532 bp, Xenorhabdus sp.; identical to SEQ ID NO: 2631
  CDS (11985)..(12989)

SEQ ID NO: 2637 - DNA, 16532 bp, Xenorhabdus sp.; identical to SEQ ID NO: 2631
  CDS (13062)..(13559)

SEQ ID NO: 2638 - DNA, 16532 bp, Xenorhabdus sp.; identical to SEQ ID NO: 2631
  CDS (13746)..(15449)

SEQ ID NO: 2639 - DNA, 16532 bp, Xenorhabdus sp.; identical to SEQ ID NO: 2631
  CDS (15565)..(16530)

SEQ ID NO: 2640 - DNA, 16532 bp, Xenorhabdus sp.; identical to SEQ ID NO: 410
  CDS (16087)..(16401)

SEQ ID NO: 2641 - DNA, 16532 bp, Xenorhabdus sp.; identical to SEQ ID NO: 410
  CDS (13159)..(15531)

SEQ ID NO: 2642 - DNA, 16532 bp, Xenorhabdus sp.; identical to SEQ ID NO: 410
  CDS (10469)..(13126)

SEQ ID NO: 2643 - DNA, 695 bp, Xenorhabdus sp.
  CDS (12)..(695)
taaagcatgatttaaatatacatggtgatgcccaacaatcgggaattcgtgctgaatgggcatttttccgcaatcagacacaaatagatacactgagaacacaatttatatataaaaaagggaataattatttaaatgatgaaaaaatcatagtaagtagtgaatctataagccttgtttctcttaatttaaatcattttcaaattattccagctggatttttttctattgatataggtattgataaaggtgtgccatggtttaatacgcaaacagtcatggacaaaaatttcattaaaggattgatgtcaataaatttgcaaaagaaatttagattatttgattcatcttatttattcaatagtcagattagcatgcagtatagccgtgatcctttaccagctatggagtgtttcagtattactgataaaaatagcatcagaggatttaacgagagttttttatgttctgacaatgggtggtatttaagaaatacgctatcttatctgcttcctatagctattcctcaaggttatttagctttaaatataggtggtgatttagggcaaactaaaattattgggcataaaaataaatatgaatggataaatgctgtagggatgagtactggattttcactgagttataaacagttgtttgccgatattcaagctttagagcacatggatcgagca

SEQ ID NO: 2644 - DNA, 17569 bp, Xenorhabdus sp.
  CDS (16717)..(17568)
ctagagaaacacccaaagggcagaaaacctgctggcaggctatgaaggtgagcgtcgtctgactgatgtcatgcacatcggtgaattgttgcaggaagaatcgttacaactggatagtgaacacgcagtagttcgctggctggcacaacagatttcccgccctgatccacagtcagaaagccagcaaatgcggctggaaagtgataagcatctggtacagatctgtactattcataaatcaaagggactggaatacccgttggtctggctgccttttatttgcagtttcaggaagcaggagcaggctatttatcatgaccgtcagaattttgatacccatttcagtatgtttcaggatagtgagaagctggaattagctgatgaagagcgtttggctgaagatttacgtctgctttatgtggccctgacacgttcggtatatcactgtagtgtcggtgttgctccgctgattgtcggcaataggaaaaaaaacggagatacggatttgcacttttctgctcttggttatttggtgcagaaaggggaaaaaggcgatgccgaattactgctacgtagcctagatgaactccgggatgacaatattcaggtgacacaaccagaaaatttcggcgatgaacagtgggatccacaacgggaaaatacactgtctctggttgccagaaaatttcggcgtttcatccgggatgactggagagtgaccagttactccggcttacaaaactcgtctgcacattcatcttcccagctccataccagcgcattcggtgaatcggtggaagtgattgtgcaatccattgcaccgaaactggatattgatgtcagcggtgaaaaacaggctgaaccatcatcgctgatgacaccacatacttttccccgtggagcaacagcgggtactttcttgcattccattctggaagatctggatttcagctcccagccgggtcagctctggctggaagaaaaactgtcaacagcagggtttgatgaaagctgggcaccggttttgcagcaatggatgacggatattcagacggcagaattgaatgagcagggtatgcgccttgcggatattccgcgccatcatcaacaaaacgagatgcagttttatctgcctgttgatcagttgctgcattccaatgcgctggatgcggtgacccatcgttatgatccattgtcagcacagtgcacaccattatcttttcatcaggtgaaaggcatgttgaaagggtttattgatttggtgttttgctggcagggtaagttttacgtggtggattataaatcaaactggctgggagaaagcagcggttcatatactcaggaagcaatggccaccgctatgatagagcatcggtatgatttacagtatcagctctatacactggccttacatcgttatctgcgtcaccggctggtgaactatgattatcggcaacattttggtggagtgatatacctttttctgcgtggcatcgataataataatccggggcatggtatttatcgctatctgccgccggttgagtttgttgatgaactggatgcgctgttcagcgcggctggtgtagaagagaaggtatgagtgcagttatatgaatgtaatgatgtcattattgcagcaggccgtggcccagaaattactgcgcccattggatgtgcagtttgcctatgcgatggttgaagatgaaaacccattgctgttattaattaccgcctatttgagtgcggaagcgggagccggtcatgtttgtctgcccttagagcgcgttactcctgaacatttatttgaagggcgcaaccctgagctggtggcatcactctggtctttggcaggagaaccttcgcggcaacagattatttctgcattgcaggcctgccccgccattggagacgggcaatctcctacaccgatcatactttcccgccgtggactttctgattatcgcctttacctacagcgtatgtggcagagtgagtgtcaggtagcggcattttttgctgatgtggcattggctgatgatattgatgaaacacagttacgcagcatcttagatgagttatttggcgttattgataaagatctggttggtgaagaggctactgactggcagaaagtggccgctgcggttgctgtgaccagccgtatctctgttatctctggcggccccggaaccggaaaaacaacgacggtagcaaaactactggctgcgctgattaagctgaatgaggggcggcaattaagtattcagctagccgctccgacggggaaagcggcggccagactgacagaatcgcttagtgaagcggtgagtaagcttgttttgacggatgaacagcggcggagtattcctgatcaggcgcaaactattcatcgtctattgggagcacagccggaaagccagaaacttcgttaccaccggggtaatccgctttctctggaaattctgatcatagatgaagcttctatggtggatataccgatgatggcccgtctgattgaagccttgccagcaaaagcgaaagtcatttttctgggcgataaggatcagttggcctctgtagaggcgggtgcggtcttaggggatatctgtcgctttgctgaacagggttacagtgtggcacgtgcagcacagctggcccggttaaccggctgtcagttagcgccatattcggagtctgaaccggaagatgctgcgttggcagtacgtgatagcttatgcctgctgcgtaaaagttatcgttttaattttgcatccggcatcgggcaactggcttcagcggtcaatcaggggaatagcaggcgtgtttccacggtactgaaacaacctttgtctgatgtctactttaacactctggccgatgatgaagattatcagcgattactgactgaaactgctgaaggttatcaacgttatttgactctggtgaaagaaagagcctctgaaaaggagattctggccgagtttaaccgtttcagattactcagtgcattaagggacgggccatttggtgtcagtgggctgaatcagagagtagagcaattattacatagtaaagggatggttgttttgccgagatattcaggtaatcggcacagctacatcaaaaaagaatatgcagaaaaagaaaaccggggctatgtcgggcggccgattatgatcctgcgtaatgacagcacattggggctgtttaacggggatatcggcattatgctgaaggatcagaatgatgagctgaaagcctattttcagttatctgacgggcagataaaaccttttcagccaagtcgtttgcctttgcatgagacggcatatgtaatgacagtacataaatcacagggctctgagtttgagcacacggcattagtgctgccgactcagttttcccctgttgtcagccgggagctggtctatacagcgttgacccgcgcccgtgaaaaactgactatttatgcgcataaagcagttctggttaaagcggttgcgacacccactcaaaggcggagtgggctggccgaatggtttaaagcctaacctcttctttaatggattttcaggtctaacatcaggatcttggaacggcgctggtaattgtacagcgcctgtttttccacgggtaacatcgtgatttctgcgggttcaaagcctttttcctgaaaccagtgaatactttgcgtggtcaggacaaataatttttccagcccgctctgccgggcctgattaatgattgcacccaataaaacttcgccacgtgcagagttctgataatccggatgtacagcaacacaggccatttcgccgattttctcttcaggataggaatagagtgctgcacaggcgatagtgatattatcgagttctatcagggtgaatttatcgatttccatttctagctgctcacgtgaacgacgaaccagaattcccttctgctccagtgggcggatcaactcaaggataccaccaatatcattgatattagcccggcggatctgtccggatcgctccatgacaatctgagtgcctatgccttcgcgggagaacaattcctgaatgagagagccattttcctgataactgagcagatgactgcgccgaacgccacggcggcaggctttaatggctccacgcagaaaacgtactgtttcggaggagtaatcaccggcgttttccagattattcagccgtatttctccttcattggggaacatttctgataaggtatgtccttcagcatcggtgaccccctgtgatgaacagaaccctatcaatttttcggctttcagtttaattgccagttgtgcagcaatttcttccgttgtcagattaaaactttcaccggtaacggaaacagcaacaggcccaatcagtacaatggaattattatctaactgctgatttatggcctcatcatcaattcggcgaatccttccgctgtggtaatagtcgataccgtcatcaatacctaaaggctgagcaataataaaattgccgctcacgacattaatatgagcgccttgtagtggtgtattactgaggctcatagaaagccgggcggtaatatcaagttgtagtaggcctgcggcctgtttaaccaaatccagtgttcgggcatcggttacccgggtgtacttgtgataaaccggctggcagtgatgttctgtgagattttgatcgatttgcgggcgggcaccatacacgacaaccagacgaatgccgagactgtgcagcaaaccgatgtcattgacgatattcgggaagttttcatgggcgatagcttcaccacccagcataacgacaaaagttttgttgcgatgtgcattgatatacggaaccgaatgccggaagatttcgaccaattcggcactactttctttcatgaagctcccctttattgaatttttattcgtgttttttatatttttattcatcgaaagaaaaatggcaagagcgagtacggattaaaagaatactattatttatatgagtattaagctattgaaggaacaggaaatgctttttttgatgacagtttggttgtaattaattagagtttcccacctgactgtcttttgctttttaacaaaagttactgtttgattgttttaaatggaataaataatgagtcattcagaccataattcttcgcgtcgtcgtttactgaaaggtgcagcggctctgtggctattaagtatcagccccgtagggcacgctgctgcatcaaaagtgattgctgtccgtatctggccggcatcaagttatacccgcgtgacgctggagtctaatattcctctaaaataccgtcagttttcacttgtgaatccaaaccgcattgttattgatttgcaaggggttcagcttaatagtgtacttagcagtatgggctcgaagattcagaaaaatgatccttatctgaaactaatacgggccgggcaatttgatcctaaaacggtacgtctggtatttgaaattaaacaacctgtttcgccgcatatttttactttgccgccggttgcggaatttaaacatcgtctggtgctggatctctatccaaaagcagcgaaagttgatgatgatccgttactggctctgttggaagagtacaacagcgggaatctggaaaagcatatgccggcaaagaggaaaaaagctggcaaggcaggaaaagacaggccggttgtgataatgcttgatccggggcacggcggtgaagatccgggcgctatcggcaagcataaaacccgtgagaaagatgttgttttacaaattgcccgtcgcttgcaggctctcattaaacgtcagccggggatgaaagtatatatgacccgcaatgaagacgtttttattccattgactgtcagggttgcaaaagcacgtaagatgcaggcagacctgtttgtctctatccatgcggatgcttttactaatcgtacggttcggggctcttctgtatttgcgttatcgacaaaaggcgcaaccagtaatatggcccgttttctggctcagactcagaatgaggccgacctgattggtggggtcagtaaaagtggtgacaagtatctggatcataccatgctggatctggttcagaccgcgacgatcaatgacagcctgaaattcggggatgaagtcctgacacgaatggggaaagtgaataagctgcataaaaacagtgtcgatcaggccgggtttgccgtattaaaagcaccggaaataccgtccattctggttgaaacggcctttatcagtaatccggaagaagaaaaaaagctacgtactgcaaaatttcagcagcaaatagcagagtctattttttcggggattaaagcctactttaaaaatggggcagaattggcacgaaggtgaaatattttcccaaaaaaatcagagtgtcttatctggcatattagatgccggttaatctcagtatattaatggagctatttaactgaaataaaacaattaaggtttaaatcatgacgcgattttacttagttttgactatcttaggtgcagtaatcccgtggtattttgttttcctgtttttagccgaaaatggtttaaacgtgtctttgtttatacagcttttattgggaaatgatgccactcgcttctttgtggctgatgtcgttatttcagctattgttttaattttctttgttgtttatgaaagcaggcgcctgaaaatgccaaatggcatttattccctgttaggtttgtgtattggtgtatcattcgcattaccattatttctctatatgagagcaaggcatatggaaaaggcagaaaatttttctgaaaaagaggaaaattacaggaatgagtaagctaattgggactctgaaaaggaagaactcaacaaccaccgactaaagtcggtgggttagtgattaacggactgaaagtccggatacgcatcggctaaacgatgcgtcaattatccagcctgaagtgatcattcgggttcggttcaaaatgatgcgccagataggcctttatcatctcttccgttaactgacctaccgtcgcacaaaaatagcctctgccccaaaaatgctgaccccagtaacgctttttcaagtgagcaaactcttcaaacaacttacttgctgtccttccctttattcgcctcatgatttctgagggcgctaagctcggaggacaactcaccagtatatgcacatggtctttgctcacgaccccttctactatcctgatttcaaacgcttcacaggtctgacgaactagctctctcacccgtaagccaacttcacctgtgagcactttgtgtctgtattttgttacccacacaaaatgatactcaatctgaaataccgtgtggctgccatatctgtaatccatattgcacctctcgtgcaacacagtatcgcagctaaagctgaccgactaaagtcggtggttttaacctttcatatggaaaaataaaaaagtaaaacatcaaacttacaaattcagtcaattaaaaaaacagaaaattgccctcctgaggtgaaaacagataattgaatataaaatcaaaattgaagatagtagtttatatatccgaaaacaaaaatcaattagcgacaaaataatgaggagtttatatgaaaaacgtttttattatgttgtgttgtggtgccggtatttccagtggaatgctggctacaaaaaccagaaatgctgccagaaaaaaagaattatccgttactgttgaagccagaagcgaaagcgaagttactgagtatttttcagtaatcgatattttatttcttggacctcattatgcctcccaacaagaagagttccagaaacatgctgatatttataatattcccgtcattgtcgtaccacaaaatatctatggcaaactggatggcgaggcattgctggaattagccatagccacactaaacaactcaacaaccaccgactaaagtcggtgggttagtgattaacggactgaaagtccggatacgcatcgactgaacgatgcgtcaattatccagcctgaagtgatcattcgggttcggttcaaaatgatgcgccagataggcctttatcatctcttccgttaactgacctaccgtcgcacaaaaatagcctctgccccaaaaatgctgaccccagtaacgctttttcaagtgagcaaactcttcaaacaacttacttgctgtccttccctttattcgcctcatgatttctgaaggcgcttagctcggaagacaactcaccagtatatgcacatggtctttgctcacgaccccttctactatcctgatttcaaacgcttcacaggtctgacgaactagctctctcacccgtaagccaacttcacctgtgagcactttgtgtctgtattttgttacccacacaaaatgatactcaatctgaaataccgtgtggctgccatatctgtaatccatattgcacctctcgtgcaacacagtatcgcagctaaagctgaccgactaaagtcggtggttttaacctttcatatggaaaaataaaattcggtttgtcataatcacagactttctccgctttcttgcctgggatacccaaacaaatgaacggttagatatcgatatagatgaattacacagttattacgcctttttcctgccattggttggcttagaaaaggcattaaccagcagtgagaatccggtagacgtcaaagctgccgaaaaaatgggtaaattatttgacctgataaaaatcaacaataatttaaccaatactgaagacattcacgcattgaatgtttttttaaccagaattctcttttgttttttcgctgaagacacagggattttcagtgatgcacaatttacttctgcaataaaaagttacactgaagaagatggaagcgatctagatgcctttctttatcaaatattctctgtgttaaatacaccagaggatagcgatacaagaataaaccttcccaaacatattaataattttcgctatgttaatggcgatttattttcatctgatgaccctattcctgagcttggtaaaaaaggaagaagaatcctccttgattgcggatcgatggactggagtgaaattaatccagatattttcgggagtatgtttcaggccgtcattgatatagaacaaaggagtcgtttagggcagcactatacctcctacagtaacattatgaaggtgattcagcctttatttattgaacctcttagatctgacttcgaaaaaaacagaaaaaatgtgaacgggttggcaaaattattggttcgcatcggaaaaattaaagtttttgatccagcctgtggttcaggtaattttttaattgttgcttataaagagctccgtaaactcgagatggaaattatcatggctttgggggaaatagaccctcagtccataccaatgagcgggctacacctgtcacaattctatggaatcgaaattgatgattttgcatgtgaagtggccagattatctctttggcttgcagaacatcaacttaataatcagtggaagaaagagttcggggatgctccaccggcactgccattacgggaaagtggttgtatagttcatggaaacagtctacataaagactggaatgaagtctgttctaaaaatactgaggatgaggtatatgttattggaaacccaccatttttaggtcatgtaggtagaactccgcaacagcgtgctgacatgctttctgttttcaaagggtttaaatcgattggttacttagattacgttgcttgctggttttggaagggaggtaattatattattaactctaatgccgaacttgcatttgttgcaacaaattcaataagccaaggtgaacaagctagcactatatggcatccattatttaaattaggacttaagataaatttcgcatatccaacttttacttggcaaaacaatgcaaaagataaggcggcagtgcatgttataattgttggtctatcacaacaaaataaaaaatctgtgctttttgatttctttgacaatcaatggcataaaaaacaagtaatcaatataagtccgtacatagtagagggtggaaactttgctatctctcctataaacaaaccttttttgaaagaaacgcctagcctcctttttggtaatatggctaatgatggtgggaatttattcctttcagaatccgaaaaaaatgaactaataaagctcggacctgaatataagaaatggattaaacgagtgcttggggcagatgaatttctgaatggtaaggatcgatggtgtttatggttatgtgatgccagcaaggaagaattagaatctttatcagccatacaggagaaacttaacaaaatacgcgcgctcaggttgaaagctggacacaccaatgctttgaaaatggcagagaaaccacattgtttctttcagataagccaaccccgatcaggtgattatatattaatacccagagtttcctctgaacgtagaaaatatgtccctatggggttctttagtcatcaagttatttgttcagatgctaatttatttgtacctgatggcacactatatgaatttggtatacttacctcattaatgcataacgactggatgcgcttggtggcgggacgtctggaaagtcgctaccgatactctgcatcagtggtttataacccttttccatggcctgatgtgagcaatgaaaaacgcacgatgatcgaaaagcttgccgaagaagtactgcttactcgtgaagaatttcccggcaaaactctggcagagctttacgatcctgaaaagatgcctgagccgttattgaaagctcaccaggcactggataaagcagtagatcgtctttatcgggacaagccattcaaagacgctgacgaacgtttaagctttttgcttgctcgctacgaaacgctaatttctcaatgacccctctgagccaccttcctatgcgccgtaaggtggctcagttatttctggagtggtggaatgaacaatcttttgcatgtggaatacaaacagactggacaaagtgcaagtcttaactcaatgggaatgcgagaaatgcaggctcgtgcttatgctgaacgcaacagtcagtatctgctgatcaaagctcccccagcctgcggtaagtcgcgtgcgttgatgtttctagggctggataagcttgaacaccagggagtgcataaagtgattgtcgctgtacctgaaaaatctatcgggggatcttttaaaaacacagcgctgactgaatcaggtttttttgccgactggcaggttagccctcagaacaacttatgcgttgatggtagtgataagagcaaggttgctgcattccagcgctttatagctggagatgaccatatcttggtctgcacacatgctactttacgttttgccttcgataaggtcgatatcgcagagtttaatcactgtttggttgctattgatgaatttcaccatgtttctgcggacggtgataatcgccttggtgggttgatcgatgaactgatggctaaatcaagcgcacatattgtggcaatgactggttcttatttccgaggagatactgtccccatcctgttaccagatgatgaagctaaatttaccaaagtaacctacacttactatgagcaacttaatggttaccggtatctgaaatcactgggaattggctatcatttctaccagggtcgatatattgatgctttacctgatgtgctcgatacccataaaaaaactatcattcacattcctaatgttaactctggcgaatccaccaaagataagcacagcgaagttgatgcgattctcgatattattggtgaagtggtacttcgtgacccagaaacaggaatactccaggtcgaggcaaacgatggacggattctcagggtcgccaacctggttgatgacacctcatctgaacgagcgaaagtgcagacctatcttcgtagtataacgtcctctgacgatatggatatcattattgcgctgggtatggcaaaagaaggattcgattggccttattgcgagcatgtgctgaccattggatatcgtagctctctaacagaaattgttcagattattggcagagcaacccgagattgtgttggaaaaactcatgcgcagttcactaatttgattgcacagcctgatgctcaggatgaagatgtcagaacatccgtaaacaacatgctgaaagccataacaacttctctcttgatggagcagatcctcgccccgaccattcaatttaagcctcgctcactgtgggatggcaaggaattacctgcaaatacactccttgttgacgacactacttcaacaccagtttcacaaaaagttctcgacattcttaacggtgacagaaacgaaattatgaccgcactactggcgaagaagcaacttatacaggaagccatcagcgacactgtaccaccggagactgtgacgcaagttgaactcccggccatcatccaaactttgtatcccgacctgacagaagaagaacaagaacaaattcgcctaggtacgctgcaaagtatgctgattactcagcaaggaggactggtagatggaaaagatctgccacccagtgcaattgtagattgggacgaagacagtgacaaaaatgacaaaaatattaccgggaagcaattcctgaaaatgggtgataagtttttgtgtattgataatctgaacattgacttaatcgattccattaacccgttcaggggagcttacgaaatcctttcgaagcaggtcgatgccgccatgctgaagactatccaggaagcggttagcgccagtaaatctcaggtttcagaagaagaggctgtgattttatggccccgaattaagcaatttactcaggagtttcgtagagaaccatcgctgaattccagcgatccaatcgaagtcaggtatgctgaggcactggcctttattcgtcagaaaaaacagcaacgattagcacagcagggacagtgaaatgattaggttatcaacacaacgtttatcatcacggatcgatcttgacgatatactcagtgaaagcgatgacctggggctgctaaatgtgcagcctctgaaagtacgtcagaatgtgaccgatatatccgaggcacagtttactgaaatcaattccttttacagagggcatggaagagcacctgaagaaaacagctcagcgagcctcagtgaaaaaagacttgctcgccgattacgtagcctgagatccagtgtggagaaatccccgaacttacaacgtctggacgagttcggacttttaaaaaatagtgatgttgaggaagtactaatttcttgtgccgcagaaccctccgcagagtatttgagtcgagccgagtcagttacctcgctggatgatatttttgcagatgatgatggtcttctcgattttgatactcctgaaatttttgtactggaacatattcaaatagaaaaaaaggagcagccagacgaaatcgcccagcgtcagccttgtccagactttgtacgttatgaaccaatttttaaacgagtacagaatggcttgcagaacggacattttagtactgaacgttttagtcataaattgaaaatcaatgtaggtgatttttttatactgaacggtctaatggggtatgttgttagtattggagagcgccttgagcagtacagtagttacaatgccagaatgcatttggtttttgaaaacggcactgagatgcgcatgctatacctatcgctgactcacggactcgtcagggataaagaaggacgtaaactacaactcaacggtgaagcaattaaaccgtctgaacaagcaataccgactggtcttgtatatatattggcgacgttaagtgttgatcctgtgcttgccccctatacgcataacctttacaaagtcggctttacagagtccactgtagagaaccgaatcaaaaatgctgaaaaagatcagacttttctacaagcccctgtgagaattgtatcaaccagtcaatgtttcaacctcaatgcacataaactggaaatgttgatacatggttttcttgcgccacgcagattgaatgtcacgctgaaaagtcataccgggcagacctatatgcccagagaatggttctacgtcccattatcaacagtgctggcagttattgagcatgttgtaaatggaacaatatcgcagtatcgacttgataatactacggggagaatagttcaaaagaaatagtcatcacatcttcgggcgatcccttacagtaaaatatgtacatgacgataaaataaattatttaaaatcagtcaactatgtgagttcaggaagcaactaactctaggggcattaataggggcataaaatcaatgagtaaaaataaattaaatatattcaatgcgttatatttatttgctagtcccgccctggcaccaaattaaaaaccactgataaaacagtgagttcgggaataaaacagtgagttcgggaataaaaaaggccaccgcaaggtggcttttttctttgatacaaatcacattcctaatattatcctaatatccattcctaatattttggcagcaaaattgacagcagtggttttttcttctcgctcgcagattgataaaaaacagcagaaatttatttctgattgaatagtaaacgctgaaaacatcacaacgatattgatgttttgagttacggatatcatttgaaataacgcagagatttgattgatggacgaagaaaaattagaactggcatacattcctgccttgatcttactccttgtacatgctcagaataaaaaagaggctcctttgaccagagaggaagtcgaagatattcgtgataatggtacatgtatagtttgccctgtttcggtaaaccaagctatggatgaaaaaagaggttactcggatattaacccggattatgtatgggaagagtggcaggagtacttgaagcaagcacaggacgagtgaggatttatgggctttaacgtacacataacccgcgttgatctgaatgattactacgatgaccctgaccgatattctgacgaatcagccaatatttccatgcaagaatggattgattatatcaatcaggatgacgagatgagactcgatggttatgctgaagcgcttttctctaatggcgaaacacttatttgtgtggatgaaagtatggctgtttggactcagcacccagatcagtctataacaagctggttttggctggatgacggaatgattaccaccaagaatcctgacaaccatatgataaaaaaaatgcactctattgccagagcgctaaatgcaaaagttcaaggagagggcggctatgatatcgataaggagggaaaacctatgattccacctgaggagctttctttcagagagtcaaaaccgtggtggaaattttggtaatgacagatcactattactcccatccctgctcagccaattcaatattcgccacctccttctctttcaaattccacaccaaattctctggcaagtacatcatcaagcgttaatgagtgtcgatgtatatcaggactagacaatgtaatccacaatcctaatataatgacaccgaccttcctgtatgtcttcggcttaccgaactacaaaagattctgactcacataataaattgaattataacgttcagaaatagaatatccattctgttcttttttacaacttcggcgagaaacctcactcgctatatagagataatttttgacaaaacattcgacgtaacagtaaacctcatctacagtttatagactggtttactcctttgtttttgttaacgaagatgtcagttgtacctaggatgaagttcacattacccaaataaaaactaaatatggtgtgatatgaagatttttgtcattaatttagaaaaagatatagatcgtaaactatcaatacaggaccaattagaaaaggcaaaccttaatgccgaatttattacaggtgtgtatgggagaggattgtctgatgaacagctcaagaaaatttgcccagactttaataaaatatatctaactcttggtgaagttgggtgttcaatgagtcacctaaatgtctataagaaaatgatagataaaaatatatctatctctctcatattagaagacgatgtcacttttgataataatctgataacggtactatcctctttagaaaaagatcctcaggctcttggatcaaatccattggtttttttactgaacaaaacaaatgaatactttgattcatttaaaaagccattaactgacgaacatagcattgtcaatgttattgattcagcaggagcctttggatacatattaaatttagcggcagctaaaaaactatatcaatatttactacccatcagattcgctgctgatgaatggaaaatatttagagagcatggtgctataaaattaaaaagtgttattccccctgtagtagggttaactgatttgaacttagattcatcaattggtaacgatagaactgacgaacgaacagagttagatcagcaacacaggaaaaaatccttttatactgaactaaaattgggtttatggagaatctttattagagcaccgctaaagaaagttaaacactagtaccaatattatactacctataatttgataaaaccctgtttaatcgactagccgatcttataatgaaaaaagataaaatttttattgccggatataatttaagtggatttggtggtatggaaaccgtttttgataattttcacagattattatcacacaatgataactatgatgttttatttgttttttttgaggataaattcaaaaaccctgatgatagatggattggtgaaaaaaagtttgttcgaattaagtcaaatattaaaaatacaaaaataagaagatttcatttcgcatataaattttcaaaattaatttcacaacacaatccaaagcatattatctcttacgactcactaacatgctatatatcactatgggcaaggagatttagttttaaaagtacaaatatcatttcttggtgtcatttcaccctgcatgatatgtataaagtagaatacattctattagcagataaacatttggctatcagttctggaatcgctacgcaactctacaacatgggagttaaccaaaaaaatatttacactgtttttaatcctgtgaccccaaaacttgaagtgataacccgtgaaaaaaatatttcttttttatatttaggcaggattaatttcaatgggcaaaagaatctaaaagaactatttttatcactttctagaataaatggagattggtcactaaatattgttggttcaggtgactcccaagaaattgataaattaaagaaacttgcaattctacttaaaattgaaaatagaataaagtggcatggttggcaacaaaatccatgggcatatgtgcgagaaaatattaaaaacgtaacttgcttattactaacctcatcttacgaaggttttcccatggttctatgtgaatcaatatcctatggcgtttacgtgattagct

SEQ ID NO: 2645 - DNA, 17569 bp, Xenorhabdus sp.; identical to SEQ ID NO: 2644
  CDS (15899)..(16165)

SEQ ID NO: 2646 - DNA, 17569 bp, Xenorhabdus sp.; identical to SEQ ID NO: 94
  CDS (12673)..(14007)

SEQ ID NO: 2647 - DNA, 17569 bp, Xenorhabdus sp.; identical to SEQ ID NO: 2644
  CDS (15090)..(15440)

SEQ ID NO: 2648 - DNA, 17569 bp, Xenorhabdus sp.; identical to SEQ ID NO: 2644
  CDS (13096)..(14247)

SEQ ID NO: 2649 - DNA, 17569 bp, Xenorhabdus sp.; identical to SEQ ID NO: 2644
  CDS (10995)..(13001)

SEQ ID NO: 2650 - DNA, 17569 bp, Xenorhabdus sp.; identical to SEQ ID NO: 2644
  CDS (8526)..(10934)

SEQ ID NO: 2651 - DNA, 17569 bp, Xenorhabdus sp.; identical to SEQ ID NO: 2644
  CDS (7640)..(7954)

SEQ ID NO: 2652 - DNA, 17569 bp, Xenorhabdus sp.; identical to SEQ ID NO: 2644
  CDS (5139)..(6383)

SEQ ID NO: 2653 - DNA, 17569 bp, Xenorhabdus sp.; identical to SEQ ID NO: 2644
  CDS (1626)..(3554)

SEQ ID NO: 2654 - DNA, 17925 bp, Xenorhabdus sp.
  CDS (10916)..(11434)
tgctctaagctcgcctcaccaccacatcgggttgtttttacggcggcggcagagaatatcgatcatcaggtcaatttcattatcacggcacagtaccggatcgagtttgccctgacgcgcctgctccgtcatattctgggtaaaacgggccagcagactgtcgctgtttgccggatgaacgccctgcccttctttatctccggcactgaaaggctgttcggcagagccgtttgtccattcagcgaaattctgacgcagcagctcacggttaatccccgccagcaggcgcgcagactgcggagccagataacgcagcgggctgaacagtaatgcgatcagcaatacaccactgcgcagttcggtatgctgcatttcagtagaagccagcagccagctatcctgcaaccattccaccagcatcggggaaaagttagggtaagtctgtacaatcgactgatgatgcgtcatcacctgatcgagttgttctttcagcagatctttatcaatttctgctttgttcaggatcagacgcacatcactgagtggtgtttcgatcatctgaagcagcagttgagccacagtaatctctggctgttgctggctgacgcaggatgccgccgccgcttccagtgcatggcgggtcatcgggtttaaacggtttacaagagtgggcagatcaatctgaatcatggcgacttcctatcttaataatttatttagctgctctaatatgtactgggtctgatcaccgaggcgtatggcataaaaactataaatagcaatcagcagacctatgcctatcgcaaacagatgtttgatcttccaacgccggatcaggcgataacttgcatcgcgctcgttgacgttgacatacagcgtggtcggcggagcatctccacgcaatgagtgaagctgttgctgcaagcggcggaacaggcgatcaaaatcatcacttttctgggtgctgactttgtaacgcccgcgatagccaagacagagacagaggtaaataaactccagcagatgctggtagcgctgagcctctcccatcaggcgttcaagcaatacaaagactttttcacccccccacgtttcattgtggaagtgcaccaacagtgattgcttcaaccagccattctgactgttccagccgtgccccaatgcggtttcatcaatgaaggtgcacagtacgtaacggaatgaaacaatcgcaccgggttcatagcccttggtttgcagaagctgctcaatagcacgaatgtcagtaacaacctgttggtaaagcttatctggcagcgcctgatcactcatgtcctgcaaacgcaggaccatccccagtaaaggagtggcggcatcgatcatcgggttgaggctttcaccacgcaacgggagctggtactggcgctgaaacgttttcagtgtttcagcctgtttttcaaatttttccagtgacggactgtcaacattgatatcactcatgcctaatcctcataactagtccttaccgcccctgatagcccagagctgcatatccaggtcagggaaatcccctgagacgtggaatgcaatggaattaccctgttggatctctttccatgccggactcttctgatccagacggaaataggtatagccagagtgatatggcaactgacgaggagctgcggacagcgcaatcagtggtacacccggcaactggacgctgaccagatcgcggatacgctccattgaggtgactttggtctgctggacgaactgacgacgcagctgttcctgcggagtactggcgctgatagccagaacaaattcagctttgcgcagcaggtcgttatcgtgcagcgtggcaacgcgaattccgccttcgttctgtttcagggcaatcgatgttgcacgcggtgtcagaacaacgttcagtgcatcacggatggcgtgcatggcatcctgaaaggtatcggtcaggttattgtggtcataggccagaatattgcccggcagacggctcgcatcggtaaaggttctcagctcaccgcaggtctggatcagctgggtatacagatgcagcggatgcagaacgctctgcttagcataatggttgtacagcggctgaacgcggttcaatagctggagcatcataaactcagccacatctgcaatcccttgctggcccggcgaaccgatacgcttcgctaacgttcttgaacgctctgtcagcaaaccatcgatttccaccatgaagcgcttgagtttgtcagcaacgaaaatggacagacaggtcgggataaattcattatccagcacgatagtgccatctttctgtttttctttaatgcggcacagcgggatcgccgtgtaagcactcatatcctcagaaccctgcatcaataccggagttagctgagcaaggttcaggatggaagaatcaccacctttggtatgcaaatcacggacatcacccggcagctcgcgataacgcactgcgctctgggtttcagcatcccgatcagccacttcacgaatggtgtcgctcgacatgggtaatgccagatagatatctttacttttcaggtcattgatgttttcgatatccagcggctttggcagcagatcctgactgggtgccgcgaatattgtgccatccggcataattccgctggcctcggtaataccgatgcgtcccagcttgagcaaatcatcattgatgctcatggagctgaaaccatgaccgtatgctgtcagtacagagacgaggctgtgggccagataatcattatgtttttgttgttgttggaaatgctgtggcttgatgaataatccttcgtgccaaatcacccgattctttcctggcatgattactcctcctcctcttttctaagttcgacgtcgttatttctgatatgcaccaagatgttgtaatggcgtcccatgtcttttacccggatgatctttttccattcagactgattgacatctgcatagtggacgatgacaccgatataacggtttttcttttctaatgtgatcacttccagcggcttgtattgccccggcagcagggtgtaatcctgatgatcgatgtagtttttccccaatgccttttcgagtttgtcactttcaagctggtcataatcggcagccagaaaacgtgaatcctcactgagataaaccagattcatctcaacaggtgccggttcaccactttcattggggttaatgttgggttcagccagtaacgtgatattggcaacagaagcctgatcactcggccttcctaccggcgtggaaggatcccagatgacctgaccgacttttttggttgcgttccatgcactgctacagccgttcagtaacatcgctgacagtaataaaatccctaccgaccagatgcgctgactaccggaacgtttcatcactggcgtcctctaagccctgacgcaatgcgcggtcataagcctgctcgtacacctcacggaaaagcttttcaaacccctgctgacggctggaagctaattcacggtaatagttggtatacatttcccacgcccatgaagcatctttgttcctgacgtcgctgctgcggcgatagtgtgaaaaccggcggagcaactgctcaggagaaaaggcttccagcatggtatccagcgccgcagagatagcttcccggttggcctgataatgcagttgcaggttatgcaggctttctgcgacagcagcgggagctgacagatgaaccgggcttttctgctcggagaacatcacctgcatcgtggtgtcgtaatccatattcaggcgcagtgggttgtcttcgataggacgaagttgcttatcacgcaatccgtgctgctcacgctggagagccagtaatccttcgattgccgctttcatggttttacccatttcctgcaagaaatcgttggcctgctgcgtgtcgtgcagaggcaactgcgtatccagcccgcgcatcaaaggcgtaattgcgacatggtcaacatccatatcttcatagtgctgctcggaagtgatatccggtaaatcaaggaactcctgatccataacactgcctcggttatcagaaatagggttagcaaatggaggggattgataatgatccggaggcagaagctgctcggtatcatcagcgtcaacctgctgtttcaatgtggtcaggctttcactgtccagtacccggagagggtcatcgctgaaacggtgcatcaccgtcggagcaacgctgtcatctttggcaaatgcagacttttgcagcgaaacgccttccatcatggcatccagtggattgctgtaactggaaaccagcgattcaggggataccgttgaaggatcgacccgatctgactcagagaagctgatgtggatcttgatcgacaacatgccgactttaatctgatcgccctgctgtaaacggatcaggctggactgtggtgttaatgtggcattattgatctgcacagcatcagacagtacttgcaggcagaatgcaccatcacgccactgaatcgagaattgtgacgggtggatgttgccctgactgtcctgaacagaccacaggtgactttcactgctgccgaccgtaccgccctgtggcgaaaactggcagctggcggctcggccactctccagttgctcactgttgataacccgcaatgaaagggttggttgatgtttttccatagtcgttattccataactgaaattgtgacagagggtttcttttccggctcaccgagaaaactggtccatcccagatggttgtgctgttgtgcccccagaaccatgccgccaacctgattttccgccagcccaagacgcagctcccacgcaaactgactacgcatgacgaaggaaatgaacatcactaatgggaggtagttttttccgtccggcaggaatgacaggaaccgatcacggggcagattgttgatactgagcaggaatttcccgctgtagtccccaatccatgaaccaatggtgaagttttgtcctaatactgacagctcggtatcaccaatcgtttgccctttattggtgccacccagacgattttgttgatcaaccgggatcgtgacttttctgaactgccagccgtgcagagtgacatcctgtaagtcaaaacagtgggaaaccagactgcatatcacttccggtgagcggccgggacttgccagcaacccggcataggccagcattttgctgtgattgatattcagcatccgacggttaacttcactgcctaaccccaccagcgagaacatgcgctgggaaaaaccgtcttccccgcctttcttaaagcagatgtaatagcggtacttccgccaaatctggtgcaggagcgtgattaagcgatggttaaacaggttgagaaaatccgtcagccggttttcaccctgtgcgtcttcccatgccagtgaatccaggtaataacccggcatcggggactggctgccatgtagccccataaaagagacttccagctcaaaatacccctgtttggactgcgtcagtgaaaccacatcacgggtaggaaatgccagactggcgctggatttgaagcggacagactcacgttcaggccgatctgtttctccggttttttcccacgctaccgccagctgattgagcagctcaaccaactggtaaaagttgtagcgtgagatgtccaattccagcgctttggcaggactctgcgctgtgattacatcaacgagtgttgacctatctgtaccggccattcataacattcctgattatctagattgattaccttcaacatatgaaaagcgttgacgctggcatacagtgagaaaaaccgtgacaaaatcgtactgaacagataaagctcaccttctgagctgaatgcctgctgccggatatacaaagtagagcgcaaaccacgtaccggctggccccggaacagacgatccgtcggctctgtctcgattttttcaatagcatcaagccgtttctgtgatgatcgtttagactgtcggttgtgaatactcgggaaatcgtaagtacgcagcacttgtttcagtgcatctctatccagcaatgacatgtagttcagcgacatgttcgacaacaatgaccagtgcaatccgccgtccaacaacgggtaaagcggcacggacgggcgtgtgatattgcggaatgtcgcaaatgacgggctgccgatagacgggtaattaatgtcgccgacacgtagctccagcggcaattcacggttggtacacgtcaggctgacggaaacgttctctttcagtctgagcctgagcagatcagattcatcgccacggacaaatgagatgaaatgttccagccctctgcggaaaggtgactctttcacccgcagacggtagtaacgcattgagcgttcatcttcgttatcaatctggtgattgaaactttcaaacggggtataaacccgctcaccgacacgtgcccggctgcgctcaccgttctctcccgtcagccagctttctacgccgtcgatagagaaaatatcgtagttatccgggaagctataactggccttcagcggatattccgtctggctaccattgagttcaatcgcttcgctgtccatcgggaacaggttaatcgccggtgtacagtgcagacggaaagtgtcatggcggatcttagcttcgggtggcagtgcctgagaaaaatgtaaattcagtttgaaatctttggtcttgagatcttcaggcagttccggcaaacccttcacatcaaaaaacaggaagctttccgcaaaacagaaatattcctgcaaaatgcgataacccatgtaggcatttttagggtaaggcaacagtgcatcttcccgctcaaacccaaccggtacaaagtcaaaatccggcaaagggatcaccttatcaccgatcaccagttccgcttttctgaagtagtaacagagccagaaatagagttgcgaagtggtatagtcatcaccactgaggtaaaaccgtaatttatccagttccagttcatggagattcagttccgtttttgaggcaaagttcaggccaatgatcccctgctcattactgttattaacggaaatatcctgaatagaaagtgggaaaagccagacatcacggcataaggtgaaggtacagcggctgtgatcatcccttttgccattcgactgcttttcattcgagtaaatatcatcatgagctgccagcgcattactcataatctgtgtgccacgtttaacctgtgtcgcttttgtcaccacactctcatcaggggtatattcgatgatggtcatgctgggagtcggacgcagataattgggccaaagcatattaagcaggccatgagtcaattcaggaaactgatcatcaatttttgcccgcagattgcctgtcaggaatgcaaaaccttcaagcaaacgctcaacgtcaggatctgagccttgttcagacagaaaagcggcaagatgaggacgctcaactgcggcttctttccccagttgtcgcaaatagttcagctcatctctgaaatatttttcaaatgacatttattgagttcgctccaggcaatagcgccggttgttgtccaactggatgctgaattccacaacatcgttgatatcatccagggaaacttccgcactgatatgaaagctcaataacaacggatctgactcatcattgatggcgctgactgacaccgctgatattctgggctcataatttctgatgcactcttctatcgcccattcgatactttgcttgaaatccactgaggttgcggttgcgtcattaagatcaatgacacccagttcaatggcactctggcaggcaccagggcgcgaattaagcacttcattcaaatgtttctttatagaatcaagcagagcacgcatccttgactgacgggaagagccgaagctcttcccttgaatgcgctcgaacagactggcagagctgcctctgttccaactgtacagcgcagccatgattattccttatccaaacgtccgaccagcgacagttcgaaactcgcacccatgtatttgaagtgtgggcgaacctgcatcgcaacctgataccagcctggatcgccttcaacatccagaaccttgatttcagcagcacgcagtgggcgacggctacgaacgtcagttggtgggttttcctgatcagcaatgtactgtttcagccacatgttcagttcacgctccagatcctgacgctctttccaagagccgatctgctcacgctgcaacactttgatgtagtgagccagacggttgatgatgaacatgtatggcagctgagtacccagcttgtaattagtttccgcaattttgccttcacgggtgttcgggaacacttttggtttctgtacagagtttgcagagaagaatgccgcgttatcgctgcccttacgcatggtcagggtgataaagccttcttctgccagttcaaattcacggcggtcagtgatcagaacttctgttgggatcttcgcctgtacctgacccatcgcttcatacagatgaaccggcagatcattcaccgcaccaccactttgtggaccgatgatattcgggcaccagcggtatttagcgaagctgtctgtcaggcagcttgccagcagataagcggtgttaccccacagatagtgctcgtggtcacggctgacattttcctgatagttgaagtttttgattgggttttcaacggaggaatatggcagacgcagcaggaaacgaggtgcagtcagacccagataacgggaatcttcagattcacgcagtgcacgccatttggtgtgtgaagggccttcaaagacagatttcagatctttgatagctggcaggtcagtaaactggttcacaccgaagaattcaggtgaaacagaggagaggaatggagagtgagccattgctcccactgagctgacatactgcatcagtttaatatcaggcgtagtgttgttgaaagcgtagttaccgatgacagcagcaacaggctcaccaccgaactggccgtaacccgtagagtaaacatgcttatagaaaccggactgaataatttctggagagaactcgaagtcttccagcaattcgtctttagtcgcgtggatgatgttgattttgatgttttcacggaaatcagtgcgatcaaccagcattttcagtgagcgccaggaagattccagctcctgaaattgcttagcgtgcatgatttcatccatctgctcactcagctttttatcaagctcgacaatcattttatcaacgaggagcttattgataggttcttcgttagaacctgtatccagaatgctgccaataaaagcggcaacaccctgttttgcaatgtagtagccgtcattttcaggagtcattctcgcttgagacataatttcatcaagcagagaagtggttgcgccagaagcaagtgctgtgctgttttcttcgtgctgagccatttagaattcctttaacgagttattttttattgatgatttcaagttctttcaggagttgttcacgaacggattcatcatccagcagtgactgcaggcgagcgcgaaatgcggggatatttcccagagggccttttaatgcaactaatgcttcacgtagttccagaagtttattcagctcgggtactttcttggcgatattatccggtgagaaatcacttagggattttatttccagattaactggtaaatcttcttcactattttcatcgaggcgattagggacgttaaaagtcaggttgatattcgcctcattcattactgcattgaagttatttttattaacagaaactgttggtctttcttcaattggcgtatcttctgttttgcctttcaggtcacctacaaccagaagattcagtggtaattcaacttctgcggtctgatcaccggtatttggaacatatttaatattaattctttctttaggagctacgctaccaggactatttttactcatatttcaaccctttggctaatacaaccatgaactgtctaacaacccattattggtaagataataattacaatgttatccatataacaaatacagcagagcttcctaaaaaaataggtataggaaaacaactgtatttgcagacataagtagacttttatatatcaccatatagataaatataagaaagactctaaccagtcgtggaaataacatcgatataaaaaatcgtcaatagcgagtttgacactttatttttttgatgtaaagccaaaacactaattgataacaccctctattctggcttttaatacttttattgtatctcttgaaaatttatgattatttttctcttactaaatagataaaagtttggttttactctttataggtgtatatagaccgattacctatcaattgtataaaaagaaatatttttcgtatgttatgaataaaatataatcaccaaattagtgacctgagattatcataaagttcattttttatttcattccgattaattatcctccataaaaaccctttctgaattcatttttttgacacccgtcacactttattaatgatcatgaaaaataaataatttaaaaattaaaaatcattatttatcaatagattacaaaaaacaaaaacttgaagattaaatttcatacagaaatataagcttaccgtttataaaaaatcagccataaatcttataacagcaatgattataaaatttttatttgtctttgaattcaggctcgtcttgcaatttataaataactttgcatcagagaaattcggccttattattcgctccgagtgttcggcatcgctaattttatttcatttagtgggcatcatttagtgaatggaataatcacgcaaggaatgagcacttacacttatattggtaaatttttataggatattcatatgccaactccatgttatatttccatcaatggaaaaactcagggtcacattactgctggcgcatttaccgctgagtcagtaggtaatatctttgttcagggccatgaagacgaaatgctggttcaggaatttgaccacatcgttactgttccgactgacccacagtcaggccagccttctggtcagcgtgcacataagccattccgcttcactgttgcactgaacaaagccgttccactgatgtacaacgcactggcttccggtgaaatgttacctacagtagaactgaagtggtaccgtacttctatcgaaggcaaacaagagcacttcttctctactaaactggtagacgcaactatcgttgacatcgactgcaaaatgccacactgccaggatccagcaaaagctgaattcactcagttggttcgtgtttctctggcttaccgtaaaatcgagtgggaacacactactgcaggtacttctggtgctgacgactggcgtgcgccaattgttgcttaagatcttatttatcagattttagataataagttttaagtaatcataaccacccgtataacgggtggtttgctcttgccctataagggcttgttaccgactgcgcctaaatgacgctgctttctcttcgttcaagctaagtgtctttgctgctttggcctaccccttgaaggggtctacatgctctttactactcaatttatccgagattaaatccgacttttcttgctctctgatatacttttgaattgtcgcttcatttagccctaccgtactgacatagaacccttccgcccaaaactttctgttgccaaatttatattttaaattggcgtgtctatcaaagatcatcaacgaacttttacccttcaaatatcccataaagcttgaaacgcttagctttggtggaatactcaccaacatatgaacatgagctggcatgagatgaccttcgattatttccacacctttatacttacaaaggtctctgaggatctctcccacacttgaacgaatattattaaaaatcactttccgtctatatttcggcgaaaagacgatatggtatttacacagccactttgtatgcgctgagctttgtgctttaatgcccataaacacctttccttatttgagttacgaatattagcttgaacatctatatcgtaacggaaaggtgtttttcttggtataacctttgaactccacccgcaaagcgggtggttttatgtttaagacgctaacgcgacttaaactggctaaagccataattaaaacaaaaatgccgattttaaatatcggcattttactgtgaaagagggcgattaatttaatgttttaacgcttcaatttcttcccggctcagtcctgtactggtgacaatgatatccagactgacaccatgctgtaatagtgcgcgagccgtttccagtttgtcttcttttctgctttcctttaggccttcttctcttccttgtctgatgccttcttcaaggccctgctcgcgccctttttgttcaagttgttctgcaatagtcatcaacttttttgccacaatatgttcctctgccttatcagtaatagtcgccattcatgaatggccgataaatgtacaatatattatcggctgctccaatatcgaagccgcttagtcagtcccgtatcggcttttgagcgatataacgactcatgatgatccctctttcagaacctatttcactctgagctcagcaaatcttgcaaatcctcccagaattcactttgtcttgccagttggcgctgttcttcaatcatgtcctccagtatttccggcgttgttagtggatttgccagcacaacgcgaaaaacagtcgttggttgtttatcccattgcgcaggtttaatactggtacgtgaaacaaatgtttttccggcagagcgctgcatggtctggatattctgattgagggcattaagcatatcctgcactttttgtcgtatcggctcagaactctcacgcatcagtttaattgcagcaggtggggcgtagcggtaagtcaacagacaaagctgcggttcgctgattagttcgaaatcttcctgttggtgaatgaagtccgcaaactgatgtgctttctcaatgcctgcatctatcagagctgccattccctgccgcccaagcaggtgaaggttactgtgcagcatcagcgacatcgcgctacgtgaaccttccagagtatgtctgcccagatcttttgatcccttgcgcaagatgtaattagcatgctgctcaatagcatcggccatagtgggctgacggaatagcaccatgcctgatcccatcgggacgtacatctgtttatgtgcatcaatagtcacgctatccgcacgctcgatgcccttgaataagtgccggtagcgttctgataacaggctggcacctccccatgctgcatcgacgtgaaaatgacactgttcccgttcagcaatatcagccagcgcatccagtgggtcgatagagccggtttcggtactgccagcgatgccgacaattgccatcggtttgatattacgtcggcgaagttcctgtaactgaatgagcaggtcatcaagacagattttcccgtctttgtcagtagcgattttaaccagtgcatcctgcccaagacccagcacatcaacggcctttttcagtgaatagtgtcccagttctgataccagaatcgccagtccactatagccataatggattaacccacgggctaaaccttcacgagtaagtccggcaaagtcgccatctgcgggcataagctgattccggcatgcccataatgcagtcaggttagccacggttccgccggagcagaagctcgccagtgcatgatcaccattgtgaagccatttttgatagaaattatcatcacagttgtagacaagtttatgcatcattcccaagacctgacgctccagcgcggtcaggacgtgggaagtttccagtttgacaacattttgattcagcgctgtcagtatcttccccagcaccggtaagtgcaggggaagagcggatgtcatatggcccacaaaggcaggtgaggaaacaggcataacctgatttagcacattttcgctcagataccgggtgtatattccggtatcaaccgggcattccggtatgctcacggaagagaactgtttttccagttcttcaaggctgcataccggcctgtttaacctatcatgacaatagctgaccgggttatctgtgatgtccgcttccagtgcggacagcgcctgcgcaccgatatttgtcataaatgggttgagaaaatcctgcatagtttgcctctttagacttacctgattgtatttgccagtttctgccagagtttacccacccagagtttggttgatggggtggataacatggtcatatgattgccggacacaggcattgcgtccagttttgcaacatgtgtgcgccactgagtttcgcggttttttatttcatccgggttctcgtcttctgcactaatcagatggacgagcccttcataacgtgcccggggaatatagcgggtgttcaggttagcctgcataacgcgaatgatcccttgcagtagtgatattgatgtttttgccgggaaaaggccggcttttattagggcatggtgtaaaagctggtgctgctcatcctgtgtcaggttttcaaaatcctgtcgggtgagaggaagcggctgatctaatatcatatcgtagatatcaatcaactccattatcgtctcagtatggctgacaggcttatggatagagccttgctggttgggttcgtctgtatcaacaagaatgaggtcagcgacctgttcgccctcggcctgtagctgtaaggcaatttcaaaggcgatccagccaccaaaagagtggcctaacagatgataaggcccgtgaggctgaatttcacgaatagtccggatgtaagctcgggctgctccttcaacgctggtatgcggataattgtgctcagcagtaaaaccacgggcttgtaaagcataaatgggcagttgcgacgggaatgataacgccagttcaagcaggctggacgggctggctccagcaccgggcatacagaatagcggggagactgatttagaacccagctgaatgataacacgcgggtcgaaagccggaacggcctgtatctgctcagtaattgaatctgcaatctgattaaggaaaggaggttgcataatagagaagtgcgttccgccaatggggcagagtacagaatggtgcccggcgatatcgtgccagccatgccagcggtcacgattgtttgactcatctgcggaatagagatgaacaggcaggggtgacttgggcgggacatagtcttgtcccagccgggtgatcagctcagcggtatgagtacgtgtaaggatatcattctgcgtgatattcgccggtacccattgatgctcaatgcagtaatcaataatctgctccagactgctgagtttgtacagtgcttccagtgcctgttcatcatcaatattcttctgagtacgcagtgaatcaatgattaacccgatttgcacagctgttttatcttcactagccctgtcttcatgaagcgtattgttacccgtatcgtcattgacataattataggtgtcaatcatgccaaggaattccacgacttcattatcattgattaactgttgagcgatttcataggcaatcaggccaccaatagaccagccagccagacgatacggtccctgaggctgaatacggcggattgcctgaatatggcaggccgcaagttcttcaatggagctgggttgctgtttcagtgtatgaatgccaagcgcctgtaatgcgtaaacgggaagttcagccggcagtagcgttgccagtggagaataaaccagcggatcgccggaagtctcgtgtatcaggaatagtggaggtaaagagccagacgggcttaacggtactgggtttgcatcaaacggcgattctggtacggcaaggtgtttatccacagcggcagccagctcacataatgtggggtgagcaaacaaagcggtcagcggagcttccatttcctgttccttcattcggtttagtagttgtattgcgagtaatgagtgaccgcccagtttaaagaaatggtcataacggccaactcgtttcagtcccaatagatcctgccaaatttgtgccagcgcgatctcagtttcgcccatcggggcggcataattatgtactatcattgcggataaatcaggggcaggcagtgcctgccgatcaagtttaccattaggggttaatgggaaagcctccaaagtcacaaaagcactgggtagcatgtactcagcaagatgttgggcaagttgccggcgaagttcagccgggactaacttagcgcccatatgcggtaataagtaagcaaccagacgttcttgtccgtctgtttgttcatcaatagtgtttttacggataatgactaccgcttcacgtactccatcacattttgccagccgggtttctatttcaccgggttcaattctgaagcctcgtagcttaacctgaaaatcattacggccaagatattcgatattgccatccggcaaccagcgcccgagatcgccggttttatacatccgctcattcggataggcagaaaaaggatcgggcaggaagcgctcagccgtcagttctggctgattcaaataaccacgggccaatccggtaccggcgatatagatttcaccaatgacaccaacggggatcagttgcctgtcagggttaagaatataacagcgggtattggcaatgggacggccgattacggagacatccgggacagtacgcgcaacatcgtactcataccatgtcgcatcaccattaatttcagatgaaccataaaaattaagcagtcggatccacggataatttgtgacgacctgtcgtgccagttcgggtgccagctgttccccgctgcaaatcaatatcctgatagatttcagggcgtgttcatcattattctggattaagaacttcaacagggaaggaacgatgaccagtaaatttacaccagcatgttgtaggcttgcgcggaaacggacaggatctttcacctcatgcttgtcgaaaactaccagccgcccccctgttaatagggtactcagcgtttctgttattgaatcaacgaagctgatactggttttcagtgctgtgataagcggaagtgtcactatatcgttcacaaaccatacgtcatgcacaaaccacaataaccggttactcagagcccggtggctgctcatgacacctttaggaacacccgttgaaccagacgtgtaaataacataggccagatgctgatctgttataccggatacttccgggttatgttctggttgtgtctccataaacggtgcccggatatctaaaaggatgattggcagagcgtccgcagattctaaatcgcataacatatcgggataaatggcctgatagatttcagactgagtcagtaatgttaccggagcggaatctttgagcatatacttcagccgctctgccggataggccggatcaagcgggacataagctccaccggctttaagaataccgagtaagctgacaaccatttcggggctgcgttcgagacataccgcaactcgatcatcagggcgcacaccctctgcaatcaagtaatgagccagatgattagcccggcggttaagttcacggtaactgatggcttgatcttcaaatactaccgcaattgcgtcaggggattggtctgcctgagcttcaaacaacctgtggatcagggcatcttgcggattgtctgctggtaagaaagtagcctgagtcgtattaaaatcgaccaacagttgctgctgttccagttccggcagcattgggaggtgcacaactgtttgcctttcatcagctgccattgccgtcagtacatttggtgaaaaaaccggccattcgttcaatag

SEQ ID NO: 2655 - DNA, 17925 bp, Xenorhabdus sp.; identical to SEQ ID NO: 337
  CDS (17347)..(17910)

SEQ ID NO: 2656 - DNA, 17925 bp, Xenorhabdus sp.; identical to SEQ ID NO: 337
  CDS (16447)..(17226)

SEQ ID NO: 2657 - DNA, 17925 bp, Xenorhabdus sp.; identical to SEQ ID NO: 337
  CDS (15220)..(16431)

SEQ ID NO: 2658 - DNA, 17925 bp, Xenorhabdus sp.; identical to SEQ ID NO: 337
  CDS (14519)..(15076)

SEQ ID NO: 2659 - DNA, 17925 bp, Xenorhabdus sp.; identical to SEQ ID NO: 337
  CDS (13240)..(14535)

SEQ ID NO: 2660 - DNA, 17925 bp, Xenorhabdus sp.; identical to SEQ ID NO: 337
  CDS (12401)..(13234)

SEQ ID NO: 2661 - DNA, 17925 bp, Xenorhabdus sp.; identical to SEQ ID NO: 337
  CDS (10635)..(12218)

SEQ ID NO: 2662 - DNA, 17925 bp, Xenorhabdus sp.; identical to SEQ ID NO: 337
  CDS (9942)..(10382)

SEQ ID NO: 2663 - DNA, 17925 bp, Xenorhabdus sp.; identical to SEQ ID NO: 337
  CDS (8461)..(9939)

SEQ ID NO: 2664 - DNA, 17925 bp, Xenorhabdus sp.; identical to SEQ ID NO: 337
  CDS (7944)..(8441)

SEQ ID NO: 2665 - DNA, 17925 bp, Xenorhabdus sp.; identical to SEQ ID NO: 337
  CDS (5441)..(5665)

SEQ ID NO: 2666 - DNA, 17925 bp, Xenorhabdus sp.; identical to SEQ ID NO: 337
  CDS (3705)..(5279)

SEQ ID NO: 2667 - DNA, 13634 bp, Xenorhabdus sp.; identical to SEQ ID NO: 95
  CDS (12210)..(12728)

SEQ ID NO: 2668 - DNA, 13634 bp, Xenorhabdus sp.; identical to SEQ ID NO: 95
  CDS (2612)..(3808)

SEQ ID NO: 2669 - DNA, 13634 bp, Xenorhabdus sp.; identical to SEQ ID NO: 95
  CDS (3818)..(4843)

SEQ ID NO: 2670 - DNA, 13634 bp, Xenorhabdus sp.; identical to SEQ ID NO: 95
  CDS (7668)..(8102)

SEQ ID NO: 2671 - DNA, 13634 bp, Xenorhabdus sp.; identical to SEQ ID NO: 95
  CDS (8181)..(8651)

SEQ ID NO: 2672 - DNA, 13634 bp, Xenorhabdus sp.; identical to SEQ ID NO: 95
  CDS (8651)..(9670)

SEQ ID NO: 2673 - DNA, 13634 bp, Xenorhabdus sp.; identical to SEQ ID NO: 95
  CDS (9704)..(10540)

SEQ ID NO: 2674 - DNA, 13634 bp, Xenorhabdus sp.; identical to SEQ ID NO: 95
  CDS (11685)..(11921)

SEQ ID NO: 2675 - DNA, 13634 bp, Xenorhabdus sp.
  CDS (13296)..(13634)
tgtgctctaaagatcgaaatttggtgggatattagttactgaatatgaaggaaattgtccagttagcttgaaaggtaaaatatgtgtttttttatatctgctaaaaaataagtttagaaagttaaggtgtagtaactaagaatatattgatatttgatgagggtaaaatttggtagcatttcttcaccaaatatatcttcatcgtgtgatattatcagatcctgtatagaataaagcgtccatgctaattaaaaaataaaatttatctattatgagtctaatatggataatctttttcggatgaagctcaggtcccttgacgtgaacaatatcctaaaagggtcatgaatccaatagttagattgctggtaaagtatagtagtgacgctcaatgaacgttcctatcactttatcgtgtatttcttcggatttggaataacctatcgtttttcgattcagcctctttatccgaatacgtagagtgagattagttctctcaatactttgggtaaatttctttcccgtcaggtgtttttcctcaggaagacaatcgtaaacggcataatcatctgtacagtaataccggatattaaaaggagaaaggggtgccagcagctttttcaacgttttcctgctgcgatccccaaacacatgcgccactgcccgtttcctattcggcccccaagtataccagagccagcgctgaattttcttattactgacaaatgacgcttactcatctatttcacagacaatttgaatatcactgcccgcaagtggcagcacagttacctgccttggcgtgagctttttaatgtgcgaataaaccgtgttaatgccaatgttcagcactcgagccgtgtccctaaccccggcgttattcatggccatatcaataattcgctcttcggcaggcttgataggctggctgtaataaccggttatgtattggataatagaatagtaagcttctctaaaatttgcatatcccgccaaaggaacccattcgctttttaagctccggaaaaaacgttccatcgggctgttatcccagcaatttccccgcctgctcaggctttgtttaataccataacgctgtaataatcgtctgaacgctttgctagtatagtggctaccttgatcactgtgaaacaggagcccttgcggccttcctctggattcaaaggcctttgctaacgctttcttcgtcagttcagagtccggcgagaaagacatcgcccaaccgaggggtttacgggcaaaaagatcgatgacgaccgccagataagcccaacgtttaccggtccagatatacgtcccatccccacaccacacctgattgggtgcggtgaccgcaaactgacggtcaagatggttcggaatatcaacatgctcttgttcttttcgtgaataacgatgccttggatggaggcgagactaaccagccccagttcagccattaattttcccggcagccatcggcccaatggactgcctttggtggtgaccatcggcccaatggctcgggcgcctgctgagacgtggcgctcgatgaaatgcttgcgcacccaactctgtcatttggctcgcgtcggatcatgcggcttccccggtttttgccaggcttgataactactgcgataaacgctaaacagttggcaaaggaaagccacgggataatgcactctgaattgttcgattagcgagaattgttcaggtaaccgacatcaagagtgctgaagccttttttaaaacgtcattttccatttcaaggcgttggagtttctttttcaggtcgcggatttcaatgtgctccggcgtgatgggcgaagcggtggggaaattttcctgccgttcctgttttaactgatgaacccatcgccccatggcggactgactgacattcagggctctggcggcgtcggcaatactgtagtattggtcaagcactaactgtgctgactccaatttaaattcggggctgaaatttcttttcatcatgtcacctgttgaattatagaagtgagaatatcacctctataacggtgaccaaaatcattgaaccacatcaactttagccatatctcacccacaataaaagcagggggtttgtcataatatctaatcattgggagtatgacccagcattggccttagcggtaaaagtgctatgtgatgcaactatagaaattgctaaacattctgaattgagaatgttcgtggtattccccaaacgttgggtagttgagctatcattcaattggttggaaaaatacaggcggctttgtaagaattgtcaacgaaaactgagtaccagtctgcaaattatcaatttggtctttttagtcatcttattgaaaagactctgaacaggttcttaataaaattatttaaaccatgctaaacatcgtcctatttgaaccagaaatcccgcctaacacagggaacatcatccgtctgtgtgccaacacaggctgtcagctacatttaatccagcctttaggtttcacatgggatgataaacgcctgcgccgtgcagggctggattatcacgaattcgccaatatcaagcaacatcacgattaccaagcatttctggaaagtgagggattaagttcagcaaactcacaatcccccaccggtactcgcctgtttgctttgacaacaaaaggcaccccgactcacagtaatgtgagttaccgtgatggtgattatctgatgtttggtccggaaactcgtggtttaccgccttatgtgctggataacatgccgcccgaacagaagataagaattccaatgctgccggatagtcgcagtatgaatctttctaatactgtggcggtagtggtgtttgaagcatggcggcaacttggttatcagggtgctttattgagggattaatacatatacccgttgtctttcaaactgcctctttgttggctgcactcactcaccccggtcacatagttatctatgctcccggggatgagttcccttgccgccgcgatgcaactcgaaatctattggatataagcactcagcgcctgacagcactgagtgttattaattctgagctatcaaaagcaaagagattttaaatcccatccccattctcaaaaccattattcattccattaaaatgctggtccatatccagagatggtttctcgctttccggtttaccaacaatccgcgcgggaacaccggcaactgtggtgtgcggtggaacaggtcttaacactactgaacccgcaccaattttcgcaccacgaccaatttcgatattgccgaggatcttagcacctgcaccaatcatcactccttcacgcactttcgggtgtcgatctccgcatgctttcccagtcccgccaagcgtcaccgattgcaggatagaaacatcattctcaacaatcgctgtttcaccgataacaatgcctgttgcgtggtcaagcataatgccgcagccaattcttgcagccggatgaatatccacaccaaaagaaacagaaatctggttttgcatgtaaaccgccaatgccttgcggtcttgtttccacaaccaatgtgcaattcgatatccctgtagtgcatgaaaacctttcagataaagcagaggggtggagtatttatctacggcggggtcacgcagccggacggctttgatatcactcgctgccgattcgatcatctttggttcactgccataagcatcttcaacaacttctctgaccgcaatcgcgggcatgattggtgtcgccagcttgtttgccagcatgtagcttaaggcacttccaagattttcatgtttaagtagtgttgcatgaaaaaagctggctaacataggctcacaatcggctagctctctcgcctcatgttttatattttcccaaacttctcttaattcttctcgagacatatcaatcattctcatgtgattgtttttataatggctattttgggtaacttaaatgtgggaatcttctccttcatcccttgtcgctcttcccaataatgcctgagccgcttcgagtacatttttgttacggtatagtatctggtagatttgctctgttatcggcatttccacaccaactcgtctggctagtgcccgaacctctttggtattacgataaccttcaacaacctgtccgatgtcactctgtgcagcgtcaacattaacgccctgccccagcatcataccgaaacgacggttacgggactgattatcagtacaggtcagtactaaatcgcccaacccagccatgcccataaatgtggaagggtccgctcccaacgcaacaccaagccgactcatttcagccagaccacgagttatcaatgcagtgcgggcattggccccgaaacccataccatcagagatcccggcgccaatagcaatcacgtttttgactgcaccaccaagctgtactccgataaaatcaggatttttgtatactcggaagcttttgccacagtgaaaaagctgctggagttcttcaccaaattcagatgttgtcgcagataccgcaattgctgtcggtaaacctgccgctaattctttcgcaaatgttgggccggacaccaccgctaacgggatttcattgcctaatatctcacgtgccacatcctgtaataaccgaccagtttctgcttcaaggcctttagtggcccaaacaatgcgggaatctggttgtaggtgaggctttatctgctgtaaaacatcgccgaagacatggttgggaaccacgatcaggatatttcggctggctgaaatagcactcttcagttcagcttcaagctgtaaactatcagggaaagaaacatccggtaagaacgcctgattacatctggcttgttgcaaagctaggacatgctcaggattatgcccccagagcacaacattatgcccgttacgggccagtgtaatggctaaagcggtgccgtatgagccggcaccgataactatcatagaagcagtattcattaggcttcctgtgttgcctcatcagactgggaatcagactgttgctgcaagtaattcatgaacagagcatcaaagttaactggcgccaggttcaattgtgggaaagtaccacggcctaccagactggtgatgcattcacgggcatacgggaacagaatgttcgggcaatatgcacctaagcagtgcgccagttgagttccttcgatgccatcaacagagaaaataccagcctgttgaacttcacacaagaacgcagtttcttcacccaatgtcgccgtaacagtgacacgcagaacaacttcataaactccctgaaccaattcactagaagcagtatccagatccagcttaacttccggctgccattcttcttggaagatctgaggtgctttaggggcttcgaaagaaatgtctttcgtgtatacgcgttggatctggaaagccatttctgtgttgttttgttctgacataataatttttaccttttgtatatccttattaaacctagattatgtaagtactaagtatactgcttacattcacattcgttactttttgccacgggctaatggtaagttttcacctgtccacccggcaattccctctttcagggtataaacttgttcaaagcctgctttcaccagattctctgccggtgttttcgattccagaccattcgcagaaacaacgataacaggctgctttttgtgtttttccaactcacccagattgttatctttaatctcagatggagtcaggttaacagaaccaatgatatgccctctgcggaaatcgtcacgggagcgtaaatccacgacgataccatcttctttattgatgaaatggatgacctgtgcgcgagtgatatctttactcttggagaacacactttttagtgtcaggacgataacagccactaacagggcaatccagacgaggctcaggatcgtgttccggctaataaattgcatgatttcttgcagcatggagggcaacaactcccattagttaataacaaaaatcttaaggtaacagagtatacctgtgtgttgtgtcaattacagccagttagcaccaacctaatgcagtttttgcggagagtttcgagaaaaaataaaaaatcctcatgaaatacttgattgccatattccgctaaaatatttcatgccaaactggtcagatacaggattttcgataataaatgagctaaattcactaaaatttagattatgattcgggaagacaaaaaactgtccattctctggtcagaggcaatttcacatgaaataatcgggcacaacagacatataatagacaagtactataaatagttagtgtagagcggggaaaggtactgaatcaaatggctgatcataagggtttcaaaagttttaactttcggaagaagcaaaaacagtggcaatttagtagcagagctttactgttctgtgccctactgtttgcttttttctgttcaggaacctttgccaatcaaatttcagaaaataaaaaccagctcaaagatattcagcaggacattgctgaaaaagagaaaagtgtcaaacaacagcaaaaacaacgcacagaactcctcagccagctcaaggagcaagagagtaccatttcagaagtgggccgttcactgcatagcactcagcttcacctgaataaactggggaatgaaatcacctccctgacgaaaaatattcagcgcctgctaatgcaacaaaaagaacagcgcaaacggcttgccagccagttggatgcagcatttcgacaaggaaatcatcaagggttagaattactgctaaatggcccagaagctcagcgcaaagaacgtatactggcttattacagttatctgaatcaggctcgtgaagagactatcactaagctccaagaaacaacggataaactgaatcagcaaaaaaaactccaacagggcaaacaaaacgagcaacaaacgctactaagcagccaaaaacaacaaaaacaaaagatggaagttgcccgcacagcccggcaaaatacgctgacaactctcgaatccgcattgaagaaagatcaacagagtctggctgaacttcggcaaaacgaaactcgcctacgcaataaaattgcaaaagcagaacgggaagctaaggctcgcgctgaacgtgaagcgcgtgaagctgcacgtgttcgtgcacaagttgcggctaagcaaaaacaagcccaacaaaaaggctccagctataaaccaacagaagatgaacgtgcgttgatggcacgaacgggtggacttggccgtcctgccgggcaggcgatctggcctgttcgtggtcgggtcattcacagcttcggggaaacaatacagggtgaattacgctggaaaggtattgttatccccgcagcggaaggaacggaagttaaagcaatttcagacggacgagtattactggccgactggttacagggctatggtctggttgtcgtggttgaacatggcaagggagatatgagtatttacggatataaccaaagtgctctggtcagcgttggtcaacaagtccgtgctggtcagccgattgctctggtgggaagtagtggtgggcagcagcagccttcattgtactttgaaattcgccgtcagggacgtgctgttaatccgttaccgtggttaggaaaataatagagggaaaccatcgtgcagcatctattaatacagtgcctccattcattcactctattatttggaatgctgcgctttcggcatattcggtgctggaaagtattaccgctttttgtgctttcatttactctgaatgctcatgctgcgcgtttggctattgttattgatgattttggctaccgggttcacaatgaaaacaaaatattacaaatgccatctgcaatctcaatcgcagtattgcctgactcaccacatggcagggaaatggcacaaaaagcccacaaacaagggcgggaaattttaattcacctgccaatgtcacctcttagcaaacaaccgttggaaaaaaataccctgcacccttcgatgaataaagaggaaattgaagccattatttacgatgctatacagaaagtgccctatgcgactggtatgaataaccatatgggcagcgcaatgacttctaatcttagcggtatgaaaaaagtcatgggcgccctatctcaatatcatctctattttctggatagtgtaaccattggcagcactcaggtttctaaagcatcgataggaacacctgtacagatactccgccggaatgtctttctggataatgttcagacagaagcagaaactctgcatcaactcaatcgtgctattgctctggctcgtaaacaaggatccgctatcgcaattggtcacccgtacccaacaactattcgtgcattacggcaagggttagcaacattaccagatgatattgagctggtagctcccagcaaattgcttaacctcgctcgaccagataaacagactgaacaaaaatgtatcaattctcagaaatccaaaactgaatccggaataacatcagagtccagagtgcaatatctcaaaatggttggagaaacattagttcccggtgcaatcattcatatcctacaacagcactttgaaaagttacatagtactgatcaaataaagtcacaacaggaagaggctatgaaggataagtctttgcaagataaagcagggataaaagagaagaccacacaaaataaaacaggtgctcataaagcagtcagcacctgttctggttcttaacagctattttactaagctgtataagatgttatcagctaatcccaatttagaataactttgccagattgccctgaacgcatgatgtcaaagcctttctgataatcatctattgagaactggtaagtgataatcggagtcagatccagaccagactgaatcaatgccgccattttgtaccatgtttcgaacatttcccgtccgtagatacctttaataaacagccctttgaaaataacctgattccagtcaatagccatatcagaaggtgggatccccaataaagcaatacgcccaccatgattcatggcattgagcaaggtacagaaagccggtggtgctcctgacatttccaagccgatatcaaaaccttctgtcatacccagttctgacataatatcggtcagattttccttactgacattcacggcacgagtgacacccattttccttgccagttcaaggcgatactcattcacatccgtgataacaacatgacgtgcgccaacatgtttgcatacagccgctgccatgatgccaataggcccagcacctgataccagtacatcttctcccactaaattaaaggaaagagcagtatgaacagcgttgccaaagggatcaaaaattgcagccagttcgtcagagatattgtcgggaattttgaaggcattgaatgccggaataaccagatattccgcaaatgaaccgggacggtttactccgactcccgttgtattgcggcacaagtgagtacgcccgccgcggcagttacggcaataaccacaagtaatatggccttctccggatacgcggtcgccaatcttgaagcctttgacttcctgaccaattgcgaccactttccccacatattcgtgcccgacgaccattggcaccggaatagttttctgagaccactcatcccagttatagatatgcacatccgtcccgcagatcgcggttttacggattttaatcatcacatcattgtggcccaattccggtgtgggcacttccgtcatccaaatcccttcttctggctttaattttgacaacgctttcatagtgataccttatgcaataatattcaattgcttaccgatacgtgtaaatgcatccactacaagttcaatttgttctttggtatgggcggctgagatctgagtacggatgcgcgcctgacctttcggcacaaccgggtagaagaagccaatcacatagataccttctttcaacagctcggcggcaaattcctgcgctagttttgcatcccctaacatgacaggaatgatggcatgatcagctccagccagagtaaaaccagccgctgtcattttttcacggaataagttggcgtttctccagaggcgctcgcgtagttcgtctccgtctttcagcatatccagaactttaatagatgcggcaacaatggaaggagcaagggaattggagaacaagtaagggcgtgaacgctgacgcaaccactccacaacctctttacgggcagcggtgtaaccaccggatgcgccacccaaggctttaccaagtgtaccggtgatgatgtcaacacgtcccatgacgtcacagtattcatgagtaccacggccatgcttgccaacaaaccctactgcgtgagaatcatcaaccatgaccagtgcgccaaattcatctgccaaatcacagatagatttcagatcggcaatcacgccatccattgagaacacaccatcagttgcaatcaggatattctgtgcaccttctgcttttgctttctccagctgtgccctgagttcctgcatattattattggcataacgataacgttttgctttgcacaaacggataccatcaatgatggaagcatggttcagtgcatctgagataatcgcgtcttctggcccgaataacgtttcgaacaaaccaccgtttgcatcaaaacatgaagagtacagaatggcatcttcaaagcctaaaaattcagcgattttattttctaattctttgtgagaatcctgcgtaccacaaatgaaacggacagatgccatgccaaaaccatggctatccattcctgcttttgcagccgcgatcaggtcagggtgattcgccaaccctaagtagttattggcacagaaattaatgacattgttaccatcagcaacggcgatatctgcatcttgtgcagaggtaataatacgttcacttttgaacaacccttccgcgcgggtttgttccaactgctcattaattttctgataaaacgaagctgacatctttctctcctgattacctgaataaatgaagtaataatgcacaatgtattctacttatagatatcgccagtgacgacagagagaaagagataatatcaagtttgtaaagcggatcacggcctgaaaactgagatgttacaggatttcaggatattcccctatatcagcagctgtcgtcagtagggttaagtgatatgatacgcaccaaagtaaagcgaactgactatttagaggtgggccaaatgattattgtcactggcggcgcaggatttattggcagcaatattgtcaaggcactgaatgacgaaggctacagagatattctggttgttgataatctgaaagatggcacaaaattcgccaatcttgttgatctggatatcgcagattatatggataaagaagatttcattgccagcatcgttgcaggtgatgatctaggtgatattgatgctattttccatgaaggtgcctgctcttccacaacggagtgggatggcaaatatatgatggacaataattatcagtactctaaagatgtactgcattactgccttgagcgacagatcccattcctgtatgcctcttctgccgccacttatggtggtcgcagtgacaattttattgaagatcgccagtacgaaaaacctcttaatgtgtatggctactcaaaattcctgtttgatcagtatgtccgtgatattctgccacatgcagactctcaaatttgtggtttccgctatttcaatgtttacgggccacgtgaaggacataaaggcagcatggccagtgtcgccttccatttaaatacacagattaatcaaggccagaatccaaaattatttgcaggcagcgaacatttccgccgggattttatttatgttggtgatgttgcggcggtgaatctgtggttctggaagaacggcgtttctggcatttttaactgcggaactgggcgtgccgaatctttccaggctgttgctgatgctgttaccgagtcccataaagaaaagtctccatccgtggaatacattgaatttccggaaaaattaaagggccgttatcagagcttcactcaggctgatctgacaaaacttcgggctgcgggttatgacaagtcattcaaaaccgttgctgaaggtgttaccgaatatatgcaatggcttaatcaggataattaatcgacctttatgaagatattggtgatcggcccatcatgggtgggtgatatgatgatgtcacaaagcctctaccgtaccttgaaggctttgtacccaaatgcagaaattgatgtgatggcgccggaatggtgtcgtccattactggcaaaaatgccggaggttaatcaggctctggcaatgcctctggggcatggagcacttgccctcggtgagcgccgccgtcttggggtagcactgcgtgaacgtaaatatgatcgtgcttacgtcctccctaattcgtttaaatctgctttggtgcctttcttcgccaatatccctttgcgtacaggctggcgtggtgaaatgcgctatggtttgctgaatgatatccgcactctgaataaaagtgcttttccgcttatggttcagcgctatgtcgctcttgcatatgacgggaaagctgtacgcagtgctgaagatctttctcatcctcttttatggcctcaattggctgtcagtgagcaagatattgcagaatcaaccgccgcgtttaatatcgacgatcatcgcccagttataggtttttgtcccggtgcagaatttggcccggcgaaacgctggccccattatcattacgcggcacttgctgaacagttgatcacccaaaagggctatcagatactgctgtttggctccgctaaagacaatgaagccggtgaggatatccgcgcacttttgagtgaagacgcccgcaaacagtgcctgaaccttgcaggcaagacttcccttgaacaagcggtgaacattatcgcagcctgtgatgctattgttaccaatgattcaggtttaatgcatgtcgcgtcagccctgaaccgtccgctggtggcactatatggcccaagcagccctgatttcacgccccctctgtcagataaagctgaagtgatccgcctgattaccggctatcacaagatcagaaaaggtgacagtgatggtggctaccaccagagtcttattgatattcagccagagctggttttgtcctcactggaaaaactcttacaggcggagaaccagcgttaatgcgtgttttactggtaaaaacctcttcaatgggtgatgtgttacataccttgcctgcattaacagatgccaaaaaacacataccgaatattaaatttgactgggtcgttgaagaaggctttgcccaaattcccacatggcacaatgcagttgaaactgttattccggttgctattcgtcgttggagaaaaaactggttcaggaaagatatctgtgaagaacggacacgtttcagagagcagttacaacaacaacaatatgatgcaattattgatgctcagggcctgttaaaaagtgcttttttcgtgacacgattggcgcatggcataaaacatggctatgacagaaaaagcgttcgctttaggagc

SEQ ID NO: 2676 - DNA, 13634 bp, Xenorhabdus sp.; identical to SEQ ID NO: 2675
  CDS (12214)..(13266)

SEQ ID NO: 2677 - DNA, 13634 bp, Xenorhabdus sp.; identical to SEQ ID NO: 2675
  CDS (11266)..(12204)

SEQ ID NO: 2678 - DNA, 13634 bp, Xenorhabdus sp.; identical to SEQ ID NO: 2675
  CDS (7770)..(8756)

SEQ ID NO: 2679 - DNA, 13634 bp, Xenorhabdus sp.; identical to SEQ ID NO: 2675
  CDS (6483)..(7655)

SEQ ID NO: 2680 - DNA, 13634 bp, Xenorhabdus sp.; identical to SEQ ID NO: 2675
  CDS (2398)..(2901)

SEQ ID NO: 2681 - DNA, 17942 bp, Xenorhabdus sp.; identical to SEQ ID NO: 96
  CDS (4499)..(4720)

SEQ ID NO: 2682 - DNA, 17942 bp, Xenorhabdus sp.; identical to SEQ ID NO: 96
  CDS (4837)..(5106)

SEQ ID NO: 2683 - DNA, 17942 bp, Xenorhabdus sp.; identical to SEQ ID NO: 96
  CDS (8978)..(10141)

SEQ ID NO: 2684 - DNA, 17942 bp, Xenorhabdus sp.; identical to SEQ ID NO: 96
  CDS (10153)..(11136)

SEQ ID NO: 2685 - DNA, 17942 bp, Xenorhabdus sp.; identical to SEQ ID NO: 96
  CDS (11144)..(12727)

SEQ ID NO: 2686 - DNA, 17942 bp, Xenorhabdus sp.; identical to SEQ ID NO: 96
  CDS (16164)..(16262)

SEQ ID NO: 2687 - DNA, 17942 bp, Xenorhabdus sp.
  CDS (15098)..(16498)
atgatttcccaaaatagtatctattgaagggaatatataataatcaacgatagactgattaaaactatccatgcgaactgctatatttacatccggtgaaaacatatggtcaaatttaattttccatctaaagttttctggtgatattttttggcatctggctacttgtagagttaatgtgaattcatcattaactttcagaatccctgtttctggtgaatcactaatccagccatcagaaagatagatatttttgattattgattctgttatattggcatttatcccgttaagatattttttggtttctaaccaggagtagtcagttttgggattgtatccaaccagcttatatactcggagtaggctaccaaaacgagaacgataaacactacttgaaggtaatagttcttcctcatcaatgataagtcctgacaatcttccctttttttgtaataataagtgtaatttttccaacaattcttcttcagtaaaaataagcgttcgagatttaattatatcgtttgcctgtttgaatttatcatgactaataattgattgatatgctccattacaccgaatccattcttcttcaggatttattatgtgttgttgcttaagtttgaacgaagtcttattataaacgttatttccaatgtatttttcgtttgtgagtatttgatggatttttccgcgagtccattcagtaccattctcagcgaggatctgctttctgttgagttcagatgcaataaccaattcaggtttcccctctactataaacatatcgaaaatttgattaacgatgtctacttcgttttgtggaccaggtatgagtataattcgatcggtctgaatactcttacgctggccgaactcaagtattcctttgggattacggtgctcatcaatgagtaaacggcgcaatccatacccggccattcctccctgatgaaaaccccgttttattaaattaacttgtccgaggaatactttttccgataaatttcgactgtagcttgcagcattataccgagagaatgacactcccagcatatacatctcagattgttcgttgaagaagggttctgcacagtaaataattttcacaccatgtatttttaacaaatatgcataatgtccagcctcatccgcatcctgaaaacgcccgaacctactgacatcataaacaagtagagtggagatgtttattttgtgatttatgacatcatcaattaatgttttaagtccggatctgccagttaaatttaatccactctttccagcatcattataagtatgaatgatagtgataccatgcttatttgcgtaatcatgaatgtatgcagattgattatcttgcgaatatttttgatgctcagtagacattcgaacatactctgcagcaaaaataacttccctttttgaactggatacctttcttttcattctcaaccccaataattataacggattgagtatttaacaatataattaattactgcaactcatttttttaatgatgttaatggctattgatatttgtcaagtaaggtttaaatgatttaatcgaattaaaactttttgaattattaaatgtctacatgctgctgttcccacatttaataattcaatgatcattactttttaggcagggtacgagcatactttgattaatatctaaccaaagaatacttgagcataataatcatcactccagtctgcttttttgagtttatttctttggctgggagcaccatagtcacattgtttgaccatattcaatacgatactccggaataacgccagattttcaatcgtttcatccaacaatacctaaatcatcctctttaaaaaccacatcaaggagataatattggctattttcaatccgccaatgttggcgaatgtagtgtcctaataacttatgccgggggagacagtgaactgatataatactgattgtaataattaatatattcaatataataattgattgttaagctagatcgtcttctatcaacttgagaattttcctaaggattcatatgagtacattacttgaattaaccgaagagaattttgacagtgttgtcagtgccaaaggggtgagtgttgtcagattctgggcaccgtggtgtgagccgtgtcgtatggttgcgccgacgtttaagcagttatcaattgatatgaaagataaggccactttcggcgaaattgatattgaacaattcaatactatcgctatgaagtacggtatccgcggtataccaacaacgtacatttataaagatggaaaacctgttgattctatagttggggtcgcttcattatcacaatttaagaatatggttgctcgaaatctgtagttcaggtttcgccatttaaaaacctgccttgcctatattatgaaatatcaatcaaaaggtaaggcagttatcagtaccgtgatattttctaattgaaattaaatgacagtctctaatatttaatatataggatttttaatctcatccatataatatatttggttctataattattggagaatgttatgcaactttcagatttaggaaatagaatctgtattatggggccttcgaatagcggtaaatcaacacttgctaatgcaatctccaaaaaatataatttgaatgtcactcacttggatcaacttttccatttgccgaatacagattggcaggaacgctctgccgatgaatttatctcgttgcatgatatggcaattaaagaagaaagttgggttattgatggaaactatgcaagatgcctgccgcaacggttatccagagcaactgagtttattttattagatgtttcaacgttatcaagcctgctatgttatataaacaggacgtcattccagcgtaaacgatatggtggattggaaggtaatcaagactcaatcaaatgggaaatgcttcaccacatcactgttgttacaccaaaaaaccgcaaacgctatgctgcaatgtttgaaaaattggccataccaaaaataaaactaagttctattaaagagatgaaagaacaatttaataaatgggagctattttaaatagaaactgatataaattagttttcattatatttatatctaaaataaccagatagattaatttattttagatataaaattcataatgttattacttttatgaattattttatgtccagttaactccctattctatatagcttatttttggttttttcttgtgcgccaaacaaactttaggtttgtttatttagaatttacctatttaaatcttattcattctatatttaaaatccaccgttaagcaggttgtggacttcttatgaaataacatttttgaatagaataagtaataaaatatagccagataactaaaggataaatccgagtaattagcataacaaaaaataaggggataataatgaagaggcaaaaattgatgaagcagatcgttatcgccattttgcttggcgtgataacgggatggggatttaatcattatcttgaagccagtcaggcaaaagaaattgcctcttatatcaacattattaccgatgtttttctgcgcctgataaaaatgattattgggccgcttatattttccacgattgttgccggattaatgtcaattggagggtcatcatctgttggacggatcactatcaaagcaatgatatggtttattgttgctggcttgatttcgattagcattggcactctgatagctaatttgttccagccaggagtcgggctgaatattgcaattccacaacatggaaatatcgatacgagtctgaatgctggtgaattttccctgaaaaactttatcagccatatatttcccagtagttttgtggaagctatggcaaataatgaaatcttacagatccttattttttctctcttttttggttcagcattgtcatatatttgccggaatagtcagaaaacaagccctatagtaactatgattgaagatctggggcgcatcatgttccgcatcacagattatgttatgtcattggctccaattgcggtatttgctgccattgcctctgcaattactattgaagggatggggttgctttatgagtatggagaattaattgctctcttttatctggggatatttttactttggtgcattttactgaccgttgggtttcttttcctcggcaaagatatttttttgctgatgcagcttatcagagagcctaccatactggcttttgccactgcgagtagcgaatctgcctatccaaagaccatgaatgcactgaactgctttggtgtaccgaaaaaaatttccagtttcgtattgcctctgggttactcatttaaccttgatggctcaatgatgtaccaatcctttgccattctttttattgcgcaggcttacaatattgatttgagtattacagaacagatcctgattatgttaacgttgatggttaccagcaaaggcatggctggcgtagcccgtgcttctgtagtagttattgccgccactctaccgatgttcaaactgcctgaagcgggtatattattgatccttgctattgaccagctccttgatatgggacgcacagccactaatgtggtgggtaactgcattgctacctcagtcattgctaaattggagggaaagcggagtagttctgaatctgaagtgcaggaaaaagagtttgtcggacatgatagttaaatgagtggggaaatttctgtatttttcgtctgtacatatgattgatatggttagtgttaggatatttttaataaaattagatttatcactaaatagattcgctattttttgtattagatagaaaaaatataataaatagagctaaatttattactttaatttagagggatgctttaccaatttaattaattggtactgaaataattaattaagactataacattataaacgtgttgtagaagatggaacatacgttatactgttccatagttgggaacatggttaccataatcaagagattaaagcacaagggaatgaaaaaattcttcttaaataatgatagtagtgggttggaacaaaaattagttcttcgaataaaaaaccgacttacaattatcgattctgccagttgtattgaagctattaattttcttagttatgatcttcatgaattaaaaggtaatcgtaaaaatatctggtcaatcaaagtatcaggaaattggcgtatcacatttaaatttataaacggtgatgctgaaatacatcgaaagtgctcctgtaaccgcacctccgagaatgcagcttggtagaactcttaccggatctttcgccgcaaacggaatcgctccctccgagataaaacatagccccagtaccagtgctgcttttccgccttcgcgttcactttggtcaaatttagttctcgcaatcactgttgccagccacatggctaatggtggaaccattcccgctgccataattgcggccatcgggccgtagctctgggcactcaataatcccactccaaaggtataagcggctttattcactggcccacccatgtcggtgcacatcattccgcccagtattgcgccgaggatcacggcgttggtggttcccatcgatttcagccagtgagtcagccattccataatcgctgaaacgggtttaccaacaacgtaaatcatgattaatcctgtcgccagtgttgcgaccaacggaataatcaggattggttttaatgcttccatgctttgtggtaggcgaagtctggttgtcagggatttggcaacatagccagcaagaaagcctgcaatgatcccgccgaggaagcctgctccggtactaacggcgagcattccgccgacaagtccgggagccaatcccgtgcgccctgcgatggagtaggctatgtaaccagcgagcacgggaaccataagggcaagtgcggatccgccgccgatttgcatcagagatgcagccagtgtatccggctctttaaacgcttcgatgccgaagacaaatgataatgcgatgcacaggccacccgcgacgaccatgggtaacatgtaggaaacaccggtcatcaggtgctgataaatgctggtatttgcctgattgttcctactggggacagaagttgtgctagtcgcggtataaatctcagctttggttagggcattctccaactcgctggcagtttttttcagggctgctcccgtcgaggtacggtaaaggcgtttgccggagaaaggggtgagttcgacctcaatatctgctgcgacaatcacgagatctgctgctgctatttcggcattagtgagagagttttcgcttcccacggagcctcgggtttcgactttgatttgccagccgcgtttttgtgcttgtgtttccagtgctttggctgccataaaggtatgggcgacaccggtcgggcaggcggtaatggcaacgatgttgacaggcttttgctgaaccttgctttctgctgtatcagcagtgtgttgctgatgataaacactcgcttctgtttgggctttgtggagaaatacctcgggttcgctgattatctgttctgcggagccaataaagattttctttccatgcaacttattgtcaggcagatttaagctatctggtacagattctccgatgatgatcacaagttcagccgtacttagatcgtcagtcagggtaaggccatgttgggctatgacattctccagtgtttgtctggcgaggtaggcgcgtgcttgtccttgtttctcattactaataatcagtatgttcatggcgttctcatcttattgttgttggtttttcgatggctgtttttttcgattgtttttttaatgaaatgagttccacttttgtcattaagcaggcgagttgctggcggtcgatattgccgacgttactttggctgacggtcatggcagaaatggcggtagcaaggcgcaatgtatgttcgcagggttgccccatcatcaggccgtaaatcaggccacccatcatggcatcaccggcaccgacggtactgacaatttcacagtgcggtggtctggcgtgccagactccggctgagttaaccagaatagctccttcctcgcctaatgagacgatgacatgtgagatcccctccgcacgtagctgctgagcagcgccgatgatatcttcctgagtcagtaaaggtctgcctgcccagatttccagttcatggcggttcggtttaaccatccacggttgtgctttgattccggcagtgaaggcttcccggctactatcgaacacgacacacatgcaagcttcgcgcagttgctgcatccagtcagtgaagtcatccggttcaacgcctgccggcaagctgccactgacgcacaccatgttgaactcccgcagccatgtgagggagtttttggcaaagctctgccagtcctctttattgatattgaatcctgaaaagttgaaatcggtcacaaggccgttctgttcggtgagtttgacgttgatacgcgtccggccttctactatctgaaaccggtcagtgatgcccagttctgcgaaagttttttgaaagttactctggttctctttaccgagaaaaccacctaccgtaacgtcaattccgagtgttttgagaattttcgcaacgttgatgcctttacctgccggatataatcccgcagtttggatccgattaacttcaccggtttttatacctccggttaacccgaccagatcgtaggcaggattgagggtgatggtggctactcttttattcattccatgcttgttcatgcgatatcttcacccagattgttgttaataagatttttgatggcgtccagggcctctttagcatccgggccggaagcggtaaaacggatacggtctccccgtttaatgcccaaacctgcaaccagcatcagtttgcggccatcaacgggaataatagtgtctccatccagatggatgatggtaatgcggctgctgaattgtttgatggtattaaccagcagtgcactggggcgggtatgtagcccgtgttcattgggcaggataaaatctgcggtcagggtattttttgcttgtgatgtagcctgttgtgcggctttagtggtcagtaatgtaatgagcgctgaatgatcctgagcccgttgcagttgctcaccttttccttgctgaatcaggttgtttagattagttagcaggctatgcagctgatcgccggcataggcaatggtgatgagcaagctgaccggtttttcatcaagattatcggtactaatactgaaggaagcttttggacgggcgatggcaacggcattacgtaagctaccctgtgaactatcactcaaccagatcccttgccccagatgtatgggggatctagcgaggatatcggcaataaatgcggcattcaccgaactggttttttgcaggcgagcgagattcagcgcctgcaaggtttccagatctctggcgtaaatatccagtgtgattgtggaggcatccaatagatagggcggttgtgggttcatgagtaagcggtagagttcatctgccgaggtggtttttgccatctggctggctcgattttcatcactgagaatggggagtaactgatgtagcagcttcagatgctcgtcagattttgctgcaatgccgataacgatgtaggcagtctggttatcaccccagtcaacaccatctgggaattgcatcacctgtacacccgtatgaagtacgttgccgcgtgtggcatgagtaccatgcgggatagcaataccgttacccagataggttgaagactgtgtttcacgctccagcatcccatcaacatactctttactgacatatccggcggtggttaaaacatcggcaacctgctgaattgcatcttctttattgtcagcatgtgctgccagatggatatttcgcaatgttaggtgaaacattttacctccctatatacacttcgtctttcaagttgcctctttgttggctacgctcgctcaccccagtcaccgtttttataaaaatacggttatctatgctcccggggatgaactcccttgccgccgcgatgcatcttgaaatccattgtgtataaaattgattgaaacgattcagttttttaggggtgaaaaaccgacgttgaataaattcacgttattttttattaagtagatggatggttttatttttctacgttgaagttacattaatcctaacgctaggaaatagtatagcaattgatataatgtgatttttattagtaactatttttcataattattaacgagttgtttattgattttttattattcagtaatatttgctaatcacctgtattgtcaggaaagtatcgttaaatagttaatgtgtaaagtaacgttttatattatttcctgaaagagtgatagcgatcttaattattttaatttcagttaaattaaatgattataaagttcattattagaatacttaactaccacctactgaagtaggtgggttagcgcacttcggtgctgacgactgaaagtcgtcgaaccacgcacctcgtaaacgcgcgtaggtcaaaacattaaagtcaaagtcaccgtctaaagacggtggttttaacctgtcatatggaaaaataaaaaatcatatgaatagattaattaattatcttatcaaagaaatattctatttatgaatgtgaattcttggtctgaaaaaggtttgagtatgttgtattggaaagaaaggcggtgtactgtctttgctgactgaaaaatagtcaacaaaagcgtgttacagactggagaaatccggttcaaaatgacctgaaatgcgaacatacatgaaatgttaataaaaaatagcatattgccatatttcggctttcaatttcggcgtactgcgtttattatgcgcgcttcgtaatttcaaccggcgccactggctttgagcttcagcggagaaataatgcttcctgttagctgacacagtcttttcccgtggcggttctatctgcattattccaagggatagatgatagcataaatgactgagaatacctctctgataccactcgttgaattaaagtccttaagtaaaggcttcgacggcaagcaagttatttcacagctcgatctgacaatcaatgatggcgagtttctgaccatccttggtccatccggttgtggtaaaaccacagtacttcgtctgatcgccgggctggaagatgctgatagcggcaaaattttattggaagggctggatattactgatatcccggccgagaaccgtcatgttaatacggttttccaaagttatgccctgttccctcacatgaccgtatttgaaaacgttgcctttggactgcgtatgcagaaaacaccggaaaaagagattgctccgcgtgttgaagaagcattgcgtatggtacagcttgaagagtttgcccaacgtaagcccgcacagctttccggtggtcaacagcaacgtgtggcgatagcccgtgcggttgtgaataaacccaaagttcttctgctggatgagtcactgtcagcgctcgattataagctgcgtaagcagatgcagaatgagctgaaagcgctccagcgtaaactcggtattacttttattttcgtcacgcatgatcaggaagaagcgctggtcatgtctgaccgcatcgtggttatgcgcgatgggcgtatcgaacaggatggttctccgcgagagatctacgaagagcctaagaatctgtttgttgcccgctttatcggcgaaattaatatctttgacgccaaagtattacaccgtattgatgatcagcggatacgtgccgatgtggaaggccacgagtgtgacattttcaccgatctgcccgtaaccgccggacaaacattgaaggtgttgttgcgcccggaagatctgcgggtagaagagatcaataatggtgagcaggtatcgggcctgattggttatgttcgcgaacgtaactataagggaatgacgctggattccgtggtcgaaatggaaaacggcaaaatggtgatggtaagtgaattctttaacgaagatgatccggatgttgaccattccctgaaccagaagatcgcagtcacttgggtagaaagctgggaggttgtgctggtcgatgaagaagtcgcgtaaactattccagaacatcgtcattacaggcattgtatcctggctgatgttgtttgtctttctgccgaatctgatgattatcggtaccagctttctgacgcgtgatgatgccaatctggtacagatggtattctctctggacaactatagccgcctgttcgacccactatatgcagaagtgttaatacactcgctgaatatggcggttattgcaacgctgtgttgtctggttatcggttatccgtttgccttttttctggcgcggatgccgaaaaaactgcgtccactgatgctgttcctgcttattctgccattctggacaaactcgctaatccgtatttatggattgaagatgtttctcagcacccgtggctacatgaatgattttctgttgtggacagggattattgagaagccgctgcgcctgatgtataccccggaagcagtggtgttagggctggtttatattctgttgccatttatggtgatgcctctttattcgagtattgaaaagttggataaaccctgtctggaagccgctcgcgatttgggagcagggaagttgcagacttttatccgtatcatcattccactgacgatgccgggtattgttgctggctgtcttttagttctgctgccggcaatggggctgttctatgtctctgatctgatgggtggtgcgaaaaacctgctgattggtaacgtcattaaaagtcagttcctcaatattcgcgactggccgtttggtgcggcaaccagtatttgtctgacgttggtaatgggtatcatctgtgggtctactatcgtgcggctaagctgctgaacaagaaggtggagctggaatgatcggacgcctgttgcgcggtggcttcatgaccatcgtttacgcttacctgtatatcccgattattattctgctggtaagttcgtttaacaaatcacgctttggtatcaactggcagggttttacaaccgaataggtacagtctgttatttaataacgacagtctgctgcaagcagcagggcattctctgacaatggctgtagtctccgcaacatttgctacattgattggttcattaacggcagttgcgctgtatcgttattcgttccgtggcaaaaaatttgtcagtgggatgctgtttgtggtgatgatgtcaccggatattgtgatggcgatttcactgctggtgctgtttatgttgctgggagtttcactgggcttctggtcactgttattttcgcacatcactttttgtctgccgtttgtcgtagtgacagtctattcccgtctgaaagattttgatgtcaaaatgctggaagcggcccgtgatttgggagcaagtgagttaacgattctgcgtaagattatcctgccactggcgatgccggcagtgatggcgggatggttactgagctttaccctgtccatggatgatgtcgttgtttcttcatttgtgactgggccgagttatgaaatcctgccacttaaaatttactcaatggtgaaagtaggagtttcaccggaagtgaatgcattagctgctattttgttggctttgtcactggtattggtactgattagccaatttgtgatgcgtgatcgcacgggtaagtcttagaggcaatctaaattaagcgcagtcagattgggctgcgcttttctaagcgttgagcttcggttcgaaatattctcggagctttactgccagctgtttaggtataaagtcccctttagccgctttcacggttaactccactaattctgggtggtcataaacttctaccccattacgtttcagaaacagcattgtggtgttcagtgctgcacgcttattaccatccgtaaaaatatggccacgagcgatagcaagccaatatgttgcagcgagttcgtaaatatcggtgatgccttcgtaaaattctcgattcattacccggctgacaattgcatcagccctgcctgaatcgctcattccgggtactcctgcgtagcgacgtaaaaggtaatcatgaagagcaatgacttcatctggagtgacgtgcctaatcatcgatctgttaattctctgtttgatttatcgaatagcccgacgatatcagcaaattcggcatccaattttgctttttgaagtgcttcaaattcttttttactaataattacagccggttctctgccacgtcgagtgatctccactggttgaccagctacagctttatcgataacagcagctaagttttcacgagtttgtgaaatagtaaatgtatccatgatgttccttcttaactttatatgtatggtttttatttattgtacaactgaatccatctaattgtacaattcacagacttacacatgataagcggctttaccccatgtaagggcgcttttataatagccgttttttggggtaggtttatatcgagcctgctgtatatgggaatgacgcgataataacgcatcaactgcggggaaacactacatgaaaaacagcatgaaaaagtggttctatctgttagccgccgggatgatggcattaagcattggttcggtaaatgctgctgccgagaatgatggcaagacactttatttttacaactggactgaatacgttccgcctggcttgctcaaccagttcactaaagaaaccggaatcaaggtgatttattccacctatgaatccaatgagagcatgtacactaagctgaaaacttataaagacggtgcttatgatttggttgtgccctccacttactttgtctccaagatgagcaaagaagggatgctgcaaaaaatcgataccagtaagctcaagaatttccataatcttgatcctaatctactgcataagtcgtttgacccgaaaaacgaatattccattccttatatttggggtgcgacagcgattggtgttaacagcgataatatcgatccaaaaacgctgacttcttgggctgagttctggaagcctgagtacaaaaacagtttggtattgacggatgatgcccgtgaagtctttcagatggcgttgctgaagctggggtattccggcaatacgaccgatccgaaagaaattgaggcagcgtatcaggaactgagaaagttgatgccaaatgtactggcattcaattcagataaccctgctaatccatttatggaaggtgaagttgatgtcggcatgatgtggacaggttctgcttatgttgcccgtcaggcgggaacgcctatcgatattatctggccgaaagaaggcggaattttctggatggatagtctggctattccggaaaatgccaaaaatgtcgaaggtgcgatgaagctgattgatttcctgctgcgtccagagattgcggcccaagttgcagaaaccatcggttatccgacaccgaatctggctgcgaaaaaattattgccagcttctgtatcaggggataaatcactgtatcctgatgaatcggtgatccagaaaggggaatggcagagcgatgttggtaatgccaatgtcctgtatgaagactatttccagaaactgaaagcaggccagtaattcagtattaaatttagctagaagggagcatttgactcccttttttaatatgtgaatccaagtattaatgttataaaaagaggtattcaaattgagatgccaaaataaagatcattgggacagttggtttgatgatgaaaatcctacacttgattttatggttgataggtcgcagccagatgagcaaaacagagaagagttcaattaagcaaggcttaaaatttaacaattagattaatgaatcctctttacatcctgaatttctacaattagtatacccagctcaaatcttcctgaattatgctgctgcaggaaaaacaagacttcttcccactcaaaacggaagaagcgattttttgtttttctgggtagcttacatgtctacattaaatcgtttacaaaaacgtctttcccgtcagggaattgaaacttattacgaaaacaatacctatcatttcaatcaaaatcaggtagaagccaaagtcctgttaccggaatctttgccactggaagaaaaagctgtacagcaattgcttgatttagctgcggttagggttcccggcagtgatgcaaaagtttgtcaggctcgagcaacgccagattttcatcccggcacgacagcgcctgttggtagtgttgtggcaaccacagaagatttagtgatccctgctgcaattggtacggatattaattgtggtatgcgtctactgacaaccgggttgagctatgaagaagcaaacagccagaaagaagcattggttcagcagctaaaaaacgtcttactactggatcaacgcaatgtccctgttactccgcaatcatttggtgccttatttgatgagggattgtctgcgtggttgcaggaattaccccgacaaggaatttggcagcaggctgatttcagccggatgtatgctgaattaagcgcagtattgagtacacatgcagtaaaagctcatagtcgatatgctccggaagcgttttttgaacatcgggaaattatccggcccgctagcctgggaacggttggttctggtaatcactttgttgaattgcagatcgtggatactattttcgacagacatgcggcttatgctgctggtctgcgtgagggcgatatattgataatgatccataccggctcacgggatgttgggttctatgttggtcagcgctggtctgataaagcgaaggcactttggcctgcgacagaaaaatatccggcttccggtctgtttggtctgacggcggagcatgctcaggaatacttattggcgatgggtgttgctgcacgttatgcgtgggcgaatcgtattgtgttaactgaattagtacgttcgaaatggcaaaaggtattcgaacaggataaaagccgtctgcttgtcgatctctcacataatattattttccctgaacagggaatgaaccttcaccgtaaaggtgcaactccggcacgagccggagaattggcattaattcccggttcaatgggggattattcttatctcgtcatgggaaaaggtcattctgactggttatggtcatgctcacatggtgccggtcgttcagtacgccgtcaggagatgcgtagtaaggctctaaaaccacaagaaaatcgcggcttgccgtggcaatgcattactctgaaaagtgagcgtttacgggaagaggcaccttctgcttataaacccattacacctgtcatcgaagttcaggaacaagctggattaattaaatcagtggcaagagtcaggccatggcttacgtttaaggcctgatattagcgaaggtttaaaggctggttttgaccagccttaattaccagagaaacatctttaattattctttaacatattcattcaaataaaaatcaatatttgatgatttttaataattaattgaagaacaaatttcatatgaaattgtgaattcatggtcattttatttttttcttattttaagaaaataaatgaatttatctggttttaataaatattaaatagccattgaatttttataaatcaatgaatcaatcctctttgtttttccagtcagaaacaggcattggattactatataattaaacttgattttttatttttcccttacgttgaataaatgttttcatagtctattaagttgtaaccattatttatgttaagtttgtaatcgcatcattcaaagctatactccaaactgcaagagttgatttcgggttaaagtacttctaaccagaggatttatatatgaagaacttgaagttatcagttgcggcattactggtgttgttttcaagtgcagtacttgcagcaccagcagtaccaacagaacctgtttctaagcctgtgatacccgtggaaaaaagtataaaatcggtaaaaaataaaaccggttcattagaaaaacaagtgcagaaaaacagtaagaaatcaacaaagaaaaggaaagcgacttcaacaaaagcggtgaataccgcactttgtaaagacggaacatatagtaagagcaaatcacgcaaaggtgcatgctctcgtcatggcggggttgccaagtggttgtagttttccgttgatttcttatcatatccaattagggagcccaggctccctaattattttctaattgatatcattttaattggtttaaaagaatatattgactactaaagaaaatagtattttaccaatattagtaatgggaacctctaaaaactctcaatacaaaaaataagatcaattttgaactcaccaataactgaccttattgtgtatgactttttcttgcttgttcaggggaaaaaaacaaacgcatcactttttcatcacatctcgaaattaaaaagcatgaatacccgattttccgaaataaaccaaacgttgcaaatcatagcaggttgccttcatcgtcatcgcaaaattggctcgcagctggcctatcgtccgaataattttttcacccatctgagagagtgagccaaagatatgttctacgcgtgcccgagttttcgctattttcttatttcggcctttttggcagtgtgataagggcttattacgtgccgcttttctctgaatatgcacacgatagccctgctccttcagcacacgttcacgcttctggctggcataccctttatccgcataaatgtcccgacgggtatttgacctgtccaaacagcttcaaaaaactggctatcatggacagccgcggttcctgtcgcga

SEQ ID NO: 2688 - DNA, 17942 bp, Xenorhabdus sp.; identical to SEQ ID NO: 2687
  CDS (13656)..(14720)

SEQ ID NO: 2689 - DNA, 17942 bp, Xenorhabdus sp.; identical to SEQ ID NO: 2687
  CDS (12153)..(12794)

SEQ ID NO: 2690 - DNA, 17942 bp, Xenorhabdus sp.; identical to SEQ ID NO: 2687
  CDS (11191)..(11994)

SEQ ID NO: 2691 - DNA, 17942 bp, Xenorhabdus sp.; identical to SEQ ID NO: 2687
  CDS (10071)..(11174)

SEQ ID NO: 2692 - DNA, 17942 bp, Xenorhabdus sp.; identical to SEQ ID NO: 2687
  CDS (3465)..(4724)

SEQ ID NO: 2693 - DNA, 17942 bp, Xenorhabdus sp.; identical to SEQ ID NO: 2687
  CDS (2591)..(3079)

SEQ ID NO: 2694 - DNA, 17942 bp, Xenorhabdus sp.; identical to SEQ ID NO: 2687
  CDS (2049)..(2369)

SEQ ID NO: 2695 - DNA, 16184 bp, Xenorhabdus sp.
  CDS (1742)..(2932)
ttatattgaataaaaggagttagtaagaaaggcagttattattttttataaaagccatctcaaaaaaggatggctttttctttattagagcattcatagataggctgaatcttcaggctatgtagatatgaattccatcagcccgttacaaaaaattaattggcttctgtattttgaaaataaaattaattttatttgtcgttattttgttgttcaattgtaattaaatgtgtggctttcaagctagatatagaatcacagagaatagtgtatagccatatctggtagtatgactgttgtaagcagtaaccatgaggacattgtcgctcaatcgtaatcatcatatctaaagatatgagaatgtggtttatacaaataccttcggttttggattagctgacaggagtatcttttagctaggaattgatgatggatataggtagattgctacaaatagggtaaaaaatggcaggacaaaatatactaactatcttattgcccatatttttaattagtatggtgatagaagcactggtgttgaatctattccgacgacgttctcaattgaatatcatagagagtttggtgaatctttcattaggcgcaactaatttagtagccggggtgcttttcacgggcttacatttatcgatctattattatgtgcaacagcattgggcgttgatacccccattaccaaatactttcctacagatactggcgactttcatattctacgattttttctactatcttaatcactgggctcaccaccgttgtaacctgctatgggctaatcaccttgtgcaccatagtggacagcactttaatcttagcactgctgtgcgcttaggcttttttggaaattttacggtatgggtgttttttctccccatggcctttctgggcatcaaattggaacattaccttctggctatcgctgcacagttggtctaccagttctttatacacacaacatttattcgcgaattgggatttctagaaaagatttttgtcacaccttctcagcatcgggtacatcatgccagtaattcgctctatatagacaaaaatttcggctgctttttagttatctgggacagaatatttggaacctatcaacgagagttatcagaagagccaatacgttatggcatcaccacaccaatagcccagcctcattcgttgggatatctgaatagcttcatgtatttggcatgtttgcggcaggcaatgaaccagcccaacctgaaatctgttttgagagtattatttggttcacctaaatatctgaattttaaaaatgaaattatcgcttcgataaatccaaatccagcaatgtctactacattgttaatgctggtatctccaacactcattagcttctatatcattttcaatgcaaatcaactcaatactattgacgtatggctagtgccgttgatcttcttgttaaccaattgcctgtactccagccgtactgagcacaatcatttatcgttagtcactttgttcataaaggctttagaagggatattcatcgtttatttgctaacaaattattccaatttacagccgttactttgggtaagtctggctctcaatattggaacacttatcttcattgttactttttatccttatgcaaggaaaaaacatcatgaataaattgcgccttactgatccccaaatagataaccatcatcgtgatatcacgcgatccagcgattatctacaaaacatggctgagcgttacgataattttgtttcagatggcaaaatggatatgattggcagagtatttcatagaataccttgtaaatatgtttctgttagctacaaccctgtcagcgctgatagcacacatatacgtgaagttctgcatttaggttcctataactattctggactcaatggtcatcaaaagattatcgaatccagtatcaatgcaattcatcaatacggaactacatccagtggtgtacgccttctcaatggtactagtgacctacatcttgaaatggaacaacggttggctaaattccttggtgtggaagaagtcattactttcagctctggattttcagcgaatctcgcagccctctccacgctatgtcgtgaaggtgacatagttttcagtgatatgcttaaccatcaatctatcgttgatggtctgaaactaagtggtgcaacgacccggatttaccagcatgcttctctgaaaagtcttgagaataagcttagccaaacttcatttcaagcacgtaaatttattatcactgacggtgtgttcagtatggatggtgacttggcacccttgcccgggattgtcgacttagcacgaaaatataatgcgttcgtcattgttgatgatgctcatggtactgggcatattggaccgaacggccggggaagttgtgcttattttggaataacggatcaggttgatgttatcaccggtagtttgagcaaaggcttgcctggcgttggcggatttattgctaccaacaagaaaacaggaaatattatccgtattgctgcaaatccttacatttattctgcttcgttacctcccgctgtactcgcttcaatcatcagcgccatcgacattcttgagagttcacctcagttgactctggagttgcaagccaaggctgagtatttccgtcagaaattacgcgatgcaggatttaatatattgaacagcgaaacggccattgtgccattgattacgggggatgagcattgctgtttcgctatggcccgtatgcttcatgagaaaggcatatacgttaatcctgtgacttatcctgctgtaagtaagacacgggcacggattcggattaatttgagcgcaaacctgaacaacgaagagttggattatagcattcgtactttcatccaaattggtcaaaagctggctttaatataaccttatatgggatttgcagttatggaaataagctgtaagtgggttgaaagtgtcagtcatttttctcgggaggactgggaacactgctatgatccagaaaatgtgattacttcatattcattgcaactcgcgttagaacgttctgaacttgtcgaaagtttttactatcttagcctttatcgtaacgaaaaactgacagctattattagttgcttcagtatgtattattccctaactgatcttgcctctccgaaatggcaggattgggttgcaaccttgcgcaagatatttcccggctttttgaaaccaaggatttttgtcgtcggtagtccgattgcaacttgcagtcacatgctaggcatttccctaccaccggatcatcccgattacccccgattgttacaagctatggaactagagattgataggaaagtatctgaactacaaattaaattgcagtgtatcaaagagtttgacggatatgttcatcaacgcttgcagcaagtcttacagagcaaatttgtcgtctgccgtagccctgacacgacttatgtttatactgatcaagttggaggcttagaatacatcaataatatgctaaaacgttataggaatgtattgagaagacgcaagcggaagtttgatgctactggtctacgttggattatggttgatgactttagtgcttacgttgacaaacttagtagcttatatcgtaatgtattgcaacgtagccataccaagtttgaatgtttaacacctgaatttttccatgctgtgaatgaagaacttggcgatcaagcacaagtattgttgtgtctggatgatgattgtattgtcgctttcgaattattcctcaagggcaaaaacctacacccgttatacttaggtattgactacagctactgcgatgccagtgcactctatttcaattgcttatatcgagttattgaagaagctcaaaatcaacaatatccatatattgaacttggccagacaagctacgacgcgaaatttagtgtaggtgctatatcatccaagctgtacttttatataaagcattctaacgccttgtataattatcttttatatcggttcagaaaactgatatttcctgcaccaaaaatcccagaacagcgaaaagtgttcaaattgaatgaagattaccttgatgccctaaaatcttcaggagcactaaaacatgttgattgatgaatttcgtatccataagtttcatattgaagtttataattctatcgaagatattgatgcctatatatggaatgaaaccttgtctcaagggcatccatttaaaacgcatagttttatgagcgtctgtgaacaaacgcttcctcatcgtgaatatcgatatttccaagtcttcgcttccgatttgaggcattccttacagggactgttctttgcgacacaagaatccattgatctgatttctgatcctcactctgcattacgatcgagattacagcgattttttccgaagtttggttgcattaccgcagccatgcttggcagttatgaaaccagtggctgccattggtggttttttcatgaaattattcctcagcaacgtatcgacataatcaatcattctttagctttaagttttccccgtgcttttgtcaggatcattcgtgatgtggagcataaagagacggattatgctgcattacattcacagttgttagcacagggcttcaatccggcaatgaattatcctttggcgtttgtccagctccaaggcagatcatgggaacaacatagccaaaatctgaaagccaattgccgtaaggtgcttaaccgaataaagtcacagtttcgccaatcaggatggcgtattgttcactatcatgaacaaactatggagcttgaggggatttatgagcaatacctcaatactcaccaccgggcaagtgaatataagcgtgaggcgttacctttgagcttttttgagcagatacaaaaaaaatgccaagtcgtagtatccgtactttatgataaacaggatcaagtacgctcatttatttttagtggtataagtgaaagtattattaacccttttgtttttggccgtaattatcaagaagaaagtgaagtaaattcctacgatattttgcatatggatctgatccagagattcagtcattttcagactaaaattatcgaccttgggattaccaattacttcgttaaacaaaatcttggtgcatgcctaatacgtaatgatatttatatgaagtttaggaatcctctgtttaatgcattatttggtcgtattcttgccaaaaaatttgatgttactcagccaaaggaacgacgtgttttcaaaaatgacgataaacattaattctgatactcacgaaaaatgcccatggcaaacacgagttgattatttatctcaaaaagtactcgtgttacagcaacgtctgaaatacgtggaattaagtcggttcatcatatttattagcctgatcgtattagtttattatttatggcaacaaccagagttgttattttattcatggctattggtaactggtggtatattgttatttgttggcttagtcttcttgcatcatcacatacaggaacaattacagaaccatcttactctggttacactaaatacagaaagcttagagcgcattcatcgaaatttcccagcgctggcaccttgcccgatacatgttgctgatcatttcagtgaacaggatcgtgctctcaacttatatggaacagcctctttagggcaactgctatttaatctgtcgacaagtctcggtgattccaagcttgccgtatggataacgcgcgggtgtcctatatcgcaactttcacagcatcaacaagctattaaagaattggcaccacaattagacttacgccagaaattgtacgcttgcgcgagaaagccagaccgtacagggggaggatattatctggagaaatttcatgactgggcgacaagcacaactttcccttatatcactgtcaggctaaaacgagtggggcaaatgctaactctgctttcattagtttgtattacttgtgctgtaactcgctttgctcctggctggattgttatccctcctgtggctatgaatatcatatttcttatgttacgggggaatcaatttaagcaagcacttaaccgtgctgaccttcaatctaatgccctgaatagtctgtcgaagatagtcagaaatattaattctggcgagtattacgcacagactttacgcaatattagtgaattactacaaaacccttctgaacgaccagagctggcattacgtaaattgtcaaccatcatccattattcacacttacgctttaatgccttgccgtatcttgtcctacaatgcacgttactctgggactttcatatcaccctgaatcttcagggctggcataagcagtatgcacagcatgtcccccgttggctggaagctatctcattatttgaggcactaagtgctatggcaaatctgagccatgaaaatcaaagttggcactttccaacaatgagcgacgagcgcaaacttcatgcaaagcaagccattcatcctctattacctgcacagcaggcaattgctaacgatatcttacttattcccggccaagtgaccattattacgggttctaatatgtcggggaaaaccacttatatgcgtacacttggtctcaacctgaaacttgccatggcaggcgggcctgtagcctgttctgaactgatatttcatccttgtgaattatttaccatattctcagccgctgattctctacatcaaggattgtcatattttatgagcgaggttttgcagattaaagaattaataacaagggtcgaacaaagcgggttacaacccgtctatctattagatgaacttctaaagggaacaaatgaacgggagcgtaatatggcaatcattgccatattaaaaaaactttgtgctcaacaggccatgggaatgataaccacccacagtaccacattagcgactgattcggatttacagcctatctcccgtaacatttattttgaagaaactatcgatgatcaatcaccagataaaatattcttcagttatcgcctcaaggaaggaatatcacatcagacaaatgccattaaactattccgtatgcttggtgtggatctgacatgaataaattgcacagcgcaaatcttcaacactgcccagccactccagattatgcttctcaggtaatcaatctgttgggcaatatatctactgataccctgaattttatttatggagctgaggagttacgttcccgatatctaataaaagagtttcgtggtgaaaaaggttattttagttactcccaacatcgtttgatgttatctgatgatcgatgtattggggtgatcgcagcctatgatcgtagtgaaattaatcggttaaattggggaacactgagttctgttttttcattttatcctttcccccaagccatcaagtgcttgtatagattacttgcttccacatcagctacgcccaagccggaaggtaattcctgttttctctacaacctttctgtcgatccggaattttcccgtcaaggtattggttcccaactattggaacaggaaattatccgggctcgtgaccgaaaatacaaaatgattgagctggacgttgctactactaaccagcgtgcgatcagcctctatcgacaccatggttttttagtaaaacaacagattgataatccccgtattcttaacggtttttgctttaatagtcacttacggatgtttttcgaactacaataattaattgtgttttaactgatgtcatgtcagtagcgaatattcggcttaaagataagtacaatttctggatttaagatatcaccagataaaaaaacagcgcccttactgattggatagccaactttgggggcgctgttttttattcgcttaaattacttggtaatttttgcgtgcatttcctgtacggaaatgacctgctcagtcgggtcagcactgagcgccatggtggttgcgaaaccgccattcagggtggtgtcataatgcactttatattgcagtgcgctgcgacgaagcagtttagaatcttcaatcgcctgacggcccgcggtagtattgacaatgtagtcatattcaccgtttttgattctgtcctgaatgtgagggcggccttcatgcactttgtttaccagacgtgggttgattcctgcttcacccaagacaaccgcagtaccatgagttgcatccagttcaaagccctgcttaactaactgagccgccaaatcaacaacacgctctttatcgccttcacgtactgacagcagtgcgcggccttttttacccatgatggagttactgcccagcattgccttggagaaagcttcagcaaaggtacggccaacacccatgacttcaccggtagagcgcatttctggccccagaatcgggtcaactcccgggaatttattgaatggtaatacgacttctttcacggagtagtaaggtggaatgatttccttggttacaccctgtgactgtaaggactgcccagccattacgcgtgcagcgactttcgccagcggcatgcctgttgctttggaaacgaatggcacagtacgtgctgcacgtgggttcacttcgatcagatagacttcgttgtttttcacagcaaactgaacgttcatcaaaccacggacgcgtaattcaaaggccagtttctcaacctgattacgcatcacatcctgaatttccttgctcagggtataggcaggcaaggagcaggctgagtcaccagagtgaacacccgcttgttcaatatgttccatgataccgccgatcaggacgcgttcgccgtcgcagatagcatccacatcaacttcaacagcatcatcaaggaagcgatccaacagaaccggagcatcgttagaaacactgactgcggtttggaagtaacgacgcaggtcagtttcatcgtatacgatttccattgcccggccacccagtacataggaagggcgaaccaccagcggataaccgaggttgttacctttttcaatcgcctgttcgatggttgtcacagtggcatttgccggttgtttcaggccaagacggttgactgcttgctggaaacgttcacggtcttctgcacggtcaatggcatccgggctggtaccgataattggcacaccagccgcttccagttcacgcgccagtttcagcggagtctggccgccgtactgtacgatcacgccttttggctgttcaacgcggacaatttccagtacgtcttccagtgttaccggctcaaaataaaggcggtcagaggtgtcgtaatctgttgaaaccgtttcagggttacagttaaccatgatggtttcgtaaccgtcttcgcgcagcgccagagcagcgtgtacgcagcaataatcgaattcgatgccttgcccgatacggttcgggccaccacccaataccatgatttttggcttatcattgtttggattagcttcgcactcatcttcataagtggagtacatgtaagccgtatcagttgaaaactcagccgcgcaggtatctacacgtttgtaaaccggatacagaccataatcatggcgcagtttacggatctctttttcggatacgccagccagttttgccagacgcgcatcagcaaaacctttacgtttcaactgacgcaggaagccggaagtcaggccgttgatgccttgctctgcaaccatatcttccagacgaaccagctcttcaatctgcaccaagaaccagcgatcaatattggtcaggttgaagataccatcaacggacatacccgcacggaaagcatcggcaacgaaccagatacgctcagcgccagcatctttcagctcgctacggattttggtcagtgattgtacatcatccagattaactttcgggtcaaaacctgttgcgccgacttccagaccacgcaatgctttttgcagagattcctggaaagtgcgaccaatcgccatgacttcaccaacggacttcatctgagtggtcagacggtcattactgccggcaaatttttcgaagttgaaacgagggatcttagtgacgacatagtcaatcgatggctcaaaagaagcaggagtcaacccgccggtgatgtcattcatcagctcgtcaagggtgtaaccaaccgccagttttgccgcaatttttgcaatagggaagccagtggctttggaagccagagcggatgaacgggagactcgcgggttcatctcaatgacaatcaggcggccatttttagggtttactgcaaactgtacgtttgaaccaccggtctctacaccaatttcacgcagtactgccatcgaggcattacgcatgatttgatattctttatccgtcagagtctgggctggtgcgacagtgatggagtcaccggtatggatacccatcgcgtcaaagttttcaatggagcagacgatgatgcagttgtcacttttgtcacgaacaacttccatttcatactctttccaaccaatcagcgattcatcgatcagcagttcattcgttggagaaaggtccagaccgcgctcgcagatctcttcaaactcttcgcggttataagcgataccaccgcctgttccacccatggtgaaagaagggcggatgatacaagggaagcctacgtcttcagcgactgccagtgcttcttccatggtatgagcgatgccggaacgtgcagtatccagaccgattttcttcatcgctttgtcaaaacgctgacgatcttctgctttatcaatggcgtcagcggttgcaccaatcatggttacgccgaattcctgcaatacaccctgacgttccagctccagtgcgcagttgagtgctgtttgcccgcccattgttggcaggacggcatccggacgttctttctcaataattttgcgtacaacttcccagtgaatcggctcgatgtaagttgcgtcagccatttcggggtcggtcatgatggttgccgggttggagttcaccagtatgacacggtaaccttcttctctcagcgctttacaggcctgagcacctgagtagtcaaattcacatgcctgaccgataacaatcgggccagcacccaagatcaggatacttttaatatcagtacgttttgccattttcctttttctcctgattatttggtgttctgagcgttttgcagacgatgctgttcaatcaatgcaataaagtggtcgaacagagaagcggcttcatgcggaccagggctggcttcagggtgcccctgaaaactgaatgcaggtttgtcagtacggtgaataccttgcagtgtgccgtcaaagagtgatttatgggttacgcgcaggtttgctggtaatgaattttcatcaacggcaaatccgtggttttgtgcggtaatcataacgacattgcgatctaaatctttaacaggatggttgccaccgtggtgaccaaacttcattttgaccgtttttgcaccacttgccagagccagtaactgatgccccagacagataccaaatacagggatttcagtattcaggaaggttttaattgcttcgatggcatagtcacaaggttctgggtcaccgggaccattggacaggaagatcccgtctggtgccattttcaacacttcatccgcaggggtctgggctggtacgacagtcacgcggcagccacgatccaccagcatacgcaggatattacgttttacaccaaaatcataagcgacaatatggtatggcaattcttgttctttacgggcttccggcaacccttctgtcagtgtccagctcccttgtaaccactgataagactgtgccgtggtgacttctttcgccaaatccatccctttcagaccgggaaatgcttttgctttttccagtgcaacttgaacatccgcttcattacccgcaatgatacagccgttttgtgcacctttttcgcgcaacaggcgggtcagtttacgtgtatcaatatcagcaatcgcaacaatgttatgatttttcagataatcagacagattgttttcactacggtagttgctggtgatgagaggtaaatcgcggattactaagccttgggcctgaatggcgggagattcttcatcagcactgttaatgccgacatttccaatatgaggataggtgagagtaacaatttggcgggaataggaagggtcggtaagtatttcttgatatccggtcattgaggtattgaagaccacttcaccaacagccacaccttctgcacctatggcgcgaccgtgaaattgggtcccatcttctagaaccaatatagctgacttaatcaaaacgccctccgggaatgaataacaaatcgcactcaatgcatattaattcggaattaatcctttaaatcaatgccaatcatgttctttgtcgaaattttggcaaattgcgcgcattctaatgatgagaacggggcttgtctacaaaaaatcccttttttattggtttttttgcgaggctcaatccaacattgttgaaatatgcctgaaaattataagtaaagtgcgattatatgctcgattaatgtgaaattaaattttaaaactgaaaaaaccgtgtgattttcagtacctatgggagaaaagatgataaaaatgacaatttatggtgtaaaactgtgagtaattgatgatgaaagttatatttactatttaaatatgtaattacgcattcattgaaaaataatggcgtaattacatgatgttatgaattcaataaatcataagttttcgagattaaggacatctttcatgtcataaaggccactatttttattggttatccaggttgctgctttaacagcaccatttgcgaaagtcattcggcttgaggctttatgggttatctcaactcgctccccaatatcagcaaaaatagcagtgtgttctccgacaatatcaccggctcttatagtggcaaaaccaatacttttcgggtctcgttcgcccgtatagccttcgcgggcatagactgcacatgttttcaggtcacggcctaatgtgtgagcaatagattcccccatcgccagcgcggtgcctgatggcgcatccactttatggcgatggtgagcttcaataatttcaatgtctgtgtgctctcccattactgttgccgctttctccaacagtttcaggacaaggttaacaccaacactgaaattcgcggcaaaaacaatcggaatgtcacgggaagcatcatgaatagcctgcttacctgcgtcatcaaacccggttgtaccaatgatcaccgctttgcggtgttggtgacaaatggcaagataggtcagtgtgccttccgggagggtaaagtcgatcaaaacgtcaaagtcatcaataacagagtggaggttatcatggatcgtaataccgttagtaccagtgccagccaattctccggcatccgctcctactaatgaagaacctgaacgcaccagagcagcccccagtgtaacgccatccgcctgctgaacggcctgaatgagattacgccccatacggccactggcccctacgatagcaatgcgaatatctgtatcagccataaggcccccgctatagtgaatatcaatttttaattgaggtgataaagtaaattgcctacagcttaactggcaatagcgggcggtgccagacttagaaggatgccattaggaaaacagagatcagacgggcagttataaaaaatgctaaagatggactactccccggcctcaggtaattcgtaatgataatgatgaggttctttggcgacttttttatcttggatattttcctgacggagtctttcagcaagaaactctataaatacactaagcttcggggataaataccgcgttggcgggtaaagcacccataattcaccggaataattagccttaaagttccagtcaggcagaacctgaaccagccgtccctgctgtaaagcatgtctggcggtaaaatagggtaagctactaataccgatgtgtttcagtgctgcatcaagcctcacaccggtatgattggcggcgtaacgcccctgaatattaacagtggcagttttgctgccctgactgaacttccagcgtgaatctcccggttcttcaccaagatagatacagctatgggtttttagatcatgaggatgttgtggtatcccgtgttctgcaaggtattccggtgtggcacataacatatgccaaatcttgagtaaccgccgccccatcagacccggagggggctgatcagtgatccgtatggcgaggtcaacttcatcatctattaaatccacatacctgtcatcaagccgcaaactgacatcaactttagggtaacgggtaagaaaagccggtatatggggatggacgacaaaacgccctacagctttaggtacactaacccggactatacctagcggttcaccgctaaagtttcctgatgcagacatgactgcctgagctgaattcatcatgtccagacaatgttcataaacctgttgcccactctcacttaaacgaagtttacgtgttgttctctgtagcagacgggttccgagcgctttttccagtctggctacagagcgactaatagcagaaggcgtagctgctaactgacgggcagtttcagagaaacttcctgtttcaacgactttggcgaaaatagccatttcccgcataagggttatcgtgttatttgtgctcataggtcaaaagttatttggtttttggatggattatcgctactgagtttatttaatacaatcaggatattctgcttatataaagagtattaaatatgctttctaactatctacatgaatttttggggcttgcgctgatccattttctggctgttgttgctccggggccggactttgccgtgactatcaggcagagcatacgttatggtcgttgggtgggtatttttactgctatcggtattggtgtggggatatcagtccatgtgatttatacgctgattggtattggggcgttaatccattcaacatattggctgatgacagccgcaaaaataatcggtggtctatatatatgctatctgggaattcaatttatcagaagcaaaccggaaaaggctgattttgccctttcctatgaagcgccagcgcagcaacaaactcttcgcagggctttctttatcgggtttatgacaaatgcgaccaaccctaaagcaacgctattttttctggctgtatttacaaccgtggtaagcactacgacgccgctatctgttcaggttttttatggtgtatggatgtgtatggtgaatgcagcatggtttattctggttagttggttgttttccaattcagtgatcagattgaaatttattcagatgggatactggtttgagcgtgtaattggcataattctgattggatttgcaattcgtctcgtatttatttccacgtaaaaaataagaacatggagttcattaaaacgaatgttattttgtattactccagaatgaaagtttgaagtttttgataaatagaaatgatgtgataaagcaaatagttacaagttatttattagtgaattggttttatttaattactatttcattgtgatgctctattttgatttatgtttttttgacaataaatatgaatgttttttattgaaataataataaaacaaggcgagtaagctgaattattttttataaaagaaggtggatcataatatgtttagatcaaaatcttttaacatacctcatcctataggttcaggttctttaacccgctcaaaatccttttcagagttatggctaaaatcaattgatatcagatattttatcgccgttagagaagttaaagcctcagctgcactaaatgcaacgagaatgataatgaaagaaactatgcttcaggattggcgcagttctgattcgtttagttcagagcaacaaagttggaatgcaagatatgatgagtcactcgatatatttgaggggattgaggaaaatatagcgggttacattgctgactcaaaaaatattagtaaattaggtatggtattttttgttgcttattttaagggggtttctgtaggtgttatgcagttatcaatgaagcataagttacctcatatttctttgttggcaacacactgtggtatccgaggttgtggcccttttctggttgaatatgcactttagagcac

SEQ ID NO: 2696 - DNA, 16184 bp, Xenorhabdus sp.; identical to SEQ ID NO: 2695
  CDS (2939)..(4144)

SEQ ID NO: 2697 - DNA, 16184 bp, Xenorhabdus sp.; identical to SEQ ID NO: 2695
  CDS (4590)..(5297)

SEQ ID NO: 2698 - DNA, 16184 bp, Xenorhabdus sp.; identical to SEQ ID NO: 2695
  CDS (5362)..(7116)

SEQ ID NO: 2699 - DNA, 16184 bp, Xenorhabdus sp.; identical to SEQ ID NO: 2695
  CDS (7338)..(7748)

SEQ ID NO: 2700 - DNA, 16184 bp, Xenorhabdus sp.; identical to SEQ ID NO: 2695
  CDS (13284)..(13433)

SEQ ID NO: 2701 - DNA, 16184 bp, Xenorhabdus sp.; identical to SEQ ID NO: 2695
  CDS (14878)..(15432)

SEQ ID NO: 2702 - DNA, 16184 bp, Xenorhabdus sp.; identical to SEQ ID NO: 477
  CDS (5060)..(8284)

SEQ ID NO: 2703 - DNA, 16184 bp, Xenorhabdus sp.; identical to SEQ ID NO: 477
  CDS (3882)..(5042)

SEQ ID NO: 2704 - DNA, 16184 bp, Xenorhabdus sp.; identical to SEQ ID NO: 477
  CDS (2623)..(3444)

SEQ ID NO: 2705 - DNA, 19492 bp, Xenorhabdus sp.
  CDS (5067)..(5942)
ctctaaagaatacacaaccattcagtatcagaattcttagctaattcgttgaataatgaattaaaaacacctttttttgaccagacattaaaacgcttaaagaccgtattccatttcccatattcagcaggtagttcccgccagggtatcccggttctcattcgaaaaagaataccttccatgatgaggcgatgcgtttttttatgataggtaagccgattttgttgcatgaagacaaatagcttatcccacacaggatctgataacataggtcgtggcatgatagttcgggtaacgagttttttggcgaaaataagagaccaaattatcatgccacccaattcccttcgagcaaacgtcaacacgccctaacgtaattttcaactcttcgagaatactctctaaagtatccctgaatgcctgaatatgggctggcatcgagaatggctcactcggttttagaagaccgctagtacttagctcgagactatctgtatctgatgattcattgctcaatttgtcatccgacgtaaaccaaccagccaatttacaaacggtttttccaagagaaccgataggaatgccagtagttaaagtcaatgcagcttcgccacttaattgagcgacccggagaagatttatccttcgccacagttcagatactttgtcggtgatagtcttattttcatctgtaagccgaacaatctcgtcccccactatttgtaacaatgcacttctggcggactcaaaatcttggtatagccatggattgaaagtgagtacgacaaaggaatgcttttcttgatttctctcttccaccaacgactcttcaactgaagagctctctaggcgtgaagcaatcattttcaccagagaagatttacctgctccccagccacctgagactcctatagaaataggttccccattagcctgcttcagcaggcttgcacatgcatcagcaacaacaccaaaattcaaataatcgacagttgtctcgttatcatgccacatagtgaaaaatccatttaaaattaatttatatcaataggatatgaaaactgttggtttctggttcacaaatccactcttgtgtagggcacttggcctgtggccagcagatcaacgcagcgccctgcaaaggcgtttggtatcgcaagagcaacaaaattacgagcacgggtgaggccaacgtagagtacgcgctttgcctcagcatctactcgcgcttcccatgactcgaagagtgcttcaattctgttttcaggggctcgattcggcgggactacgacgcatactgcatcgtactcacgacctttcacttcatgtatgttgccacatgcaaaacctagagcagcgggcacttgaagatgctttgaccattgcgcattaggaggctgtcggaagaaacgacgtacacttacaccagccgggagtggcagatgcagcttctccatttctgcatgaacacaggctatccaggcaagccgctcttcatcggaatctctgcacgtttttggaaggttaatgagaaaacttagggcgcatctccgatgggcacgccggtccattccaagacgttcgatggctttaatcagatgctcatttggttggcgaacccccattaaatccagcaacaatatttcgactgactggactacattctccttcgttcttggggttgcggcaggcgaccagaactctgacactttacgagccagcaactcaattcgcgagtttccggttgaattgctggaagtgacaccagctgcccgcatagcaactttgcctgagtgagccaaaataatcgccttggttgactccagtcccagttccgtaatccgtccaaggaatgcctgaccaataatttccgttgggccccggccaccgtaggtaagaagtaaaattggatagtcaacattctcactttcaccaagcgaccgatcaacttgaccttctcgccttagagtggctgctaactggcaaattgcgggactactacgaaaattccccgtcaactccttatgcgacgcaataggatatgtatctttaagtatttgtattccttgaggattaccattatgaaattcgtagattgcttggtcaggatcacaaacgaacgtaacatttaccccatgtgctctgagccatgtcagtatttgtagatcgagtggattgcaatcttgcccttcatcaaccataacttcttgaaaacgtgccgctaatgcgcgaaaaagagccccaccaattacattatctctaatcaaccgcaatgtttgagcacgtgcgtcccctgcactcatatagccagcttgtaacaaagatcgtcgccgatttgctgcagcttgttgatatcgaatctgatgttgacgtacatgattttgcaaacccgcatgtccgattctatcaggatcaataatgttggtttctgaatcaaacaaatctaagcttaccgattcacctcgaaaggcaaattgacctgataaacgaatttctacaccaagcgtatcccaactatctaggataattggccgagtttggctcgataccgcgcaacttggcagtacaacgaaatgcctgacgaaagcatcaagtgttcccatgaaactaggatacttcaaaagcgtatcgagcccagcagccaggcatcgttcgcggaactcgtctaccgcggagtttgtgaatgaaagtatcgctatgccctgacgagaaggcaacttagcggcgatcctcgctagccgagcaatgatagtgcgcgtttttccggctccaggacaagcattaacgaagactccgccaatgtgagaagcaaatgtctcttgctctggggttagattgtggatgccagtcatatatgtgaagctccacgaattgcatcaatgagataaggcggaacaacaaatggttcacccgcctcaatgcgcgaagccatagcttgtgccaaatcgcctttacgagtttttttcgcctcaattaatttaagaaatgcattgggacgatcttgttctggaatgccctctatctgagcttcccagtctctacgtgaattacgatgcaaacgaagaaacacgcttttcaggaaactttcatttccagcgccaaaaatttcgtgctccaatgtatgctgattggttagcacgatcagagcatctggagctccatgcgttgcagccagattttccagatcaactttcctatttcccaacacggttgggttcgcatcagtgatcactatcagcctatcagcaatacgtgcatcaccatatggccgtagcagcacctctacatatggacggaagtccacaccttcaataggcacaattacagcccccttgaacctaagccacccatctaaatcagcggctagcacaagcttttgtgctagcacgggcaacaatagtgcttccgcgatcccttccaccaagatagctctgttaccaaacagcaaagcggaacgagtcacgtcaagatatcggctgattttatctaatgtctttggctttagccctatttcggcaataggcacactcactgattctgagatggctattccatcttgttcacgatgccgcgaacgcatgaccactaggtgacgtggagaaacccatgctgtcaggttgggggagtgggttgtcacaacaatttggatgcggccttcaggctttcctggctctatgatacgtgatgcagattggcgcgcttgatccaagaggaactcaagcacaagtacctgtaattgcggatgcaaatgcgcttcaggttcttcaacaaggaaaatcgtgaggtctgcttctttggccttagtcagctctacaacaacagtggccatgtagagtagatttgagtaccccagaccagaagaccgaatatcttcgggtatcaaacctgtatcggccatacgaaatctcaaatcacgagctacatcgagcaaggtttcgctaccaaaatccaatgccgctatctgcggacgtactccattagtgagtagtcctagagcagtactgatatccgtattgattgtagttaagatctcaggccgattatccgcacgcctgacaccagcgaggaaatcctgttcccgctcttttggcaagaaattacgcagcaatgccatcactcgagtgccactgctagtaccaagcacctgatgtgcgtcccttaaaggtgggagataaacgtgtctaatcaactcagaagaaccaagctctggtccattagtgtcgaaacgtccagcccacatggtagtcttaccacggggagcatgttcagaacgcgattcatatcgatagccgaaggtagcctcgctcttggtaggatcgggaactgcagatatcaatagacctttgagggtatcgcttagaccttggaaagccccttcgatttgaaaacttgggacggtcgaatagcgtcgtacatcctcatcctctggatatcgttcgcggcgtccactcaacggcaaagtaagcaatctgattgcgtctacgacattggattttccaccattattttcaccaaccaatacagttaaatctgggcggagacaaacggtcacatcatcacaagacctaaaccgcgaaactttcagcttacctaaatacataaatatccttatattacaaaaacatataatttaccctgataagaccacgtggagggcttcatccaaaatactttaatatctcggtaatccttctcgactcactgttaacgggcattaactgtttgctttgttacgaacacgaagaaatctacgaatttgctagaatgaagcgaagcgataattactgattcagtactccataattacaataatatcaacaccttccttatgacaatgtgccagaggcatcatttttcacttttgccaaaaaaaatgatttagatccaatcaaatagctatctctagctcaaacgtgattctgtattaatccttttgaagctacatttcttaaatctgcctacccactttgaatccaaataatttcatacagatattatcttcgtgaatcccccgcaatcccataccggatcgcggggctttttatttttcacgctgagagctctgtatgcaaaaatctgacggccttcagtccattgaaaagccactggctttactgcctcataccattcgcagtcttattcttgaacgccttcgtagtctcacacaatacgagccggtgatcggcattatgggtaaaactggcgtcggtaagagcagcctctgtaatgccctgttcgagggagaggtaacacctgtcagcaatgttgagccctgcacccgcgatgtgctgcgcttccggctcagcaatggcaatcacagcctgatgattgttgatttaccgggggtgggtgagagtgagcaacgcgatgatgaatattcagcactgtaccgccggatcttacctgaattggatttggtgttgtgggtcatcaaagcggatgatcgtgcactgtcggtggatggacatttttatcgacaggtcatgctgacatatcagcacagggtattgtttgtagtaaatcaggccgacaaagctgagccctgccacgaatggaatatcatcgacagaatatcttcccatgaacagcaacaaacgattgaagcgaagcgtaatgctatccagcagttgtttatgcccaattatcctgtctgcatagtatcagctggaactggatgggggatggaagcgatggtggaggccatgatgggctacctacctgactgcgccaccagccctattgcgacacagttgcacaggaggctctgcacagagcaggtaaaaaagcaggccaaggatagctttggaagtgtagtgggtgaggtgtttgacacaattgagtcttcatcctttctgccagcacctgttcgtgctgttattcgcacagtgcgggaagcagtggtaacggtcgcccgtagcgtatgggaatggattttcttctgacaaacctcgcatggcggacactccctgtccagttggtgctcaattaataaactgatggttcggcgggcagtgagattcatattgtctgtgaaatagacgaacaatggtcatttgtcggtaataaaaaaaatcagcgctggctctggtatgcctgggagccgaataagaaacgggtagtggcacatgtgtttggggatcgcagcaggaaaacgttgaaaaagttgctggcactcctgtttcattttactatccggttttactgtacagatgattatgccgtttacgattgcctgcctaaggaaaaacacctcacgggaaagaaatttacccaacctatcgagagaacgaatcttacgcttcgtatccggataaagaggctgaatagaaagacaataggttattccaaatccgaagagatgcatgacaaagtggtcggtacgttcattgagcgtgaatactatatttcataacaaatctaaccattgggagcatgatcctcaaactgatagcgcaattgccataccttttctccagataacggaacatatagatacaagccgttactatcagatagacggtatggtttttcttttatcttagcggagtcgacctgtttcacagtgagcattgggtaaaattacattaggtaaaatttttacccaaaatttacccatataagcatgaggatgccaacgaactaatgcgggtttctacgaacggctattttcaattaatactgataaatggtggattttgaggacttataagaacggtgttgaactgttggatggcgccccctgcaggaatcgaacctacaactagcccttaggaggggctcgttatatccatttaactaagagggcattttactgcttgtttcaggccgtttctgaaacgcccgtatcttagctctttctgcctgttttaatcaagttttttgcatttgtttgtttcattctaccctctttagttttctgttatagtcaactcatcacttactattttgtacagattgagtacataatcgcacttcattttgtgaacgatttataaccatgattttgagtgttattagcagctgattttggtgacattataaaaataatcaagattgtcattttttctgttcgagcatcagtcaatttaaaaataaaggttaaagtgatcaataaaaactgaccacttgttataaaaacatatctcgttactctaatcacttaattatcacaccatctgaaacaaaaacgtttagtttctccagtttccttcaatacatcgcctaattttttcgcgtcaggaatagactgagcaatatagtcgtatgtaatgttgtaatcatgtacaactgaaattccaactataatttttgaatattttccaaggtggtaagttacaccatcaactgttacataaagaaatttatcatagaataaatccaacatatttttagagctttgctgttttttataagaatgcgcattaaataaaagaaaaccaccaggcaatcctgcaaataacctttctgaccaatagaaaaaccctattttatctgcatcaatgggtgtgttattttcgataacagataatttaccaaaagacggcctattctggcttgattgtgcttcactattgtatccccaatgcatgttttctaattctatttctggatcggagaaattaaacttctcagcaccgagcgtaatatcaagttccaatttatattctgtctctgatgtgtcaatttttgatttatcattattgagcatgatattctcacttattatttatctgagataaataaggccgtgcattgcacggcccggaaaattcattcagtgtctctacctgaaatatttatcttttatccagtataagagctggctctgcagcaacataaccctgcaaaataccttctttataaattcctacaatgcactcataatacattgtacgcatagtgccatttgcaggcatcatattaattttgctcatccaatagtaatttcttattgcctgcatattcacatctaatggattttttacatcgacaaccggaatatattctatgccctgtacaaccttgtgaggttctatcattgtcatcatgtcatccggcatgacgttcatcattgaatccagttttatcagtgcaactgaatagtctaaattcatatttaatgtcattacttttacgcgcagcatatcgccagcatcacatttaatgactaaattacctgaactattaactgacgcaagtctgtcatcctcagggatataagtgatatattttttaaaaataccatcagaccaaagtgaaacaggattgttaatatctttgctaagcttgccaaaatcattcataatatcttcgactctgataccaactaatatatcaatcattttagacattattgtaccctcatttatttatggtattagcatgttttattacacaaaaaacataacactctgactgaatttttttacaagccactgacggaatgaataatagcaaaataatataaagtcaaaacctcaaaaaaacttatgtacgagatgtttttatcacaataaaaaggttaaattgtattttatataaattacttttcatctttaaaagtttaaccaaaaattaaactcagcgaatcaaagctatattaaccttcattcagaaaattactaaaataaatattcttgtattatagaaagattttcaaaaagaaattcacacaggaataataagatagcaatattaataatgttgttgcgaaaccagataatccactcctgatttttattttttatattacctctaaagttaaatagatatacaatttactccaatgtataatcgttaactattacttcagctactacattaatttttactcttcgcctttcaagttacttctttgttgcccgcaacacctcttgaaatccattgagtatatatcttatgaattttgagtaatcgcctgtaaagcggcaaatataaattcaggagaaaatatgtttggtaaaggtactgtaatcaagaactacaccagcgcttatccaattccgatccggttgcagtctggtgatatcgtttcaatcagccactctgatatagagtacccttattgggtgtggacgacggataaatcagaaataagtggctgggttccccaacagatcctgcgtttgactcaggttaatcaggcaatatgtacggaaaactacattgcacatgaattaactgtaaaagccggtgaattactctatctggaaaatttattgaatggttggttctgggcccacaaagagtgtggcgaaacaggctggataccacaggattatataactcaggagatttaagtaatgacgtttgttcccgattatcgtgatgtttcagaagcccactcccgcattaaaaactatatccacaaaacccctgtatttacctcaaatacggttaatcagatattcgacgctgaagtctatttcaaatgtgaaaactaccaacgaatgggagcatttaaatttcgcggtgcaatgaatgcgttatcccagtttagtgatgagcagaaaaaagctggggttattgctttctcttccggtaatcacgctcaggctattgccttagcagctaagatgcacaatattccagccacaatagtgatgccacatgatgcccctaaagccaaaattgaagcaacaaaaggttatggtggaaaaattgttttttatgacaggtatactgaggataacaaggctataagccgtaatctggcagaaaaacacggtctgactttaattccgccttatgatcatccacatattattgcagggcaaggcactgtagccaaagagttatttgaagaaatcggcgaactcgatactctgtttgtcccgctcggtggcggtggtctgttatccggctcagcattatctgcttctcagttgtccccaaaatgtcaggtttttggtgtcgaacctgaagagggtaatgacgggcaacaatctttcagaaaaggtgagattgtatatattgatactccaaaaacgattgcagatggcgcacaaacaccacatctaggtcagcataattttgacattattcgtcaccttgtgacagatattctgacagcctcagataaagaactggttgatgcgatgtattttctggcagagcgaatgaaaatggttgttgagccaacaggttgcttgggttttgctgcagcaagagcgataagggaacagttgcagggcaagcgtatcggtattatcttgagcggaggcaatatcgatatgcaacgatactcccagttactggcaaataaataagccagtagattttacagatcctgtcctctattcggggcaggattttttaggttcttttgttgctcctgcttcaatctccgccatagtgtcgtacggctgatccccagatattccgcagcagcctgccggttacccgagaaatgcgcaacaatatcactcaatgaaatatcgtgctccaaaggtgatttttctgtaaaagaatgagatgcggtttttactccttgcatattattcatgatgccaatttcaacctgacgctcaggagaaagcgacaatatcagagcaggggttaatatctgttcaggattagcactcgtataaagagcgatccgttccatcaggttacgcagttccctcacattacccggccagtgataagatcgtaatacttcatcacactgagaaagttcacgcgttcttaaaggtgaaacgcgcaaattaagagcggcacatgcccgccgaaaatactcctgagccagcatactgatatcattttccctctcccgtaacgccggaagattaatgcgcaatacatttaaacgataaaacagatcaacacggaagcgcccttctcttacccactgatccaaatcaacatgggttgcacaaataatacgcacatcaacggcaatcggacgatatcccccaactctgacaaccgatttctcttccagtactctcaataaccgggtctgtagcggcaatggcatttcaccaatttcatccagaaataacgttcccctgtgcgcaacttcaaataacccagcccgcccgccgcgccgtgaacccgtaaatgcaccttcttcgtaaccaaacaattctgcctctaataacgattcggcgattgcaccacagttaacagcaacgaatggccgggaatgttttctttttaactgcccatagcgaagggtatattcatgatggatagcctgtgcaaccagttcctttccggtaccactttctccctgaatcaatacggtcgctgtcgaacgggcatataatgtgattgtgcttcgtacatgctccattgccgcagaattaccccgaatatcattgatggtatgtcggatacgcaatttatcttcggtaggataaggtgaaattactgcctgattaagtctggccatcttagccatatccaaagcatcatgaaatgcctgccggatagaatcagcagaatagacaaaaacgcccaccagccccgcttcatatgccaaatcggtgatcaacccggttccaacaatcacctgaataccatctgccttcaacgcattaacctgtgttctggcatcctctgccgttgcatagctgcgttgttctatgcgcagatgaaaacgttgctgaaattcctccagcgcaggtaaggtgttttggtaggagatgacgccaatgcgggaactgatttgccgggcgcgagccaatgcctgcatgaaatcaaaaccactggctttggctatgatcaccggtactgaaagcctgcttttcagataggcgccattagaacccgcacatattacggcatcacaatgttcgttttccagacgcttacggatatgttgcaccgcctgttcaaaaccaaggtggatcggtgtgatatccgcctgatgatcaaactccggtgtaatgtcgcgaaaaaggtcaaaaaggcgggagatagagaccgtccagatgacagtcttattactgttacgctctgaggcatgtattggcatgatatacctccttttgtttttctacccattttctattacgtttcacttaaacaaaataaaacaataatgaaacatagctgtttaaaattgaaacaagtatatattataatcagcagaaagtcagaaacgacatcacagcaaaaaaaataattatccatttgattatcaaattaaaacaaaaatacctctatctatttcctatcctttcctcccatttctgctttttggcataagccttgctttgttaataaatcattacagataagtttcatttttaataatggagttgcatatgggattttattctgccggtttggcttttcgtcaggcaataaaagacgaatctccgttacaggtggtaggtactatcaatgcaaaccacgccctgctggcgaagagagcaggttataaggctatttatctttccggcggcggggtttcagcaggttcattaggtttgccggatttgggtatctcaacactggatgatgtattaaccgatacccgacgcatcactgatgtgtgcgacttacctctgctggtagatgctgatatcggcttcggatcctccgcatttaatgtggcccgcacagttcagtctattattaaagcaggagctgccggattgcatattgaagatcaggtcggtgcaaaacgttgtggccatcggccaaataaagagattgtctccaaagaggagatggtagatcgcattaaagcagccgttgatgcccgtaacgatgaacatttcgtcattatggcacgtactgatgcgctggcagtagaaggattgaatgccgcccttgacagagccgaagcttatagggaagcaggagctgatatgctgtttccggaagccatcacagagctactaatgtacaaaactttcgccgaaaaaacacaaattccagtactcgcaaacatcaccgaattcggagccaccccactttttactcttgaagaactaaaaagtgcggatgtctctatcgctctttatcccctgtctgcatttcgcgccatgaataaggcggctgagcaagtctatacagccctccggcgcgatggcacgcaaaaaagtgtgctcaatatgatgcaaacccgtaatgagctttacgaaagtatcaactattacgattttgagcagaggctggatgccctgttttcccagaaaaacaatcgaggtgatacacatgaatgaacaaattatagggattaaaccgaaaaaatctgttgctctgtcaggtgttaccgcgggtaataccgcgctttgtactgttgggaaaaacggcaaggaattgcattaccggggttatgatatttttgatttggcctcccaatgcgaatttgaagaagttgcctacctgttagtccatgaaaagctgccttcacgtgccgaactgactgcctataaggccaagctgaaagcattaagaggtttgccgagcagcgttaaatccgcactggaagctctaccagcagttgcacatccgatggatgtgatgcgcacaggagtctccgttcttggttgtacattaccggaaaaggaggaccataatcctgctggtgcccgcgatatcgctgaccgcctactcgcttccctcagctcgatattgctttattggtatcactatagttataacggacgccgtatcgatgtagaaactgatgatgattctatcgggggtcacttcctgcatcttttacatgggcagaaaccacgggcatcgtgggaaaaagcaatgcatacttcccttatcctgtatgcagagcatgaattcaatgcttcaacttttaccagccgggtgattgccggtacaaactcagatatttactctgccattatcggggggatcggggcgctgcgaggttcaaaacatggcggtgccaatgaggcttcatttgatattcaacagcgttatgatacgcctgatgaagcagaaactgacattctccgccgtctggagagaaaagaagtcattattggcttcgggcatccggtttataccatttctgatccacgccacaaagtgatcaaagaggttgcgcaaacgctatccgaagaagccggcacactgcaaatgttcaatattgccgatcgcattgaatctgtgatgagggatgagaaaaaaatgttcccgaatctagactggtttgcagcggtgtcgtatcacatgttgggggttcctacagccatgtttaccccactgtttgtgattgcccgtacttccggctgggctgcgcatattattgaacaacgtattgataataaaattattcgtcctacagctaattataccggcccggaaaatctgccgtttgtcccgattgaaaagcgctgatacccgttaatgaatgcttgataaacagtacattaatgcaatttttccaaaaggattgattatgtttacctctatgcctgactctacactgacttccgctgtaaataaccggcctgaatacgaccaagtgattgtagatatcgtggattacgtcatggactacatcatcgtttcccccattgcctatgtcaccgcccaacatacatttttagacgctttaggctgtggtttagaagcactggaataccccgcctgtactaaattattggggccgattgtaccgggaacagccgttcccaatggagtacgagtaccgggaactcaatttgaactcgaccccgtacaggctgcattcaatatcggcacactcatccgctggctggattttaacgatacctggctggcggctgaatgggggcatccgtctgataacttaggcgggatacttgctgtcgctgattggttgtcaagaaatgccgtcgcccgtggagaagagccactgaccatgtgggatgtctttgcagccatgattaaggcatacgaaattcagggttgtctggcactggaaaattcgttcaataaagtcggtctggatcatgttgttttggtaaaagttgcttcaaccgctgtggttgcacaaatgatggggctggatcgtgaacagatattaagtgccgtatcactcgcgtgggtagatggccagtctttacgcacctaccgccattcgcccaatacaggctcccgtaaatcctgggcagctggcgatgccacttcccgcgccgttcgtctggcgctgatggcaaaacagggtgaaatgggctacccctccgtattaaccgccaaaaactggggcttttatgatgttctcttcaggggcgaatcatttcagtttcagcgcccttatggtagttatgtgatggaaaacattttgttcaaagtttctttccctgctgaatttcatgctcagaccgcggttgaagctgccatgcagctacatcaccaactgaaagcgcagggaaaaactgtcgaagatatcgctcaaatcactattcgtacccatcaggcttgcatccgtatcattgataaaaaaggcccgctgcataatccggcagaccgggatcattgcatccagtatatggttgccattccattactgtttggccgtctcactgcggcggattatgaagatgatgttgccagagatccgcgtattgatattctgcgggaaaaaataatctgtgttgaagatgctaatttcacacaggattaccatgacccagaaaaacgttctattgccaatgccctgactatgacttttaatgatggcaaccagcttgatgaagtcataatagagttcccaatcgggcacagacgccgccgtgcagacggtgtccccgccttgctggaaaagttcagaaccaatctggcacggcgtttcaccgaagaacaacaacaaaaaattctgtcagtctcccttgagcttaacgatataaaagacatccccgtaaacgagtaccttgatttatacagtatttaatctgcaattttatttagtggttctggttccagaaccactatccttacattacatcaggaaaatattacgtcaggaaaaatatctcgttaggagaaattatgtcatttcaagatttttaccgacgttcgattgatgaccccagcggtttctgggcagaacaagccagacggattcattggcagcatccttttgaacaaacgctggatcacagtgatcctccttttgcccgctggttttgcggcggaaaaactaacctatgctacaacgcgtcagatcgctggctggaaagtcagcctgatgccaaggcgttaattgcggtttcaacagaaacaaataccgagcaagtcttcacctatcgggagttatatcaggaagtcaatcaggcagccgcgattatgctttctctcggtgtcaaaaaaggcgaccgtgtcgtggtatatatgccgatggtggctgaagccctgtttatcctgcttgcctgtgcccgcatcggtgctatccactccgttgtttttggcgggtttgcggcccatagtcttgctacccgattagataatgcagagccggtactggtcgtttccgctgatgcaggatcgcggggaggaaaaattatcccctacaagccattattagatgaagccattgaactggcagcacatacaccacgtcatgtattgatgataaaccgtggtttgagtgagataaattgggtcaaaaaccgggatctggatttcgcgacattacggcaggctcatctgggtaccgaagtccctgtagcatggctcgaatctaatgaagtttcctgtgtgctctatacgtctgggacaacaggaacgcccaaaggggtgcaacgggatgttggtggttatgccgttgcgctggcaacatccatggatattatttttggcggtaagcccggaggaacattcttctgcacatcagatatcggctggattgtagggcattcctatattgtttatgccccgctgattgccggaatggcaaccgttatgtatgaagggctgcccatccgaccggatgccgggatttggtggcggattgtggaaaaatatcacgtcaccagaatgttttctgcgccaacagccattcgagtcctgaaaaaatacccaacagacaatattgctcaatatgatatttcctctcttgaaacgctctatctggcaggtgaacccctcgacgaacataccgcacgctggattactgaaaccattaatgtccctgtgattgacaattactggcaaactgaaactggctggccaattatggcaattgcacgagcactggatgacaggcccggtcgttttggtagcaccagcttcccgatgtacggttttaacgtcaaattaattaatgagctgaccggacaagaatgtggtgataacgaaaaaggaatggtggttatcaaaggtccgttacctccggggtgtatccagaccatttatggtgataatcaccgttttgtaaatacctactggaaacacttcgatcaacaggtttattctacttttgactggggtattcgtgacagtgaaggctactactttatcttagggcgttcggatgatgtgattaatgtttctggccatcgtctgggaacccgggaaatagaggagtgtattgcaagccatgaagatgttgcagaagttgccgttatcggtattaaagatgatgtaaaaggacaagctgctgtttcctttgtcgtcctcaaagagggaaaagaaattcagagtgctgaccactttgcaacattggaaaaatcactgatggatctggtcgataaaaagattggcagtgtcgggcgtccggcacgtatttattttgtcacacaattacccaaaacccgctccgggaaaatgttgcatcgcactatgcaggcgatttgtgaaggccgtgaccccagtgatatcgctttgatagaaaacccggcgtcactggatgtgatacgtgatgcagtttctcatcattaatattaacagattgcggcattctcgcatctatttaaacggtgtttagcagtagggtattactatacaactgtactacatttccccagctacttttacccattcctgctccgtgccaatgcggagcttttttttattttttaatgagttgcataatagcggattatttgaaatcagagcgcttttattgcgctcttcaatgaatttgttgtttttttatcgggaataaaaagcggtatattaatgcgcgatttcaggctctttttgtgcagcttccagccattccaccattgccggatgttttaggatccgatcaatccatgcctgactcgcaggtgaaaatttcaacccgtaagttctggcccggaaagctaccggcgcaaaaaatgcatccactgccgtgaaagaatttcctgccagccattcaccaccaaatctgcttagcccttcagaccaaagttcatcaagccgagaaagatcgctctgtaattcagaggatatttcggctaatgcaatggtttttgtgcaattcattgcacaaatctggcgtaatgcagtaaaaccagagtgcatttctgctgccgcacttcttgcccacgctctggcagtacgatcttctggccatacctgagcatgttcctctgcaacatattcagtaatagccagtgtatcccaaactgtaatatcaccatctaccagacaagggacaagacccgttggtgagaatgccttaaatttctcatggctacttttaccatcttcaaagtaacttaactgctcgttgaaaggaatattcagagctttgagcaaaatccagggacgcaacgaccaggaagagtaatttttattagctatccataatgtatacatcgtatttctctctgttagtctctttatatttgaatatgtcgctttactgactaccattcaaaatatattgggtatgatggtgaatattgacacacgagaacattatagtttttttctaccggagtaaacatatatatcaaactgacttttgatattgacatcagtcgtatagagcctatagtttttttatccaaagccttagatattttagacaacagacctattgaagatgcggaaaaaattaatgaaaaaatgatattcttttaataaatgcttcactgcggtgcgatcgtattattctaataacttgagtaaattgaaaatatgacaacaaattcttatcccgaaaaaaaaggatttttaaaccgtgtcgaacgtataggtaatgttatgccgggcgtaacaatgctatttgtttatgccctgataatctgttggcttttgtcgtttttactttctttcgtaaattttgattattatcatcccgtctcgaaagagaaaatatctattgttaatcttttccaatatgaagaaattatattatttgtgacaggagcagtgaaaaactttattaatttcccgccatttggaattacaatcgtttcaacgttaggaattgggattgcagaaagtagtggttttataaaaacagcattgaaaaaaatgctttctttcattactcccaaaatgctgaccccaaccgttgcttttgtcggtattgtttcacatctggcgtcggattcagcttatgttatcttaatgccggtttccgccattttta

SEQ ID NO: 2706 - DNA, 19492 bp, Xenorhabdus sp.; identical to SEQ ID NO: 2705
  CDS (8952)..(9299)

SEQ ID NO: 2707 - DNA, 19492 bp, Xenorhabdus sp.; identical to SEQ ID NO: 2705
  CDS (9303)..(10268)

SEQ ID NO: 2708 - DNA, 19492 bp, Xenorhabdus sp.; identical to SEQ ID NO: 2705
  CDS (12273)..(13178)

SEQ ID NO: 2709 - DNA, 19492 bp, Xenorhabdus sp.; identical to SEQ ID NO: 2705
  CDS (13171)..(14319)

SEQ ID NO: 2710 - DNA, 19492 bp, Xenorhabdus sp.; identical to SEQ ID NO: 2705
  CDS (14393)..(15856)

SEQ ID NO: 2711 - DNA, 19492 bp, Xenorhabdus sp.; identical to SEQ ID NO: 2705
  CDS (15955)..(17844)

SEQ ID NO: 2712 - DNA, 19492 bp, Xenorhabdus sp.
  CDS (18776)..(19249)
taaaaatggcggaaaccggcattaagataacataagctgaatccgacgccagatgtgaaacaataccgacaaaagcaacggttggggtcagcattttgggagtaatgaaagaaagcatttttttcaatgctgtttttataaaaccactactttctgcaatcccaattcctaacgttgaaacgattgtaattccaaatggcgggaaattaataaagtttttcactgctcctgtcacaaataatataatttcttcatattggaaaagattaacaatagatattttctctttcgagacgggatgataataatcaaaatttacgaaagaaagtaaaaacgacaaaagccaacagattatcagggcataaacaaatagcattgttacgcccggcataacattacctatacgttcgacacggtttaaaaatccttttttttcgggataagaatttgttgtcatattttcaatttactcaagttattagaataatacgatcgcaccgcagtgaagcatttattaaaagaatatcattttttcattaattttttccgcatcttcaataggtctgttgtctaaaatatctaaggctttggataaaaaaactataggctctatacgactgatgtcaatatcaaaagtcagtttgatatatatgtttactccggtagaaaaaaactataatgttctcgtgtgtcaatattcaccatcatacccaatatattttgaatggtagtcagtaaagcgacatattcaaatataaagagactaacagagagaaatacgatgtatacattatggatagctaataaaaattactcttcctggtcgttgcgtccctggattttgctcaaagctctgaatattcctttcaacgagcagttaagttactttgaagatggtaaaagtagccatgagaaatttaaggcattctcaccaacgggtcttgtcccttgtctggtagatggtgatattacagtttgggatacactggctattactgaatatgttgcagaggaacatgctcaggtatggccagaagatcgtactgccagagcgtgggcaagaagtgcggcagcagaaatgcactctggttttactgcattacgccagatttgtgcaatgaattgcacaaaaaccattgcattagccgaaatatcctctgaattacagagcgatctttctcggcttgatgaactttggtctgaagggctaagcagatttggtggtgaatggctggcaggaaattctttcacggcagtggatgcattttttgcgccggtagctttccgggccagaacttacgggttgaaattttcacctgcgagtcaggcatggattgatcggatcctaaaacatccggcaatggtggaatggctggaagctgcacaaaaagagcctgaaatcgcgcattaatataccgctttttattcccgataaaaaaacaacaaattcattgaagagcgcaataaaagcgctctgatttcaaataatccgctattatgcaactcattaaaaaataaaaaaaagctccgcattggcacggagcaggaatgggtaaaagtagctggggaaatgtagtacagttgtatagtaataccctactgctaaacaccgtttaaatagatgcgagaatgccgcaatctgttaatattaatgatgagaaactgcatcacgtatcacatccagtgacgccgggttttctatcaaagcgatatcactggggtcacggccttcacaaatcgcctgcatagtgcgatgcaacattttcccggagcgggttttgggtaattgtgtgacaaaataaatacgtgccggacgcccgacactgccaatctttttatcgaccagatccatcagtgatttttccaatgttgcaaagtggtcagcactctgaatttcttttccctctttgaggacgacaaaggaaacagcagcttgtccttttacatcatctttaataccgataacggcaacttctgcaacatcttcatggcttgcaatacactcctctatttcccgggttcccagacgatggccagaaacattaatcacatcatccgaacgccctaagataaagtagtagccttcactgtcacgaataccccagtcaaaagtagaataaacctgttgatcgaagtgtttccagtaggtatttacaaaacggtgattatcaccataaatggtctggatacaccccggaggtaacggacctttgataaccaccattcctttttcgttatcaccacattcttgtccggtcagctcattaattaatttgacgttaaaaccgtacatcgggaagctggtgctaccaaaacgaccgggcctgtcatccagtgctcgtgcaattgccataattggccagccagtttcagtttgccagtaattgtcaatcacagggacattaatggtttcagtaatccagcgtgcggtatgttcgtcgaggggttcacctgccagatagagcgtttcaagagaggaaatatcatattgagcaatattgtctgttgggtattttttcaggactcgaatggctgttggcgcagaaaacattctggtgacgtgatatttttccacaatccgccaccaaatcccggcatccggtcggatgggcagcccttcatacataacggttgccattccggcaatcagcggggcataaacaatataggaatgccctacaatccagccgatatctgatgtgcagaagaatgttcctccgggcttaccgccaaaaataatatccatggatgttgccagcgcaacggcataaccaccaacatcccgttgcacccctttgggcgttcctgttgtcccagacgtatagagcacacaggaaacttcattagattcgagccatgctacagggacttcggtacccagatgagcctgccgtaatgtcgcgaaatccagatcccggtttttgacccaatttatctcactcaaaccacggtttatcatcaatacatgacgtggtgtatgtgctgccagttcaatggcttcatctaataatggcttgtaggggataatttttcctccccgcgatcctgcatcagcggaaacgaccagtaccggctctgcattatctaatcgggtagcaagactatgggccgcaaacccgccaaaaacaacggagtggatagcaccgatgcgggcacaggcaagcaggataaacagggcttcagccaccatcggcatatataccacgacacggtcgccttttttgacaccgagagaaagcataatcgcggctgcctgattgacttcctgatataactcccgataggtgaagacttgctcggtatttgtttctgttgaaaccgcaattaacgccttggcatcaggctgactttccagccagcgatctgacgcgttgtagcataggttagtttttccgccgcaaaaccagcgggcaaaaggaggatcactgtgatccagcgtttgttcaaaaggatgctgccaatgaatccgtctggcttgttctgcccagaaaccgctggggtcatcaatcgaacgtcggtaaaaatcttgaaatgacataatttctcctaacgagatatttttcctgacgtaatattttcctgatgtaatgtaaggatagtggttctggaaccagaaccactaaataaaattgcagattaaatactgtataaatcaaggtactcgtttacggggatgtcttttatatcgttaagctcaagggagactgacagaattttttgttgttgttcttcggtgaaacgccgtgccagattggttctgaacttttccagcaaggcggggacaccgtctgcacggcggcgtctgtgcccgattgggaactctattatgacttcatcaagctggttgccatcattaaaagtcatagtcagggcattggcaatagaacgtttttctgggtcatggtaatcctgtgtgaaattagcatcttcaacacagattattttttcccgcagaatatcaatacgcggatctctggcaacatcatcttcataatccgccgcagtgagacggccaaacagtaatggaatggcaaccatatactggatgcaatgatcccggtctgccggattatgcagcgggccttttttatcaatgatacggatgcaagcctgatgggtacgaatagtgatttgagcgatatcttcgacagtttttccctgcgctttcagttggtgatgtagctgcatggcagcttcaaccgcggtctgagcatgaaattcagcagggaaagaaactttgaacaaaatgttttccatcacataactaccataagggcgctgaaactgaaatgattcgcccctgaagagaacatcataaaagccccagtttttggcggttaatacggaggggtagcccatttcaccctgttttgccatcagcgccagacgaacggcgcgggaagtggcatcgccagctgcccaggatttacgggagcctgtattgggcgaatggcggtaggtgcgtaaagactggccatctacccacgcgagtgatacggcacttaatatctgttcacgatccagccccatcatttgtgcaaccacagcggttgaagcaacttttaccaaaacaacatgatccagaccgactttattgaacgaattttccagtgccagacaaccctgaatttcgtatgccttaatcatggctgcaaagacatcccacatggtcagtggctcttctccacgggcgacggcatttcttgacaaccaatcagcgacagcaagtatcccgcctaagttatcagacggatgcccccattcagccgccagccaggtatcgttaaaatccagccagcggatgagtgtgccgatattgaatgcagcctgtacggggtcgagttcaaattgagttcccggtactcgtactccattgggaacggctgttcccggtacaatcggccccaataatttagtacaggcggggtattccagtgcttctaaaccacagcctaaagcgtctaaaaatgtatgttgggcggtgacataggcaatgggggaaacgatgatgtagtccatgacgtaatccacgatatctacaatcacttggtcgtattcaggccggttatttacagcggaagtcagtgtagagtcaggcatagaggtaaacataatcaatccttttggaaaaattgcattaatgtactgtttatcaagcattcattaacgggtatcagcgcttttcaatcgggacaaacggcagattttccgggccggtataattagctgtaggacgaataattttattatcaatacgttgttcaataatatgcgcagcccagccggaagtacgggcaatcacaaacagtggggtaaacatggctgtaggaacccccaacatgtgatacgacaccgctgcaaaccagtctagattcgggaacatttttttctcatccctcatcacagattcaatgcgatcggcaatattgaacatttgcagtgtgccggcttcttcggatagcgtttgcgcaacctctttgatcactttgtggcgtggatcagaaatggtataaaccggatgcccgaagccaataatgacttcttttctctccagacggcggagaatgtcagtttctgcttcatcaggcgtatcataacgctgttgaatatcaaatgaagcctcattggcaccgccatgttttgaacctcgcagcgccccgatccccccgataatggcagagtaaatatctgagtttgtaccggcaatcacccggctggtaaaagttgaagcattgaattcatgctctgcatacaggataagggaagtatgcattgctttttcccacgatgcccgtggtttctgcccatgtaaaagatgcaggaagtgacccccgatagaatcatcatcagtttctacatcgatacggcgtccgttataactatagtgataccaataaagcaatatcgagctgagggaagcgagtaggcggtcagcgatatcgcgggcaccagcaggattatggtcctccttttccggtaatgtacaaccaagaacggagactcctgtgcgcatcacatccatcggatgtgcaactgctggtagagcttccagtgcggatttaacgctgctcggcaaacctcttaatgctttcagcttggccttataggcagtcagttcggcacgtgaaggcagcttttcatggactaacaggtaggcaacttcttcaaattcgcattgggaggccaaatcaaaaatatcataaccccggtaatgcaattccttgccgtttttcccaacagtacaaagcgcggtattacccgcggtaacacctgacagagcaacagattttttcggtttaatccctataatttgttcattcatgtgtatcacctcgattgtttttctgggaaaacagggcatccagcctctgctcaaaatcgtaatagttgatactttcgtaaagctcattacgggtttgcatcatattgagcacacttttttgcgtgccatcgcgccggagggctgtatagacttgctcagccgccttattcatggcgcgaaatgcagacaggggataaagagcgatagagacatccgcactttttagttcttcaagagtaaaaagtggggtggctccgaattcggtgatgtttgcgagtactggaatttgtgttttttcggcgaaagttttgtacattagtagctctgtgatggcttccggaaacagcatatcagctcctgcttccctataagcttcggctctgtcaagggcggcattcaatccttctactgccagcgcatcagtacgtgccataatgacgaaatgttcatcgttacgggcatcaacggctgctttaatgcgatctaccatctcctctttggagacaatctctttatttggccgatggccacaacgttttgcaccgacctgatcttcaatatgcaatccggcagctcctgctttaataatagactgaactgtgcgggccacattaaatgcggaggatccgaagccgatatcagcatctaccagcagaggtaagtcgcacacatcagtgatgcgtcgggtatcggttaatacatcatccagtgttgagatacccaaatccggcaaacctaatgaacctgctgaaaccccgccgccggaaagataaatagccttataacctgctctcttcgccagcagggcgtggtttgcattgatagtacctaccacctgtaacggagattcgtcttttattgcctgacgaaaagccaaaccggcagaataaaatcccatatgcaactccattattaaaaatgaaacttatctgtaatgatttattaacaaagcaaggcttatgccaaaaagcagaaatgggaggaaaggataggaaatagatagaggtatttttgttttaatttgataatcaaatggataattattttttttgctgtgatgtcgtttctgactttctgctgattataatatatacttgtttcaattttaaacagctatgtttcattattgttttattttgtttaagtgaaacgtaatagaaaatgggtagaaaaacaaaaggaggtatatcatgccaatacatgcctcagagcgtaacagtaataagactgtcatctggacggtctctatctcccgcctttttgacctttttcgcgacattacaccggagtttgatcatcaggcggatatcacaccgatccaccttggttttgaacaggcggtgcaacatatccgtaagcgtctggaaaacgaacattgtgatgccgtaatatgtgcgggttctaatggcgcctatctgaaaagcaggctttcagtaccggtgatcatagccaaagccagtggttttgatttcatgcaggcattggctcgcgcccggcaaatcagttcccgcattggcgtcatctcctaccaaaacaccttacctgcgctggaggaatttcagcaacgttttcatctgcgcatagaacaacgcagctatgcaacggcagaggatgccagaacacaggttaatgcgttgaaggcagatggtattcaggtgattgttggaaccgggttgatcaccgatttggcatatgaagcggggctggtgggcgtttttgtctattctgctgattctatccggcaggcatttcatgatgctttggatatggctaagatggccagacttaatcaggcagtaatttcaccttatcctaccgaagataaattgcgtatccgacataccatcaatgatattcggggtaattctgcggcaatggagcatgtacgaagcacaatcacattatatgcccgttcgacagcgaccgtattgattcagggagaaagtggtaccggaaaggaactggttgcacaggctatccatcatgaatatacccttcgctatgggcagttaaaaagaaaacattcccggccattcgttgctgttaactgtggtgcaatcgccgaatcgttattagaggcagaattgtttggttacgaagaaggtgcatttacgggttcacggcgcggcgggcgggctgggttatttgaagttgcgcacaggggaacgttatttctggatgaaattggtgaaatgccattgccgctacagacccggttattgagagtactggaagagaaatcggttgtcagagttgggggatatcgtccgattgccgttgatgtgcgtattatttgtgcaacccatgttgatttggatcagtgggtaagagaagggcgcttccgtgttgatctgttttatcgtttaaatgtattgcgcattaatcttccggcgttacgggagagggaaaatgatatcagtatgctggctcaggagtattttcggcgggcatgtgccgctcttaatttgcgcgtttcacctttaagaacgcgtgaactttctcagtgtgatgaagtattacgatcttatcactggccgggtaatgtgagggaactgcgtaacctgatggaacggatcgctctttatacgagtgctaatcctgaacagatattaacccctgctctgatattgtcgctttctcctgagcgtcaggttgaaattggcatcatgaataatatgcaaggagtaaaaaccgcatctcattcttttacagaaaaatcacctttggagcacgatatttcattgagtgatattgttgcgcatttctcgggtaaccggcaggctgctgcggaatatctggggatcagccgtacgacactatggcggagattgaagcaggagcaacaaaagaacctaaaaaatcctgccccgaatagaggacaggatctgtaaaatctactggcttatttatttgccagtaactgggagtatcgttgcatatcgatattgcctccgctcaagataataccgatacgcttgccctgcaactgttcccttatcgctcttgctgcagcaaaacccaagcaacctgttggctcaacaaccattttcattcgctctgccagaaaatacatcgcatcaaccagttctttatctgaggctgtcagaatatctgtcacaaggtgacgaataatgtcaaaattatgctgacctagatgtggtgtttgtgcgccatctgcaatcgtttttggagtatcaatatatacaatctcaccttttctgaaagattgttgcccgtcattaccctcttcaggttcgacaccaaaaacctgacattttggggacaactgagaagcagataatgctgagccggataacagaccaccgccaccgagcgggacaaacagagtatcgagttcgccgatttcttcaaataactctttggctacagtgccttgccctgcaataatatgtggatgatcataaggcggaattaaagtcagaccgtgtttttctgccagattacggcttatagccttgttatcctcagtatacctgtcataaaaaacaatttttccaccataaccttttgttgcttcaattttggctttaggggcatcatgtggcatcactattgtggctggaatattgtgcatcttagctgctaaggcaatagcctgagcgtgattaccggaagagaaagcaataaccccagcttttttctgctcatcactaaactgggataacgcattcattgcaccgcgaaatttaaatgctcccattcgttggtagttttcacatttgaaatagacttcagcgtcgaatatctgattaaccgtatttgaggtaaatacaggggttttgtggatatagtttttaatgcgggagtgggcttctgaaacatcacgataatcgggaacaaacgtcattacttaaatctcctgagttatataatcctgtggtatccagcctgtttcgccacactctttgtgggcccagaaccaaccattcaataaattttccagatagagtaattcaccggcttttacagttaattcatgtgcaatgtagttttccgtacatattgcctgattaacctgagtcaaacgcaggatctgttggggaacccagccacttatttctgatttatccgtcgtccacacccaataagggtactctatatcagagtggctgattgaaacgatatcaccagactgcaaccggatcggaattggataagcgctggtgtagttcttgattacagtacctttaccaaacatattttctcctgaatttatatttgccgctttacaggcgattactcaaaattcataagatatatactcaatggatttcaagaggtgttgcgggcaacaaagaagtaacttgaaaggcgaagagtaaaaattaatgtagtagctgaagtaatagttaacgattatacattggagtaaattgtatatctatttaactttagaggtaatataaaaaataaaaatcaggagtggattatctggtttcgcaacaacattattaatattgctatcttattattcctgtgtgaatttctttttgaaaatctttctataatacaagaatatttattttagtaattttctgaatgaaggttaatatagctttgattcgctgagtttaatttttggttaaacttttaaagatgaaaagtaatttatataaaatacaatttaacctttttattgtgataaaaacatctcgtacataagtttttttgaggttttgactttatattattttgctattattcattccgtcagtggcttgtaaaaaaattcagtcagagtgttatgttttttgtgtaataaaacatgctaataccataaataaatgagggtacaataatgtctaaaatgattgatatattagttggtatcagagtcgaagatattatgaatgattttggcaagcttagcaaagatattaacaatcctgtttcactttggtctgatggtatttttaaaaaatatatcacttatatccctgaggatgacagacttgcgtcagttaatagttcaggtaatttagtcattaaatgtgatgctggcgatatgctgcgcgtaaaagtaatgacattaaatatgaatttagactattcagttgcactgataaaactggattcaatgatgaacgtcatgccggatgacatgatgacaatgatagaacctcacaaggttgtacagggcatagaatatattccggttgtcgatgtaaaaaatccattagatgtgaatatgcaggcaataagaaattactattggatgagcaaaattaatatgatgcctgcaaatggcactatgcgtacaatgtattatgagtgcattgtaggaatttataaagaaggtattttgcagggttatgttgctgcagagccagctcttatactggataaaagataaatatttcaggtagagacactgaatgaattttccgggccgtgcaatgcacggccttatttatctcagataaataataagtgagaatatcatgctcaataatgataaatcaaaaattgacacatcagagacagaatataaattggaacttgatattacgctcggtgctgagaagtttaatttctccgatccagaaatagaattagaaaacatgcattggggatacaatagtgaagcacaatcaagccagaataggccgtcttttggtaaattatctgttatcgaaaataacacacccattgatgcagataaaatagggtttttctattggtcagaaaggttatttgcaggattgcctggtggttttcttttatttaatgcgcattcttataaaaaacagcaaagctctaaaaatatgttggatttattctatgataaatttctttatgtaacagttgatggtgtaacttaccaccttggaaaatattcaaaaattatagttggaatttcagttgtacatgattacaacattacatacgactatattgctcagtctattcctgacgcgaaaaaattaggcgatgtattgaaggaaactggagaaactaaacgtttttgtttcagatggtgtgataattaagtgattagagtaacgagatatgtttttataacaagtggtcagtttttattgatcactttaacctttatttttaaattgactgatgctcgaacagaaaaaatgacaatcttgattatttttataatgtcaccaaaatcagctgctaataacactcaaaatcatggttataaatcgttcacaaaatgaagtgcgattatgtactcaatctgtacaaaatagtaagtgatgagttgactataacagaaaactaaagagggtagaatgaaacaaacaaatgcaaaaaacttgattaaaacaggcagaaagagctaagatacgggcgtttcagaaacggcctgaaacaagcagtaaaatgccctcttagttaaatggatataacgagcccctcctaagggctagttgtaggttcgattcctgcagggggcgccatccaacagttcaacaccgttcttataagtcctcaaaatccaccatttatcagtattaattgaaaatagccgttcgtagaaacccgcattagttcgttggcatcctcatgcttatatgggtaaattttgggtaaaaattttacctaatgtaattttacccaatgctcactgtgaaacaggtcgactccgctaagataaaagaaaaaccataccgtctatctgatagtaacggcttgtatctatatgttccgttatctggagaaaaggtatggcaattgcgctatcagtttgaggatcatgctcccaatggttagatttgttatgaaatatagtattcacgctcaatgaacgtaccgaccactttgtcatgcatctcttcggatttggaataacctattgtctttctattcagcctctttatccggatacgaagcgtaagattcgttctctcgataggttgggtaaatttctttcccgtgaggtgtttttccttaggcaggcaatcgtaaacggcataatcatctgtacagtaaaaccggatagtaaaatgaaacaggagtgccagcaactttttcaacgttttcctgctgcgatccccaaacacatgtgccactacccgtttcttattcggctcccaggcataccagagccagcgctgattttttttattaccgacaaatgaccattgttcgtctatttcacagacaatatgaatctcactgcccgccgaaccatcagtttattaattgagcaccaactggacagggagtgtccgccatgcgaggtttgtcagaagaaaatccattcccatacgctacgggcgaccgttaccactgcttcccgcactgtgcgaataacagcacgaacaggtgctggcagaaaggatgaagactcaattgtgtcaaacacctcacccactacacttccaaagctatccttggcctgcttttttacctgctctgtgcagagcctcctgtgcaactgtgtcgcaatagggctggtggcgcagtcaggtaggtagcccatcatggcctccaccatcgcttccatcccccatccagttccagctgatactatgcagacaggataattgggcataaacaactgctggatagcattacgcttcgcttcaatcgtttgttgctgttcatgggaagatattctgtcgatgatattccattcgtggcagggctcagctttgtcggcctgatttactacaaacaataccctgtgctgatatgtcagcatgacctgtcgataaaaatgtccatccaccgacagtgcacgatcatccgctttgatgacccacaacaccaaatccaattcaggtaagatccggcggtacagtgctgaatattcatcatcgcgttgctcactctcacccacccccggtaaatcaacaatcatcaggctgtgattgccattgctgagccggaagcgcagcacatcgcgggtgcagggctcaacattgctgacaggtgttacctctccctcgaacagggcattacagaggctgctcttaccgacgccagttttacccataatgccgatcaccggctcgtattgtgtgagactacgaaggcgttcaagaataagactgcgaatggtatgaggcagtaaagccagtggcttttcaatggactgaaggccgtcagatttttgcatacagagctctcagcgtgaaaaataaaaagccccgcgatccggtatgggattgcgggggattcacgaagataatatctgtatgaaattatttggattcaaagtgggtaggcagatttaagaaatgtagcttcaaaaggattaatacagaatcacgtttgagctagagatagctatttgattggatctaaatcattttttttggcaaaagtgaaaaatgatgcctctggcacattgtcataaggaaggtgttgatattattgtaattatggagtactgaatcagtaattatcgcttcgcttcattctagcaaattcgtagatttcttcgtgttcgtaacaaagcaaacagttaatgcccgttaacagtgagtcgagaaggattaccgagatattaaagtattttggatgaagccctccacgtggtcttatcagggtaaattatatgtttttgtaatataaggatatttatgtatttaggtaagctgaaagtttcgcggtttaggtcttgtgatgatgtgaccgtttgtctccgcccagatttaactgtattggttggtgaaaataatggtggaaaatccaatgtcgtagacgcaatcagattgcttactttgccgttgagtggacgccgcgaacgatatccagaggatgaggatgtacgacgctattcgaccgtcccaagttttcaaatcgaaggggctttccaaggtctaagcgataccctcaaaggtctattgatatctgcagttcccgatcctaccaagagcgaggctaccttcggctatcgatatgaatcgcgttctgaacatgctccccgtggtaagactaccatgtgggctggacgtttcgacactaatggaccagagcttggttcttctgagttgattagacacgtttatctcccacctttaagggacgcacatcaggtgcttggtactagcagtggcactcgagtgatggcattgctgcgtaatttcttgccaaaagagcgggaacaggatttcctcgctggtgtcaggcgtgcggataatcggcctgagatcttaactacaatcaatacggatatcagtactgctctaggactactcactaatggagtacgtccgcagatagcggcattggattttggtagcgaaaccttgctcgatgtagctcgtgatttgagatttcgtatggccgatacaggtttgatacccgaagatattcggtcttctggtctggggtactcaaatctactctacatggccactgttgttgtagagctgactaaggccaaagaagcagacctcacgattttccttgttgaagaacctgaagcgcatttgcatccgcaattacaggtacttgtgcttgagttcctcttggatcaagcgcgccaatctgcatcacgtatcatagagccaggaaagcctgaaggccgcatccaaattgttgtgacaacccactcccccaacctgacagcatgggtttctccacgtcacctagtggtcatgcgttcgcggcatcgtgaacaagatggaatagccatctcagaatcagtgagtgtgcctattgccgaaatagggctaaagccaaagacattagataaaatcagccgatatcttgacgtgactcgttccgctttgctgtttggtaacagagctatcttggtggaagggatcgcggaagcactattgttgcccgtgctagcacaaaagcttgtgctagccgctgatttagatgggtggcttaggttcaagggggctgtaattgtgcctattgaaggtgtggacttccgtccatatgtagaggtgctgctacggccatatggtgatgcacgtattgctgataggctgatagtgatcactgatgcgaacccaaccgtgttgggaaataggaaagttgatctggaaaatctggctgcaacgcatggagctccagatgctctgatcgtgctaaccaatcagcatacattggagcacgaaatttttggcgctggaaatgaaagtttcctgaaaagcgtgtttcttcgtttgcatcgtaattcacgtagagactgggaagctcagatagagggcattccagaacaagatcgtcccaatgcatttcttaaattaattgaggcgaaaaaaactcgtaaaggcgatttggcacaagctatggcttcgcgcattgaggcgggtgaaccatttgttgttccgccttatctcattgatgcaattcgtggagcttcacatatatgactggcatccacaatctaaccccagagcaagagacatttgcttctcacattggcggagtcttcgttaatgcttgtcctggagccggaaaaacgcgcactatcattgctcggctagcgaggatcgccgctaagttgccttctcgtcagggcatagcgatactttcattcacaaactccgcggtagacgagttccgcgaacgatgcctggctgctgggctcgatacgcttttgaagtatcctagtttcatgggaacacttgatgctttcgtcaggcatttcgttgtactgccaagttgcgcggtatcgagccaaactcggccaattatcctagatagttgggatacgcttggtgtagaaattcgtttatcaggtcaatttgcctttcgaggtgaatcggtaagcttagatttgtttgattcagaaaccaacattattgatcctgatagaatcggacatgcgggtttgcaaaatcatgtacgtcaacatcagattcgatatcaacaagctgcagcaaatcggcgacgatctttgttacaagctggctatatgagtgcaggggacgcacgtgctcaaacattgcggttgattagagataatgtaattggtggggctctttttcgcgcattagcggcacgttttcaagaagttatggttgatgaagggcaagattgcaatccactcgatctacaaatactgacatggctcagagcacatggggtaaatgttacgttcgtttgtgatcctgaccaagcaatctacgaatttcataatggtaatcctcaaggaatacaaatacttaaagatacatatcctattgcgtcgcataaggagttgacggggaattttcgtagtagtcccgcaatttgccagttagcagccactctaaggcgagaaggtcaagttgatcggtcgcttggtgaaagtgagaatgttgactatccaattttacttcttacctacggtggccggggcccaacggaaattattggtcaggcattccttggacggattacggaactgggactggagtcaaccaaggcgattattttggctcactcaggcaaagttgctatgcgggcagctggtgtcacttccagcaattcaaccggaaactcgcgaattgagttgctggctcgtaaagtgtcagagttctggtcgcctgccgcaaccccaagaacgaaggagaatgtagtccagtcagtcgaaatattgttgctggatttaatgggggttcgccaaccaaatgagcatctgattaaagccatcgaacgtcttggaatggaccggcgtgcccatcggagatgcgccctaagttttctcattaaccttccaaaaacgtgcagagattccgatgaagagcggcttgcctggatagcctgtgttcatgcagaaatggagaagctgcatctgccactcccggctggtgtaagtgtacgtcgtttcttccgacagcctcctaatgcgcaatggtcaaagcatcttcaagtgcccgctgctctaggttttgcatgtggcaacatacatgaagtgaaaggtcgtgagtacgatgcagtatgcgtcgtagtcccgccgaatcgagcccctgaaaacagaattgaagcactcttcgagtcatgggaagcgcgagtagatgctgaggcaaagcgcgtactctacgttggcctcacccgtgctcgtaattttgttgctcttgcgataccaaacgcctttgcagggcgctgcgttgatctgctggccacaggccaagtgccctacacaagagtggatttgtgaaccagaaaccaacagttttcatatcctattgatataaattaattttaaatggatttttcactatgtggcatgataacgagacaactgtcgattatttgaattttggtgttgttgctgatgcatgtgcaagcctgctgaagcaggctaatggggaacctatttctataggagtctcaggtggctggggagcaggtaaatcttctctggtgaaaatgattgcttcacgcctagagagctcttcagttgaagagtcgttggtggaagagagaaatcaagaaaagcattcctttgtcgtactcactttcaatccatggctataccaagattttgagtccgccagaagtgcattgttacaaatagtgggggacgagattgttcggcttacagatgaaaataagactatcaccgacaaagtatctgaactgtggcgaaggataaatcttctccgggtcgctcaattaagtggcgaagctgcattgactttaactactggcattcctatcggttctcttggaaaaaccgtttgtaaattggctggttggtttacgtcggatgacaaattgagcaatgaatcatcagatacagatagtctcgagctaagtactagcggtcttctaaaaccgagtgagccattctcgatgccagcccatattcaggcattcagggatactttagagagtattctcgaagagttgaaaattacgttagggcgtgttgacgtttgctcgaagggaattgggtggcatgataatttggtctcttattttcgccaaaaaactcgttacccgaactatcatgccacgacctatgttatcagatcctgtgtgggataagctatttgtcttcatgcaacaaaatcggcttacctatcataaaaaaacgcatcgcctcatcatggaaggtattctttttcgaatgagaaccgggataccctggcgggaactacctgctgaatatgggaaatggaatacggtctttaagcgttttaatgtctggtcaaaaaaaggtgtttttaattcattattcaacgaattagctaagaattctgatactgaatggttgtgtattctttagag

SEQ ID NO: 2713 - DNA, 19492 bp, Xenorhabdus sp.; identical to SEQ ID NO: 2712
  CDS (17190)..(18416)

SEQ ID NO: 2714 - DNA, 19492 bp, Xenorhabdus sp.; identical to SEQ ID NO: 2712
  CDS (15379)..(16644)

SEQ ID NO: 2715 - DNA, 19492 bp, Xenorhabdus sp.; identical to SEQ ID NO: 2712
  CDS (11151)..(11696)

SEQ ID NO: 2716 - DNA, 19492 bp, Xenorhabdus sp.; identical to SEQ ID NO: 2712
  CDS (7513)..(9213)

SEQ ID NO: 2717 - DNA, 19492 bp, Xenorhabdus sp.; identical to SEQ ID NO: 2712
  CDS (782)..(1411)

SEQ ID NO: 2718 - DNA, 17816 bp, Xenorhabdus sp.; identical to SEQ ID NO: 97
  CDS (2)..(400)

SEQ ID NO: 2719 - DNA, 17816 bp, Xenorhabdus sp.; identical to SEQ ID NO: 97
  CDS (435)..(1310)

SEQ ID NO: 2720 - DNA, 17816 bp, Xenorhabdus sp.; identical to SEQ ID NO: 97
  CDS (10281)..(11201)

SEQ ID NO: 2721 - DNA, 17816 bp, Xenorhabdus sp.; identical to SEQ ID NO: 97
  CDS (14395)..(15501)

SEQ ID NO: 2722 - DNA, 17816 bp, Xenorhabdus sp.
  CDS (15042)..(16490)
gctcctttatgtgcgctctaaagctttagagcaaacgatttagcacaaaacggtgtcactttcatcacgaaaaagcggagtaatattaaagcgagtgtgctggaagattgggataagatgatgttatcaaggcgttttattatcgagacggttaatgggcaattgaaaaatatctgtcaaatagaacattctcgtcatcgaagtataaaagggtttctgttgactgttttaacggggttaattgcttattgtcataaaaagaagaaaccatcactgaaagttttctactcagaagaagaagatattccagtgacagcttaaacagaattggggttaattaaccatacttacgggcaaactcttcatcggagttgcacaggtaaataatgaattcaatgaaagaaatgaagtaaggaataaacgtccaacagaaaattagatataaaaagccttgcgcaattttacccagataaaacttatgaacgccaatcccccctagaaaaaatgctaagagcgcagcagcgatacggtttttagttcctgcagttccttgtattgcaccacagtttggacacgccttagctgtttcgtgaattttattaccgcacccgcggcaaaacaccatactcgacattgagcttaatccttttaattaacctgagttttggatagaaatcgacgaactgcctgtttcagaagaaaagttttggtaaaggctgaaaaactgctctgaggaagaacaagctatggttaagctagtagaaattttttatcatgtcgacgatttttgtcatttattcattcttccggctggagtcaattaccctagcctaatagatatcctatcttaaataatagttacaaatttattctaaatatagataaaaaagtaaaatgaggcttccataagacacctacttcaacctcacttatactcactgcttccgaactgtagtggcacacggaatttgattgtctgaatagatatgatatgaattactatgcagaggaccacttctaggtaacgtattctctgcttgaggtacataggctgctttattttatgcgagaggctggggagccactacactggctgattaagtatgaacatacaaaaagttcaaagtaaataattcgtaaataattcgggctgtacacagttggaaccagcacaaacagcaggttactccaaggcagtttgaagttgccgttaaaaccctcaataaaaataattagttagcattttaacttaaggtggaactaattgtggctattaaaacgagtggaaatttattatgaaactaaaaaaacttaagaaagagcttgatgcgttaaagttaatggaaaaagatcctgatgtggtcggttatgtactgtttaacaagcgtaatcgtcgatttgtgacgttggatgaaaatgagtttggtatggtgatgtacgcggatgatatcgaagaagcctacttggcaccgtcacggtttgtcgcattaatggatattgattttttgccggagccagacaaatttgataccgcggctgtcccggttgttgataatcctttatttggtttaatgcttaaagatcctatttgaattaatacgataaataataaaggataataatagtgttcgatccagaaaagtatcccgataaagcaactatccttaaaattattaaggaaaaaaagatgttccgagaaagaattattacacaggcccatcaatggatcacggaacgtgcatatattctggatactgaaaccacaggtttagataaacaggcacaggtcgttgagatagccgttacagatatcgatgggaaggtgatttttcagcgctatctccgcccttctgtactgattgatcctgaagctcaagctgttcacggtataaccctgagtgctttgagtaatgaacctcaatggccgcagattgctgatgaacttatcccgcttttgaccagccgtcctttgattatttttaatgaaaagtttgatctcaggcttatagctcagactgcgaaggcatttgcgatggatacgcgttggataaagcagttgcagtctcagtgtgcaatgggattggcagctcagttttatggtgcaacaaaccgatatggcactatttcactggccaatgcagcacgggctgcgggagtatcagtgaagggaaaagcgcatacggcagtagtggattgccagacgactgccgcagtggttcgttccattgcggatttatattctcagctaaagtaagacattatcctgctcactgtattccccgtccaaaacagccacaaaaggacggggaattaaattacatactaccctgatacttattaatttcctgattgagtaatcccagtcgttgaactaatgttcttcttctttctatacccttggcaaatacctgataaattgtcacaaattcggctaatgcattattaatctgataagccgcgtacagatcttttatttctctggccgctttatcgtaagcgctggcatggccttgttcactgtatgtcttcgcatttttccagtgaatttcttttgcggcaaagaccgcattgagccgttttaatgttgcaagccgctcttgttcgcgctttctttcttcagccagcaagcgttcccgttccatttcctcattcgcagcctgccaataagtatgaagtgaggaaggactcagccaatattgataatcattgctggttgacggtttgcaaactaatgctctcgcttgatgtgcagtcagttgtcctttatcaaataaggatttcaataacaaatctttatctgcatcagatagctgattaatttgctcttctgtggtcaactgcttaacctcagcgggatgtgctggtgatgatttaagcagcatatctaaagccttgtatgctgctggaggaatatcgaataattctgcaaatgccaattgtgcatcagataattgattaaaatcgaaattaatcagagggagttcagacagcgtctcatcgttatcaaatgcgagtttcagccaggggagatatagcagacggtaatctcctctcagtaactctgaacgtaattcaaccaaatgattcagataatcacttgcatcttcatcgtccatataataatcattttcacccacagaaaatgtgaatagtacgtacccattcacattctcacaggttacagagtcaccatcatcaatgtgcataaataccggcgggatcgtatctaacggtacttttaggtagaaaataacctggccccaattcgcatagtaaagcccgatatcaaaatactgaaccattagtttatctggatcagcttttaaatcactatagttataatgaacagaaaaatgactcgaactgatttcggcacggctggagatcattctcagactggctttttgctgtgccgacagcacgccatccagccgttcaaaatggtaatattggtattcactcataggcagaattctataaattcaggttaatatgatgttgtgataacctcactttaacacttggtcaattcaagaggaaattaatgtggcggcttaccaacctccttaccgtatcaccccatctatacttaatcgtgttatagaaataggtgagttattggggcgctggtcagtacaaaatgagatgagttctcctttgttacgtaaagaaaaccggattcgcacaatacaagcgtcattggcaattgagcataatagtttatcgatcgagcaagtcacggcaattatgaatggtaaacgtgtactggctcctgcaaaggatattcaggaagtacacaatgcgatattagcttatgagaaattaccggattggcgtagtcaccgattatctgacttattagccgcacaccggttattgatgatgggattaattgattttccgggacaattacgtggcaatgatgttggtatttatcgtgaaaataaacttattcatatggcacctcctgccagccaaatatcccgtttgattaacgaattacttacatggttaaagcaaactgatatccatccgttaattgccagttctatttttcattatgagtttgaatttattcatccatttgctgatggtaatggccgcatgggccgtttatggcaaacgttgattttgagtgaatggcgctcggagttggcatggttgccggttgaaaccattattcattatcaacagcaagcatattatcaggttcttagagaatgtgatcaggccagtgattgcacggtatttatcgattttatactggaaaaattagctgaagcacttaaggaaagtattgatacagaacagcaggatactatcttagagtcggaagaaatgtcggtacaaatgtcggtacaaatgtcggaagaaaatacacaacagctgaacgcgactgcgaaaaaaatcctgtctattattgtcaatcatccagctataacaatatctcaactagctgatgatttaggcgttactcctagaacaatagaacgaaatattaaagtattgcaggactttgggtatttaattcgtgttggtgcgaaaaaagggggatattggcgggttagataaaattggctgtttttaatttttgttagatcacttttagctccctgtgaattcgaacaattagccctaatcctaataggattttacgactataaattagctattttcatggtataacatcatcatttaaacggaagttatcctaaagcatgatgcaatacacagacagagttacccattcattaatttgcatagcagtttatatcggctggtttgccttgtctttcctgttgattttctttcctaatgcggtagagctatatcgttctgaattagctctccctgtgttaagtcttctgatctggtttccttattcaataatttgttggcgcagttatcagaaaaaatttaacttaatgccgataggtaagttgcgtttaacggatcttgtactacccgtgctggcaattattgctctgatttggataaatggcattcttgggattgaagaatcctggacttcaaatcttgtttatctacctacttttacttttttcctacatgtgattgctatttgtattgcagcccccattagtgaagaaattatattccgtggttttttactaaatgcaggaatgggatacggtgaaagaggaaagcaggtagccattataacgacatcgttgttattttctgccgggcatatgcaatattcatcacccactacttttatcgtgttattcgtattttccgttatcctatgccatgtaaggatacatactcgttctcttattattccgatggtgctacatgcacttaataatatttttgctgttttatatgagttttaactcatttcagggtatggaaatttcatgcccatttgatattttaagtttcggtgaataaatctaataatcaaacattattataaataaggaaactaacgtatgagtaaccaaaagaaagaaaaaaactggtttaaagacttcactttagattttttaaaagatttctttattgaacatattattgctattataatttttgttgtaattacttctgtggttgtttctattttaaatactattatgggtgcaattgtaatattagctatttttataattatatgtgttattttgtttttcctttttacataaataatcctctgcttaattatatataatgagtcatgtgagctatatcttctcaaatctgactcattaataagttaattgctaaaccaataaaaataaaacttgtcactttatttaaaataattttcactaatgagtgattcgcgataaattcatgcaaaaaaacagacaagtaagatatcatcgtaaatgaaatcataaccacccgttatacgggtggttatgatttaagacgctaacgcgacttaaactggctaaagccataaaataaaagctacgccgacaaatatcaatcccaagtataataattgtagtgaaacaggcattgcttcttcatggttactgataaactgtggcaagaaagccaaaaagaaaataattacttttgggtttgacaaattcattatcattccttttttaatgaatttcttgctatcacagagaatctctgagttatcctttaaataaactggcttggcagttaaagctccccatgccagataggttaagtaaagtactccaagccctctaataatctcaaaagcgatagcattttcccgtattattatagcaatacctaatgaaactaaagatgtatgtattattaacccgatacataacccaatggtaatgaatatacctgtttttcgtccgttcagggctgattgatttaagactaaaatattatctggccccggtaagaagcataaaaatgttgatatttcaataaatggaatgagtgtttctattgatggcattatatattccctctatccttcgtctttcaaattgcctctttgttggctgctcacactcaccccggtcacatagttatctatgctcccggggattcactcccttgccgccgcgacgcaacttgaaatccattggatatatattgattggatagtatattaatgccattaatctgcatgtaaatatgataaatctacttgtgggtatgaattaatttcataccgtattttatcgtcctttcaagatggtttttgattaaagataagcaaagttctctgaaccatttatgttctggatcttcatggtgtttagcatgccagagtaagtagtattgttgtggtttgatatcaataggtaaagtttttatttttaaatcatatcgctgagaaaaatcagacgcgatatgcagtggcatggttagcattgtgtccgtttttaataacaactcaatggctgactggaaaaagggtacggttgcaaaaatatggcgttttaggttcatcatcgctaattgttgatcaatcgggctgtttttatctccgcctccactgatgagaatatgtcggccattaatatagttgctgaccgtcatattgttatcaaaatgaggatggtcgttcctgaatactactacaagcgggtcttccgccattaaatttccgtataaattatcgggtactgaatcagcaattgttgctactaaatccacatcctgctcagctacgttatacaggttatctttatgccactgtttatattcaatactgacattaggtgcttctttttcaatatggctcaatatagaggctaaaatagcctgagcaacataatcgctggaggctaaggtaaactttctgtcacaaagacttggttccattagttcaggtgcatacagattatttaactgttgaagtaaggccggaagttgtgctttcagtttttctccttttttcgtcaggatgaactgattggcttcccgcacaataattctgtcatgaaaatcttcacgtagctgatttaatgttttactcattgcagactgggtaacatttaactgttttgcagattcggtcaggttaagtgttttcagtattgataccagtgcagggagtaatttgtaattattcaagatgtgatttccatatgatcagtgggtaagtgtaataatatcgtaaaatagtcagttaacttttatatgttatatgtacggttattggccgtataaatttgcttgttatctcatcagatgctatcttccgtcagtacgataaataaacatttataggtgaataattctacaattaaattaataaaatatagttttatcaactaactggagtaaccaaaatggcaacgatatcggtaaaaaagcctcataaagaggtgaaaaatgcccgtgtagagttaaagaccagcactgaattgaaagaaactttgcgtcaggcagcacaagttgctggtgttgatttaagtgcatttatcctgagtgcggcttttgagcgagcggaagaagtactggaaaatcaaaagcgtcgtgaattagatgaagaaaactggcgtactttgaatatgctgattgctgaaccagcgtccccaacacttgctttacgcgctctgatgaggaagaacaaagatggaaaagccactaaatgaaattgcggttgaatacatttgtgtgaactaccagagcgatatgatatatccgggccaaaaagcttttgattgtggtaaccatgttattaaccgctacgttcgcagtagtcttaaaagtaatgtttccaatggaaattgcgtcgctaaggtcttaattgatgataaaacaggcgagttacttggtgtgtgcagtttcacaggttattcgctagcaaaatccagactgagtggtgtaataactggttcaatgccaagcgacctttccgtcgttcgcttggtgatgttgggagtatcggcaaaacatcaaaagaagggatatggtcatattttaatgcaggagtttttagagcacgccattaaagttcataatgtgatgccgattaagggggtatttttggatgcagaccctgatgcagtcgcgttttatacccttcttgggtttgttgagttaggtgttcctgcatccaatggaacaactcctatgtttttaaagatccaagatttatttgcagctataaggtagctttagacatagtcattatgaagttgcttttactccaaataatgctccttaaaataacgctctaaaaactcaactgttactctgatacgggcggacatagccaagcgtgtaacgtaaaccgcccagatattcgctgattggtaatattccggcaggatatgtactaaagctcctgatttaatactctctctgatatcccaatatgatcgcaggataataccgtgtccatccagacaccattggtgaatgatctcaccatgattggatgacatcggcccggtgacttttattgactgaactcctgtgctgttttgtagtttccagatcccgaacggatgatcccgctctttgatcaccagacaggcatgagaagggagttcattaattgattttggcactgaatgacgggcaaggtaagccggtgatgcacagaggatccggcggttggatgccagtttacgggcaataagattgtcatcaatctcatcaccaatacgaatatcgagatcaatcccttcagtcgccagatcaacaagacgatcttccacatcaaaacgaagatcgagctgtggataagtctggatcaatgctgataatgccggagcaacgaacttccggccaaagccaaagctgctggtaattctgatctttccctgtggttcttgccgaagttcgcagagttcatccatcatctggttaacatcgttcagaatatgctgcgcccattcataaatccgctcaccatcttctgtaatagatacccggcgtgtggtccggtgtaacagactgacattcaatacattctctaatatcgcgatgcgcttactgataaaagcaggagaggcaccgatctcttccgcggcggcggcaaaactggctcttttcgccactaaaagaaaaacgcgtagatcctgtaaaaagggaagattattcatagattgtaaattatgtttctacatttttagtattgaatacaaatcagtcaattataagatatccagaaagtcaattctgtaccctgataaatgagatatactcgatgaaaaaaacgtttaaaattgcagcaattccgggtgatggaattggtcatgaagtgcttcctgaaggtattcgggttttgcaggcggtggctgaaaaatgggatcttcatttatcgtttgaatattttgaatgggctagctgcgattattatctcaggcacggcaaaatgatgccggatgactggtttaatcaattaatgcagtttgatgctatttattttggcgcagtaggctggcctgaaaccgtgcctgatcatatctcactttggggctcattacttaagtttcgccgtgattttcagcagtatgttaatttgcgtcctgtgcgtttgttaccgggagtgccttgtccattagcgaataagaaaccggaagatatcgatttctatgtcgtccgggaaaatactgaaggggaatattccgctattggggggcgtttcaatgaaggtacagagcatgaagtggtgattcaggagtcggtttttacccgccgtggtgttgatcgcatcctgaaatatgcgtttgaattagcccagagccgcccgcgcaaattattaacttccgcgacgaaatccaatgggttatccatcagtatgccttactgggatgagcgggttgaaaagatggcaaaacagtaccctgatattaaatgggataaacagcatattgatattctttgtgcccgctttgtgttgaatccagagcggtttgatgttgttgtcgcttccaatttatttggcgatattctttccgatctagggccggcatgtaccggaactattggaatttccccttctgctaatttaaatccggaaaggaatttcccttctttgttcgaacctgtgcatggctctgcaccagatatttatggcaaaaatattgctaacccgattgctatgatctgggcgggagccatgatgttacagtttttgggggagggtgagcagcgctatcaggatgctcatgatgatattttagcggcgattgaagcggtaattgtgcaaggcattgtaaccccggatatgaaaggaaaggcatcaacacagcaggtgggagaagccatcgttaatcatttgaatgcttaaaattattcttttctaaaaaaacattattttctaaaaaccatattctttattgggggggtatggtttttttgttgtctgatttcagactgattctgaactaacatcacaaaacattaattacgatatgtgttttatctatttactgtttagctaattgtttaaatagtgtagcgacactatatttttattgttaacaaaaagaagcgataagttttgttcttacttagttgcacgttttccttttgtcctgtccataacaacgataacaggcaattttgtgtatccataaaaaataaggagatatacaaaatggtaaagcggaggttttatgctgagcaacccaaagaaagatattccgttaattgtcatcagtctggtctgtattattgtgatagcaataacactcggtgcgtttcctgaaaaaacaagtgttattgctaatgcaatttttaatggtctgactcgtttgcttgggtcaaccattcagattttagtgcttgttgctttgatgtttgtcctttatctggcactgagtaaatacggcaatattcgtcttggagaaggaaaaccaaaatatgccacagcaccgtggttatgcatgtttatttgtgcggggcttggttcatcgacgttatattggggggtgatggaatgggcctattattataaaacgcccggtctgaatattgctcctcatacgcctaaagctctcgagtacagtatcagctactcttttttccattggggagtcagtgcctgggctacttatgctctggcttcgttggtaatggcttaccattttcatgtcagaaaaaataaaggcctgagcctgtcagggatcatctctgccattatcaaaatcaatcctcagggtttttggggtcgtctggtggatatgacattcttaattgcgacggtaggcgcattaacgatttcgttagtggtgactgcatcaacattaagtggtgggctttcggtgctaaccggcataccgaacaattttatggttcaggccggaatcacattattagccgccttaattttcagcttaagttcttatattggtattgataatggtatgcggcgtttaagccagatggtgggctggggagcgctggggtttgcgtttctggttctgatggcagggccgacagaatttatcattaataatattattcataccattggtctgacgacgcagaatttcctacaaatgagcttgtttaccgatccaatgggagatgggcaatttacccgtagctggactgttttctattggttgtggtggatttcatatactcccggtgttgctatgtttgtgacgagggtttctcacgggcgaaaaattaaagaagtgatttgggcgttattattaggtagtacgtttggctgctggtttttctttggtgttctggaaagctatgcgatgcaccaatttattaccggagccattaatgtccctgaaatattaaatacgttcggtggtgaaacggcggttcatcagctattgaatgcgttgccattcggccagtttttccttattgcctatctttgcattatgattatttttctggcctcacatatggatgcagtggcctacacaatggcagcaaccagtacccgtaatttaagtgaaggtcaggaccccagccggaatttacgtcttttctggtgtgtggtgattacactcattcccctttcgatcctgtttacacaggcttctctggaaacaatgaaaacaacggtagtgctgactgcactcccctttctggtgatcctattatttaaggtctatggttttattcgctggataaaacaagattacgcgcatgttcctgcccatcttattgatacttctgaaccgcaggagaatgttgttattccggtgccgataaaagtaaaaaatactaacaataccttcatccacgacagcaataactaacaaaacagtcaatgaacgtcataagaagattaaggaattgatatgagcatccaacatcctgatttcacattgccaagagatttttgtgcaaacccgacagaagcttataccatgccagcccgtttctatacttctcagagtgtatttgattatgagaaagaagcgattttcgctaagagttggatctgtgttgcacacatcagcgagttggctaacccgaatgattacattacgcgtgaaattattggtgaaaacattgtcatcgtgcgtgggcgtgacaaagtattacgggccttttttaacgtttgtcctcatcgtgggcaccagttattaaaaggggaaggtaaggcaaaaaatgtgattacctgcccttatcatgcgtgggcctttaaacttgatggcaccttagcacacgcgcgtaattgcgaaaatgtggccaattttgataaagacttagcgactctgacccctgttaaactggaggaatacgctggttttgtctttattaatatggatgtaaatgccggtacagttgaacaacagttgccgggattaggagccaaagtattggaagcctgccctgaagtttacgatttaaaactggctgcccgtttcacgacatcaacccctgctaactggaaaagtattgttgataactatctggaatgttatcactgtgctccggcacatccgggtttttctacttctgttcaggttgatcgctactggcatactatgcgtgataactggtcattacaatttggttatgccgttccctcagagcaatctttcaaatttgaaggtgaatcttcattccatggtttttggttatggccttgtactatgtacaacgttacacccattaaaggcatgatgacggttatttatgaatttccggttgatgcggaaacaacgctacaacactacgatatttactttaccaatgaggatctgactcaggagcaaaacgatttgatcgaatggtatcgtgatgtttttcgcccggaagatcttcgtttggttgaaagcgtacaaaagggactgaaatcccgtggttatcgtggtcaggggcgcatcatggcagatagcacaggaagtgggatgagtgagcatggtatcgcttattttcataatcttatcgcgcaaatctaccatgaataatgaggtgtagtttatggctacttatcaaatggttggtgttattgtcagcgatattgaaacgataacgccaaccattaagcgtttcacgttaataccagatcaaaacacgcatttaccctcgtttactgctggcagtcatatttttgtgcaaatgcaggatggcagcagcaattatagtaatgcctattcgttgctcaattctccttttgatgaacaacgttatcaaattgcaattaagcgggaagcgcgttctcgcggtggttcggcatttatgcatgaaaaagtcactattggggataagctctttgtttctgagcctaataatttattctcaatcgtgcctgaagctaaaaaacatatcttaattgcgggtggaatcgggatcacaccatttatgtctcacctgcatcagctggaacagcaaaatgcagattatgaactgcattattgttaccggaatgccaatgaaaacgcattctggcaggaattaatggcatcagaatttaaagataaagttgtttgtcatgtttcatctgaaggttcccgtatggagctggagactttcattgctcaattgcctgaaggaagccacatttatacatgcggttcaaattcattaagtgaaggtgtaaaacaagcggcacaaaaagccggatttcctcaatatcaattacattttgagcagtttgcagttgaagataaaacaggtgatgcctttacccttgtgcttgccagatcaggaattgaattggaggtcgataacgcatcgacaattctgcaagttattgaaagaaataatgccgcagtggttgaaagtttatgccgagaagggatctgcggaacttgtgaaacggcgattttagaaggtgaggctgatcatcgtgatcactattttagtgatgaagaaagagagagccagacatctctgctgatttgctgttccagagcaaaaggtaaacggctggtgattgatttataatgaaagtcatttctagggctacgcggaatattctgtagctctatattccacattgttgctgaccgcgctggcttatctttgtcaccatcatcgctgtacaaatactatccatccccctgcctcgattaatgttagtcccccctcataaatacaaatggttgttttattgaataaaaaataacatgttgcgatggtgggaaaatgtcctcatcagaaaataccttataggggggaatgtgaataatcattacgatgttttgattatgggggctggtgtttctggtatcggtatggcatgccatctggccagagaatgccctgataaaaaagtgtggatattagagcgtcgtcgtacaattggtggaacatgggatttattccgttatccgggtattcgtactgattcggatatgatgagttatggctataaattcagtccctggacagaaaccagtatttttgctgatgggccttcaatcaaacgttatctccgttcagcgatggaggagtataaaattgataaaaaaattcagtttgggataaaaataatcctaattaattggtcaaataaaagccgtcaatgggagatttcagcaattgatgaggccagcggtgaaacccggcagtttacctgcaattttctgatcggtgcgacaggttactttaaccatgatgagcctcattcccccaaacttcccggacttgaagatttcaagggcccggtggttcatccgcaacattggcctgagactttagattacaaacggaaacgggttgttgtgattggaagtggtgcgacagcggtaactttattgccggcaatggctaatgatacagagcatattactatgctacagcgttctcccagttatattttttcaataccgggcagggataaattcgctgaattttttaaaggcattattcctcagcgttggatttacgccctgagcagagagcgtaatatattatttttcagttacctgtataagataagccgatattttcccaatatgttgagagcatttttgctgggactagcccaaaggaaagttggccctgattttgacatgaaaaatcttacgcctgagtacatgccgtgggatgaacgattgtgttttgtgcccgacagtaatttttttaaggtaataagagaaggaaaagcatcgattgttactgatcatattaagcatattactgagaatggcattttgttgcagtctggtaaggagttaccggcagatatcatcgtaacagcgacaggtttacaattacagcttatggggggggttggggtttccattgatgggcaaccgatagatactagtaacattatgttttataagggaacattgattcgggatattcctaattttgcttacctgtttgggtacattaataatgcctggacattaaaaattgatctttcagcggattatatatgtcgtctgttccatgaaatggatcgccgtcaggctacggttgtgactccacatgcgcagccggatgagattttggtggatgagaatattttcggggcgctgaaatccagttatgtaaaacgaagcggtgatgctcttccccgtcagggacgcagcgaaaactggcgtgtgtcacatgattatcaaaaagataaacaggttttacgtcaaccagtagatgatccggctttggagtggacataattaaccccaattccgcttaagctattgctgaaatatcttcttctgagtagaaaattttcagtgatggctttttctctttaaggtagtaagcaatcaatcccgttaaaatcgttaacaaaaaaccggttatacttcggtgacgagaatgttctaattgagagccgatttttaattgtccattaatcgtttcaatgataaaacgctttttaagcataaccttatcccactcagccagtgcaagcgctttcatgttgcggcgttttttcgtgataaaggtgatatccgttttagctaaatcatccgccaattcctgactcagatatcctttgtcaccgtaaagagaacccgtgagatcttttgataattcgcgtacaggctccctatcatccacattacccggggtcactttaagcgctaaaatttcgcccagatggttaataatcaggtgtaatttgaacccatagaaccatcccattgaggtttttccgcgttgcgctatgccctgaaagaccttatgacgaggaatacggatgttatgacaaacgcgcaaactcgtggaatcgataaaagcaatgcctgtcggttttccttttaattgagtcagataactggataaaggtacaaaaacggacggggcaacgctgataaaacgagtatagctgagcaaggaggggaagtcgcggtggtggtattgccagatatgctccaaataaaagtttttaaaatcacggtaatgcgaccgctgaaagaggattaaaactgtcatgatttcactgggatacatgcggccttgtctacggcgcaggcggtatccgttatcgagacaaaactgcgcccactgggggatgaaaagacggcaaaagtcgtcgacatcgcagaaaatttcaactaacttgtccatggcctggagggcaaacgggtctaatttatacagatgaaaatcccactgtcaggattttcatcatatagccattatcccagccagccttctggcgcttagtcttcacgcctattttaactgacttctcatttttcagtaagttaagtgctattttattcattaatgccacattttcggccgcatgaccgcttctcagacgccggctatcctcaccaaaactcacatccaattgccagtgcagtttattttcaatatgccaatggctgcgtatggcacacgcaaggaattctgccgaggcaccacgatggctggtaatatagtagcgcctttcataactctctgttttaccttgctcttcccgccatgactccacaaccgcgataccccccaacgtgtgccactgaggatgagtttctgcagccaat

SEQ ID NO: 2723 - DNA, 17816 bp, Xenorhabdus sp.; identical to SEQ ID NO: 2722
  CDS (13840)..(14805)

SEQ ID NO: 2724 - DNA, 17816 bp, Xenorhabdus sp.; identical to SEQ ID NO: 2722
  CDS (11214)..(12665)

SEQ ID NO: 2725 - DNA, 17816 bp, Xenorhabdus sp.; identical to SEQ ID NO: 2722
  CDS (9638)..(10723)

SEQ ID NO: 2726 - DNA, 17816 bp, Xenorhabdus sp.; identical to SEQ ID NO: 2722
  CDS (7806)..(8075)

SEQ ID NO: 2727 - DNA, 17816 bp, Xenorhabdus sp.; identical to SEQ ID NO: 2722
  CDS (3646)..(4572)

SEQ ID NO: 2728 - DNA, 17816 bp, Xenorhabdus sp.; identical to SEQ ID NO: 2722
  CDS (1664)..(2254)

SEQ ID NO: 2729 - DNA, 17816 bp, Xenorhabdus sp.; identical to SEQ ID NO: 2722
  CDS (1296)..(1592)

SEQ ID NO: 2730 - DNA, 21420 bp, Xenorhabdus sp.
  CDS (1317)..(2117)
gctcgtgccatgtgctctaaagttttctgtattttttcatttcggttgtggaggcgggtaagaatgtgacaacggggttaattcttctgattcatgattatcaaaatttcccagaattaatccaatcgtcgggccatcatcaattgcccctaatgaactaccacaatgattacaaaatgccctgctggagtaatcagaagatcgatataaagaaggaaagccaccctttccaatccatcggactgaatctttgggaaattcaacccaacagagtgtcaatgctccggaatgtttctgacacatcgtgcatgaacaggcatggggattattaggcgttcctgtcgcaatgaactggatattgccgcataaacatccaccacgatattcagatatacccataacctttcctcataaagaataaatagcttcatacacaattaataaaagacccttgctattttattcacggggataaatagcaaaggccctttatattgtgaatgagtaattcatccgaacaaagacagataacgatctctcgaccagcgataatataaggccagcatattattgacttcctcaggataaaatttttcaggtaaaaatgcgtcaccgggggaaatttcagtttcaccatgtatccattcaaacatgtcctgatattcttcatgggctggatcgttaagaatattaagtaaatccctgtaaccatagactcctccacaatcttccggagggcaggcttgttctccttcgaggcagaatatcggcatgggtaattcttccggtgaatagttactgttttccaacaggatttcatgctcccaggagtcaccaaaatcataaagatagatgaatttacttcctttacgtttgatgagtgaatccagtttgaatttcccttcctcatggccttcttctggtgtttcaggcctttcggtaaaacgtttagaatcaaaaataaattcatgtaaatgactatcttcccagcccattacaacttgaatgacatcatgtaatctatccaatgaaatattggatgggacaatgaagcgacgccatatagcgggttttgtttctgtaagtgtaatttttaactgatagaattttttcatttattacccttaatgacttgaataattgacaaataaatatgttgggttcaataaggcttcattacagtatgagtttcctatagtgataatgcgaacaaattctaataaatagcttgagttattcacttatgcaagggcatgattaatagaagaccctatttactgaaaaataagagaaaattaatggcagatagcactggcgtattgattaaaaattcagaagaaataaaacgaatggaaattgccgggcgtatgacggggcaggttcttgaagcggttcgtcagattattatccccggagtgacgacattagaaatagatacgttttgtcataattatatcgttaatacactgggagctattcccggtagtctggggcagtatggttttccctatacagtcaatacatcagttaatcatgtcgtttgtcatggctggccatccgataaaaaattgaaagatggtgatattgttaatgtggatgtgacagtaaaaaaagacggatactatggcgatagcagtgtcacgttctgcgtcggagaagttccctcacatgccaaacggctggtggatataacacaagagtgtctgtacaaggcgatcaggattgtaaagccgggtatcacattaggggatatcgggcagacgatacagcagcatgctgaggcgaataattatagtgttgtccgcgaatactgtggtcatggtatcggaagtagtatgcatgaagaacctcaggttctgcattatgggagcgcgggtgaaggaattgtactggaagaaggtatgacattcacgattgagccaatgatcaatcaggggaaaaaagaggttaagctgcataaagatggctggactgttacaacgaaagatcgccgcttatcagctcagtttgagcatactattctggttacgcatgatggtttcagagttctgaccttacgggatgaagaatgggagatgtttgagcgcatcgagcttcccagttttgtactctattgatagttatctttttttgtgattttaagcaggctgtttttgttttctaatagtctgctatgacgtagtattatcggaaattaaagtctattgtttagtatagccatcattttccggatatataaacaataaaggaactgacttacaacaatatttatggttataaggaataccgataatattatgtcctcactttataaaaataaaaatattttttatttaatctctctttttctactgttattactgatccataattgtttcggatatcagctaaaattaatatatgtttttagtgcttttgcattctttttatttcttgcctccagtaataaacgtctatatgttgtactgatctctctgttttccattgtcggaatattatacgcaccgcttggtctcaactacggttttccggatatcaacgctgtcggttcagtgctttataccaaccgtaatgaaacactggaatatatcagtgggtttcctgtgtcaacttatttgactgtgtttgctatttttattctgatgttgtgctcggtaaaattaaatgccgttttctcagcgaaaggtaagaagtggttattggcactgttttttatttctgcgttttggtcaccggttaaggggtatgtgaagtcgggttttgtggatagctatgaacttctgaataccagtttacctgaaatccgctttttcaaagacgcttaccaaagttatgtgaaggttatgtctgaaaataaccggtttgccagcgttatcaaatatcaggatgactggcagcccaccgttaaagaagataaatatgatacctacattatggttattggcgagagcgtccgtcgggattttttaggagaatatggattccctgataacaacacgccctggctggataagacgaatgcaacaatattcactaactatatttctgctgcaccatccactcagctttcattgacgaactcactggcaattcgtcaggaaaatcagattaagctgaataatagcattatgacactggcaaataaggctggttttgaaactcactggatttccaatcagggaatgaaaggcgggtttgattctccttctgcactgataggccagcaggccacgcactctatttttctgaaagagggaagttcagatgacaggagctatatgccggatgaaaatttattaccccatatccgtaatgcccttaaacagggtcacaagaagaaactgattgccattcatttgatgggctcacacccacagccctgtgccagaacgaataataaatacagccactattttcactccaaagacatctcctgttatgtacagagcatccataatacggacagcttattagctgaaattgagaatatcgccagacataaccagctgaactggacgatgctctattttgccgatcatggtttgtcttttgtgcgcaaaggaacggataaagagaatctgaaccatagtgatgccaataaacagaattatcaggtgcctttcgtcattactggctatgactataacgttaagaccagaatcgatgctcaccgcagcggatttcatcttttacctatgttatccacgtggctggggattgaagaacctcgtttatcttctgaatgtgactggttctctgagcagcaatgcgacgatcaacacactgtcatttcatttgatggtaagtatgctgactttaacagcctgaaagatgatgccattgattttggtttgtagacgataagtatattcacgaaacatctacgctaaagtcactgtaaaaccactgatagaaggattctgaccgcttaatgtgttatttcaccgttagcgcagatccttcccatcccggcggaagaagtttcgtatcatagtacagtgtggcgagtagtatcgcttcctgcggtagtcggataactggcgtacagaagcggagaaatgaaagggtaacttgctgttcgtcttaccttaaaaaagggtgttttatgaacaataataaatttttaaaacatatcccctggatgatactggggataattggggcattttgcctcggagttgttgcactacgtcggggagaacatgttagtgctttatggatagttgttgcttcggtggcagtttatctggttgcttatcgctattacagcctttatatcgccactaaggtgatgaagctggatgcaacacgggcaacaccggcggttgttaataatgatggcctcaattatgtgccaaccaacaaaaatgtcctgtttggtcaccactttgctgccattgcgggtgccgggccgttagtcgggccagtgctggcggcacaggttggttatctgccgggaacattgtggctgttggcgggggtcgttcttgccggtgctgtacaggactttatggttctgttcatgtcttcccgccgcaatggaacatcactgggagagatcgttaaagaagagctggggcgggttccgggaacaatcgccctgttcggttgcttcctgattatgatcattattctggcagtactggcactgatagttgtgaaagcgctggcagaaagtccgtggggagtatttaccgtttgttccaccgttcccattgctctgttcatggggatttatatgcggtatatccgcccgggacgagtaggggaagtttccgttattggtattctgctgctgattgctgcgatatggtttggtggtgttgttgctgctgactcttattggggtccggctttaactttcaaagataccaccattacttatgcattgattggctatgcctttatctctgccttgctgcctgtttggctgattctggcaccacgcgattatctggcaactttcctgaaaatcggtgtgattgttggtctggcggtgggtattgtgatcctcaatcctgacctgaaaatgccggctgtaacacaatttgttgatggtacaggccctgtctggaaaggcacgttattcccattcttatttattacgatcgcctgtggtgctgtatctggttttcatgccctgatttcttccggtacgacgcctaagttactggcaaacgaaaaagatgcccgattcattggttatggtgcaatgctgatggaatcattcgttgcgatcatggctttggttgcagcatccatcatcgagccggggctttatttcgccatgaatacaccgccgtcggcactgggtattaccatgccggatttgcataatctgggaacatctgaagcgcctgtgattatggcggctttgcaggatgtcaccactcaggcagcggccacggtaagttcatggggatttgtgatttcacctgaccaaatcctacaaacggcaaaagacattggtgaaccttcagttctgaaccgagctggtggtgcaccgactctggcggtgggtattgcccatgtattccatcagatcattccggccgcagatatgggcttctggtatcactttggtattttgtttgaagcgttgttcatcctgactgctctggacgcagggacacgttccggccgttttatgttgcaggatttattaggcaatttcgttccatccctgaaaaaaacggattccctgattgccagtataattggtacagcgggctgtgtgggaatgtggggctacctgttatatcaaggcgttgtcgatccgctgggcggtgttaagagcctgtggccactctttggtatttcgaaccagatgctggcagctgttgcactcgtgttgggtactgttgtgctgatcaaaatgaaacgtactaagtacatttgggtaacggttgtaccggctatttggttgttgatttgtactacatgggcgttggggctgaaattattcagtgataatcctaagctggaaggcttcttgttcctggcgaaggaatataagcaacgtattgtggaaggcggagcagatctgactgctcagcagatcaatgatatgacccatattgttgtgaacaactatacgaatgctggcctaagcattttgttccttattgtggtctatagcatcattatttatggtatcaaaactgcgataaacgcgaataaaaacccagaacgtacagataaagaaacaccttatgttcctgttccggaaggtggagtaaaagtttcttctacgcactgatgctaacacttaagccatagagtgctttggcaatcacaataccccacatgataggttttgtattatgtggggtatttctttaaggtatagttttaagggaaatcatttttgagaacagttatgggagagtgttatgtttggtaatcttggccgtgccggaaaatatttagggcaggcagctcggatgctggtgggagtgcctgactatgatacttatgtacaacatatgaaggataatcatcctgaccaaccttatatgacttatgaagaattcttccgtgaacgtcagaacgcacgttatggtggtgatgggaaagggggaatgcgttgttgttagtgagtgcggtcagtacaaacctgaggcgcatcgtcaccttatttttatcaaaaagtgttgattgcgtctcaggctaagttaggtaaatcaggttgctaagcaggctgaataatatttttcctgtctatcctgaatggatagatattaaaagaagtacttccttttaatgcaagatcggcgcaggctttgccaaataatggggcaaatttaaatgaccagccacctaatgataaaataatatttttgtattgatcatattgttgaggtataaaatccaggacggctgtattatcaggtaaatcagtatgtaatgctcttgccatatcaatgggggttgtatctactcctctcatatatttgttggcaaaatcccgggttatatcaatatctaattcctttggtgcaaaacaccttttatctacatcataaaatttatgcgaagcccaatctaccgccagccggataaaaccttttcttgcaaaatcataactaggaaaaccatagaacagattgctgtaaccatttttagggttatcaaattgaaaaaacattggatagtttttttctggaatttctcctgtgagtttataatatgaaaaacacatatcccaaataatataatttattcttattcctactgagttaggtaatatttgattggtgaaagcattagaagtaataactattttatccgatttatagctgccattgtttgttataatcgaaacaccatcttggcggctggttattttacagacttttgtttcctcagtaacggtaacattatttgactctttcaagtattgaccaagttttttgatgatatttttaacatctatagttgcattatccgggctatataaacctatataattatctggcaggtttttgaaagggtacttactttccagttcatctttggtaattatttcatattttttattgagcttttttaatacttttactggcccgaatagtgtgccttccggtgtatcacctgttgcaataccaaaatttagtaggccattcatatatatgaatttagaatccagctctttttctaaatcatgatacatgtctccggctttgaaagataatttagcatgttcaagatcatcatacacggttctccacattctgacatgtcctgctgagcttgaatcttgtgttccgatagtattcctttctatcagcagtatattcttaccagacttagcggcataataagccgtgcacaatccaataattcctccaccgactacacagatatcatattttttattatgaatatatttattttcgtgatctgttaatggtgactccgttttaataacgtcatgtcgattcatctatattctccaattttatttattgttaaagtttaattttattaactataaaaccagacacagattgcacgccaaacacgattgagactaaatagtgttctaacttgaaattcattgtgtatagataattatcgccctaaataatattctttatctaaccattcaggccaattaagacgaaatatttcttgtaataatttttccgtgacacaaaatgctccttcagtccagccctgatcccctgaataagcttctccgataatatgcactgattcattttttattggatgcctcataaaaggcatgacttcgtcaactgatactccgactttccatgcatgatatccaccgccatatggatccttagaccagtcttgaattcgggcaatataaggaggtggaatatcaatgccatgtagttctttaacctgattcattgcttcttctaccaggtgtttagagacaggctctccgggtaaaggagattctttcaatttttcttttgatactatatgagtttcacaaggttcatagatagaatttttatcttttatttgtatcagtgctttccaaaatgttacagcccgcatgtcgttatagcttgataggaataatgaatgtgaatttttatcgtctgtgccgaaatagtagcattggcgaatagctaaatcagtaattgatgcaccggatttggtgttaaattgtttattccaccacgggtactcaaatcccatcaataattttaatgatggttcaggaataaccgtattaatatttttatttaattttgggtgtgaatgtttatcaaagaaaaaattgtactgatccagaagactcagggattgctttggcattgcaagaataatagtgtcagtgtgtactgtccagtctgtctggctattttcatttctgaatcttaatgagtaacgacggtttccgccattattatgctgaaaagttattaaagtgttttttaaccatagcttagcaccattttggtctgtataggcttttgctaaagcataggctaattggtcatatccatttttaatagttcgatattctatatcagtttgtgtaaaatcacctaccatataagacattgattcagcagcattccagtttatggtgtttgaataatatcctcctgcatcagataagaaattatatccttcctgaccgacttgatctttaattaaattccagaatccgatatctttgactttcattttatcatagggacttccttttttaatataagtaatatcctttttgataatatcccactgccgtagactgattttaaatttgtaatcatacttacttgttttttcaacaagattaccgtagttctccttaaaccaagggtctgcaactaaaacgtcatatataatcttattaaataactgtgatgcactatatccttgaatatcatcattaagaaaatatcgtattttaaatttcttatcctttttctgcatttcagaccatgtatccgccctgaaacgctggcctcgtaaatagaagaaattatttggtgagtcactttctggaaagggaccgtaatctaatttaaaaatattctcaatcaatgaagtggtgattttttgtgatgttaaataacgcattcctcctaactcaccaataatatccattccgggtaagttaacagagagtaatcttcctcctatcatatgatttaaatcaaaaatatgtacacttttaggagaataggcgttgtcagaataatctccacttaacaaacgataccctgtatataaaccagatacacccgcaccaacaatagcaatatcaattgatagttcatcctgagtcccggtactatgagggatttgatccatctcaattcttttgttttttttcatgatccatctccattaatataaatagtattctgctggagttgttttttaatacaaagctgagaagagaagtgatttttatcagtatgatattatttttctagaattggagtaactggattaatctgattgtgcaaatcgtgtattattattgatctcagatttgaatttttttaaaacaaacaatttttatagtgatgcaggaaaaaatgaaacctatatcagtgaccatccttacaggatttttaggatcagggaaaacgacattattacagcatattctcaatgctgaacatggttataaaattgctgtcatagaaaatgaatttggtgaagtacctattgataatgaactcatcggagatagagcaacacaaattaaaacactaagcaatggctgtatttgttgtagccgttcgaatgaattggaagatactttacttgatttattagatggtattgataacgggcagtttgtttttgatcgcctgattattgagtgtacaggaatggcagatcccggcccaatcactcagactttcttttctcatgaggttttgtgtcagcgttttttactggatgggattattacactggtggatgcggttcatgcagagcagcagcttgataatttttccattgcacaatcacaagtaggatatgctgataggcttttgttgacgaaaacggatgttgctcctgagaatgacgcattaatcgggcgattgcagaagatcaatgccagagcaccgatccataagatcgtacacggtaaggctgatttagatctgctttttgatctggaaggtttcattctgaatgatcaacttactgttgcacagcctgtttttcgttttatccctcagcaccaaaatagtgttcagtcgatagttgttaccctgaaccattcagtggaattaactaaagtttcaaatttgatggaagagttgttactgagttttgctgataatttactgcgttataaaggtattcttgccattcagggagaatcgcgcaggttgttgtttcagggagtccagcgtttgtacagtgcagactgggatcgtgaatggcgtgatgatgaacatcgtcaaagtgtgctggtttttattggagtagatcttccagagcagaaaatcagggaaaaatttgcacagctatagttagttattttttaataacaacatatctgttgtactgaacttgaaaaatgaagggaatactcccttcattttttaagctacctctttactaatgaaatcgattcattgcagtaagatgctgggtaatacatttttctatatctacctttcaggtgctgtattactggctgcaacctgaaattcataatgtatattattaagaataggtagaaattttttgccacatatttaaatagaaatttatattataaattctaacctggagtttaagttttataaaaacagcaagcactgatttaacaaatacaaaacaataaagacaaatattatacataaatcagatttatcatacgtcaaggttcatatttgcattatgatgaattcacctgttttgtttacctgcaatctccacagaagaagtagtggagatcgtcgcaataacagatcatgttagtgaaaacagggaaaataaatggaaattcacttagagtgtgtctcccaaatgttagaaaagcgttttacattactggctgtgtaaatcactgtatgtgaaatattacggtgccccagataatcctgaattaaacgtgtatcacggccgagatcggcaagtgcgtaaccacaggcatgtcttagcatatgagggtgtggagaaacactgaccgcagcctgcttaccataacgcttcagtaatccataaacttgttgccgtgaaaccgctcccgatttttgggagaggaaaacccatggagaatccgcttctcgccatttttggcgtacatccagccatttttttagtgcttcaatttcttccgggattagtggatgtgttgttgacagaccaccttttaagcgtctgatatgaataatagctgaatttaaatcgagatcggataaacataaattacacagctcactgaccctgaagccatgaataaaacacattaatagcatgcaataatctcgttctgcatgacgtccttgttttgtttctgccaaaattgcgtctatttcgtatcgggttaaaaatttacgttgcttcatgaaattatcattcctattacatcagttcgatcagctataaataacggggatatttaaactaatcgaatacaacaagctattggagcttttccacatgattggataaataccaggttaatataattagaaaacagacaatgaagaaatttgctgcttctatttatctttttttaatgaaaatatttattgagaaagtgtaaatatttgttatgtaaccctcgtgaatagaatgggctaattataaagataattctactaagaatgttgtttggctaaattttgcaactaaacattttgctgagttttatttttagttttttattcttatattgttcctttagggtgtaatggtttcgtctttttactgcatttagtggaaaaagtaaatgatttatctaattagatcaaaatatacacttattttgtgtgctaattatctacaaaaagactccatatgatattttatggattaatattttatgtttttcaaacatccgatattttgttttgatgtttaatatttaatgatgatagtgggcactttaatgccaataatggaaggattgtagagtgttaaatgatcaatggatatgtattggagaactattatttattgttactatttttgtaagtgattatttcattaataactaaatggttttattattcctattaaggtaggacgagttattaaataaatataaattataattaattaaaaatgactattatcattgcaataatagtttattagaggtatttgataacacaaatgccttatggatttcaagatacattgtggtagttaaggaatgaatttatccggcataaaatatgcattccggatgaaaggttgtaatttttataaaaatggtaatagaggtaaattcgtaaagataacagaaaagctgattgagatatgtctgataaagaccttccgtagaggaaggccattatttgtaaataaaccttaatcataaaacagccagtgactgtttttatcacatcaggaaaaggccaggaaaggagagatacacagtaagatccctgtgaagataattaaaaccagtgagattcctttgtagtgatgaaggctggggactttataaaccagataggctggaatcagacagccgacaatcccaaatatcgggctacagatagaggtgaagcttaaaacaggtgcattcagaatgatagctccccacgccaataaaatagcaaataccacaatgcctttttggacccacttttcattgatttttgcagcaggcattaaccgtccgagcaggttcatggctattccctgactggcttcgcggaagccgaggtaaacaccaaaaaaagcggtcatgacagcgaagacattgagcatgacactgacaaaaatgacccagccaccagggaaaaattgggcggcaatcgcaagtgcagaaatattctgctcataagctttgattgcttcatcgtgtcctaatgccagcgtgaaagagacggcatagaaaaataccgtacaaaacaggatagcaaaggcaatattcatcgcccgcagtgccttatagcgggcaacttcgcggttgctttcatgacttcgataagagataaccatcgggcttagtgtctgaataaacaaaatggaagtcagtgtgaaaggcagtgtgataatagcttttttgattaacatggaaaaaggaggaagcgcaccgatattgtataggtgccacataccaatcatggaaagccctagtgcagcaacaacaactaattttaccgttaccatcaggctggaaactttaaatagtaattgctcactacgggaagaaatcatcaccaaaatacagattaaggccagaccataagaaggattttcggatagtaagttatcggtcactccgaaggtttgtaggtatgaggcactatcgttggtaattgcagtggaataaacaaacatccaaattaccagcataataaagtagagcacacctaataaaactccccagttcttaccaagataacccccgattatgctggggtagtctttacattcgggggattcggcaagtgtattaatgaacaaccgctgaaaaagatacatagccggatagccgataactgaagagagcaagaaaacccatagtcccatcagaccaacctgaacaggaaggaaaacaatacctgctcctatggccatgccaatactcataatcacccaacccatgtcagtaccattgaactttatggcctgtttccattcagcttctttcatattggctcgttttgctgccgaagaaacatgagacatgggctgattaccttttattgctgttttcataatagttctcgcttacatttttggtgttggagtcgggtttagctaagacagggagacgtaccatataaacaccaaagaattgtttgctcagaaaatgaattgttgtgtgttgatattaaagaattttatgaagaaaatgttttccggatgactctggcttaatacgtttttgggaagagtcatttttatgcctaaatgggaaaggtgtatcattttctttttatatcaggaagttgtaattgcttatgatattgaaaatttaaacaaccagagagaaaacgatgtgttttatcacatacgaacttgctcaaaacgtcctgtcagtattaaatcctttttattattttcattatgatataatttaggatattaatctagttttttcttattgacgataaaaaatggatgaaaattcatctgtcctgatgagagtaattttatttgtttatttgtttatttttatgctttatttaagctgaatcaatttatggttagagttttgtattaatttatcgattaaaataaaaataacggaacgggatagatgcttatcaaatattatttagtgattatttaaatcatccggtatttatatggttttaaaatggcattttttgttttatttattttttaaaattctatttgttttgtatttacgtttttttagcgagttatttctatttttagataggaatgagtgattttatcgtagttgtgatattcaaaaatcatcaggtatagtgacacagagcaggcctggtgagagaagttctggaggtggggttaagtatcatttaagtcagagtttatacaattattcctatttttagtgggttgtttggaaataatattccgcaatatatgatatttctataatgatattttaaggattaatatcttcagttttgtttaactatagtgatcagctttgttgataatattatgttttatttcatggacttttcctatgataaaatctattatttggccgttttatcttggtcatatctgccgttatatacttaatttcgcttaaatagaaaccagcaagataatataaaggtatcactgacctgacaggctgttaatcaaaaaattcgcaggaagaaaataatgaaaagtaaactgactttagcttctgtttgtctggcttcacttatgctagccggttgtgcaacagaatcctcatcaactcttcaggttcaaaaagtttcctcttataacacaatctataaaggtattcgcagccctattgccgtgggtaagtttgaaaaccgttcaagctaccagaatggtattttctctgatggtattgatcgtttgggtaaccagtcaaaaactattctggtgacagacttacagcaaaccggtcgttttaatgtgctggagcgcacgaatatggccgagttgcaaacagaagccggattacaaggtaaggcacagaagttaaaaggggcaagttatgtcattactggtgcagtgactgaatttggccgtaaagaagtcggtgatcaccagttatggggaattttaggtcgtggtaaatcacagatcgcttatgcaaaagtgatgctgaatgtggtgaatgtggaaacttctgaagtcgttttctcttcagcgggagccggggagtacaagctatccaaccgtgaaattattggatttggtggcacttcgggttatgactccactctgaatggcaaggttttagatttagcaattcgtgaagctgtgaatgatttagtgtcaggtattgaaagtggtgcctggaagccaacgaattaataataaatattatataggaaagattatttaatgtttttgatgaaaaagacggggatgttactggtcacgctagtgttagtcggatgtgtacaggcaccgaaaactatttatgaatggggtgattaccagtcaacgctttaccagtattaccaacaagataaaactgggccactggagcagatacaggctctggaaaaagtgattgaacaggcaaaagccaaagataaacctgttcctcccggcctgcatgcacaaatggggctactgtacagcaaaacaggcaatattgagaatgcctttcagcagtttgaaatagagaaaagattatttcctgaatctgcaccttatatggattttctgctgagtaaaaataagggagtgaaataatgaaccgaattttgggtgcaattggtgctttatttttgctgatactgacggggtgtgccaaacaggcaccgcatgattattctgctttaagggcaagcgatcctaaatcgatactggttctgcctccagtgaataagtctgtacatgtgaaagccgctggcagtgtgatttctcaggttacttatccattggctgagtcaggatattatgtttttcctgttgcggtagtagaagaaaccttccggcagaatggtgtgtctgaggctcaggatattagtaatatcagctataagaaactgcatgatatttttggcgcagatgcagcgctttacttggatatcacgcaatacggtacacaatatcagatcatcagtagtgatactcgtgtaactgctgaggctcgtttggttgatttgcgtacaggtgaaaaaatatggggcggtatagcaacagcctccagcgcagagaatcgtaacaatggtggtggcggaattattggtatgttagtgtctgcggccattgaacaaattgttaatactgtcgctgatagaggccatgagattgcgggcattaccagcaaccgtttgttaagtgccgggcaatattggaatggccacctgctgtatggcccacgttcagagttttatcgtaaagaaaaaacagaataattactcctgttaccttgccgattattttattacaaatgccgcagataattactgcggcatttttactaacgttctttaatctgattaaacatccaatcgcttagtttgccattttttggatttccagcgccacgcgtttaccagaccacgtacccactcatcacagaaaaagccaatccagatccccagaatgcccattcccatcgtaattcccagaaaataaccaactggaatagagataccccacatgaaaatcagggcagtataaagcgggaaccgggcatcgccggaagctcgcagtgcgttaaccataacgatattaaaagtacgccccggctccagaaacactgataacaggaagagtggcagcaacagctcaatgattttttggtcttctgtcatcaggccgagaagtggttgccggaaagcccagaaagataagactactccaattgtgacgataacaccgattttcaggctttttataccgcggatataggcctcttcaaagcgttttgccccgacaaggtgaccaaccataatttcgttaccaatactggtggctatcccaaaaagcataatgaacagcgatagctggaaatacagcgtttgtgctgccagagatgtttcgcccatcaaaccgataaacgcctgtgccgtcatgtactgcaatatccacacgaggttttcaccggccgcaggcaaaccaatatgcaggattttacccagcatattctttgaccagcatatgagtaattttggtaccagctttattttcaggccataaaatagcaagccacagaggagaataactgcaacagtacgaccaaatactgtagaccatgccacaccttcgaggccatatttaggtagcccgaagaacccgtacagaacaatcatattgccgacaattgtcagtaaattggcaatcagggtgacatacatggctgattttgatttgccatatactcgcaagcaggctgccagaataattgaaatggcttctggtatcagacagatacccaaaatatgcagataagcaaatccatcatccatcaggttttctggcagattcatgatatgcaggattttgtagccgaagaaaatagttaccaatgcacagccaaaacccaacacaaaattaaaggcgatggaaatgtggatcgcctgactggctttatcccgccttcctgaaccgaggtattgggcgatgacaacgctgcaaccaacgctgatgaaattgaagatagtaatgaatagatcaaaaacatgattcccaacgcccatcgcagccagataagccgaagaaatatggctaaccatataggtattgattaacagcgtcgccatatgaagaaaaatatcaatgaagatcggccagctcagggaaaaaagcgaacgatcaacaacatcagattgatgcattataaaaaacctattgtttgaattgaaatgagtggtctttttgtggtgtgacatatactcagaatacagtcgtaattttacttggtttattggttgattgataggcaaaacacacgatttgctgatagataacaggtaataaaatttatggctatgacttgattcttatccccgattcactggataatcttctgcctcaaattatctcaccatttttttatctcaaaagccaaacgattgcgtatgagaaatggctgaattgatagcttcagcatttttagtgttactaagtgacgtaatcgttttcgtcgggaggggagtaaagaaatgatgagaaaaataatgatcgatatttaacacactggcaggggataaatatgtctggcatgcaggcaccaactcaatgcaaactcgataggtattttaagataactgaacgtggaagctcggtacgtcaggagattctcgctgggttaacaatatttctggctatggtgtattccgtgattgttgtaccgggtatgctcggacaagccggatttcctcataccgcggtatttatttctgtctgtctggtgaccggaattggctcattgctgatgggattatgggttaatttgccgatggcgattggctgtgccatctcattgactgcctttacggcttttagtctggtattagggcagcaagttagcatccctgttgctctgggcgctgtttttctgatgggatgtatatttacctttatttctgttaccggtattcgagcctggttattgcgtaatattccaatgggaattgcacatggggcaggaattggtatcggattatttttgctgcttattgcggcaaatggcgtcggtctggtgattaaaaatccgaaggaaggattaccggttgcctttggtacactaactgcctttcctgtctttatgactctgctcggtctggctgcgattatcggtctggaaaagaaaaaagtccccggtagcattttgctggttatcattgctatttcaatcattggcctgattttcgatcctgcggtgaaatatcagggattttttaaagtgcctacattaggagaagacggcctttccctgatgttcagtatggatattatgggggcgttgcagccagctgttctgccaagccttcttgcattggtgatgaccgcagtatttgatgccacagggactatcagagctgtggccgggcaggccaacctgttggataagcgtgggcagattattagtggtagtaaggcgttaaccgctgattctgtcagtagtatttttgccggagcgataggctcttcgcctgctggcgtttatatcgaatctgccgcagggagtgctgtaggcggaaaaacagggttaactgcgaccattgtcggtattttgtttctgctaatcttattcctttccccattgtcatatctggttcctgcgtatgccactgcaccggctttaatgtatgtcggtctgctgatgctgagcaatgtgagaaaactgaattttgatgattctgttgatgctgtgtcggggctgttgtgcgccgtattcatcgttctgacctgtaatatcgtgacaggaattatgttgggtttcagcacgttggttgtcggacgtatttttgccggtgagtggcgtaagctgaatatcagtacggtagtcatcgccactgcactggtggtattctatgccagcagttgggctatttagccagaactagcctgaaagttatgcgtaagcggttaacgcttgcgcatatatctccctgcctgataatttttaaaacctgtcaaattttcgacaaaatccctcagataagtataaaataagaaaatggcttgcgggtcattgattcacaatgtgattgttttttgattttccagaataacttcaatttttgtggttattagcgctgttattagaaagaaaaaacagtcacaatctcctcaccgacggatttttggcaatttgtaagggtaacatggaaatattctttactatcttgatcttgattttggtggtgtcagtttctggtgttcttactaaggtgatcccgttccgtgtccctttgccgatagtgcaaatagcaatgggggcgttgctggcttggcctcattttggtttacacgttactttcgaccctgaattattcctcgttttacttatccctcctttgttatttgttgatggctggaaaacaccgaccagagaattttttcaccatgggcgtgaaatcgttattctggttttagtgctggttttagtaaccgttgtcggtattggttatttgatttactggttattgccgagtattccgcttattgcggcttttgctctggccgccgtgttgtcaccaactgatgccgttgccttatcctcaatcgtcgggaaagggcgcattcctaaaaatatgatgagtgtgctggaaggtgaagcgttgatgaacgatgcttcgggtctggtcgctctgaaatttgctgtggcaattgccatgggaacaatggcatttacggtaaccggtgcaacattcgaattctttaaagttgcaattggtggtctggcatcgggcgtcgctgttacctggttgtacagtaaatcactgcgattgatgagccgctggagtggcgatgatcccgcgactcaaatcatgtttatgatgctgttgccatttgcttcttacatgattgctgaacatattggtgtttctggcattctggctgccgttgcggcgggtatgactatcagtacggctggtgtgatccgcaatgcaccgc

SEQ ID NO: 2731 - DNA, 21420 bp, Xenorhabdus sp.; identical to SEQ ID NO: 2730
  CDS (2379)..(3857)

SEQ ID NO: 2732 - DNA, 21420 bp, Xenorhabdus sp.; identical to SEQ ID NO: 2730
  CDS (4097)..(6259)

SEQ ID NO: 2733 - DNA, 21420 bp, Xenorhabdus sp.; identical to SEQ ID NO: 2730
  CDS (6393)..(6596)

SEQ ID NO: 2734 - DNA, 21420 bp, Xenorhabdus sp.; identical to SEQ ID NO: 2730
  CDS (10140)..(10991)

SEQ ID NO: 2735 - DNA, 21420 bp, Xenorhabdus sp.; identical to SEQ ID NO: 2730
  CDS (15481)..(16152)

SEQ ID NO: 2736 - DNA, 21420 bp, Xenorhabdus sp.; identical to SEQ ID NO: 2730
  CDS (16225)..(16539)

SEQ ID NO: 2737 - DNA, 21420 bp, Xenorhabdus sp.; identical to SEQ ID NO: 2730
  CDS (16668)..(17207)

SEQ ID NO: 2738 - DNA, 21420 bp, Xenorhabdus sp.; identical to SEQ ID NO: 2730
  CDS (19010)..(20356)

SEQ ID NO: 2739 - DNA, 21420 bp, Xenorhabdus sp.; identical to SEQ ID NO: 2730
  CDS (20691)..(21419)

SEQ ID NO: 2740 - DNA, 21420 bp, Xenorhabdus sp.
  CDS (20324)..(20911)
gcggtgcattgcggatcacaccagccgtactgatagtcatacccgccgcaacggcagccagaatgccagaaacaccaatatgttcagcaatcatgtaagaagcaaatggcaacagcatcataaacatgatttgagtcgcgggatcatcgccactccagcggctcatcaatcgcagtgatttactgtacaaccaggtaacagcgacgcccgatgccagaccaccaattgcaactttaaagaattcgaatgttgcaccggttaccgtaaatgccattgttcccatggcaattgccacagcaaatttcagagcgaccagacccgaagcatcgttcatcaacgcttcaccttccagcacactcatcatatttttaggaatgcgccctttcccgacgattgaggataaggcaacggcatcagttggtgacaacacggcggccagagcaaaagccgcaataagcggaatactcggcaataaccagtaaatcaaataaccaataccgacaacggttactaaaaccagcactaaaaccagaataacgatttcacgcccatggtgaaaaaattctctggtcggtgttttccagccatcaacaaataacaaaggagggataagtaaaacgaggaataattcagggtcgaaagtaacgtgtaaaccaaaatgaggccaagccagcaacgcccccattgctatttgcactatcggcaaagggacacggaacgggatcaccttagtaagaacaccagaaactgacaccaccaaaatcaagatcaagatagtaaagaatatttccatgttacccttacaaattgccaaaaatccgtcggtgaggagattgtgactgttttttctttctaataacagcgctaataaccacaaaaattgaagttattctggaaaatcaaaaaacaatcacattgtgaatcaatgacccgcaagccattttcttattttatacttatctgagggattttgtcgaaaatttgacaggttttaaaaattatcaggcagggagatatatgcgcaagcgttaaccgcttacgcataactttcaggctagttctggctaaatagcccaactgctggcatagaataccaccagtgcagtggcgatgactaccgtactgatattcagcttacgccactcaccggcaaaaatacgtccgacaaccaacgtgctgaaacccaacataattcctgtcacgatattacaggtcagaacgatgaatacggcgcacaacagccccgacacagcatcaacagaatcatcaaaattcagttttctcacattgctcagcatcagcagaccgacatacattaaagccggtgcagtggcatacgcaggaaccagatatgacaatggggaaaggaataagattagcagaaacaaaataccgacaatggtcgcagttaaccctgtttttccgcctacagcactccctgcggcagattcgatataaacgccagcaggcgaagagcctatcgctccggcaaaaatactactgacagaatcagcggttaacgccttactaccactaataatctgcccacgcttatccaacaggttggcctgcccggccacagctctgatagtccctgtggcatcaaatactgcggtcatcaccaatgcaagaaggcttggcagaacagctggctgcaacgcccccataatatccatactgaacatcagggaaaggccgtcttctcctaatgtaggcactttaaaaaatccctgatatttcaccgcaggatcgaaaatcaggccaatgattgaaatagcaatgataaccagcaaaatgctaccggggacttttttcttttccagaccgataatcgcagccagaccgagcagagtcataaagacaggaaaggcagttagtgtaccaaaggcaaccggtaatccttccttcggatttttaatcaccagaccgacgccatttgccgcaataagcagcaaaaataatccgataccaattcctgccccatgtgcaattcccattggaatattacgcaataaccaggctcgaataccggtaacagaaataaaggtaaatatacatcccatcagaaaaacagcgcccagagcaacagggatgctaacttgctgccctaataccagactaaaagccgtaaaggcagtcaatgagatggcacagccaatcgccatcggcaaattaacccataatcccatcagcaatgagccaattccggtcaccagacagacagaaataaataccgcggtatgaggaaatccggcttgtccgagcatacccggtacaacaatcacggaatacaccatagccagaaatattgttaacccagcgagaatctcctgacgtaccgagcttccacgttcagttatcttaaaatacctatcgagtttgcattgagttggtgcctgcatgccagacatatttatcccctgccagtgtgttaaatatcgatcattatttttctcatcatttctttactcccctcccgacgaaaacgattacgtcacttagtaacactaaaaatgctgaagctatcaattcagccatttctcatacgcaatcgtttggcttttgagataaaaaaatggtgagataatttgaggcagaagattatccagtgaatcggggataagaatcaagtcatagccataaattttattacctgttatctatcagcaaatcgtgtgttttgcctatcaatcaaccaataaaccaagtaaaattacgactgtattctgagtatatgtcacaccacaaaaagaccactcatttcaattcaaacaataggttttttataatgcatcaatctgatgttgttgatcgttcgcttttttccctgagctggccgatcttcattgatatttttcttcatatggcgacgctgttaatcaatacctatatggttagccatatttcttcggcttatctggctgcgatgggcgttgggaatcatgtttttgatctattcattactatcttcaatttcatcagcgttggttgcagcgttgtcatcgcccaatacctcggttcaggaaggcgggataaagccagtcaggcgatccacatttccatcgcctttaattttgtgttgggttttggctgtgcattggtaactattttcttcggctacaaaatcctgcatatcatgaatctgccagaaaacctgatggatgatggatttgcttatctgcatattttgggtatctgtctgataccagaagccatttcaattattctggcagcctgcttgcgagtatatggcaaatcaaaatcagccatgtatgtcaccctgattgccaatttactgacaattgtcggcaatatgattgttctgtacgggttcttcgggctacctaaatatggcctcgaaggtgtggcatggtctacagtatttggtcgtactgttgcagttattctcctctgtggcttgctattttatggcctgaaaataaagctggtaccaaaattactcatatgctggtcaaagaatatgctgggtaaaatcctgcatattggtttgcctgcggccggtgaaaacctcgtgtggatattgcagtacatgacggcacaggcgtttatcggtttgatgggcgaaacatctctggcagcacaaacgctgtatttccagctatcgctgttcattatgctttttgggatagccaccagtattggtaacgaaattatggttggtcaccttgtcggggcaaaacgctttgaagaggcctatatccgcggtataaaaagcctgaaaatcggtgttatcgtcacaattggagtagtcttatctttctgggctttccggcaaccacttctcggcctgatgacagaagaccaaaaaatcattgagctgttgctgccactcttcctgttatcagtgtttctggagccggggcgtacttttaatatcgttatggttaacgcactgcgagcttccggcgatgcccggttcccgctttatactgccctgattttcatgtggggtatctctattccagttggttattttctgggaattacgatgggaatgggcattctggggatctggattggctttttctgtgatgagtgggtacgtggtctggtaaacgcgtggcgctggaaatccaaaaaatggcaaactaagcgattggatgtttaatcagattaaagaacgttagtaaaaatgccgcagtaattatctgcggcatttgtaataaaataatcggcaaggtaacaggagtaattattctgttttttctttacgataaaactctgaacgtgggccatacagcaggtggccattccaatattgcccggcacttaacaaacggttgctggtaatgcccgcaatctcatggcctctatcagcgacagtattaacaatttgttcaatggccgcagacactaacataccaataattccgccaccaccattgttacgattctctgcgctggaggctgttgctataccgccccatattttttcacctgtacgcaaatcaaccaaacgagcctcagcagttacacgagtatcactactgatgatctgatattgtgtaccgtattgcgtgatatccaagtaaagcgctgcatctgcgccaaaaatatcatgcagtttcttatagctgatattactaatatcctgagcctcagacacaccattctgccggaaggtttcttctactaccgcaacaggaaaaacataatatcctgactcagccaatggataagtaacctgagaaatcacactgccagcggctttcacatgtacagacttattcactggaggcagaaccagtatcgatttaggatcgcttgcccttaaagcagaataatcatgcggtgcctgtttggcacaccccgtcagtatcagcaaaaataaagcaccaattgcacccaaaattcggttcattatttcactcccttatttttactcagcagaaaatccatataaggtgcagattcaggaaataatcttttctctatttcaaactgctgaaaggcattctcaatattgcctgttttgctgtacagtagccccatttgtgcatgcaggccgggaggaacaggtttatctttggcttttgcctgttcaatcactttttccagagcctgtatctgctccagtggcccagttttatcttgttggtaatactggtaaagcgttgactggtaatcaccccattcataaatagttttcggtgcctgtacacatccgactaacactagcgtgaccagtaacatccccgtctttttcatcaaaaacattaaataatctttcctatataatatttattattaattcgttggcttccaggcaccactttcaatacctgacactaaatcattcacagcttcacgaattgctaaatctaaaaccttgccattcagagtggagtcataacccgaagtgccaccaaatccaataatttcacggttggatagcttgtactccccggctcccgctgaagagaaaacgacttcagaagtttccacattcaccacattcagcatcacttttgcataagcgatctgtgatttaccacgacctaaaattccccataactggtgatcaccgacttctttacggccaaattcagtcactgcaccagtaatgacataacttgccccttttaacttctgtgccttaccttgtaatccggcttctgtttgcaactcggccatattcgtgcgctccagcacattaaaacgaccggtttgctgtaagtctgtcaccagaatagtttttgactggttacccaaacgatcaataccatcagagaaaataccattctggtagcttgaacggttttcaaacttacccacggcaatagggctgcgaatacctttatagattgtgttataagaggaaactttttgaacctgaagagttgatgaggattctgttgcacaaccggctagcataagtgaagccagacaaacagaagctaaagtcagtttacttttcattattttcttcctgcgaattttttgattaacagcctgtcaggtcagtgatacctttatattatcttgctggtttctatttaagcgaaattaagtatataacggcagatatgaccaagataaaacggccaaataatagattttatcataggaaaagtccatgaaataaaacataatattatcaacaaagctgatcactatagttaaacaaaactgaagatattaatccttaaaatatcattatagaaatatcatatattgcggaatattatttccaaacaacccactaaaaataggaataattgtataaactctgacttaaatgatacttaaccccacctccagaacttctctcaccaggcctgctctgtgtcactatacctgatgatttttgaatatcacaactacgataaaatcactcattcctatctaaaaatagaaataactcgctaaaaaaacgtaaatacaaaacaaatagaattttaaaaaataaataaaacaaaaaatgccattttaaaaccatataaataccggatgatttaaataatcactaaataatatttgataagcatctatcccgttccgttatttttattttaatcgataaattaatacaaaactctaaccataaattgattcagcttaaataaagcataaaaataaacaaataaacaaataaaattactctcatcaggacagatgaattttcatccattttttatcgtcaataagaaaaaactagattaatatcctaaattatatcataatgaaaataataaaaaggatttaatactgacaggacgttttgagcaagttcgtatgtgataaaacacatcgttttctctctggttgtttaaattttcaatatcataagcaattacaacttcctgatataaaaagaaaatgatacacctttcccatttaggcataaaaatgactcttcccaaaaacgtattaagccagagtcatccggaaaacattttcttcataaaattctttaatatcaacacacaacaattcattttctgagcaaacaattctttggtgtttatatggtacgtctccctgtcttagctaaacccgactccaacaccaaaaatgtaagcgagaactattatgaaaacagcaataaaaggtaatcagcccatgtctcatgtttcttcggcagcaaaacgagccaatatgaaagaagctgaatggaaacaggccataaagttcaatggtactgacatgggttgggtgattatgagtattggcatggccataggagcaggtattgttttccttcctgttcaggttggtctgatgggactatgggttttcttgctctcttcagttatcggctatccggctatgtatctttttcagcggttgttcattaatacacttgccgaatcccccgaatgtaaagactaccccagcataatcgggggttatcttggtaagaactggggagttttattaggtgtgctctactttattatgctggtaatttggatgtttgtttattccactgcaattaccaacgatagtgcctcatacctacaaaccttcggagtgaccgataacttactatccgaaaatccttcttatggtctggccttaatctgtattttggtgatgatttcttcccgtagtgagcaattactatttaaagtttccagcctgatggtaacggtaaaattagttgttgttgctgcactagggctttccatgattggtatgtggcacctatacaatatcggtgcgcttcctcctttttccatgttaatcaaaaaagctattatcacactgcctttcacactgacttccattttgtttattcagacactaagcccgatggttatctcttatcgaagtcatgaaagcaaccgcgaagttgcccgctataaggcactgcgggcgatgaatattgcctttgctatcctgttttgtacggtatttttctatgccgtctctttcacgctggcattaggacacgatgaagcaatcaaagcttatgagcagaatatttctgcacttgcgattgccgcccaatttttccctggtggctgggtcatttttgtcagtgtcatgctcaatgtcttcgctgtcatgaccgctttttttggtgtttacctcggcttccgcgaagccagtcagggaatagccatgaacctgctcggacggttaatgcctgctgcaaaaatcaatgaaaagtgggtccaaaaaggcattgtggtatttgctattttattggcgtggggagctatcattctgaatgcacctgttttaagcttcacctctatctgtagcccgatatttgggattgtcggctgtctgattccagcctatctggtttataaagtccccagccttcatcactacaaaggaatctcactggttttaattatcttcacagggatcttactgtgtatctctcctttcctggccttttcctgatgtgataaaaacagtcactggctgttttatgattaaggtttatttacaaataatggccttcctctacggaaggtctttatcagacatatctcaatcagcttttctgttatctttacgaatttacctctattaccatttttataaaaattacaacctttcatccggaatgcatattttatgccggataaattcattccttaactaccacaatgtatcttgaaatccataaggcatttgtgttatcaaatacctctaataaactattattgcaatgataatagtcatttttaattaattataatttatatttatttaataactcgtcctaccttaataggaataataaaaccatttagttattaatgaaataatcacttacaaaaatagtaacaataaataatagttctccaatacatatccattgatcatttaacactctacaatccttccattattggcattaaagtgcccactatcatcattaaatattaaacatcaaaacaaaatatcggatgtttgaaaaacataaaatattaatccataaaatatcatatggagtctttttgtagataattagcacacaaaataagtgtatattttgatctaattagataaatcatttactttttccactaaatgcagtaaaaagacgaaaccattacaccctaaaggaacaatataagaataaaaaactaaaaataaaactcagcaaaatgtttagttgcaaaatttagccaaacaacattcttagtagaattatctttataattagcccattctattcacgagggttacataacaaatatttacactttctcaataaatattttcattaaaaaaagataaatagaagcagcaaatttcttcattgtctgttttctaattatattaacctggtatttatccaatcatgtggaaaagctccaatagcttgttgtattcgattagtttaaatatccccgttatttatagctgatcgaactgatgtaataggaatgataatttcatgaagcaacgtaaatttttaacccgatacgaaatagacgcaattttggcagaaacaaaacaaggacgtcatgcagaacgagattattgcatgctattaatgtgttttattcatggcttcagggtcagtgagctgtgtaatttatgtttatccgatctcgatttaaattcagctattattcatatcagacgcttaaaaggtggtctgtcaacaacacatccactaatcccggaagaaattgaagcactaaaaaaatggctggatgtacgccaaaaatggcgagaagcggattctccatgggttttcctctcccaaaaatcgggagcggtttcacggcaacaagtttatggattactgaagcgttatggtaagcaggctgcggtcagtgtttctccacaccctcatatgctaagacatgcctgtggttacgcacttgccgatctcggccgtgatacacgtttaattcaggattatctggggcaccgtaatatttcacatacagtgatttacacagccagtaatgtaaaacgcttttctaacatttgggagacacactctaagtgaatttccatttattttccctgttttcactaacatgatctgttattgcgacgatctccactacttcttctgtggagattgcaggtaaacaaaacaggtgaattcatcataatgcaaatatgaaccttgacgtatgataaatctgatttatgtataatatttgtctttattgttttgtatttgttaaatcagtgcttgctgtttttataaaacttaaactccaggttagaatttataatataaatttctatttaaatatgtggcaaaaaatttctacctattcttaataatatacattatgaatttcaggttgcagccagtaatacagcacctgaaaggtagatatagaaaaatgtattacccagcatcttactgcaatgaatcgatttcattagtaaagaggtagcttaaaaaatgaagggagtattcccttcatttttcaagttcagtacaacagatatgttgttattaaaaaataactaactatagctgtgcaaatttttccctgattttctgctctggaagatctactccaataaaaaccagcacactttgacgatgttcatcatcacgccattcacgatcccagtctgcactgtacaaacgctggactccctgaaacaacaacctgcgcgattctccctgaatggcaagaatacctttataacgcagtaaattatcagcaaaactcagtaacaactcttccatcaaatttgaaactttagttaattccactgaatggttcagggtaacaactatcgactgaacactattttggtgctgagggataaaacgaaaaacaggctgtgcaacagtaagttgatcattcagaatgaaaccttccagatcaaaaagcagatctaaatcagccttaccgtgtacgatcttatggatcggtgctctggcattgatcttctgcaatcgcccgattaatgcgtcattctcaggagcaacatccgttttcgtcaacaaaagcctatcagcatatcctacttgtgattgtgcaatggaaaaattatcaagctgctgctctgcatgaaccgcatccaccagtgtaataatcccatccagtaaaaaacgctgacacaaaacctcatgagaaaagaaagtctgagtgattgggccgggatctgccattcctgtacactcaataatcaggcgatcaaaaacaaactgcccgttatcaataccatctaataaatcaagtaaagtatcttccaattcattcgaacggctacaacaaatacagccattgcttagtgttttaatttgtgttgctctatctccgatgagttcattatcaataggtacttcaccaaattcattttctatgacagcaattttataaccatgttcagcattgagaatatgctgtaataatgtcgttttccctgatcctaaaaatcctgtaaggatggtcactgatataggtttcattttttcctgcatcactataaaaattgtttgttttaaaaaaattcaaatctgagatcaataataatacacgatttgcacaatcagattaatccagttactccaattctagaaaaataatatcatactgataaaaatcacttctcttctcagctttgtattaaaaaacaactccagcagaatactatttatattaatggagatggatcatgaaaaaaaacaaaagaattgagatggatcaaatccctcatagtaccgggactcaggatgaactatcaattgatattgctattgttggtgcgggtgtatctggtttatatacagggtatcgtttgttaagtggagattattctgacaacgcctattctcctaaaagtgtacatatttttgatttaaatcatatgataggaggaagattactctctgttaacttacccggaatggatattattggtgagttaggaggaatgcgttatttaacatcacaaaaaatcaccacttcattgattgagaatatttttaaattagattacggtccctttccagaaagtgactcaccaaataatttcttctatttacgaggccagcgtttcagggcggatacatggtctgaaatgcagaaaaaggataagaaatttaaaatacgatattttcttaatgatgatattcaaggatatagtgcatcacagttatttaataagattatatatgacgttttagttgcagacccttggtttaaggagaactacggtaatcttgttgaaaaaacaagtaagtatgattacaaatttaaaatcagtctacggcagtgggatattatcaaaaaggatattacttatattaaaaaaggaagtccctatgataaaatgaaagtcaaagatatcggattctggaatttaattaaagatcaagtcggtcaggaaggatataatttcttatctgatgcaggaggatattattcaaacaccataaactggaatgctgctgaatcaatgtcttatatggtaggtgattttacacaaactgatatagaatatcgaactattaaaaatggatatgaccaattagcctatgctttagcaaaagcctatacagaccaaaatggtgctaagctatggttaaaaaacactttaataacttttcagcataataatggcggaaaccgtcgttactcattaagattcagaaatgaaaatagccagacagactggacagtacacactgacactattattcttgcaatgccaaagcaatccctgagtcttctggatcagtacaattttttctttgataaacattcacacccaaaattaaataaaaatattaatacggttattcctgaaccatcattaaaattattgatgggatttgagtacccgtggtggaataaacaatttaacaccaaatccggtgcatcaattactgatttagctattcgccaatgctactatttcggcacagacgataaaaattcacattcattattcctatcaagctataacgacatgcgggctgtaacattttggaaagcactgatacaaataaaagataaaaattctatctatgaaccttgtgaaactcatatagtatcaaaagaaaaattgaaagaatctcctttacccggagagcctgtctctaaacacctggtagaagaagcaatgaatcaggttaaagaactacatggcattgatattccacctccttatattgcccgaattcaagactggtctaaggatccatatggcggtggatatcatgcatggaaagtcggagtatcagttgacgaagtcatgccttttatgaggcatccaataaaaaatgaatcagtgcatattatcggagaagcttattcaggggatcagggctggactgaaggagcattttgtgtcacggaaaaattattacaagaaatatttcgtcttaattggcctgaatggttagataaagaatattatttagggcgataattatctatacacaatgaatttcaagttagaacactatttagtctcaatcgtgtttggcgtgcaatctgtgtctggttttatagttaataaaattaaactttaacaataaataaaattggagaatatagatgaatcgacatgacgttattaaaacggagtcaccattaacagatcacgaaaataaatatattcataataaaaaatatgatatctgtgtagtcggtggaggaattattggattgtgcacggcttattatgccgctaagtctggtaagaatatactgctgatagaaaggaatactatcggaacacaagattcaagctcagcaggacatgtcagaatgtggagaaccgtgtatgatgatcttgaacatgctaaattatctttcaaagccggagacatgtatcatgatttagaaaaagagctggattctaaattcatatatatgaatggcctactaaattttggtattgcaacaggtgatacaccggaaggcacactattcgggccagtaaaagtattaaaaaagctcaataaaaaatatgaaataattaccaaagatgaactggaaagtaagtaccctttcaaaaacctgccagataattatataggtttatatagcccggataatgcaactatagatgttaaaaatatcatcaaaaaacttggtcaatacttgaaagagtcaaataatgttaccgttactgaggaaacaaaagtctgtaaaataaccagccgccaagatggtgtttcgattataacaaacaatggcagctataaatcggataaaatagttattacttctaatgctttcaccaatcaaatattacctaactcagtaggaataagaataaattatattatttgggatatgtgtttttcatattataaactcacaggagaaattccagaaaaaaactatccaatgttttttcaatttgataaccctaaaaatggttacagcaatctgttctatggttttcctagttatgattttgcaagaaaaggttttatccggctggcggtagattgggcttcgcataaattttatgatgtagataaaaggtgttttgcaccaaaggaattagatattgatataacccgggattttgccaacaaatatatgagaggagtagatacaacccccattgatatggcaagagcattacatactgatttacctgataatacagccgtcctggattttatacctcaacaatatgatcaatacaaaaatattattttatcattaggtggctggtcatttaaatttgccccattatttggcaaagcctgcgccgatcttgcattaaaaggaagtacttcttttaatatctatccattcaggatagacaggaaaaatattattcagcctgcttagcaacctgatttacctaacttagcctgagacgcaatcaacactttttgataaaaataaggtgacgatgcgcctcaggtttgtactgaccgcactcactaacaacaacgcattccccctttcccatcaccaccataacgtgcgttctgacgttcacggaagaattcttcataagtcatataaggttggtcaggatgattatccttcatatgttgtacataagtatcatagtcaggcactcccaccagcatccgagctgcctgccctaaatattttccggcacggccaagattaccaaacataacactctcccataactgttctcaaaaatgatttcccttaaaactataccttaaagaaataccccacataatacaaaacctatcatgtggggtattgtgattgccaaagcactctatggcttaagtgttagcatcagtgcgtagaagaaacttttactccaccttccggaacaggaacataaggtgtttctttatctgtacgttctgggtttttattcgcgtttatcgcagttttgataccataaataatgatgctatagaccacaataaggaacaaaatgcttaggccagcattcgtatagttgttcacaacaatatgggtcatatcattgatctgctgagcagtcagatctgctccgccttccacaatacgttgcttatattccttcgccaggaacaagaagccttccagcttaggattatcactgaataatttcagccccaacgcccatgtagtacaaatcaacaaccaaatagccggtacaaccgttacccaaatgtacttagtacgtttcattttgatcagcacaacagtacccaacacgagtgcaacagctgccagcatctggttcgaaataccaaagagtggccacaggctcttaacaccgcccagcggatcgacaacgccttgatataacaggtagccccacattcccacacagcccgctgtaccaattatactggcaatcagggaatccgtttttttcagggatggaacgaaattgcctaataaatcctgcaacataaaacggccggaacgtgtccctgcgtccagagcagtcaggatgaacaacgcttcaaacaaaataccaaagtgataccagaagcccatatctgcggccggaatgatctgatggaatacatgggcaatacccaccgccagagtcggtgcaccaccagctcggttcagaactgaaggttcaccaatgtcttttgccgtttgtaggatttggtcaggtgaaatcacaaatccccatgaacttaccgtggccgctgcctgagtggtgacatcctgcaaagccgccataatcacaggcgcttcagatgttcccagattatgcaaatccggcatggtaatacccagtgccgacggcggtgtattcatggcgaaataaagccccggctcgatgatggatgctgcaaccaaagccatgatcgcaacgaatgattccatcagcattgcaccataaccaatgaatcgggcatctttttcgtttgccagtaacttaggcgtcgtaccggaagaaatcagggcatgaaaaccagatacagcaccacaggcgatcgtaataaataagaatgggaataacgtgcctttccagacagggcctgtaccatcaacaaattgtgttacagccggcattttcaggtcaggattgaggatcacaatacccaccgccagaccaacaatcacaccgattttcaggaaagttgccagataatcgcgtggtgccagaatcagccaaacaggcagcaaggcagagataaaggcatagccaatcaatgcataagtaatggtggtatctttgaaagttaaagccggaccccaataagagtcagcagcaacaacaccaccaaaccatatcgcagcaatcagcagcagaataccaataacggaaacttcccctactcgtcccgggcggatataccgcatataaatccccatgaacagagcaatgggaacggtggaacaaacggtaaatactccccacggactttctgccagcgctttcacaactatcagtgccagtactgccagaataatgatcataatcaggaagcaaccgaacagggcgattgttcccggaacccgccccagctcttctttaacgatctctcccagtgatgttccattgcggcgggaagacatgaacagaaccataaagtcctgtacagcaccggcaagaacgacccccgccaacagccacaatgttcccggcagataaccaacctgtgccgccagcactggcccgactaacggcccggcacccgcaatggcagcaaagtggtgaccaaacaggacatttttgttggttggcacataattgaggccatcattattaacaaccgccggtgttgcccgtgttgcatccagcttcatcaccttagtggcgatataaaggctgtaatagcgataagcaaccagataaactgccaccgaagcaacaactatccataaagcactaacatgttctccccgacgtagtgcaacaactccgaggcaaaatgccccaattatccccagtatcatccaggggatatgttttaaaaatttattattgttcataaaacacccttttttaaggtaagacgaacagcaagttaccctttcatttctccgcttctgtacgccagttatccgactaccgcaggaagcgatactactcgccacactgtactatgatacgaaacttcttccgccgggatgggaaggatctgcgctaacggtgaaataacacattaagcggtcagaatccttctatcagtggttttacagtgactttagcgtagatgtttcgtgaatatacttatcgtctacaaaccaaaatcaatggcatcatctttcaggctgttaaagtcagcatacttaccatcaaatgaaatgacagtgtgttgatcgtcgcattgctgctcagagaaccagtcacattcagaagataaacgaggttcttcaatccccagccacgtggataacataggtaaaagatgaaatccgctgcggtgagcatcgattctggtcttaacgttatagtcatagccagtaatgacgaaaggcacctgataattctgtttattggcatcactatggttcagattctctttatccgttcctttgcgcacaaaagacaaaccatgatcggcaaaatagagcatcgtccagttcagctggttatgtctggcgatattctcaatttcagctaataagctgtccgtattatggatgctctgtacataacaggagatgtctttggagtgaaaatagtggctgtatttattattcgttctggcacagggctgtgggtgtgagcccatcaaatgaatggcaatcagtttcttcttgtgaccctgtttaagggcattacggatatggggtaataaattttcatccggcatatagctcctgtcatctgaacttccctctttcagaaaaatagagtgcgtggcctgctggcctatcagtgcagaaggagaatcaaacccgcctttcattccctgattggaaatccagtgagtttcaaaaccagccttatttgccagtgtcataatgctattattcagcttaatctgattttcctgacgaattgccagtgagttcgtcaatgaaagctgagtggatggtgcagcagaaatatagttagtgaatattgttgcattcgtcttatccagccagggcgtgttgttatcagggaatccatattctcctaaaaaatcccgacggacgctctcgccaataaccataatgtaggtatcatatttatcttctttaacggtgggctgccagtcatcctgatatttgataacgctggcaaaccggttattttcagacataaccttcacataactttggtaagcgtctttgaaaaagcggatttcaggtaaactggtattcagaagttcatagctatccacaaaacccgacttcacataccccttaaccggtgaccaaaacgcagaaataaaaaacagtgccaataaccacttcttacctttcgctgagaaaacggcatttaattttaccgagcacaacatcagaataaaaatagcaaacacagtcaaataagttgacacaggaaacccactgatatattccagtgtttcattacggttggtataaagcactgaaccgacagcgttgatatccggaaaaccgtagttgagaccaagcggtgcgtataatattccgacaatggaaaacagagagatcagtacaacatatagacgtttattactggaggcaagaaataaaaagaatgcaaaagcactaaaaacatatattaattttagctgatatccgaaacaattatggatcagtaataacagtagaaaaagagagattaaataaaaaatatttttatttttataaagtgaggacataatattatcggtattccttataaccataaatattgttgtaagtcagttcctttattgtttatatatccggaaaatgatggctatactaaacaatagactttaatttccgataatactacgtcatagcagactattagaaaacaaaaacagcctgcttaaaatcacaaaaaaagataactatcaatagagtacaaaactgggaagctcgatgcgctcaaacatctcccattcttcatcccgtaaggtcagaactctgaaaccatcatgcgtaaccagaatagtatgctcaaactgagctgataagcggcgatctttcgttgtaacagtccagccatctttatgcagcttaacctcttttttcccctgattgatcattggctcaatcgtgaatgtcataccttcttccagtacaattccttcacccgcgctcccataatgcagaacctgaggttcttcatgcatactacttccgataccatgaccacagtattcgcggacaacactataattattcgcctcagcatgctgctgtatcgtctgcccgatatcccctaatgtgatacccggctttacaatcctgatcgccttgtacagacactcttgtgttatatccaccagccgtttggcatgtgagggaacttctccgacgcagaacgtgacactgctatcgccatagtatccgtctttttttactgtcacatccacattaacaatatcaccatctttcaattttttatcggatggccagccatgacaaacgacatgattaactgatgtattgactgtatagggaaaaccatactgccccagactaccgggaatagctcccagtgtattaacgatataattatgacaaaacgtatctatttctaatgtcgtcactccggggataataatctgacgaaccgcttcaagaacctgccccgtcatacgcccggcaatttccattcgttttatttcttctgaatttttaatcaatacgccagtgctatctgccattaattttctcttatttttcagtaaatagggtcttctattaatcatgcccttgcataagtgaataactcaagctatttattagaatttgttcgcattatcactataggaaactcatactgtaatgaagccttattgaacccaacatatttatttgtcaattattcaagtcattaagggtaataaatgaaaaaattctatcagttaaaaattacacttacagaaacaaaacccgctatatggcgtcgcttcattgtcccatccaatatttcattggatagattacatgatgtcattcaagttgtaatgggctgggaagatagtcatttacatgaatttatttttgattctaaacgttttaccgaaaggcctgaaacaccagaagaaggccatgaggaagggaaattcaaactggattcactcatcaaacgtaaaggaagtaaattcatctatctttatgattttggtgactcctgggagcatgaaatcctgttggaaaacagtaactattcaccggaagaattacccatgccgatattctgcctcgaaggagaacaagcctgccctccggaagattgtggaggagtctatggttacagggatttacttaatattcttaacgatccagcccatgaagaatatcaggacatgtttgaatggatacatggtgaaactgaaatttcccccggtgacgcatttttacctgaaaaattttatcctgaggaagtcaataatatgctggccttatattatcgctggtcgagagatcgttatctgtctttgttcggatgaattactcattcacaatataaagggcctttgctatttatccccgtgaataaaatagcaagggtcttttattaattgtgtatgaagctatttattctttatgaggaaaggttatgggtatatctgaatatcgtggtggatgtttatgcggcaatatccagttcattgcgacaggaacgcctaataatccccatgcctgttcatgcacgatgtgtcagaaacattccggagcattgacactctgttgggttgaatttcccaaagattcagtccgatggattggaaagggtggctttccttctttatatcgatcttctgattactccagcagggcattttgtaatcattgtggtagttcattaggggcaattgatgatggcccgacgattggattaattctgggaaattttgataatcatgaatcagaagaattaaccccgttgtcacattcttacccgcctccacaaccgaaatgaaaaaatacagaaaactttagagcacatggcacgagc

SEQ ID NO: 2741 - DNA, 21420 bp, Xenorhabdus sp.; identical to SEQ ID NO: 2740
  CDS (13476)..(14729)

SEQ ID NO: 2742 - DNA, 21420 bp, Xenorhabdus sp.; identical to SEQ ID NO: 2740
  CDS (11614)..(13347)

SEQ ID NO: 2743 - DNA, 21420 bp, Xenorhabdus sp.; identical to SEQ ID NO: 2740
  CDS (9386)..(9949)

SEQ ID NO: 2744 - DNA, 21420 bp, Xenorhabdus sp.; identical to SEQ ID NO: 2740
  CDS (7084)..(8379)

SEQ ID NO: 2745 - DNA, 21420 bp, Xenorhabdus sp.; identical to SEQ ID NO: 2740
  CDS (2816)..(4129)

SEQ ID NO: 2746 - DNA, 17121 bp, Xenorhabdus sp.
  CDS (12614)..(17119)
aaaactgcgtaacagtgaattaatgacactggttctgggggcattgcaggcaggtgcagccgttaaaggtgaatttgaaaaacgcttcaaaggcattatggctgaagttattcagtcaccaaaacctatcatcctgtttatcgatgaagctcatacgctgattggtgccggtaatcaggctggcgggctggatatttccaacctgctgaaacctgcactggctcgtggcgaactgaaaaccatcgctgcgaccacatggagtgagtacaaaaaatacttcgaaaaagatgcggctctttcccgtcgtttccagttggtcaaagtttctgaaccgagcgcagaagaagcaactgtcatcatgcgtggcctgcgagctatttatgagcaggcacacggtgtcctgattgatgatgaagcactgaaagcctcggcggtactgagtgaccgttatctctccggccgtcagctaccggataaagccatcgacgtactggataccgcctgcgcccgcgtagccattaatctgacatcgccaccgcgccagatctcctcactgacaaccgaactgcatcagatgcagatggaaatcgatgtgctggaaagagagcagcggatggggctgaacgagcattcagaacgtctggaagaactgcaaaaccagcagcaggaaacgcaggagcaactgactgctctggaaagcgactggcaacagcagcaggaactggtgaagcaggtaatcgaactgcgcagccagcttctgtctgatgataaagaagccagccaggatgccgatagagaaaaacaggctgcggatgaagtttctgacaactcagaacatgatgcgactgagcaagaagaagtacaggaagaaacggtcactgaaccggctgatgtgaaatctctgattgaaaaactggctgaactcaatgagcagctggcagaacttcagaaaaaacaaacgctggtttccccacatgtcgataaaactcagattgccggtgttatcgctgaatggacgggggttccgctgaaccgcctgtcacagagcgagctgtcaattgtgactgagttgcctgttcatctggggcagaacatcaaaggtcaggatgttgccattcagtgcctgcataaacatctgttgactgcccgcgctgatttgcgccgtccgggacgccctctgggtgccttcctgttggtagggccaagtggtgtcggtaaaaccgaaactgtactgcaaatttccgaactgatgtttggtggccgccagtacctcaccaccatcaatatgtctgagtttcaggagaaacacacggtttcacgcctgatcggttctcctccgggttatgtgggttatggcgaaggtggtgtactgaccgaagcgattcgtcagaaaccttactccgtcgttctgctggatgaagtggaaaaagcgcatccggacgtactgaacctgttctatcaggcctttgataaaggtgaactggcagatggtgaagggcgcattatcgactgtaaaaatgtcgtgttcttcctgacctccaatctgggttaccagaccattgtcgattatgccgagcagcctgagcagatcaacgatcagctttacccggaactggccgctttcttcaaaccggcattgctggcacgtatggaagtgatcccttatctgccactgggccatgaaacactgaaaaccatcattcagggcaaactggcccgactggataaactgctgactcagcgtttcaacgccgaagtcactatcagcgatgacgtatcagaagagatcctgctgcgcgctacccgcgctgaaaacggtgcccgtatgctggagtcgattattgatggcgcgctgttaccgccggtttcattactgctgttgcagaaaatggccgcaggcaccgcgatcagtgccattcgtttaaccgtagcagaacatgagtttcaggcagagattgaggaggcagaataatgaaacagcggctgaaaagcgtgttagcgttattggaagatgacactattgaacaactggttgaccactttttgctggtgaaccaaaacccgcgttttgatgccctgttggttttcctgcttaacatccatgaaaacaggctggaatgctgtaatttgccagaacctgatgaaatcagctcacgccgattgtatctggatattgatgacgtcaataacccgctgatacaagtcatgcgcaagggaacgcccacagtgtgggattccctgaatcacggtgcgcgcattgacgatcctcacttccgtacattcattgccgagttaccccataactgcgggttgtatggcattccactgtttgactgcaacgggcaggcctgcggtgttattgccatttttgccgaaaatgtcagtcattttaccaacaatgaaaacatgttcggcatttattgccacgttatgcagcaccgactgaaaaagttgcaggaactcgaacaactgcgtgggcagttacgtcaaatccgtcaggtatttcaggttcagcgtcaaaaagaaaaacaactggatgaactgcttgcttccctgagtgaatccaaaaacgcaggagcaggcagtatctccgtggattacagtcacatcgataatctgccaaaggccatagaagaatttgaaagtgccgtgttagttcaacgtcagcgccagtttggcaacgataccagactgatcgcgcaaagtctggggatcgcccagcggacgttggtttacaaactggctaaatacgggtgtagattatgaatatttctttaattatcagttcattactggtgtcattggcaggcagtcccacacttgcggagatagcagaagcacagaaaaccgcagcgtccaaaccacaggaagtggttttacaacaggaaaaacaattggatgagctgcaaaaatgtcgctttgagcgttcccctcttatccgactggcatgttatgaccgggaattcgataaccttaaaatcggtactgtgccagttacgctggaaaatatggggcctatgtggcgacaggcgatggagcaggagatgcagcgaactgaccattcgactggcttcattgtctcgcggggagaaaacggcacaacccggatcattctgacaacccccgctgttggggttccccctccgcgccctgttctgatgctcagttgtattgaccgcatcacccgtttgcaggttgctttgcctaagcctgcggaatcgggtgcggttactgtcacgacgaacaaaaccctgttcaaaaccgaatggttcctgcgggagcgtggttacttatgggaatccagccgtggtctgccggggattgatgaaatcaaacgcttaatgggcagcgaacatatgaccatcaccccagaacaaggcagccagatcacctttaacatttctcagttggagcaggccgcgaaaccattgcgcgaagcctgtcgttggtaatcgacatggacatcagaacacaatttgactggttcggctctctgctggccccgctgtccgacgaacagacaggcaaagcactgggagacaatgatcccacatgggaatttatcgatggcgagatgattaaattcggctcgttgtcacacggttcgctggatgttgaagagatccagcggcaggcactgcaacttttcagcgaaaccagtaaggatttccggctgatggtgcatttgttgcgtaccctgcaacatgccggccagccggctgaactgcttttggcgatggagttgctgacggagtacgtaaaaaactactgggaaaaagcgtggccgaataaacccgtgttgaagcgccgtcttgcgcagcaggtgctcaaacgctttgattctgcccaaaacagctttacagagaaatccagtaaagttcagcgggatgatgcacagggagtactggctcatcttgcacagtgctggcatagcagtgaaccggagctggcaaaagaaatcgaccaactgcgcacccgctataaccgtcagccagaagccggaacagcaccttcacagcctgccgtagcggcaacgtctcagactacgcctgaaccacaatcttctcagggaactacgcaggaaaatgcggctgcgccgatgccggaagtagacgttaacagctccagcgacaaggcgtggaaacagaccctgatgacggtttctgatctgctttgtgaacgttacccggaatcaccggtcggttattgtctgcgccgccatgccgtctggtacaccatcaccacagcaccgatggcgggtgcaacaggtaagacaccgctggcacccgcctcagcggatcgcactgccgattatctggcaaggctgccgaccgcagataacaaactgctggtgcaaattgaacagagtctggcgcttgcaccttattggctggatggtcatgccattgctgctcaggcggcagcacaactgggctacaagaatgttgcccagtccattcgccacgaactgaatgcgtttctggaacggctgcccgtattaaaaaccttaagtttttctgacatgagtccgtttatttctccagagactctggactggctggcacctgaaccctcttcatcaacgggaggcggttcggtttctgctgatcaggaagccatctggcaatgtttccagcaacaagggctggaagccgccctgaaaatgctggaagaacaccagcagcagctcacggagcctcgtgatcaattctatggtcagttgctcaatgctcaactgcttgaagaagcgggcatgacagcactggcacaacagcattaccggaacttgttacacacgggacaacacatgttactgacccaatgggaacccagcctgctgacgcagttagctgaaagaataggcgttgaaaaaacaggcgctgaaaaaatcccttcgcttgataaggatactgcttcaaacaggagcgttaacctatgaaatggccctctttgtcatcaatcgctcaattgaaatcggtgctgccggcagtggggaaatttaaatccatgccgcgttttaaggcagcaatagcgctcattctggcgcttatcccctgcgtgctgctcatcgcagtctggtggtgggggcctgatctgaaaatccgtgaggattatccactggaaagccttgccgcccgctggctggcgacagccctcatcattatgggagtgctgggctggatcggtgtgaaagcgtggcgtcgtctgcgtcagcttgaaaaactgaaccttgatgttgaattgaaagtggttgatccggttcgtatggatattgaatatcaggatcgttaccttgaccactggaaatctcagttacagcgccatctggattcttacaactatctatacgaacgcccgtggtacatggtgatcggcagccagatgagcggtaaaacctcgctgatcaaagaaggttataagctgtctgaaatcgctgcgccggaatatttgcgtcaggatggggatatctccctgttattgcgttgctggctgggagaaaaagccgtcatcatcgacccgaaaggccgcctgattgaccagcctgttccgctgaacagtgacaaaccgcagatcaacagtcgtctgtgggaagccctgctgaactggttgtcagaaaaccgccagcgccagccgcttaacggtattattctgaccgtggatactctgcgtctgatgacggataaccgcgaacagcgtgagcgttacgtgcgggaaattcatcatcgtttgcaggaaattcgcctgactttccacagccagttgcctatctatctggtgatgaccaagattgacctgttgcacggttttgaagccatgtatcagtcgctggatcgcaaactgcgtgaccaaattctgggtgtcactttcagcctcaacaatcgcgacgaaaaagcgtggcgtagtgagctggaacagttctggcagcagtggatgaacaacctgaacggtgccatgccggatatgatgctgaatggcgttgatgctaatcagcgtagcgctctgttcagtttcacccgtcagattcaggggctgtacagctatatcgtacagatgctggaagacattctgtacaacgatgaaaatcaccgtccaatgctgcgcggtgtgtacctgacttccgcccatcaggtcgggcagatggatgacatgttcactcaatcggcttcggcgcagtatcacctcggttctcaggcatttccgacatggcctgcgggagacacgctgcctttctttacccagaccctgttcgaagacgtgttattggcggagccgaatctggccgctgaaaaccgtatctggctgagtcgcaaccgtcgccagttatacaccttctccaccgtgagtgcgctggtcgtactggcaatgtggggtggctggcattacttctaccagaaaaactaccgtgccggagaagaagtactggcagaggcgaaaaaattcctctccgtaccggctccgacaggggatgacaattacggtagcctccagttgccactgttgaacccgatccgtgacgcaacactggcttacggtaattaccatgagaaaaaatctttcctgacagatatggggttatatcagggcggtctggtagggaaaaaagtggaaaacacttacctgaatctgctggagcaaaaattcctgccatccctgatgcacgtactgttggatgacctgaataaggcaccggccggtagtgaggaaaaactcgaaatcctgcgtgtgatgcgcatgatggaagataaaagcaaacgtaatgcagggctggtcgcacagtatatgcgtgagcgctggagtaaagccttctacggtcagcgtgatgtgcaggatgcattactgagccacctgaattacgcactggatcgtactgactggaaagagaaacgtgatgccggtgatcaggaagcgattgatagttttgcaccgtttgcgaaacctatccgggaagcacagctagagctgagcaagctctccgtcaaacagcgtgtttaccaaaacctgcgtatcaaggctcaggatactctgccagcacctatcaacctgcgtgatcagattggcccgagttttgacagcgtatttgtcgccagtaacgaaaaacggttggtggtacctcagttcctgacccgtcagggtctgacggactactttattcagcagagcggcgagctggtcgagctgaccggaatggatagctgggtactgaacttagcgaagaataaaggtctgtacaaagaatctgaatcggcaccacgtaaagacaattacagtgaaccggatcgggagcgtatcgagcgcgaaatcacggagctgtatctggcggattacaccgcaacatggcgtgccgcgatgaataacctcgaaatccgtgactttgaggatttaccacaggctatcaatgccattgaacaggtaattagtggtgaacagccgatcaaacgtgcgttacaaatcctgagtgataacaccaaccctccgatgctcgatagctcactgagtaatacggaaagaaaggcgttgttagataagcaggattacacactcctgactgacatcagccgtggttttgcgcaggaaaccggcgtattgatcgaacatggtgataaaggcagcacgctgcaaagcgtctaccagaaactgatggcactgcatcgttatctgctgtctatccaaaactcaccaacaccgggtaaatcagcacttcaggctgtgcagatgcgactggataagaacaacagcgatgcgatctttgaagtccagcagatggcgaaaaacttgcctgaacccctgaatcgctgggtcggagaactggcgaatcaggcgtggcgcgtcgtcatgatggaagcggtccgctcgctagaagtggaatggcaggatacggttgttaaacagtacaacacctatctggcaggccgttatccgttcaatccgaatgctaaagaagaagtcccgctaagcgagtttgagcgtttcttccgcccggacggcacgcttgatgccttctacaaacagagcctgaaaccatttgtggaacacaaactgacgatgggtactgacggtcgtacgcttatccgtccggatgtgttgaaacagctggaaaatgctaaccgtatccgcgccaccttcttctcaccacagaacgggctgggcacacagtttgccattgagccagtcagcctgaccggcaacaaacgccgcgccttgctgaaccttgatggacagttggtggattacacccacggccgcagcaatgttgcacgtctgatatggccgaactctatgcgtgcaggcacagaaagcaagctgaccctgatgccggacagaagtaatcaggctccgcgctctatcagctatatggggccgtgggcgcaattgcggctgattaacagcggcaagctgaccaacattcaatccggttctttcgatgtgcgcttcagcgtggatggcggcgagatgacctatcgcatctacgtggacgaatcagacaacccatttgccggtgggctgttcagtcatttcaaactaccggacaccctctattgaggcgaaggtgtgggttagttttgaaagtaaaaccttcccctgccttcgggcaggggtttttttaaggagaaaaaaagatatgagcggacaccctgaaaacctcattatccgggcgggaggcagcccgctgaacctgccggaattcgccgttatccgtgacgaaatcaacaaaaccagccatccatcacaacctgaagtcaactggatgctggtggaatccctgtcactgaccctgttcaaaaccaacggtgtcgatttacagacagcgatttattacaccttagcccgaatgcatctgaatggtctggctggatttactgaaggctgtgaactgctggcaggggttatcgtcagtgaatgggatgccttgtggccgtcacaaccacaggtacgcactgatttgctggaatggttccacacccggacagggagtgtcctgcgccagctggattttgccgccagcgatctacggatgatttaccgcgctgagcgggcactccagctcatcattgatcagctacaacaatctgatttgaaacatttgccgagagtagagaacctgctgtggttcttccagaatgcagcgaaaaaactggagaagccgcgtcaggctgcgaaacccgcacagcagccagtgaaaatgccgccgctggtttacctgtctaaatctgaatgtgagccggaaacaccacccccttccccgccgccacagccacaacctgaaattgcgccggaagaaagccagcaacgggtcagggtacagtttccagaaccgccacaacgcgggctgaccgcatggcagggcttcggaatcggggcatttctggggttgttggtgctggtagggagctggctcttattctataaaccgctgcaacagcaactgaacgccataacagaacagcccgcaggttcacggctggcatggttgtatcagccgacactggcaaactacgcagcccagcttgatcgcctggcggaaacatctccactggcaacatgggatgctgcacgaacactgactgcaacagcagaaaaacagtggccacaattagcggaacaagttaacgctacccgtaactggcaacagcagatgaccatccgcatcgatagcgtaccgttaaaaggcagctggtacagcacccgcgatcaactccagcaactggcagacaaaattctgttgcaggaacgcacacgtggcagcttcaccctttcctacctaaaaaccgccatttatgacattcagcgcaaccacggcagcgaaattccgctggaagagttgctgcgccaactgaatgttcatgcggaaaaaggcgaagctgtttctcctgtgctgatgaaagaaattgatgaccgttttaacgcgctgctcggccgttatgaccgcctgcgtcatgtaactgaacagcgtgaccgtgccaccaaacatacaaacatgtaagtggcgaacaatcagggagacataccatgtcaattaagaagagcatagctaaattgcagaaaggacaggcccttgtgcaacaggggcaacaggccgctcaaatggccaagcaagctgcgggcatgttgggggggagcggacaaagtagtggtcagtctctgccgcatactcagggaattaccggcggacagggcacatcaggtggtcagggattagcgaagcaggcagcaagcggtcataacgcagcggctaaagtcttgcaacaagccagcgcattactgggtggcggaggcagtgatcccagtggcctacaatttacgttaaccgccggaggattaccgccgcagacttttgttgtcactgatttcgcactgaatgaaagcttttcccagccattcagtctgagtgtcgggctggcgagtgccgatcctgccatcgactttccgacagtattggatcgcaccgccacgctgaccattttgcaggatggcgttgagcagcgcagtatcacagggatcgtttcccgctttgagcagggcgataccggtttgcaccagactacttaccagatgagcatccgccctgacttgtggcgcacgacactgagacagaactcgcgtattttccagcagttggatattcaggccatcatcaccaccatcctgaaagagcacggtatccgtgacgtcatattcagcctgcgtcatcctcaccctgagcgcgaattctgtgttcagtatcaggaaagtgactttaatttcctacaacgcctaaccgcagaagagggaattttctacttcttcgagtgcggtaatggccgtaatacgctggtctttgccgatgatgccggttctgtaccgccgggaatagtccttccttatcagcccggtggagtcagcacaattggagaacctgccatcagcagcctgacatgcagcgcacaggtacgaccggcacaggtgcaactgaaagactacaccttcaaaaacccggcatggcccgctgaattccgcgcagagatgaaggaagacaccttacaggagatgtattacgagcattatgactatcccggtcgttttaaagatgaaacacacggtgaagcctttacccgctaccgccttgaagccctgcgtaacgatgccgtgatgggacagggcagcggcaacgctatcgccatccagccgggccgtttatttactctgtataaccacccgcgccctgatcttaaccaaccgtggcaagtcgtgggggcgagccactcaggcagccagccgcaagcacgggaaactgcaagtggcgatacgggcacaacgttgcacagccacttccactttatccgccacaaccagagctggcgtccgactccattaccgaagcccgtgattgatggcccgcagattgccaaagtcgtcggcccggcaggggaagaaatcttctgtgaccagtatggtcgcattcgcctccagttcccgtgggatcgttacggacgcagcgacgatcaaagctcttgctggatcagggtgacccaaccgtgggcaggacagggctggggaatgttggcgataccgcgtatcggacaggaagtcgtcgtggatttcctgcacggcgacccggatcagcctatcgtcaccggtcgtacctaccacgccagcaacatcccgccgggcggtctaccgggcagcaaaacccagatggcattccgttccaaaacccataaaggcgaaggctataacgaactgctgtttgaagatgcaaaaggcagtgaactactggctctgcatgcgcagaaggatatgagcacgctggtgaaagacaaccagagcctggtggtggaaaagggtaataggacgctgacgattcagaaaggccatgaagctaaaagggtggaggaaggcaatttgtcggaagaagtttgccagactcgtagtacagaagccagttcggttgttgttgtgacggagggaacgaaaggggaagagccgggtactcagttttataaagcgaccaatgcgatcaccctgatggttgggagtagtcaaatccagctggatactgaagggatcgcgctggcctttaacaacaacacaattttgatgaatgccgaaggggtgtttatcaatggcacgcttatcacattgaattaacggcggatttatcccgctattatcactaataaataaagagaaaaaggaaactccatgaacgcacaagcttacccaatgaaagaaggcaccctgatgatcccagctgactggcgagatgagtcaatgcatgtgtttgtcctgccagacgaaagcggagcgaatctagtgattaaccgcacgccggtgcccgaaggagtcgatcatgccagtttttatgaagagacactgagtcaatttgtcactcacttaccggggtatcaggagcagggacgttcgcaaatggaactgagcggcgagctggcatggcggttggattaccattggcaaagcccggaaggagagatgcaccagatcgtggtgttacaaattcggggagatcaattgttggcttttaatttgacgtcaacgcagccgtttaacgaaagtcggcgtaatactctgctgcaagtggtgagcagttttaacgctgtctgacagggggtcagccatgggactattggaaggagcggcagttcgagccgctcggatggcggcagttcgagctggcactgcatcagccaagggcggcaatggaccgaaagcggcccgtatcggtgacccaatccaacatagcagttttctggccgcattagcgggagtcgtcgccggtgcccttattgcggctgcggttatcggggctgttggccttttgttagggccgatcggaggtttactcgtcggtggctatcttgttgcaaaaatggccggaactatcgccagtgcaagcgctgctgtcacacgaatgtgcgatagtgtctgttctcctgatgggatgctgatgtcgggatcaaaaaacgtcaaaatcgagggaaaagatgcggctcgtgctgaagttgataaatcaggttgcagtaaacatctcaaggtattgattgcacaaggtagcgaaactgtgtttatcaacagtcaggcggccgcacgcgagggggataaattggtgtgcggggcgaccataaagggcggtgcaagtaccgttcttattggctccgggcagggcacttacatagacgtagaagaagagttttcgccctggcaaagagcactgctggtggcggtagagtttatagtgccgccccagcggggtctgctgaaagccggcttaaagctgatgaccaaaggaggacgaaaagcgctattcaggctggcagtgaaagaggccaaaaacacagtccgcgatgcgaaggcggtagtggctggagctaaacttgcagcgaagaacgcgaaagcgtgggcacaaaaagcggccaaaaaccctaaatgggccgctcaaagcgcggcaaaaggggctaaagctggagcaaaagtagcagctagtgcggcaaaaaatcatgtaaaacaggtggctgcaaacgccaaaaatcgtgtcaagcaggctggaaaccgtatcagtaatgccggacgcagtatgaaaaacggctcagctaaggtattgaatggcacaaaaaaaggagccactacagcaggaaagtcagtcaaaaatgacttatccgaacgctgtcagagtgcgaggcgcggttacaatgagacacagggtgcaaagcgttatctagaagccaccaagcgtttcttctgtaaagaccctattgatgtaacaaccggcatgttgtttgaccagcgcattgatatcgaattggggcaaaccattccactcgcttttatgcgtagttggtcgccgggtgaacgaggattattgggtgaaaactggactgacactttttctggtagtgcaatagttaatggtgatcagatagccatacgcaccactgaaggcgcatgcctttactttgttctgatgcctcatgaacagcgtagccgaaatccagagcatccggccttcatactgagtcgcgagggggcaggattttgtttgcgggaacgtaacaatccggtcagtcagcactttactgtgccggtaccgactgaagaaggtgggattcaatggcaactgggtgccttgaaggatgtgtacggtaaccagatccagttccactacagtaacgaaaatcgtttggtcagcgttactcacagtgacggccctgagctgatgctgctgtatcgtgaagacggtaagctggaagagatacgccgcagtgataacgaacaggatgaagtaatggtacgctatggctaccatgacaacggttggttggcagatgctgacagtactcaacattttcatctgttctatgaatacaatgatcaggggcttatcagtcgttggtcggacggtgaccaaaccgcagtcgaatatcagtatgatgcgcaggggcgttgtatttataccgtgggcagcggcggttattatccgggacgatttgaatatgagccggggatcacccgggttattgacccggacgggtatgtgactgcctggcactataatgcagagcaattggttaccaaggaaatctccccctgtggccatatcacccgttatgaatacgataattggggtaacctaacgcgtaaaatcctgccggaaggccagacttttacgctggagtatctggcggatactgggctggtgacggctttcaccgatgcaatgggagccatgtgggaatatgactatgatgagcaggatcggctggtacaagtcatggcaccatctggtcagaaatggatgcaacactacgatgaccaaggccaacccacgcgctttgttgcaccagacggtagtgagacgacgctgactcgtaatgaatttgggctagtaactgccattgaagacagtgatggacgcaaacgtactcaggaatacgatgccaatcacaggttgacggccttgttcgacgaggagaaccgcaacctgatactgggatatgaccgtcaggacaggttgcagcacctcaaaacaggcggtggtgcacagtggagttgggaatatgatcgtcaccaccgcatatccctgagccatcgccccaacaacagccgagagcgattacgccatgatcgccacggtaatctaacgacatggacggatgcacgtggggttgcgtggagtttggaatacggcccctttgacctgcctgtggcacgggtagatggtgaaggtcatcgatgggaatatcgctacgacaaaaatagcctacaattgattgaagtgattaatccgctgggggaacgctaccgttatacattagatgcagatgggcgggtgataacagagactgattactcagatactcagtggcattacgcttatgacggtaacggcaactgtacggagaagcgtgatgctctagggcaaataacccgttatcgatatgatgataatggtaaactgacggagatggaaactccggaaggtactacaacatggtgctatgatccgatgggaaggctgctggaagtagcagcactgggtaccatccccctgcgctttgaatatgatgagcagggacgactcgtgaaggaatatcaggcgtacgggcaaatcagtcatgagtatccagatgcctttactcatcagcgcaatgtgctagtgcaggatgggcaggaatggcagactgagatgggggtcaacaaagccggagaactgaaacggcttaggataagtgacgatcatcgcctgaatattgaacgggatgtggaggcgaatgaatgtcgccgctcctcgaacaaaggctttatcctgcaccaagaacataccctgatggggcagttgactacacaacgtgctgggcgtaataccgaattctttgaagcccatgaggtggcagatattccccagccaacgctagctgggttggacagagaatatcgctatgatgcggcactgaatctggtggcagcgaatgatgaacgggaatgtttgcgttatgttgtcagcggcaatggacaagtaacctccgtcagtgaaggcgaacggctgcgagagcattatcaatatgatgcttctggctatcctgcccgccgttttgatggcctcaacgagattgacggggaacggctgtaccagaaaggccaccggctacgccagctcggccagcatctgtttgagtatgatgatgcggggcggatgaccgccatgcagctgtggcaggaaggccaccgcccgcaactgaccaagttccgctggaacagccagaaccagctagttggcgtgcagacgccgggcggccagcagtgggattatcgttatgacgccttcgggcggcgcacggagaaagtgtgtgagcgggcaggcatgcgcacgacgtatctgtgggatggcgatgtgccggccgaaattcgggagtaccggcacaaccggctgtacagtatccgccatctggtgtttgatggctggcagttgctggcgcaacaagtgcagttctttaccctgaacccggaaaaccggcatgaactgctggccggggagattcagacgcaatacgcggtgtgtgcgccgaccggggagccactggcgttgttcgatgaagccggacaccgggtttggcggcaaccgccgcagagcctatacgggctgcgtctgggcgttctgggggaaaatgccgaactgaatccgggcttaaaatttgccggccagtggcgggatgaagagagtgggctggtctacaatcggttccggtattactcgcctgttgcaagcatgtacctcacgcccgatccattgggactagtaggtgggaagaatccttatgcttatgtatcaaatccaacaagttggatcgatccattagggttaacttcttgtcctggttctggggtaaaagattgggccgttgatgaatatggaaaattgagggatttagtcaaaggtaaaaatttaggccttgatgctcaccatgctggtcaaaaagcaataatgaaagatcttgtaaaaggctatgatccaagtactggaccagctattttggtgccaaaatccggacatacaatatttaaaggggatttaggcgttgtatcaagaagcactaaaaactcaaaaacaggagagaaatttactaatgc

SEQ ID NO: 2747 - DNA, 17121 bp, Xenorhabdus sp.; identical to SEQ ID NO: 2746
  CDS (12181)..(12600)

SEQ ID NO: 2748 - DNA, 17121 bp, Xenorhabdus sp.; identical to SEQ ID NO: 2746
  CDS (10057)..(12126)

SEQ ID NO: 2749 - DNA, 17121 bp, Xenorhabdus sp.; identical to SEQ ID NO: 2746
  CDS (8753)..(9982)

SEQ ID NO: 2750 - DNA, 17121 bp, Xenorhabdus sp.; identical to SEQ ID NO: 2746
  CDS (5059)..(8541)

SEQ ID NO: 2751 - DNA, 17121 bp, Xenorhabdus sp.; identical to SEQ ID NO: 2746
  CDS (3458)..(4939)

SEQ ID NO: 2752 - DNA, 17121 bp, Xenorhabdus sp.; identical to SEQ ID NO: 2746
  CDS (2796)..(3452)

SEQ ID NO: 2753 - DNA, 17121 bp, Xenorhabdus sp.; identical to SEQ ID NO: 2746
  CDS (1993)..(2766)

SEQ ID NO: 2754 - DNA, 17121 bp, Xenorhabdus sp.; identical to SEQ ID NO: 2746
  CDS (2)..(1972)

SEQ ID NO: 2755 - DNA, 6481 bp, Xenorhabdus sp.; identical to SEQ ID NO: 241
  CDS (1241)..(1558)

SEQ ID NO: 2756 - DNA, 6481 bp, Xenorhabdus sp.; identical to SEQ ID NO: 241
  CDS (2071)..(2199)

SEQ ID NO: 2757 - DNA, 6481 bp, Xenorhabdus sp.; identical to SEQ ID NO: 241
  CDS (2069)..(3259)

SEQ ID NO: 2758 - DNA, 6481 bp, Xenorhabdus sp.; identical to SEQ ID NO: 241
  CDS (4765)..(5103)

SEQ ID NO: 2759 - DNA, 6481 bp, Xenorhabdus sp.; identical to SEQ ID NO: 242
  CDS (1938)..(2252)

SEQ ID NO: 2760 - DNA, 726 bp, Xenorhabdus sp.
  CDS (1)..(726)
ctgacggctgacaaagcgtttgtcaaagattgcgatacgctgatttattactggccaaagagcaagcaggaagcccgtttccaactccgcagcctgttttccatcctgcctgtcggaacaaatatttttattgtcggcgaaaaccgcagtggtgtgcgtagcgttgataagttgatggaaggtattgttactttccgcaaagtcgatactgcccgccgttgcagccttttttatggtcagcttgaacaacaggttcagtttgatcagaacaactggtggcatagctatcaggttggggataccatcgtcaatacactgcccggcgtattcagtcaggatgatctggatgtcggcagccgtcttctgctttccacttttgataaaccgatttccggcaacttgctggatattgcctgtggctctggtgtgctggccgcagtgttgggtaaaaataatcccgatttgtcactgactctcagcgatgtcaatgcagccgccataacatccagtaaagcaacattgaaagccaataaactggaaggaaatgttatcaccagcaacgtctattctgctattgaagagaaatttaactggatagtctctaatccgccattccatgatggtctgaaaaccagtatggcagccgctgatgacatgatacgtctggcaccaaattatctgaaatccggtggtaaattccgcatcgtagcaaactcgtttttgcct

SEQ ID NO: 2761 - DNA, 16639 bp, Xenorhabdus sp.
  CDS (229)..(375)
atatatcttccatcattgagttatcttattaactcttttgatatagaaatgaagataataaatactgtttaattggttatcaatttcataaaacaaaaaggacatgatgaatttgaaagcgttattattttttgggaaaatgctaattatctgattgattgggttataccagatagtggagataactataattataaggcaattttattcagtaagccattcattgatatgaaagattcagttgtcccttacaaagaagccgaaggcgcgcaggctttgtgggcgaaagaaggggttatccaaatgatggaagattgtgagttacatggtcaaaaaataacgataaaaccttctgaggtggttgatattaaatagtattgaagctgctcgcagccagcgagcagtaggaaccattttacaattgattcttaggcacaaaatcgtcactaaagaccatccgcttacgccccggttctatttcagtcaacggttctacctgcctcaatgtatttttacaacgtgttacaagatcctgatattcccgagtgctgatccgcttccattccagttcctgctcggtcagagtacgcaaagcgcgggcgggtgtgccgacgatcagctgattggcggcaaaaattgcttctgccttgataaaggccattgctcccacgatggagttttcaccaatttctgcgccatccattacaactgaattcatgccaaccaaaacattgcgccggatttggcacccatgcagtatcgctccatgcccgatatgaccattttcttcaatcactgtgtcctgttgaggataaccatgcatgacacaattatcctgaatattcgaaccatccatcaccaccagccgaccgaaatcaccacgcaggctggcattcgggccgatataaacctgcttgccaataatgacgtcaccgaccaaaacagcggtagggtgaacataactactgggatcaataaccggagttaaaccatcaagttgatatacaggcataagtatttcctcaaacaattgtcaggcgttactaagagccgctgtgcaatcctccaaaacgacgatagtaggcagcagcaggttggggcaatttacctatggtggtttcacattgttcaccaatgtatcgtgttgcggcagggccaatgcgctggtagatgttgatgcataagttccgggcgatttggccttcccactgtgtaggcaacagagcatcaggcagcaatgggtcacgcagtacgacacggcggtaaaagtggatcagcagaaggcgtaactggaaacagcgctccggtgtcagttcgtctgcataacagtcttgcaagagtttcatcaagggccggaatgtgatgataaattcatgatagtgctgagcaacctgatccagcgaccaactggctgatacccgttctttcaggctctgttcggagcggggataaggataatctgcccggaagtagatcacggaatcactggcgttgagttctccgagcagagccggaatatcactttgtgaactgctgggggctgccattaatgtgctgttgagttgactaaacccaaaccaattcagctcttttttcaggcgggtacgttcctctttgctggtttcttccaacagcaataaatcccatttgccgtcccatgccggttgttcgctgagataaattttactctctgcatggcggaattggttcatgccccgctcagtgatgcggtagtaactgcgacgacctattttctctacctccagccagtcttctttttgtaaacgaaagacagatgtccggacaaaacggtcactgaatcccagcggttccagtagaaggctgagactgcccagccagacttcacctccccgatggctgagtgcatcgccatacagggaaatgatcagcgatgttccgctaatcgtttgggcatcaagggcatgtcgaataaaatcgtcgagtttgtgtgtcatattttgttattgtctaaacgcaaatgagtcatgacagtagcataatcaggtgtcccagtcgttattgtcttgtttgaatattatttctgctgacggtggtcaagaacccgaaccgctttgccttcggaacgaggtatatccccacagttgactatactgacttcggtgttgatccctatcatggctttgatgtgatggcgtaattggtggcagatatcgcaacgttgctggatactcagttgcgccggatctttcagttcgaccttgacggacaggctgtcataattcccaacgcggtccacttccagctgataatgtggcgacagttcactgaaacgtgtgatttgttcttctacctgtgatggaaagacattgatgccacggatgatgagcatgtcgtcggaacgtccggtgatcctgtccatacgccgcatattgcgggcagttcccggtaacagacgtgtcaggtcacgggtacggtagcggatcatcggcatagcttctttggtgagtgtggtgaaaaccagctcaccattctcgccgtccggtaatatattcaggttgtcaggatcgatcacttccggataaaaatggtcttcccaaatagtcgaaccatcggcatattccagtgattccatggcgacacccggccccatgatttcggacagaccataaatatccagcgccttgatacccatgcgggtttcaatttcatgccgaagcccttctgtccacggctcagccccgaaaatacctacccgcagagagcattgtctggcatcgcctcccatttggcgttccaatacatccaatagtgtcaggcagtaagagggtgtcatcataatgacatcgggtttaaagtcgcagatcagctgtgcctgtttttctgtctgcccgccagacatcgggatcacggcagcccccagacgctcagcgccataatgtgctcccagaccgccagtgaacaggccgtaaccgtaagcgacatgtattttgtctttggctgttgctccggcaaaacgcaggctacgggcgatcagatcagcccagttgtcgatatcttgctgagtatagccaacaacggtcggacgccctgtcgttccggatgaagcatggatacgcacgactttttccatcggaacagcaaaggtatcaaaagggtagttatcccttagatcctgtttggtggtgtaaggaaatttagcgatgtcctcaagctgccggaaatcactggggtgaataccaatcgcatcaaatttacggcgatacattggcacgttgttataggcatgatgcaatgtccatttcatttgcttaaactgtcgcgcctgaatttcgtcgcgtgaagcaaattcaacagaatcgagattggcctcgggatgtggagtgaagcttgagttgaggtgctgtacgttgttgctcataattcccgcccttttgttggttgaactgtatcaggctgtttttattgtgatacccgtcgtctttcaagttgcctctttgttggctgcactcactcaccccagtcaccgtttttataaacatacggttatctatgctcccggggattactgagaggctcctgcctcccaccggaggccagcctttggctgggcaaattcgtcgggaacgaatttgtcactcccttgccgccgcgatgcatcttgaaatctattgtgtatatatacaggtgttggttatgaaatacgttcaataatcatggcaattccctgaccaacgccgatgcacatggtgcataaggcatagcgtccggctcgccgttccagttcaagcgttgctgtcagtgcaagtcgggcaccactcattcccagcggatgccccagtgctatcgcaccgccattcgggttcacatgttctgcatcatccggtaatccccactggcgcatcactgccagtgactgagctgcgaaggcttcgttcagttcgatcacatccatctgattcagactcagtccggtaagagctaacactttgctcgtagctgacagtggcccgatccccataatgcgtggctcaacaccgctggtggcggttgccacaatacgcgctttaggtgtcagcccgtgttttaatgctgcgacttctgaagcgataatcagggcggcggctccgtcattgacgccggaagcattaccggcagtgacggtgccttcggtccgaaatggtgttttcagcttttgtaactgctctaatgtcgtttcagggcggggatgttcatcctgtgaaatgatcgtgttttccccttttttccggcggtcaggcagggtaacagggatgatctcttcagccagaatgccttgttgctgcgctttagcggtacgttgctggctgcgcagcgcgaaagcatcctgagcgtcccggctgatatcaaatagagccgcaacgttttctgcggtttccggcatcgaatctgtaccgaattgtttctgtatcagcggattaatgaagcgccagccaatggtggtatcaaatatctgcgcctgacggctgaaagccgtttccgcttttcccatcactaatggggcgcgggtcatggattccacaccaccagccagtaccagctgagtttcacccgctttgatactgcgggcagcaaaagccagcgcatccagacctgagccacacaaccggttgagagttgtgccgggaacggaatatggcagaccagccagcaatgtcgccatgcgagcgacattgcggttatcttcacccgcctgatttgcacaaccgagaatgacatcatcaatcgcttgccagtccagtccgggataacgtgccagcaatgcccgtagcggcagagcggccagatcatcagagcgcaggctggcgagggctccaccataacggccaataggtgtacgcactccgtcacaaataaatgcatgggtcatgatttttctttcctgattgttttagtaggagtcgttgctttggcgggttcttctaaaacagaatgacccagacggtgggagtgaccacggaaaaaggccacagttttgccattctgattggtaattttgacatcatataacccgttagttttgccctgatgctgcactgacgcgttagcagtaagccggtcaccattaaaaaccggatggatgaaatcgatattacagccggaagcaacagccgcagttccttcactgttgcaggcataggcgaatgcggtatctgccagactgaatataatgccaccatgacaggtcttatggccgttaagcatggtaggtacaatggtcatgcttaactgagcgatcccgatgtcgatatagtcaatctgcattcccatatgattagcgcaggcatctttggtatacatggtctcaatacagtttcgggcaagttgcttcggggacgtattcgttttattaggcatgatctttcttcttatgttgatattcatgttgccggagagatggagactgtaatgtgacatggcccgccgccagctgccgaagcaggggtgacggacgataacgggtttccccgtaaaactgctgtaagttttccagtgtattgaaaatatgctgccagccgagctgagttccccatgccagtggcccgatgggataattcacaccgcggcacattgccagatcgatatcttcggcgctggcaatgcctttattaagcgcatccagcgcttcgttgcacagcattgctacagtccgcatcgtcagcatggccggataatccggcagtaaaatgacctgtttgccgaggaaatggagaaaacgggcgacttttgccgtttgttgttgagtgttctggctggctgcgcttattgtgattatcggagcagcatgatggttggctgacagatcaaactgcacgaccggagcctgaatttcatcagccagctgggagctggttttgccggttgccagcataaagagaacatcatcaatctgtaatgcaggtgaaggtaatgggatattgcatttttctccgcagaataccccgttttcctgcaacttatcttgtaataaagcggcaaaatgcggcagggtagaccagtctccgttcgcatttatttgtgctgatgtgattggctctgcggcttgtttttcttcaatctcaggaaataattgcggttttttatctacactatttttttctgcattattggtgtcggaatagacataaaacccccggccacttttgcgccccagatgattggcttccaccagttctttttgtcgtaatgatggctgaaagcgaggatctccgtagaaagcgtgaaacagggattcagtaacggcgtaattgacgtcatgcccgattaaatcagtcagctgtaatggccccatagcaaagccgccggcatcctttaggacggcatccagtgtcgccggagatgcaacttgctcctccagtgcgcgcagggcttctgcgtaaaaaggccgcgcaatgcggttgacgataaaaccgggtgtagagcggcaaatgacgggctgtttttgccagttgatcatgaggcatttaagcgttgcgatgatttgtgggcaggtttccagaccttgcacgacctccactagtttcattagcggagcagggttgaaaaaatgcagcccggccatgcgttggggtttactcagaacacgggcaatagctgtaatcgacagtgatgaggtattactggcaaaaatggtttgttctgaacacagagattccagctggtggaataatttttgtttggcttccagttgttcgataatcgcttcaatcaccagtatacagggagccaatgcctgtaatgagttaaccagagtgatgcgttgcaacagcgcctgagttttgtctgcatcggctttacctgctgtgacacgctgatgcaggcgggtgtggagtgtatccagcgcacgttgtgcggcttcaacatttgcatcaaatagcaggacggaatgtcctgctagtgctgcaacctgagcaatgccgatacccatcgttcccgcgccaataacagcgattgggccttctggtattgattcattagctgttgaatcactgaatgtcggacgatgatgtactggcatattcatatttattttcctttaaactgtggttcgcgcttttccataaacgcccggatgccttcctgaaaatcttctgtatgcccgcactggcgttgtagatcgcgctcaagttcaagctgctgatccaacgtattggttgcggcggcgtaagtggatttcttgatgcacgcaagggagactgtcggctgagaggccagacgctgggcgatttcccatgctttttcttccagttctttaggttcaaagacctgccagatcatgccccactccagtgcctgttcagcactgattttgtctcccagcattgccattcccatcgcgcgggcatgaccaattttacgaggcaggaaccaactgccgcctgcatcaggtgtcaggccaatacgacaaaaagcctgaataaaggtggtattgcgggacgcgagcacaatgtcacccgccatagcaagggaaagacccgctcccgccgccacgccatgaacagcgcaaatcaccggcttgggaaggatggtcagacggcggattagcgggttatagtaagtttcaagggaatagccgagatcaggaacgccacctacgttgataacagaactacgatcatttaaatcctgaccggcacagaaaccacgtccggcccctgaaatcagtacacagcgcaccgattcatcctgttctgcgattttcagtgcttcactgagttgcaggtgcatttcctcgttgatactgtttatcagttttggacgattgagtttaatgctaaggacacctgctttcacttcagtgagtatcgtgggtatattttcattttccatctactagcatcctttaaatgtcggtttacgtttttcaaggaaggctgaaataccttcctgacgatcggctgtacctgctaaggcaacaaagtgttgtcgttcagcggacagcccttgtgacaggctggtttcgtatgcagtcttgagcgcagccttggccgcccgcaaagccagcggcgaaaattcactgatgcggtctgctatctgttgtgcacgtttcaacgtcaggttatcgatgcaaatttcactcactaaccctgcctgttgcgcctgatgagcgttaatggcttcgccggttaagatcatctggctggcaagggctttgcctacactgcgaataagccgctgtgttccgcccgctcccggcattagccccagcgtgatttccggcagtccaaaactggcgttttcaccacaaatcaccagatcacaggccagtgccagttcacagcccgcgccgagggcataaccattaacggcggctatcatcggtttgctgatattgttcagccgttgccagagctgagggcgacgatcagttattgcgctggcaacggtttgttgctgtagctctttaaggtcagcccctgcggcgaagcagcgtagtgagccggtaatgataatgacaccggttccggcatcggcatctgcctgttccagacgttgtacgagcagttccagacagtcattgctgagagcgttgcgtacttccgggcggttgagggtcagcgtgcgtacccgctgttgttgaagacttaaaacccattcctgattcatggtatctcctgatttgcactcttatctctggaatatttctgattaatgagagatttcagacatcaaaatcaacaacaacaccatcgcctttcggccatgactggcagcttaaaatataaccggcggtcagttgatccggttcaaggctgtagttcacgcccatatccacttcaccggatttgagccggcatttacaggtggcacaaacaccgcctttacaggcgtagggcaaatctgcgccctgacgcagggccgcatcaagaatgctgttatcctcagtattcatcacaatattcagagtacggccatctaaatgaatttcgacactcgtttcattgcgtccggccagactggcaggatgggaattggtgtagagaggatgattaccggtattgaaacgttcactatggatgtgttcagattccatgccggcctgctcaagtgctgatttggcatcatccagcatcgtttcaggcccacaaagaaaagcgtgatcaaactgggaaaagttaagcagtatcttgccgatcctcagcaggttttcggtattgatacgaccgttgagcagcgggctgtcagtggtttcctgactgaatagatacatgacctgaaaacgttgcaggtagcggtttttgagatcagccagtgcttccctgaacatcacagagcggctggtactgttaccataaatcagcgtaaaagtactgtctggctccaaagccagtgtgcttttgataatcgacaggataggcgtaatgcctgaaccggctgcaatcgccagataatttcccggttggctggtatcggggggatgaccaaaattaccttgtggctgcatgacatccagctcatccccgactttcaattgttggttaataaaggtagagaatcgcccctgatagatagctttgacaccaatttgtagtgtgtcatccagtggtgagctacagatggagtagcagcggcgtagttcctccccgttaacctctgccttgagtgtcaggtgctgacccggctgatagtggaaatattctttcagttcatcgggaatattcagtgtgactgcgacagaatctggcgtttcctgttcaatagcagcaatgcgtaagcgatgaaactgtgttcggtgtgactgcttttgttgagaaccgggttgaggaagaatagccatctgctgctcccttaaatacatttgaaataatcgaaaggttccagacagtgctgacaacgataaagtgctttgcacgcggtggaaccaaactcactgattttttctgtctgatggctgccacaacgcgggcaggtaatggattcggtatctgcgggtttttcacaggcagctccctgtggtggcgcgataccggattcccgcagacgctttctggcatcggcattcatccagtcagtcgtccatgccgggctcaggcttacgtcaatagatacaggggaaaaaccggccagagccagtgttgtccggatttcattaatgagaaagtccgtggccgggcagcctgaataagtgggggtgaataccacttgccaccctttctgaccgttctgctcattctgggaagcggtaacttcccgtaccataccgagatcggtaatcgataacgtcggtagttctgggtcggcaatctgatgcagacactgccagatctggtggatttcgggttgctgcaacgctattgattgcaacgctattgattgcaaggaactaagttgctgctccatcctaccccctcagttacggtcaccagttattgtctggatatgcccgctgtaaaaactgcatttctgccagtatgtatccgagatgttctgtatgccgcccttgcttgccgccctgtcggtacggggtttcctgtggtatttccagcgtggcctgagcaaaggtgtctttgaccatttgctgccacggttcatgcagtgtccggggatcaaccgcaatgccagtctcagcaagttgctgctctacctcatcgcaatggaaaagttcgcctgtaaagcgccacagttgattgacagactgctgcattttctcgtggctctgttctgtgccatcccccagccggatcatccagccacggctgaaacgcaggtgatattccacttcttttaatgacttattgctgatggcagctaattgggtatcacggctctgccctaatgcctgatggagtaagacgtgataggcatcgataaaaaactggcgcaccagcgtatcgttaaagcccccattaggttgctccaccagcagaagattgcggaactcccgctcatcacgaccaaaagccagccggtcttcatcactttctctatttttttcagcatcagttccgtcaagtgtggcggcatagctgagaaaatggcgagcctgacccagtaaatcgagaccgatgttagccagagccaaatcaatttccagttctggcgcgtgaccacaccactcgcacaggcgctgcgccagaattagcggactgtctccgagacgcagtacgtagttaaaaagattatggttgaaaaggttatgatcgagggaagcggtatgaggcatgttcatatttcccccttacatattcttgatgccgtcagggatcgtgtagaacgtcggatgacggtaaatcttgtcttccgaaggttcaaaaaaagcgccgcgatcttccggctgtgatgcaaccaaatagatggatttcaccacccagatagagcagccttcgttacgtcgggtataagcatcacgtgcattttccagcgccatctgatcatccgctgcatggaggctgccgacatgacgatgagccagcccctgcttactgcgaacaaagacttcatacagtggccaatcggtattgttcatatcttgcctccgttttcatcgattattaaatacagtggactaagcagcctgttttttggcagccatttttctggcatggctggaagccgcctcgcgtacccagcttccgttttcccatgcccggcgtttggcttccagacgttcgtggttacatataccgtggcctttgatcacctgattgaattcgtcccagttgatttcaccaaagcggtaatgccctgttgtttcatcccaggccagttcaggatcaggggctgtcatacccagtgcttctaattggggaacggtgttatcgatgaatttctgtctcagctcatcgttactaaaccgtttaattttccaggccatactctgggcgctgttgggggaatcgctgtcattgggaccgaacatcatcaacgtcggccaccagaaccgattaatggcatcctgtagcatggcccgctgagttttactcccttttgccagcacggtaaccgcttcatatccctgacgctggtggaagctctcttctttacagattttcaccatagcgcgggcataggggccgtaagaggcacgacacagagcgacctgattgactattgcagcaccgtccaccagccagccaatgacgccaatatctgcccagctcaaggtgggatagttgaaaattgacgaatatttcatcgttccatccagcaatttctgatagatgtcctgacgagtacagcccagtgtttctgcggcgctgtagagataaagcccgtggcctgcctcatcctgcacttttgccagtaatacagccttgcgccgcagggttggggcacgggggatccagttggcttccggtaacatgccgacaacttccgagtgtgcgtgttgaccgatctgacgtatcagattttggcgataggcatcgggcatccaatccttagcttcaatggtgatatctgcctcgatcttggcgtcaaaatgcgcctgtcgttgatgatccggttgatcagttgtcatataacgctccacatatgattcttatttttttaaaaatatagtaaaaacgaatcacttaatgcaaccttaaatctacaaattgataacaaaaatatcaaacgttttatttttccatatgacaggttaaaaccaccgtctttagacggtgactttgactttaatgttttgacctacgcgcgtttacgaggtgcgtggttcgacgactttcagtcgtcagcaccgaagtgcgctaacccacctacttcagtaggtggtagttaagttgtatatttgttgagctcatcacaatttatgttatttatttttcaaaaagttgtaattaatttttattgttatggataagtaaggggattgatatgcagagcccagaaaatgtttgcttttgttaattttttgggtggttttttgtctggattatatgatacataaatattgcatattgttttaatggtgattcattaatgatatcggcggagaaaaaaatgcaacaattgaccagttatatttgtggtgagtgggtttatggaaacggtaacgccagaactattcaccatgcagtaagtggtgcagcgctgtatcaggtctgttcagatgatctgccactggctgatagccttaaatatgccagagaaaaaggtggaaaagcactctcagccatgacattccagcaacgtgcccagatgatgaaagccgttgcaaagcatctgcttgccaataaagaagctttatatgctatctcggcagaaaccggagcgacccgctcggatggctgggtagatattgaagggggcattgcaacgttattttcctatgcgggtctggcaggacgcgagttaccggatgatgtgttgtggccggaagatgagatgatcccactttccaaacagtcccagtttgtcgctcgtcatgttctgacttcccgttccggtgtggctctgcacattaatgcatttaacttcccttgctgggggatgctggaaaaactggcaccgacctggatggcgggcatgccggccattattaaacccgctaccgcttcagcacagttaacacaggcaatggtgaaactgatcctcgacagtggtttggttccggaaggcgcattgcagttgatctgtggcggaattggcgatctgtttgatcatctcgactatcaggatgcggtaacttttaccggctcagcccagaccggacataaattgaagtcccaccctcgtctgattgaaaaatccattccgtttacgatggaagctgactctctcaactgttgtattctgggggaggatgtgacgccagacatgccggaatttggcgtatttattaaggaagttgtccgtgaaatgaccgtgaaggcagggcaaaagtgtactgctatccggcgtattattgtaccggaaagccagcttgagtcggttaagcaggcgttggtgaaacgtttgtccggtgttgtggtgggcgatccggctttgcctgatgtccgtatggggtcattgatcagccttgaacagcgcgatgaagttcagtccaaagtggatttactgctacaaagtggttgtgaattactgcatggtggctctttagctaaactgcaactggcggataagacgaatagtcatggggcattctacccgccaactctgctttattgcgcagacccgatgaccaatcaggctgtacatgaaacagaagctttcggtccggtttccaccttgatggcatatcaggagactgagcaggcgattgagctggctttaatggggcagggcagtctggtgggttcgctggtcacggcagatgagcagattgcgatgcaggtcatccgtgcaacagcctgtgctcatggccgtatgctgattctggatgaagcggcttctgccgaatcaaccgggcatggttctccgttacccatgctggtacatggcgggccgggacgcgccggtggtggtgaggagcttggcggattacgtgctgtgaaacactatatgcagcgcacggcaattcaggccagcccaagtatgctggcagcaattggccgtgagtgggtacgtggcgcaaaagtgaaggaagatcctgtccacccgttccgtaaatatttcgaacaaattgaaatcggggaaagtctgctaaccgcccgccggacagtgacggaagcagatatcgtcaattttgcctgcctgagtggtgatcatttctatgctcatatggataaaattggcgcggctgaatccctgttcggtgagcgtgtagcacatggctattttgttgtttctgccgccgccggcttattcgtcgatgcatccgttgggccggtactggcgaattatggcatggaaaacctgcgctttattgaaccggtgaagattggcgatacgattcaggttcggctgacctgtaagaagaagatcaagaaagtgcagaaaacgccggatgataaaccacatggtgtcgttatgtgggatgtgcaggttttaaatcaggagcaacagcctgtcgcgctttacagcattctcacgctggtggaacggcaattgagggattatgtttgatctgtacttgttagccttttctgaataagagagtgcctgaggtgaaaaacaatataagtggtatccctcaggctatttttttacattctgaatttgggttggttatcattttcggagagtgaattttgtagtttttgaaataactcttttaagtttgagattaagtaagggataaatttcttatttcccaaagtgcgtgtaaaggtatcactgggcagaaagcgctccatttcggcgacaaatgctttacctgtgatgatttcaggtaaggactgaaggcgaagctctaataaagtagtaaagtttattagcttgtagtcagcgatttttttcatcaccaaatcagtatttaatttggcattttgttgttgtaaccaaaccaaatcccaaatgtcacgatggcgtacataatttctggtagcaggtaatgaaatcaatttatccgccatgatttcatctaaggtttctacatgtatcaatgtgtcattgtaaccatcgggcagagaagagtagttattacgtaatggcaaaatatttcgggtgtaagcaggaatattggcaacttcaatcttaatgcgttgtttgggtaagtcttttctgccgggagatgtaatgatagaaatctgccacttattgattttcagttcagaatactcgggctgttgcttcaagatatcgggttcttttaccgttacttctaagccatatcgttttccaatgtaatcttcaatacactgtttcatgtcctttaattgactggatgagaaatcttttccaccagcaaagtccaagtcttcactaaagcggctgcctccatagcagagtcgtaaggatgtccctccctgaaaaacaagctcatccagtaacccgccctgctcaagacaaaataagatgtcatagtgaagaagttctttttcgacaacaggtctcatgtgtgtcacctggtcattttgcattgcgatgttaaccagctgtgagaaatcagtacgattaatcttcattgataacctccttctcaactaaatgagtgtttctgcctactcgttttagatcccggtaagctgtttgtttactggccagacggagtggcctgccaatttctttaatgttgttaataatatcgggtacggatcttttagtgtgtgtaaattcaatggtaccgaaaggtgttctataagtcccttcacggccagttgtcattacagtcagccgatcaatcgggatttgagaaatagcaccgtattcagataatgcagattctaggctgacatagctgtactcacctcgcctcattgctctggcgattaattccagcgtgtccagcccattatgttgtgacagtgcgaatacataaatgcctttacaggctcgtaataacaccccgtgcttcacgaggcgattcagaccggcttcaaaggctcttttactatcttctgaaaaaactttagcgagatctttagtggtaaagacgtagcgaccttgctgatcaaatttattcagatattgaatagcagtcatgtgattcatggtattaagtctacatttatatcacttttgaatgaggtgtatgtatacataatatacttaattaaggatacacaaatatcatatatat

SEQ ID NO: 2762 - DNA, 16639 bp, Xenorhabdus sp.; identical to SEQ ID NO: 2761
  CDS (12961)..(15024)

SEQ ID NO: 2763 - DNA, 16639 bp, Xenorhabdus sp.
  CDS (15628)..(16224)
atatatatgatatttgtgtatccttaattaagtatattatgtatacatacacctcattcaaaagtgatataaatgtagacttaataccatgaatcacatgactgctattcaatatctgaataaatttgatcagcaaggtcgctacgtctttaccactaaagatctcgctaaagttttttcagaagatagtaaaagagcctttgaagccggtctgaatcgcctcgtgaagcacggggtgttattacgagcctgtaaaggcatttatgtattcgcactgtcacaacataatgggctggacacgctggaattaatcgccagagcaatgaggcgaggtgagtacagctatgtcagcctagaatctgcattatctgaatacggtgctatttctcaaatcccgattgatcggctgactgtaatgacaactggccgtgaagggacttatagaacacctttcggtaccattgaatttacacacactaaaagatccgtacccgatattattaacaacattaaagaaattggcaggccactccgtctggccagtaaacaaacagcttaccgggatctaaaacgagtaggcagaaacactcatttagttgagaaggaggttatcaatgaagattaatcgtactgatttctcacagctggttaacatcgcaatgcaaaatgaccaggtgacacacatgagacctgttgtcgaaaaagaacttcttcactatgacatcttattttgtcttgagcagggcgggttactggatgagcttgtttttcagggagggacatccttacgactctgctatggaggcagccgctttagtgaagacttggactttgctggtggaaaagatttctcatccagtcaattaaaggacatgaaacagtgtattgaagattacattggaaaacgatatggcttagaagtaacggtaaaagaacccgatatcttgaagcaacagcccgagtattctgaactgaaaatcaataagtggcagatttctatcattacatctcccggcagaaaagacttacccaaacaacgcattaagattgaagttgccaatattcctgcttacacccgaaatattttgccattacgtaataactactcttctctgcccgatggttacaatgacacattgatacatgtagaaaccttagatgaaatcatggcggataaattgatttcattacctgctaccagaaattatgtacgccatcgtgacatttgggatttggtttggttacaacaacaaaatgccaaattaaatactgatttggtgatgaaaaaaatcgctgactacaagctaataaactttactactttattagagcttcgccttcagtccttacctgaaatcatcacaggtaaagcatttgtcgccgaaatggagcgctttctgcccagtgatacctttacacgcactttgggaaataagaaatttatcccttacttaatctcaaacttaaaagagttatttcaaaaactacaaaattcactctccgaaaatgataaccaacccaaattcagaatgtaaaaaaatagcctgagggataccacttatattgtttttcacctcaggcactctcttattcagaaaaggctaacaagtacagatcaaacataatccctcaattgccgttccaccagcgtgagaatgctgtaaagcgcgacaggctgttgctcctgatttaaaacctgcacatcccacataacgacaccatgtggtttatcatccggcgttttctgcactttcttgatcttcttcttacaggtcagccgaacctgaatcgtatcgccaatcttcaccggttcaataaagcgcaggttttccatgccataattcgccagtaccggcccaacggatgcatcgacgaataagccggcggcggcagaaacaacaaaatagccatgtgctacacgctcaccgaacagggattcagccgcgccaattttatccatatgagcatagaaatgatcaccactcaggcaggcaaaattgacgatatctgcttccgtcactgtccggcgggcggttagcagactttccccgatttcaatttgttcgaaatatttacggaacgggtggacaggatcttccttcacttttgcgccacgtacccactcacggccaattgctgccagcatacttgggctggcctgaattgccgtgcgctgcatatagtgtttcacagcacgtaatccgccaagctcctcaccaccaccggcgcgtcccggcccgccatgtaccagcatgggtaacggagaaccatgcccggttgattcggcagaagccgcttcatccagaatcagcatacggccatgagcacaggctgttgcacggatgacctgcatcgcaatctgctcatctgccgtgaccagcgaacccaccagactgccctgccccattaaagccagctcaatcgcctgctcagtctcctgatatgccatcaaggtggaaaccggaccgaaagcttctgtttcatgtacagcctgattggtcatcgggtctgcgcaataaagcagagttggcgggtagaatgccccatgactattcgtcttatccgccagttgcagtttagctaaagagccaccatgcagtaattcacaaccactttgtagcagtaaatccactttggactgaacttcatcgcgctgttcaaggctgatcaatgaccccatacggacatcaggcaaagccggatcgcccaccacaacaccggacaaacgtttcaccaacgcctgcttaaccgactcaagctggctttccggtacaataatacgccggatagcagtacacttttgccctgccttcacggtcatttcacggacaacttccttaataaatacgccaaattccggcatgtctggcgtcacatcctcccccagaatacaacagttgagagagtcagcttccatcgtaaacggaatggatttttcaatcagacgagggtgggacttcaatttatgtccggtctgggctgagccggtaaaagttaccgcatcctgatagtcgagatgatcaaacagatcgccaattccgccacagatcaactgcaatgcgccttccggaaccaaaccactgtcgaggatcagtttcaccattgcctgtgttaactgtgctgaagcggtagcgggtttaataatggccggcatgcccgccatccaggtcggtgccagtttttccagcatcccccagcaagggaagttaaatgcattaatgtgcagagccacaccggaacgggaagtcagaacatgacgagcgacaaactgggactgtttggaaagtgggatcatctcatcttccggccacaacacatcatccggtaactcgcgtcctgccagacccgcataggaaaataacgttgcaatgcccccttcaatatctacccagccatccgagcgggtcgctccggtttctgccgagatagcatataaagcttctttattggcaagcagatgctttgcaacggctttcatcatctgggcacgttgctggaatgtcatggctgagagtgcttttccacctttttctctggcatatttaaggctatcagccagtggcagatcatctgaacagacctgatacagcgctgcaccacttactgcatggtgaatagttctggcgttaccgtttccataaacccactcaccacaaatataactggtcaattgttgcatttttttctccgccgatatcattaatgaatcaccattaaaacaatatgcaatatttatgtatcatataatccagacaaaaaaccacccaaaaaattaacaaaagcaaacattttctgggctctgcatatcaatccccttacttatccataacaataaaaattaattacaactttttgaaaaataaataacataaattgtgatgagctcaacaaatatacaacttaactaccacctactgaagtaggtgggttagcgcacttcggtgctgacgactgaaagtcgtcgaaccacgcacctcgtaaacgcgcgtaggtcaaaacattaaagtcaaagtcaccgtctaaagacggtggttttaacctgtcatatggaaaaataaaacgtttgatatttttgttatcaatttgtagatttaaggttgcattaagtgattcgtttttactatatttttaaaaaaataagaatcatatgtggagcgttatatgacaactgatcaaccggatcatcaacgacaggcgcattttgacgccaagatcgaggcagatatcaccattgaagctaaggattggatgcccgatgcctatcgccaaaatctgatacgtcagatcggtcaacacgcacactcggaagttgtcggcatgttaccggaagccaactggatcccccgtgccccaaccctgcggcgcaaggctgtattactggcaaaagtgcaggatgaggcaggccacgggctttatctctacagcgccgcagaaacactgggctgtactcgtcaggacatctatcagaaattgctggatggaacgatgaaatattcgtcaattttcaactatcccaccttgagctgggcagatattggcgtcattggctggctggtggacggtgctgcaatagtcaatcaggtcgctctgtgtcgtgcctcttacggcccctatgcccgcgctatggtgaaaatctgtaaagaagagagcttccaccagcgtcagggatatgaagcggttaccgtgctggcaaaagggagtaaaactcagcgggccatgctacaggatgccattaatcggttctggtggccgacgttgatgatgttcggtcccaatgacagcgattcccccaacagcgcccagagtatggcctggaaaattaaacggtttagtaacgatgagctgagacagaaattcatcgataacaccgttccccaattagaagcactgggtatgacagcccctgatcctgaactggcctgggatgaaacaacagggcattaccgctttggtgaaatcaactgggacgaattcaatcaggtgatcaaaggccacggtatatgtaaccacgaacgtctggaagccaaacgccgggcatgggaaaacggaagctgggtacgcgaggcggcttccagccatgccagaaaaatggctgccaaaaaacaggctgcttagtccactgtatttaataatcgatgaaaacggaggcaagatatgaacaataccgattggccactgtatgaagtctttgttcgcagtaagcaggggctggctcatcgtcatgtcggcagcctccatgcagcggatgatcagatggcgctggaaaatgcacgtgatgcttatacccgacgtaacgaaggctgctctatctgggtggtgaaatccatctatttggttgcatcacagccggaagatcgcggcgctttttttgaaccttcggaagacaagatttaccgtcatccgacgttctacacgatccctgacggcatcaagaatatgtaagggggaaatatgaacatgcctcataccgcttccctcgatcataaccttttcaaccataatctttttaactacgtactgcgtctcggagacagtccgctaattctggcgcagcgcctgtgcgagtggtgtggtcacgcgccagaactggaaattgatttggctctggctaacatcggtctcgatttactgggtcaggctcgccattttctcagctatgccgccacacttgacggaactgatgctgaaaaaaatagagaaagtgatgaagaccggctggcttttggtcgtgatgagcgggagttccgcaatcttctgctggtggagcaacctaatgggggctttaacgatacgctggtgcgccagttttttatcgatgcctatcacgtcttactccatcaggcattagggcagagccgtgatacccaattagctgccatcagcaataagtcattaaaagaagtggaatatcacctgcgtttcagccgtggctggatgatccggctgggggatggcacagaacagagccacgagaaaatgcagcagtctgtcaatcaactgtggcgctttacaggcgaacttttccattgcgatgaggtagagcagcaacttgctgagactggcattgcggttgatccccggacactgcatgaaccgtggcagcaaatggtcaaagacacctttgctcaggccacgctggaaataccacaggaaaccccgtaccgacagggcggcaagcaagggcggcatacagaacatctcggatacatactggcagaaatgcagtttttacagcgggcatatccagacaataactggtgaccgtaactgagggggtaggatggagcagcaacttagttccttgcaatcaatagcgttgcaatcaatagcgttgcagcaacccgaaatccaccagatctggcagtgtctgcatcagattgccgacccagaactaccgacgttatcgattaccgatctcggtatggtacgggaagttaccgcttcccagaatgagcagaacggtcagaaagggtggcaagtggtattcacccccacttattcaggctgcccggccacggactttctcattaatgaaatccggacaacactggctctggccggtttttcccctgtatctattgacgtaagcctgagcccggcatggacgactgactggatgaatgccgatgccagaaagcgtctgcgggaatccggtatcgcgccaccacagggagctgcctgtgaaaaacccgcagataccgaatccattacctgcccgcgttgtggcagccatcagacagaaaaaatcagtgagtttggttccaccgcgtgcaaagcactttatcgttgtcagcactgtctggaacctttcgattatttcaaatgtatttaagggagcagcagatggctattcttcctcaacccggttctcaacaaaagcagtcacaccgaacacagtttcatcgcttacgcattgctgctattgaacaggaaacgccagattctgtcgcagtcacactgaatattcccgatgaactgaaagaatatttccactatcagccgggtcagcacctgacactcaaggcagaggttaacggggaggaactacgccgctgctactccatctgtagctcaccactggatgacacactacaaattggtgtcaaagctatctatcaggggcgattctctacctttattaaccaacaattgaaagtcggggatgagctggatgtcatgcagccacaaggtaattttggtcatccccccgataccagccaaccgggaaattatctggcgattgcagccggttcaggcattacgcctatcctgtcgattatcaaaagcacactggctttggagccagacagtacttttacgctgatttatggtaacagtaccagccgctctgtgatgttcagggaagcactggctgatctcaaaaaccgctacctgcaacgttttcaggtcatgtatctattcagtcaggaaaccactgacagcccgctgctcaacggtcgtatcaataccgaaaacctgctgaggatcggcaagatactgcttaacttttcccagtttgatcacgcttttctttgtgggcctgaaacgatgctggatgatgccaaatcagcacttgagcaggccggcatggaatctgaacacatccatagtgaacgtttcaataccggtaatcatcctctctacaccaattcccatcctgccagtctggccggacgcaatgaaacgagtgtcgaaattcatttagatggccgtactctgaatattgtgatgaatactgaggataacagcattcttgatgcggccctgcgtcagggcgcagatttgccctacgcctgtaaaggcggtgtttgtgccacctgtaaatgccggctcaaatccggtgaagtggatatgggcgtgaactacagccttgaaccggatcaactgaccgccggttatattttaagctgccagtcatggccgaaaggcgatggtgttgttgttgattttgatgtctgaaatctctcattaatcagaaatattccagagataagagtgcaaatcaggagataccatgaatcaggaatgggttttaagtcttcaacaacagcgggtacgcacgctgaccctcaaccgcccggaagtacgcaacgctctcagcaatgactgtctggaactgctcgtacaacgtctggaacaggcagatgccgatgccggaaccggtgtcattatcattaccggctcactacgctgcttcgccgcaggggctgaccttaaagagctacagcaacaaaccgttgccagcgcaataactgatcgtcgccctcagctctggcaacggctgaacaatatcagcaaaccgatgatagccgccgttaatggttatgccctcggcgcgggctgtgaactggcactggcctgtgatctggtgatttgtggtgaaaacgccagttttggactgccggaaatcacgctggggctaatgccgggagcgggcggaacacagcggcttattcgcagtgtaggcaaagcccttgccagccagatgatcttaaccggcgaagccattaacgctcatcaggcgcaacaggcagggttagtgagtgaaatttgcatcgataacctgacgttgaaacgtgcacaacagatagcagaccgcatcagtgaattttcgccgctggctttgcgggcggccaaggctgcgctcaagactgcatacgaaaccagcctgtcacaagggctgtccgctgaacgacaacactttgttgccttagcaggtacagccgatcgtcaggaaggtatttcagccttccttgaaaaacgtaaaccgacatttaaaggatgctagtagatggaaaatgaaaatatacccacgatactcactgaagtgaaagcaggtgtccttagcattaaactcaatcgtccaaaactgataaacagtatcaacgaggaaatgcacctgcaactcagtgaagcactgaaaatcgcagaacaggatgaatcggtgcgctgtgtactgatttcaggggccggacgtggtttctgtgccggtcaggatttaaatgatcgtagttctgttatcaacgtaggtggcgttcctgatctcggctattcccttgaaacttactataacccgctaatccgccgtctgaccatccttcccaagccggtgatttgcgctgttcatggcgtggcggcgggagcgggtctttcccttgctatggcgggtgacattgtgctcgcgtcccgcaataccacctttattcaggctttttgtcgtattggcctgacacctgatgcaggcggcagttggttcctgcctcgtaaaattggtcatgcccgcgcgatgggaatggcaatgctgggagacaaaatcagtgctgaacaggcactggagtggggcatgatctggcaggtctttgaacctaaagaactggaagaaaaagcatgggaaatcgcccagcgtctggcctctcagccgacagtctcccttgcgtgcatcaagaaatccacttacgccgccgcaaccaatacgttggatcagcagcttgaacttgagcgcgatctacaacgccagtgcgggcatacagaagattttcaggaaggcatccgggcgtttatggaaaagcgcgaaccacagtttaaaggaaaataaatatgaatatgccagtacatcatcgtccgacattcagtgattcaacagctaatgaatcaataccagaaggcccaatcgctgttattggcgcgggaacgatgggtatcggcattgctcaggttgcagcactagcaggacattccgtcctgctatttgatgcaaatgttgaagccgcacaacgtgcgctggatacactccacacccgcctgcatcagcgtgtcacagcaggtaaagccgatgcagacaaaactcaggcgctgttgcaacgcatcactctggttaactcattacaggcattggctccctgtatactggtgattgaagcgattatcgaacaactggaagccaaacaaaaattattccaccagctggaatctctgtgttcagaacaaaccatttttgccagtaatacctcatcactgtcgattacagctattgcccgtgttctgagtaaaccccaacgcatggccgggctgcattttttcaaccctgctccgctaatgaaactagtggaggtcgtgcaaggtctggaaacctgcccacaaatcatcgcaacgcttaaatgcctcatgatcaactggcaaaaacagcccgtcatttgccgctctacacccggttttatcgtcaaccgcattgcgcggcctttttacgcagaagccctgcgcgcactggaggagcaagttgcatctccggcgacactggatgccgtcctaaaggatgccggcggctttgctatggggccattacagctgactgatttaatcgggcatgacgtcaattacgccgttactgaatccctgtttcacgctttctacggagatcctcgctttcagccatcattacgacaaaaagaactggtggaagccaatcatctggggcgcaaaagtggccgggggttttatgtctattccgacaccaataatgcagaaaaaaatagtgtagataaaaaaccgcaattatttcctgagattgaagaaaaacaagccgcagagccaatcacatcagcacaaataaatgcgaacggagactggtctaccctgccgcattttgccgctttattacaagataagttgcaggaaaacggggtattctgcggagaaaaatgcaatatcccattaccttcacctgcattacagattgatgatgttctctttatgctggcaaccggcaaaaccagctcccagctggctgatgaaattcaggctccggtcgtgcagtttgatctgtcagccaaccatcatgctgctccgataatcacaataagcgcagccagccagaacactcaacaacaaacggcaaaagtcgcccgttttctccatttcctcggcaaacaggtcattttactgccggattatccggccatgctgacgatgcggactgtagcaatgctgtgcaacgaagcgctggatgcgcttaataaaggcattgccagcgccgaagatatcgatctggcaatgtgccgcggtgtgaattatcccatcgggccactggcatggggaactcagctcggctggcagcatattttcaatacactggaaaacttacagcagttttacggggaaacccgttatcgtccgtcacccctgcttcggcagctggcggcgggccatgtcacattacagtctccatctctccggcaacatgaatatcaacataagaagaaagatcatgcctaataaaacgaatacgtccccgaagcaacttgcccgaaactgtattgagaccatgtataccaaagatgcctgcgctaatcatatgggaatgcagattgactatatcgacatcgggatcgctcagttaagcatgaccattgtacctaccatgcttaacggccataagacctgtcatggtggcattatattcagtctggcagataccgcattcgcctatgcctgcaacagtgaaggaactgcggctgttgcttccggctgtaatatcgatttcatccatccggtttttaatggtgaccggcttactgctaacgcgtcagtgcagcatcagggcaaaactaacgggttatatgatgtcaaaattaccaatcagaatggcaaaactgtggcctttttccgtggtcactcccaccgtctgggtcattctgttttagaagaacccgccaaagcaacgactcctactaaaacaatcaggaaagaaaaatcatgacccatgcatttatttgtgacggagtgcgtacacctattggccgttatggtggagccctcgccagcctgcgctctgatgatctggccgctctgccgctacgggcattgctggcacgttatcccggactggactggcaagcgattgatgatgtcattctcggttgtgcaaatcaggcgggtgaagataaccgcaatgtcgctcgcatggcgacattgctggctggtctgccatattccgttcccggcacaactctcaaccggttgtgtggctcaggtctggatgcgctggcttttgctgcccgcagtatcaaagcgggtgaaactcagctggtactggctggtggtgtggaatccatgacccgcgccccattagtgatgggaaaagcggaaacggctttcagccgtcaggcgcagatatttgataccaccattggctggcgcttcattaatccgctgatacagaaacaattcggtacagattcgatgccggaaaccgcagaaaacgttgcggctctatttgatatcagccgggacgctcaggatgctttcgcgctgcgcagccagcaacgtaccgctaaagcgcagcaacaaggcattctggctgaagagatcatccctgttaccctgcctgaccgccggaaaaaaggggaaaacacgatcatttcacaggatgaacatccccgccctgaaacgacattagagcagttacaaaagctgaaaacaccatttcggaccgaaggcaccgtcactgccggtaatgcttccggcgtcaatgacggagccgccgccctgattatcgcttcagaagtcgcagcattaaaacacgggctgacacctaaagcgcgtattgtggcaaccgccaccagcggtgttgagccacgcattatggggatcgggccactgtcagctacgagcaaagtgttagctcttaccggactgagtctgaatcagatggatgtgatcgaactgaacgaagccttcgcagctcagtcactggcagtgatgcgccagtggggattaccggatgatgcagaacatgtgaacccgaatggcggtgcgatagcactggggcatccgctgggaatgagtggtgcccgacttgcactgacagcaacgcttgaactggaacggcgagccggacgctatgccttatgcaccatgtgcatcggcgttggtcagggaattgccatgattattgaacgtatttcataaccaacacctgtatatatacacaatagatttcaagatgcatcgcggcggcaagggagtgacaaattcgttcccgacgaatttgcccagccaaaggctggcctccggtgggaggcaggagcctctcagtaatccccgggagcatagataaccgtatgtttataaaaacggtgactggggtgagtgagtgcagccaacaaagaggcaacttgaaagacgacgggtatcacaataaaaacagcctgatacagttcaaccaacaaaagggcgggaattatgagcaacaacgtacagcacctcaactcaagcttcactccacatcccgaggccaatctcgattctgttgaatttgcttcacgcgacgaaattcaggcgcgacagtttaagcaaatgaaatggacattgcatcatgcctataacaacgtgccaatgtatcgccgtaaatttgatgcgattggtattcaccccagtgatttccggcagcttgaggacatcgctaaatttccttacaccaccaaacaggatctaagggataactacccttttgatacctttgctgttccgatggaaaaagtcgtgcgtatccatgcttcatccggaacgacagggcgtccgaccgttgttggctatactcagcaagatatcgacaactgggctgatctgatcgcccgtagcctgcgttttgccggagcaacagccaaagacaaaatacatgtcgcttacggttacggcctgttcactggcggtctgggagcacattatggcgctgagcgtctgggggctgccgtgatcccgatgtctggcgggcagacagaaaaacaggcacagctgatctgcgactttaaacccgatgtcattatgatgacaccctcttactgcctgacactattggatgtattggaacgccaaatgggaggcgatgccagacaatgctctctgcgggtaggtattttcggggctgagccgtggacagaagggcttcggcatgaaattgaaacccgcatgggtatcaaggcgctggatatttatggtctgtccgaaatcatggggccgggtgtcgccatggaatcactggaatatgccgatggttcgactatttgggaagaccatttttatccggaagtgatcgatcctgacaacctgaatatattaccggacggcgagaatggtgagctggttttcaccacactcaccaaagaagctatgccgatgatccgctaccgtacccgtgacctgacacgtctgttaccgggaactgcccgcaatatgcggcgtatggacaggatcaccggacgttccgacgacatgctcatcatccgtggcatcaatgtctttccatcacaggtagaagaacaaatcacacgtttcagtgaactgtcgccacattatcagctggaagtggaccgcgttgggaattatgacagcctgtccgtcaaggtcgaactgaaagatccggcgcaactgagtatccagcaacgttgcgatatctgccaccaattacgccatcacatcaaagccatgatagggatcaacaccgaagtcagtatagtcaactgtggggatatacctcgttccgaaggcaaagcggttcgggttcttgaccaccgtcagcagaaataatattcaaacaagacaataacgactgggacacctgattatgctactgtcatgactcatttgcgtttagacaataacaaaatatgacacacaaactcgacgattttattcgacatgcccttgatgcccaaacgattagcggaacatcgctgatcatttccctgtatggcgatgcactcagccatcggggaggtgaagtctggctgggcagtctcagccttctactggaaccgctgggattcagtgaccgttttgtccggacatctgtctttcgtttacaaaaagaagactggctggaggtagagaaaataggtcgtcgcagttactaccgcatcactgagcggggcatgaaccaattccgccatgcagagagtaaaatttatctcagcgaacaaccggcatgggacggcaaatgggatttattgctgttggaagaaaccagcaaagaggaacgtacccgcctgaaaaaagagctgaattggtttgggtttagtcaactcaacagcacattaatggcagcccccagcagttcacaaagtgatattccggctctgctcggagaactcaacgccagtgattccgtgatctacttccgggcagattatccttatccccgctccgaacagagcctgaaagaacgggtatcagccagttggtcgctggatcaggttgctcagcactatcatgaatttatcatcacattccggcccttgatgaaactcttgcaagactgttatgcagacgaactgacaccggagcgctgtttccagttacgccttctgctgatccacttttaccgccgtgtcgtactgcgtgacccattgctgcctgatgctctgttgcctacacagtgggaaggccaaatcgcccggaacttatgcatcaacatctaccagcgcattggccctgccgcaacacgatacattggtgaacaatgtgaaaccaccataggtaaattgccccaacctgctgctgcctactatcgtcgttttggaggattgcacagcggctcttagtaacgcctgacaattgtttgaggaaatacttatgcctgtatatcaacttgatggtttaactccggttattgatcccagtagttatgttcaccctaccgctgttttggtcggtgacgtcattattggcaagcaggtttatatcggcccgaatgccagcctgcgtggtgatttcggtcggctggtggtgatggatggttcgaatattcaggataattgtgtcatgcatggttatcctcaacaggacacagtgattgaagaaaatggtcatatcgggcatggagcgatactgcatgggtgccaaatccggcgcaatgttttggttggcatgaattcagttgtaatggatggcgcagaaattggtgaaaactccatcgtgggagcaatggcctttatcaaggcagaagcaatttttgccgccaatcagctgatcgtcggcacacccgcccgcgctttgcgtactctgaccgagcaggaactggaatggaagcggatcagcactcgggaatatcaggatcttgtaacacgttgtaaaaatacattgaggcaggtagaaccgttgactgaaatagaaccggggcgtaagcggatggtctttagtgacgattttgtgcctaagaatcaattgtaaaatggttcctactgctcgctggctgcgagcagcttcaatactatttaatatcaaccacctcagaaggttttatcgttattttttgaccatgtaactcacaatcttccatcatttggataaccccttctttcgcccacaaagcctgcgcgccttcggcttctttgtaagggacaactgaatctttcatatcaatgaatggcttactgaataaaattgccttataattatagttatctccactatctggtataacccaatcaatcagataattagcattttcccaaaaaataataacgctttcaaattcatcatgtcctttttgttttatgaaattgataaccaattaaacagtatttattatcttcatttctatatcaaaagagttaataagataactcaatgatggaagatatat

SEQ ID NO: 2764 - DNA, 16639 bp, Xenorhabdus sp.; identical to SEQ ID NO: 2763
  CDS (14664)..(15596)

SEQ ID NO: 2765 - DNA, 16639 bp, Xenorhabdus sp.; identical to SEQ ID NO: 2763
  CDS (13297)..(14583)

SEQ ID NO: 2766 - DNA, 16639 bp, Xenorhabdus sp.; identical to SEQ ID NO: 2763
  CDS (11752)..(12966)

SEQ ID NO: 2767 - DNA, 16639 bp, Xenorhabdus sp.; identical to SEQ ID NO: 2763
  CDS (11321)..(11755)

SEQ ID NO: 2768 - DNA, 16639 bp, Xenorhabdus sp.; identical to SEQ ID NO: 2763
  CDS (9598)..(11271)

SEQ ID NO: 2769 - DNA, 16639 bp, Xenorhabdus sp.; identical to SEQ ID NO: 2763
  CDS (8816)..(9595)

SEQ ID NO: 2770 - DNA, 16639 bp, Xenorhabdus sp.; identical to SEQ ID NO: 2763
  CDS (8015)..(8788)

SEQ ID NO: 2771 - DNA, 16639 bp, Xenorhabdus sp.; identical to SEQ ID NO: 2763
  CDS (6769)..(7959)

SEQ ID NO: 2772 - DNA, 16639 bp, Xenorhabdus sp.; identical to SEQ ID NO: 2763
  CDS (6281)..(6832)

SEQ ID NO: 2773 - DNA, 16639 bp, Xenorhabdus sp.; identical to SEQ ID NO: 2763
  CDS (5512)..(6261)

SEQ ID NO: 2774 - DNA, 16639 bp, Xenorhabdus sp.; identical to SEQ ID NO: 2763
  CDS (5155)..(5442)

SEQ ID NO: 2775 - DNA, 16639 bp, Xenorhabdus sp.; identical to SEQ ID NO: 2763
  CDS (4189)..(5115)

SEQ ID NO: 2776 - DNA, 16639 bp, Xenorhabdus sp.; identical to SEQ ID NO: 2763
  CDS (615)..(1535)

SEQ ID NO: 2777 - DNA, 16639 bp, Xenorhabdus sp.; identical to SEQ ID NO: 2763
  CDS (89)..(625)

SEQ ID NO: 2778 - DNA, 17739 bp, Xenorhabdus sp.
  CDS (1070)..(1345)
cacaggtcgttttgctgatcggcacacctttgcggtactgacaatcgggatcagtatactaaccatatcgctgctgatattcgcgcttttcccggaaaaccgctatatcagtgtgatcgcttttctaatcattggcattgtaggtgtctctatgagcccggcactgattacacgggttatgcgcgtggcaaatgctggccctttggtgaacagcgtccatgtctctttcattaatagtggttctgccttcatctcatgggccggaggattaagtattgctgccgggtatggattaatatcaccactttggattggcttaattatggctattgttgctttactttcgcttacgccgcgtagtgtcagaactgcaatgacattgccctgaacaaaaaatttatttaaaagcagtgtgtatcaggagtattaccagaattcggagagtggtaagaaattagggctgagcctgataaaaaagatttggagcgggaaacgagactcgaactcgcgaccccaaccttggcaaggttgtgctctaccaactgagctattcccgcttaattttggtgtgctgtactttcgaaattattcatcggtacggggagcgcattatacaaataattcaccttctggcaagtaccaagacgaaaaaaatcgggctttatttttaattggtcagttatcgaacgaaagatctgtttagtgattcagatatggatatcttactttgattgatacatatccatatttgatcgcgttgctcaaatgagctacagtatacttattaaccaaaggaggtttaaatatggccgcaaatgcatttgttcgcgctcgcatagatgaaaaattgaaaaatgaagcagcagctgtactagcaagcatggggttaaccgtttccgacctagttcgcataacactcactaaagtcgcaacagaaaaagctttaccatttgatatgcgtattcctaatgagctaacagctaaaaccattgccaatagtgaaaaaggcattgatgttcaccaagcaaaagatgctgatgatatctttgataaattgggtatctgataactcatgaaacaaagggctattgaatattccactcagtttcaaaaagatgtgaaattagctcagaaaagacataaagacatagaaaaactgaaagagctaatgaaactcttgattaacaatgagttgccattgcctactgtatacaaagatcatccgctaaatggtaactataaaggctatagggacgctcacatagaaccagattggatcctcatctacaaaataaccagtgaccttctccgatttgaacggacaggaacacactcagacctattttaaattgctagcaacgcaagtcatgataaacgttgattaagtgggattttagacccacttaatcaactcatgtcagcaaaataccgccatttatttctgaataaaatgttcgcgatagtaaaccaactcggcaattgactcccggatatcatccaatgcctgatgagtatttttcttgcttaaacctgccagcatttctggcttccagcgacgggccaattctttaagtgtgctgacatccagatagcgatagtggaaatatttttccagttcaggcatataacggaacaggaaacgacgatcctgaccaatgctgttaccgcagataggggattttcctgccggaacccactgttccagaaacgcaatcgtcgctttttcagcttcagcctcactaaacgaactctgctttacacgctccaccaagccactagcagtgtgagtcctgacgttccactcatccatcagggcaagttgctcagctggctggtgtaccgcaataaccggcccttctgcaagaatattcagctctgaatcagtcacgatagttgcaatttcaattatgcgatcgcgctcgggatccagacccgtcatctctaaatctatccagataagattgttctcactttttgacatgatatatcctaggttcctttaaaacaggtaatctgtatcagaggtgtatcatagcgtttttgatcacccacagcgataaccagcaagatagatgaaataagtgaggttcggtggctaaaagtaaactctccaaagggcagcaacgccgtgtgcaggccaatcaccagcgcaggctaaaacagccgctcagcaggaatgacgcccaaaaaccagaactggacgacagccagttcggtgagccacaagaagggctggttatcagccgattcgggcaacatgcagatattgaggccgcagacgcctccatacaacgctgtaatatccgcaggacaattcgttcactggtgaccggtgatcgtgtcgtatggcgtcctgctttacagctccagtcagatgttaaagtcaatgggatcgtagaagccgttcacgaacgaacttccgtgctcacccgtcctgattattatgatggtatcaaacccattgccgctaatatcaaccaaattgtgattgtttccgctatcctgcctgaactctcactgaatattatcgatcgctatctggtcgcatgtgaaacactcaatattgaacccttgatagtgcttaataaaatcgaccttctggatgaagaaagtcgtgaatgggtcaacggtgttatggatatttaccgccatatcgggtatcgggtgctggaagtttccagccataccggagaaggcattcctgaactagtccaattactggctgataaaattagtatattcgccggtcaatcaggggtcggaaaatccagcctgctgaacaccctgcttccggacaacgaaaacaccattctggttaatgaagtctcagataactccggccttggtcagcatacgacaacaacagcgcgtctctaccattttccacagggaggagatgtcattgattctcccggcgtccgggaattcggcttatggcatttgacgccagaacaggtggtacaaggatttattgaatttcgggattaccttggaagctgtaaattccgcgattgcaaacatcttgatgatcccggttgcgcattacgcgatgcactggaacgaggggttattgcagaagagcgctttgaaaactaccaccggatcctggaaagcatggctcaggttaaaccacgcaaaaatttcactgaaggtcaaaaataaggcaataattagcaatacgttgccctgacattcaagataagggcaggtagaatagcggacttttgcccaattttcctataagacattggccgataaaacacttcaagaggttgacgtgctggataatattaaaatcagactacaatatttactgccaaagcaatgtattactcacttagcaggctggttcgccaataaaaaagcaggctggttgacacagcttgtcattaaggcttttgccaaagtttataaagttgatatgaatgaagcccagaatccatcttttcaggcttattcaacctttaacgaattctttgtccgaccattaaaagaggacattcgtcccgtcgtcaatgaaacacacctgttggcactgcccgcagatggagccgtcagccaattgggtgccatccgggaagagcagattattcaggctaaaggtcactactatacggtagaagcactgttggccggccaacatcaacttgctgagcagttccgtaatggccattttgtgacaatttacttatcaccgaaagattatcaccgtgttcatatgccatgtgacggcgtattgaaagagatgatttatgttcccggcgatctgttttcagtcaacccgctgactgccgccaatgtaccgaatttgtttgcacgtaatgaacgtgttatctgtatatttgatacagcctttggcccaatggcacaaattctggttggtgccacaattgtgggtagtatagaaactgtctggagtggctgtgttaccccaccacgcgaagggattatcaaacgctgggtctatccggcagaaggcgaggaaggggcggtttctctcaagaaaggagaagaaatgggccgtttcaaactgggttcaaccgtaatcaatctgtttgcccctaatcagattcagtttgccaataacttatacagtggttcacaaaccctgatgggtggcctgctggcacaaactatctcaaacgatgaagagcatactgagcacacaactgacgatgtttccgtgaatcaaaatagcgccagttaatttattaccaaggagccccttattgtgcgcctgattatcagtttatttcttagtctgcttattgcgaatctggctttcgcctccacaacacagttggatgaaaaccagcttaaacaggagctgaaacaggttgaaggcagtaaaaatccgcaggacgctgaaattgcgcaagcactgcaaggggctatcacttggattagtgacacaaaatcctccaaggaacggattgcaaaatatcaacagtcaattgatgacttcccaaaattaatcaaagaattacgtcagaaaatactggcaaccagtgaaccacctcctgctattcaggctaatcaggccatcagcagcctggaacagcagattatccagctgaacagtcaattactggagcaggaacggcagttacaacaagaacaggagaaaatccgggagattagtgaatccgtaaatctcatgcctcaacagcaaacagaagcaaggcgcttgttagctgaggcaacttcccggcttcagtcattaaatacaccttcaccgggactgagtgaagcacagttaacgcttgctcaggcagaagtgaatgcccgcaaaaccgcgaccagtgaactggagatggcacaactttctgccaataatcggcaggagattgcccgcttacgagcagaattatttaaaaaacgctatcaaaatctggatattcagctccagcaacttcgtagccagttaaacgccaagcggcagcaaaaggcagaatcagctcttgagcatactgaaatgctggcagaacagaatggtggaaaactccctcagtttctactggatgaacttcagcaaaaccgccacctttcacaaatgctcaatcagcaaactcaacgcatggattccattggttctcagcaacgcaaagctgccgatgatattctgcgggtacgtcagacccttaataccatccgcgaacaggcgcagtggctgggtgattcaacaacattaggagccgcgttaagggcgcagttaacccgcatcccggatgtcccaaaatctcagcagctagaccgaaatatagttgaattacgggttgaaaggctaaaatatgaagaaatgctggaacactctcagcgggaaagcgaacatactcctattacaaatagcagcctgacgccaacccaaaaacaggtttatgattcccttatccgtaccagaaaagagttacttaattccctgctttccggttatgacagcgaaatattggaattaacaaaactcaaagtttctaccagccagttaaatgaggcattgaaagaagttaaggatgccacacaccgctatctgttctgggtagcagatgtcaatcccatttcactgaattatcctctgttggttgtacgagatttaacccgattactctctctggatacaatttcccaattaggcattgcaatccatgtgatgctgacaacgcaggataccttgctttatctgctgggtacgttgttgctggtgatattcagcatcagttcacaccgccagtatcacgctttccttgaacgctccagcaaccgtatcggcaaggtgacacaagatcacttctccctgaccataagaaccgtgttctggtctgttgtagcggctttgcctctgccaatgctctggtcagcgattggctacggcctgaaaaatgcctggcagtacccaatggcaaccgctatcggtaatggtgtcagtgaaacaacgcctatcctatggattttcatgctcagcgcagcgtttgcccatccgaatggtttatttattgctcatttccgctggccggaagaacgtgtcaaacgggcaatgcgtttttatcgggtatcaattttcctgattgtgccattgatgatggcgctaattacctttaacaattacagtgatcgtgagtttggtgcaaccctcggcagattatgttttctaatgctctgcgtctcgctgagtctggtcacaaccagcctgaaacgggcaggtattccactgtacatggataaacatgggtcaggtgaaaacgttatcaactctgttttatggtggatactgctctctgcaccaattctggccgcgctggcttctgtactgggttatctgcaaacttcgcaggccctgttggcacggttggaaacctccgttgccatctggttctccctgctggtcatctatcacataacccgtcgatggatgttaatccagcgtcgtaaaattgcgttcgaaagggcaaaacaacgccgagccgatatccttgcccaacgtgctaaaagtgaagaagattccagcaacattaacagtagtgttgaaggggtgattgaagttgaagagccagttatcgatctggatgcaatcagtgcccagtctttaggtctggtacgctccatcctgacgatgctggcactggtttcacttatcctgttatggtcagaactacattctgcgttctctttccttgaaaatatccggttatgggatgtcaccacaagcatcaacggtattgatactatccagtcaatcactctgggttctatcctgattgccattctggtcattattattacgactcagcttgtccgtaatctccctgcattactggaactggcactgttacaacatctggaactgactcccggtacaggctacgccatcaccacattaaccaaatacggtattacattgatcggcagtattgtcggtttctcattagtgggtattgaatggtcaaaactgcaatggttagttgcagcaatgggggttgggcttggttttgggttacaggaaatttttgccaatattatttccgggctgatgatcctgttcgaaaaaccaatccgtattggcgataccgtcactattcgcgggctgaccggtagcatcacaaaaattaatacacgggcaactactctgactgactgggatagaaaagagatcatcgttcccaatagagcatttattactgaacaatttataaactggtcattgtctgataccatcacccgtattgtcctgacgatccctgttcccgtagagacagaatctgcgaaagcaacagagatattactgaccgcagcaagacgatgcccgttaattatcgataatccgatgcctgaagcctatctggttgacctgcaacaagggattcagatttatgaactgcgagcttatgccgcagaaatggggcatcgtatgcctgctcgtcatgaagtacatcagtatattttgcaggaattccataaccacaatatcaccctgccattcccaccatttcaggctcgtgttgatattttcggacaggagatccgcagtgctacaaccaatacatcaggtcgcaatcttccacgtaaaccgggagatctataatttaatttagggaaaaagagaacaaaaatatggtaaggcgcatccctgttcagataagtggcttactggcattaaatggtgtttctattctgggaaacaccatcacagaaatcgctattccttggttaattctggaaatatcaggcagtccattactggttgctgctgtgatgtcagccaaaatgctgccattaatattatctgtttttttcagtgcacagttagttgatagatacggcgaatttcggatctcagtattatcggatgtcgttaatttcctgagtgtgttattaatccctgtattctatacaatggatattcttcacttttatcttctagctattttattaatattttcaactattctggatgcaccagggcgtctggcaaaagatattatgctagcaaaggaaataaaactgcataaaagagagaatgaattaatcaatggcataaatagcaccattgaaaatatttgtgatcttgttggccctgctgttggctcactcattatcgccatgcttggtacaatcaacgcattatactttgatgcggtcagttttttagttgttgcccttggtattattattctgaaaaaacatttttccgctgatataaaccagataacggaaaccccttctctgccacatcattatttccttgaagccttgcgctacattaaatcagagaaggaactgttttctgtactcatcctaagttcaataatcaattttgttatcaccccattcctgaccgtttacctgccttacgtcaataaaaccgaatttaattccgttatcagtcttggagtttcaatgacatgctttggtataggtactgctctttcctctttgctgtacggcctctatggaaaatacttttccagccaccggatccttctctccggttacggcctgctggggttatgcttcctgtctttgcctctattcaatgagcagtatgttttgtttatccagctttttgccatcggctgtagcattggttttgctgcgccagtagaaattacgttgattcaacgcaaagtacctgaaaatctgtttggcagaataatgaccttgtttacctctacccgatttattagcgttcctgtcgggtatatctctttcggtgctgtgctggaatccagcatcgcccaacaaatacctattattatggcggtaatagtattaagcggaatattagtttacttgcttctgagaggaagaagggaaaattaaaaatcaggtaacgatgacagaataagatgattttttattgataagaaaacgctgttataaaatcataagcagcgttttgatagttttggcaaactaaagaaaaagatcaaagagatattactatattaacgcagtccctttgggtcagcgccgtattcattactgccttctgtaccttccagaagagtaaagataaatacaacaataccgccaatcgggacaaaaaccagtaagaaccaccagccagagcgatcagtatcatgcaggcgacgtaccgttactgccagtgacggaataaaagtgattaacgcatagagaacaactaatataagtccgatggtttcaccgagaattgcacctaatatgcaaacggccaaaaatgccagcatattaaaaaagtaaaacatccaatattctttacgacgtgcacgcccggagaaatcagcgtaattttttaaaacctgaaaataccaattcataatattacttctttaaaagaaaatttaataaaacaaaaggagacaaactataaaggatgcgagattttatactcaattatattttaaagtccacacatcgcccttaaaggaataatattaaaaaaaccatgtaattctcagatatttaatcaataaaatctgcccaatataaaatacaatgtaacttcaatatatattcgtctacttcatatcaaagttagccatcaattgatcagaaaaaaaaagctaattaatgcagcattaaccgaccataaaataatattttcatagcatgcttataattaattaaatcatcaaaaaaaggaatggtgtctctgaaaaatactctaatcagttattaatcatcgcacaaatgcaaaaaatgcgattacaccagtcacgccatttacataaatttaacaaaacactattatgtcagtttaaataataaacatattcttatcgttcgagataatatgaaaaccttatccgacaggccatggttactaataacttttttcctgatagcaaatcttttctcttcaattgccgttgcaataggaatgtatcttattccgtggtatatcagcaataatgccggggatccttcttctctggcaacaactgccatgttttctgctgttttagtactttgtctcactccttttattggcagaataatcgattctttcaaccgaaaatcaattctgatgtttatcaccattgcagttctgatactttttctgtttctttctctctcaggtagtacattttcgaaccaattatatgccctaatctgtgcctatatctgcattcagatttatttcgctgttttctatacaacccgacagggatttattaaagatgtttttcaggccagtgagctgtatcgtattaatgccattcttgaaatagaagcccagtcttcgacactcattgcagcattattagtcgttaccttttctggttcagccaacattgatatttttatgctactggcatgtatgacgtttatttcccttattatactggcagtaatcccttataccgccagaaatatcaatcatggaagtgcttctgaatctcagcaatccacacttcctttgtcatttttaaaaaccgacttattttgctatatgtcgatgggtgcaattcccttcatttgcatcatgacaatcaatatcatccaacccccatttatgaatagtgtgcttcagcaacctatcagttcttatgctgcttacgggattatctatggctgtggtgcgattctggttggttttattatgggaaaaatatccaatcgttatcctcaacgcaatctggtgctaatgttcactctcacttttacgatagcgctcggtataatcgctctgtttccaactcttgaagtgattctgatatgtggttttttcctcggattcagtaattcagcatcacggatatcaagcaacaaccttattctacaggaagttggttctgaggtaattggccgggcattttcatatgggcaatttttcgcactgtgcggcaggatcattgcgacagggcttgttccactaatttttgttagtgattacaaattagtatggaattatgtctttgctatcagccttattgtaccagtcgtgttgttggtcaggcgatatttagatcaggcagaacccagtgaagtacgataataaataagtttatcgctcaggctggcagccacaggattcaccaatttgtaattcaaactcgaattcacactcctgtgcccggccattccatgttctcaatatgttgatagctgtttgtgccatctgatcaaccggctggcgaacagcagtcaaagaaggcacattatataaagattgctgagtcgcattgaaacaaactaacgcaatatcggctgacacttttattttatgttcggccagtgcacgtaaacaaccgaacgcctgcaactcattggaagcaaacaaagcctgaggcaacttccctttcaacattcgtaacgtcgcttcatagcctcccagccgggtataatctgtagagaaaatccattctttctttatcgccagattggcctgttctaacgcatctcgccagccggaaaggcgatcttgtgtgtttagcatactaagaggcccacaaataatggcaacatctcgataaccatgctcagtcagatgttgagtcactttaaatgcggcaatccgttcattgacccggattgcactgacatttgaatcagcataaacccaatcgagcatcacgcagggagttccactggcctgaatcaaatcaatataaggatgacgatccacgctggtgtacagtaaaccatcaatttgacgattcagtagattattaatcagctccttctcccggattcgattatcccctgaatctcccggcagcagtacctgaccatgtttaaaagcctccaactgcaaggcatgagctaccgaagaaaggaaagtctactcgcgtagactgaaaaatataggaatttaattattgaactttagcaacaactatcatagaaaattcattgattgtaattaataaattttgaaacatgatgataaaaaaacccctatatctacacagtgaattttcattacgatacatcattaagataaaaatcgcatagcaacatgaaatgtaaacaattaaaaataaagtcacagtaataatataaccatacaaccaaatgataatatttgtgataataaaattatcatatttaaaaatagtattgctaattttgtcttttaaatataaaaacagcatccgattggatgctgtttttatattttgatgggtgaaaccaacacaacaccctcaaacctgatacattttctgcaaataacacgacaccgcatcatcagcattagagcctatgatttccatgtccggcagagtatctttcaggcgctgatgtgctccctgcataatgcagcctttaccagccacgctcagcatttcacgatcattcatgccatccccaaacgctatgcaatcacttaactcataaccgatggactggcagacctgtgccagtgcttcacccttggatacaccgcctgacatgacttccagacagtttctcagtgaaaagctgacattgactttgtctccccagcgcgcttcaatcctttcttccagctgaaccaaataatcatggtcgtcgctggtatagtaaaccttgcatactccattaaccggaaaattgtcgcgctggaaaatctggtaatggaaatccgatactttaaagaattcggtttgttcctcgcttgcgcgattaacccaccactcatcgttattgtaatagttagtcagaacatccggattatcaaactccagcaaacataaatcacgggcaatttccggtgcaaggttatggctgaagaccaaatctccttgtgagttatgtaccctcgccccatttgatgtgatcatgtaagcatcaatgcccagcccgtcccggatctgtcctacatcaatgtggtgacgccctgttgcaaagataaagtgaattcctttatccgtcagcagattcaatattttctttgtatacggtgttaatacgtgatcgggagataacagtgtgccatctaaatctgaagcaacaacatggtacatggttcaaattcctaagctaaattaattttggtcaaaaaaatcacaaatcgcattaagagcctgtgctctcaatgcatctttttcgaacaggatttcatggcgtgccccttggataaccagaggattatattcttcttttcctgctccggctttttgacgagatgcacaaaaagccaacaactcccgattgctaactactttatcttcgcttgcttttaagacgatgagtggtgtctgaatttcgccagccttctcaacgaggctatctccagcccgcatactttcacgcatccaacgataagtcgggccacccaggcgcaattcaggataatctacataatagcgtaagtatcgctggtaacgagcatagctatgagttaacaggttgataaaatagggtaatggacgccattgcccggttaagaccgcatatctgttacgccttccaggataaggttcagcctgattaaccaaaaagtttgccgcccagcgaggcattggcaaattaataccaaacataggagcacataaagccgcagcacggaataccgacgcatgacgtaacagcaaagagctcaggattgcccctcccattgaatgagccagtgcataacagcgatgcgacttaagtgaagaaatttccagttcaatgagttttgccagatcatctacatagtgatcaaacgattcaacatgccctttctgaggatctgtcagcattctgccagaacgcccctgaccgcgatgatcaataataaggatgttgtaacccagatggtaaaaatcataggctacctccgggtatttcacatagctttcgctacgccccggagatatcaccaatgttttatcatgatgaggtgaactgaaagagacataacggatagggatattatcaacacccatgaattcacgttcatctctgatattccaaaaatccagcaataatccatttgtaaaagcagaaaactgaggctcacggtttaaccagcttgcttttagtctttcaggtaccattatcatcctctatacccgctgtctttccggttgcagattacagaattgttactgctacgtttattcgaatccttcgaaatgttcacggataactgtcataaaggcatcaccaaaacgctcgagtttacgctgcccaacgccgttaatcagcagaagctcatcaggtgttattgggcactgttctgccatctcaatcagtgttacatcattgaagacgacaaacggcggaatattattttcgtcagcaatggattttcgtaatttgcgcaatttagcgaataatttacgatcatagtttccactgtatgatttgttttgttgatttctgcttttcaggctttgaattcggggaactgcaagttgcaggggcatttcaccacgcaaaataggccgcgcggcttccgttagttgtagtgctgaataattggcaatattttggttgataagccccagatggatcagctggcgcaggacactcatccaatgttcctgactatgatctttaccgatgccgtaaacaggtaacctgtcatgccctgactccctgatacgctggttattagcgccacgtagcatttccacaatatagccaattccaaaacgctgcccaacgcggtaaatacaggacagagctttttgtgcatccaccagaccatcataacgtttcggtggttcgaggcagatgtcgcagttaccacaggttgtttgcttgctttcaccaaaatagttgagcaagaccaagcggcggcaggtttgtgcttccgcaaatgcgcccatcgcattgagtttatgccgttcaatatcctgttgttccccggcaggcttttcttcgagacaacggcgcagccacgccatatccgccggatcataaaacaacaccgcttcagcaggcaggccatcacgcccggcacgccccgtttcctgataataggattcgatattgcggggaatatcaaaatgcacaacgaatcgcacgtttggtttgttaatccccataccaaacgcaaccgttgccaccactacctgtaaatcatcccgctggaatgcatcctgtacccatgctcgctgattgttttccagccccgcatggtaaggtgcaacgctcaatccgcgcttttgcagccgttcagccgtttcttccactttgttccggctgttacagtagataatcccgctttttccctgctgacttcgaatgaatgcccaaagctgatcaaggggcttatatttctcaaccaatgtgtagcgaatgttaggacgatcaaaactactgaggtgaatgataggatcacgcagttccaacaggcggacaatatcctgccgggttgtcttatctgcggtggctgtcaacgcgataacgggaagatcaggaaaacgcctgcgtaattgcccaagcgcccggtattccggccggaaatcatgcccccattgagaaatacagtgtgcttcatcaacagccagcaaagcaggacgccaattggataactgttcgagaaagttatcagtcaccagccgctcaggtgcaatgtaaagcaatttaatgcttccctgacgacaccgacggataatatcactctgttgttcacgatcctgagtggagtttaagcactctgcttctataccattcgctctaagttgatccacctgatctttcattaatgagatcaatggagaaaccaccaatgtcagtccctctttcatcagagcagggatttgataacaaactgatttaccgccacctgtcggcatgataaccagacagtctcgatcatcaagaacagcatcgatgacctgttgctgtccggcgcgaaattgctgatatccgaatgtttttcgtaatacttgttcagccagcgatgccgtgctgatgacttctgcggtagacacgcctttcctcaatgtttagagctggttttataaaatgattatatccagtgaatttcaagttgcatcgcagcgacaagggatcgcctccgggaacttagataaccgtctgtttataaaaacggtaccctgagcaagtgaacacagccaacaaagaggcaacttgaaaaacaacggatatttaattaattacagcatatcattcagcataacaccgataccgaatcgggtctgtctgaaattgtaatcaatcattgactcgccatatccgctgaagagttgtgcgtaaaaacggacatgtttagatagaggataactccagcccagctctccgccactataaccactgttccagttataacgcccctgcatggtaaatacattttcaccatagtgatagccgactttcaggcgataataccccatataacggttcatatccgggttatcatcccgcctgttactttcagtcaggcgataccacggtttcaaatctacctgccagtttcctttttgtgccatcagccgtgcataaacccggttccagctacgggaagtggattccggacgaccattagactggtgattaatacccgcttcaatttcccgcaggtgccagccggcaagttcataatcagtcagccatgccagaaataactgcggttcataattagtctcacgaaatggagaagattctcttttattactgagctgccaccatgaacgctgtgtataagaagcccccagcaatgaattttcaccaacaatacctcgccatattggaaaaccaaaactgacctgaaagtgaacttcatctttacgggcatgatcaacccaatcataactgctaattgcctgtttatttacccgggagctgtaagtgtaaagaatataatttgtatcataaggatagagcataaaaggcgaatcatattcttgcagcattgccgaaattacactgcctctaactgcgtcagcctgtttatctgagccataagctaatgttgataataaacaggtaataaccagtattttccaccgcaattgcatttctggttttcctaatcgtgatagttcaaagataaagaagtaagaagataagaatattaagagcaataaatcactaggatattctaaactcgaaacggggattttttatagtaactttttcctcaataaattattttttcgaaacgcttcttagactggcaagatgataaataaaagcataaaattaacaagttattaaccaaagataactctctaatgatattaaatttatttttctaattatcaggaagttcaacatggaaacgatacagcacccaactcaacctttaacacaagaagaagcgcgtaaaattataggtgaggtttttatttatcagatgccattcaaccaacttttaggacttgaattgattcgttttgagcaggactacgcagagcttcaattttgcaatcaggataaactattgggcaatatggctcaaaagatcctacacggcggagccatagcttcaatccttgatgttgcaggtggtttagtctgtgccggcggggcgctgaacatgatgaaaacaatcacgctcgaggaaataagaaagcgtctgcccactttaggtacgatagacctgcgtgttgactacctgcgtcccggacgtggagaaatatttacggccagcagtaatattatccgtgccggcaataaagtatctgttgccagaatagaattacacaatgaaaaacaagtgcatattgcaagtgcaacagggacttatttggttggatgatgtttaatattcttaaataaaggaatgtgataaggaatacattccttttttcagtataatttgcttagaatcccctgaattttatgaaaactgaattattatacataagcaactcttta

SEQ ID NO: 2779 - DNA, 17739 bp, Xenorhabdus sp.; identical to SEQ ID NO: 2778
  CDS (7669)..(8763)

SEQ ID NO: 2780 - DNA, 17739 bp, Xenorhabdus sp.; identical to SEQ ID NO: 2778
  CDS (806)..(1066)

SEQ ID NO: 2781 - DNA, 17739 bp, Xenorhabdus sp.; identical to SEQ ID NO: 2778
  CDS (2092)..(3162)

SEQ ID NO: 2782 - DNA, 17739 bp, Xenorhabdus sp.; identical to SEQ ID NO: 2778
  CDS (3278)..(4207)

SEQ ID NO: 2783 - DNA, 17739 bp, Xenorhabdus sp.; identical to SEQ ID NO: 2778
  CDS (4232)..(7576)

SEQ ID NO: 2784 - DNA, 17739 bp, Xenorhabdus sp.; identical to SEQ ID NO: 2778
  CDS (17135)..(17620)

SEQ ID NO: 2785 - DNA, 17739 bp, Xenorhabdus sp.
  CDS (17509)..(17637)
taaagagttgcttatgtataataattcagttttcataaaattcaggggattctaagcaaattatactgaaaaaaggaatgtattccttatcacattcctttatttaagaatattaaacatcatccaaccaaataagtccctgttgcacttgcaatatgcacttgtttttcattgtgtaattctattctggcaacagatactttattgccggcacggataatattactgctggccgtaaatatttctccacgtccgggacgcaggtagtcaacacgcaggtctatcgtacctaaagtgggcagacgctttcttatttcctcgagcgtgattgttttcatcatgttcagcgccccgccggcacagactaaaccacctgcaacatcaaggattgaagctatggctccgccgtgtaggatcttttgagccatattgcccaatagtttatcctgattgcaaaattgaagctctgcgtagtcctgctcaaaacgaatcaattcaagtcctaaaagttggttgaatggcatctgataaataaaaacctcacctataattttacgcgcttcttcttgtgttaaaggttgagttgggtgctgtatcgtttccatgttgaacttcctgataattagaaaaataaatttaatatcattagagagttatctttggttaataacttgttaattttatgcttttatttatcatcttgccagtctaagaagcgtttcgaaaaaataatttattgaggaaaaagttactataaaaaatccccgtttcgagtttagaatatcctagtgatttattgctcttaatattcttatcttcttacttctttatctttgaactatcacgattaggaaaaccagaaatgcaattgcggtggaaaatactggttattacctgtttattatcaacattagcttatggctcagataaacaggctgacgcagttagaggcagtgtaatttcggcaatgctgcaagaatatgattcgccttttatgctctatccttatgatacaaattatattctttacacttacagctcccgggtaaataaacaggcaattagcagttatgattgggttgatcatgcccgtaaagatgaagttcactttcaggtcagttttggttttccaatatggcgaggtattgttggtgaaaattcattgctgggggcttcttatacacagcgttcatggtggcagctcagtaataaaagagaatcttctccatttcgtgagactaattatgaaccgcagttatttctggcatggctgactgattatgaacttgccggctggcacctgcgggaaattgaagcgggtattaatcaccagtctaatggtcgtccggaatccacttcccgtagctggaaccgggtttatgcacggctgatggcacaaaaaggaaactggcaggtagatttgaaaccgtggtatcgcctgactgaaagtaacaggcgggatgataacccggatatgaaccgttatatggggtattatcgcctgaaagtcggctatcactatggtgaaaatgtatttaccatgcaggggcgttataactggaacagtggttatagtggcggagagctgggctggagttatcctctatctaaacatgtccgtttttacgcacaactcttcagcggatatggcgagtcaatgattgattacaatttcagacagacccgattcggtatcggtgttatgctgaatgatatgctgtaattaattaaatatccgttgtttttcaagttgcctctttgttggctgtgttcacttgctcagggtaccgtttttataaacagacggttatctaagttcccggaggcgatcccttgtcgctgcgatgcaacttgaaattcactggatataatcattttataaaaccagctctaaacattgaggaaaggcgtgtctaccgcagaagtcatcagcacggcatcgctggctgaacaagtattacgaaaaacattcggatatcagcaatttcgcgccggacagcaacaggtcatcgatgctgttcttgatgatcgagactgtctggttatcatgccgacaggtggcggtaaatcagtttgttatcaaatccctgctctgatgaaagagggactgacattggtggtttctccattgatctcattaatgaaagatcaggtggatcaacttagagcgaatggtatagaagcagagtgcttaaactccactcaggatcgtgaacaacagagtgatattatccgtcggtgtcgtcagggaagcattaaattgctttacattgcacctgagcggctggtgactgataactttctcgaacagttatccaattggcgtcctgctttgctggctgttgatgaagcacactgtatttctcaatgggggcatgatttccggccggaataccgggcgcttgggcaattacgcaggcgttttcctgatcttcccgttatcgcgttgacagccaccgcagataagacaacccggcaggatattgtccgcctgttggaactgcgtgatcctatcattcacctcagtagttttgatcgtcctaacattcgctacacattggttgagaaatataagccccttgatcagctttgggcattcattcgaagtcagcagggaaaaagcgggattatctactgtaacagccggaacaaagtggaagaaacggctgaacggctgcaaaagcgcggattgagcgttgcaccttaccatgcggggctggaaaacaatcagcgagcatgggtacaggatgcattccagcgggatgatttacaggtagtggtggcaacggttgcgtttggtatggggattaacaaaccaaacgtgcgattcgttgtgcattttgatattccccgcaatatcgaatcctattatcaggaaacggggcgtgccgggcgtgatggcctgcctgctgaagcggtgttgttttatgatccggcggatatggcgtggctgcgccgttgtctcgaagaaaagcctgccggggaacaacaggatattgaacggcataaactcaatgcgatgggcgcatttgcggaagcacaaacctgccgccgcttggtcttgctcaactattttggtgaaagcaagcaaacaacctgtggtaactgcgacatctgcctcgaaccaccgaaacgttatgatggtctggtggatgcacaaaaagctctgtcctgtatttaccgcgttgggcagcgttttggaattggctatattgtggaaatgctacgtggcgctaataaccagcgtatcagggagtcagggcatgacaggttacctgtttacggcatcggtaaagatcatagtcaggaacattggatgagtgtcctgcgccagctgatccatctggggcttatcaaccaaaatattgccaattattcagcactacaactaacggaagccgcgcggcctattttgcgtggtgaaatgcccctgcaacttgcagttccccgaattcaaagcctgaaaagcagaaatcaacaaaacaaatcatacagtggaaactatgatcgtaaattattcgctaaattgcgcaaattacgaaaatccattgctgacgaaaataatattccgccgtttgtcgtcttcaatgatgtaacactgattgagatggcagaacagtgcccaataacacctgatgagcttctgctgattaacggcgttgggcagcgtaaactcgagcgttttggtgatgcctttatgacagttatccgtgaacatttcgaaggattcgaataaacgtagcagtaacaattctgtaatctgcaaccggaaagacagcgggtatagaggatgataatggtacctgaaagactaaaagcaagctggttaaaccgtgagcctcagttttctgcttttacaaatggattattgctggatttttggaatatcagagatgaacgtgaattcatgggtgttgataatatccctatccgttatgtctctttcagttcacctcatcatgataaaacattggtgatatctccggggcgtagcgaaagctatgtgaaatacccggaggtagcctatgatttttaccatctgggttacaacatccttattattgatcatcgcggtcaggggcgttctggcagaatgctgacagatcctcagaaagggcatgttgaatcgtttgatcactatgtagatgatctggcaaaactcattgaactggaaatttcttcacttaagtcgcatcgctgttatgcactggctcattcaatgggaggggcaatcctgagctctttgctgttacgtcatgcgtcggtattccgtgctgcggctttatgtgctcctatgtttggtattaatttgccaatgcctcgctgggcggcaaactttttggttaatcaggctgaaccttatcctggaaggcgtaacagatatgcggtcttaaccgggcaatggcgtccattaccctattttatcaacctgttaactcatagctatgctcgttaccagcgatacttacgctattatgtagattatcctgaattgcgcctgggtggcccgacttatcgttggatgcgtgaaagtatgcgggctggagatagcctcgttgagaaggctggcgaaattcagacaccactcatcgtcttaaaagcaagcgaagataaagtagttagcaatcgggagttgttggctttttgtgcatctcgtcaaaaagccggagcaggaaaagaagaatataatcctctggttatccaaggggcacgccatgaaatcctgttcgaaaaagatgcattgagagcacaggctcttaatgcgatttgtgatttttttgaccaaaattaatttagcttaggaatttgaaccatgtaccatgttgttgcttcagatttagatggcacactgttatctcccgatcacgtattaacaccgtatacaaagaaaatattgaatctgctgacggataaaggaattcactttatctttgcaacagggcgtcaccacattgatgtaggacagatccgggacgggctgggcattgatgcttacatgatcacatcaaatggggcgagggtacataactcacaaggagatttggtcttcagccataaccttgcaccggaaattgcccgtgatttatgtttgctggagtttgataatccggatgttctgactaactattacaataacgatgagtggtgggttaatcgcgcaagcgaggaacaaaccgaattctttaaagtatcggatttccattaccagattttccagcgcgacaattttccggttaatggagtatgcaaggtttactataccagcgacgaccatgattatttggttcagctggaagaaaggattgaagcgcgctggggagacaaagtcaatgtcagcttttcactgagaaactgtctggaagtcatgtcaggcggtgtatccaagggtgaagcactggcacaggtctgccagtccatcggttatgagttaagtgattgcatagcgtttggggatggcatgaatgatcgtgaaatgctgagcgtggctggtaaaggctgcattatgcagggagcacatcagcgcctgaaagatactctgccggacatggaaatcataggctctaatgctgatgatgcggtgtcgtgttatttgcagaaaatgtatcaggtttgagggtgttgtgttggtttcacccatcaaaatataaaaacagcatccaatcggatgctgtttttatatttaaaagacaaaattagcaatactatttttaaatatgataattttattatcacaaatattatcatttggttgtatggttatattattactgtgactttatttttaattgtttacatttcatgttgctatgcgatttttatcttaatgatgtatcgtaatgaaaattcactgtgtagatataggggtttttttatcatcatgtttcaaaatttattaattacaatcaatgaattttctatgatagttgttgctaaagttcaataattaaattcctatatttttcagtctacgcgagtagactttcctttcttcggtagctcatgccttgcagttggaggcttttaaacatggtcaggtactgctgccgggagattcaggggataatcgaatccgggagaaggagctgattaataatctactgaatcgtcaaattgatggtttactgtacaccagcgtggatcgtcatccttatattgatttgattcaggccagtggaactccctgcgtgatgctcgattgggtttatgctgattcaaatgtcagtgcaatccgggtcaatgaacggattgccgcatttaaagtgactcaacatctgactgagcatggttatcgagatgttgccattatttgtgggcctcttagtatgctaaacacacaagatcgcctttccggctggcgagatgcgttagaacaggccaatctggcgataaagaaagaatggattttctctacagattatacccggctgggaggctatgaagcgacgttacgaatgttgaaagggaagttgcctcaggctttgtttgcttccaatgagttgcaggcgttcggttgtttacgtgcactggccgaacataaaataaaagtgtcagccgatattgcgttagtttgtttcaatgcgactcagcaatctttatataatgtgccttctttgactgctgttcgccagccggttgatcagatggcacaaacagctatcaacatattgagaacatggaatggccgggcacaggagtgtgaattcgagtttgaattacaaattggtgaatcctgtggctgccagcctgagcgataaacttatttattatcgtacttcactgggttctgcctgatctaaatatcgcctgaccaacaacacgactggtacaataaggctgatagcaaagacataattccatactaatttgtaatcactaacaaaaattagtggaacaagccctgtcgcaatgatcctgccgcacagtgcgaaaaattgcccatatgaaaatgcccggccaattacctcagaaccaacttcctgtagaataaggttgttgcttgatatccgtgatgctgaattactgaatccgaggaaaaaaccacatatcagaatcacttcaagagttggaaacagagcgattataccgagcgctatcgtaaaagtgagagtgaacattagcaccagattgcgttgaggataacgattggatatttttcccataataaaaccaaccagaatcgcaccacagccatagataatcccgtaagcagcataagaactgataggttgctgaagcacactattcataaatgggggttggatgatattgattgtcatgatgcaaatgaagggaattgcacccatcgacatatagcaaaataagtcggtttttaaaaatgacaaaggaagtgtggattgctgagattcagaagcacttccatgattgatatttctggcggtataagggattactgccagtataataagggaaataaacgtcatacatgccagtagcataaaaatatcaatgttggctgaaccagaaaaggtaacgactaataatgctgcaatgagtgtcgaagactgggcttctatttcaagaatggcattaatacgatacagctcactggcctgaaaaacatctttaataaatccctgtcgggttgtatagaaaacagcgaaataaatctgaatgcagatataggcacagattagggcatataattggttcgaaaatgtactacctgagagagaaagaaacagaaaaagtatcagaactgcaatggtgataaacatcagaattgattttcggttgaaagaatcgattattctgccaataaaaggagtgagacaaagtactaaaacagcagaaaacatggcagttgttgccagagaagaaggatccccggcattattgctgatataccacggaataagatacattcctattgcaacggcaattgaagagaaaagatttgctatcaggaaaaaagttattagtaaccatggcctgtcggataaggttttcatattatctcgaacgataagaatatgtttattatttaaactgacataatagtgttttgttaaatttatgtaaatggcgtgactggtgtaatcgcattttttgcatttgtgcgatgattaataactgattagagtatttttcagagacaccattcctttttttgatgatttaattaattataagcatgctatgaaaatattattttatggtcggttaatgctgcattaattagctttttttttctgatcaattgatggctaactttgatatgaagtagacgaatatatattgaagttacattgtattttatattgggcagattttattgattaaatatctgagaattacatggtttttttaatattattcctttaagggcgatgtgtggactttaaaatataattgagtataaaatctcgcatcctttatagtttgtctccttttgttttattaaattttcttttaaagaagtaatattatgaattggtattttcaggttttaaaaaattacgctgatttctccgggcgtgcacgtcgtaaagaatattggatgttttacttttttaatatgctggcatttttggccgtttgcatattaggtgcaattctcggtgaaaccatcggacttatattagttgttctctatgcgttaatcacttttattccgtcactggcagtaacggtacgtcgcctgcatgatactgatcgctctggctggtggttcttactggtttttgtcccgattggcggtattgttgtatttatctttactcttctggaaggtacagaaggcagtaatgaatacggcgctgacccaaagggactgcgttaatatagtaatatctctttgatctttttctttagtttgccaaaactatcaaaacgctgcttatgattttataacagcgttttcttatcaataaaaaatcatcttattctgtcatcgttacctgatttttaattttcccttcttcctctcagaagcaagtaaactaatattccgcttaatactattaccgccataataataggtatttgttgggcgatgctggattccagcacagcaccgaaagagatatacccgacaggaacgctaataaatcgggtagaggtaaacaaggtcattattctgccaaacagattttcaggtactttgcgttgaatcaacgtaatttctactggcgcagcaaaaccaatgctacagccgatggcaaaaagctggataaacaaaacatactgctcattgaatagaggcaaagacaggaagcataaccccagcaggccgtaaccggagagaaggatccggtggctggaaaagtattttccatagaggccgtacagcaaagaggaaagagcagtacctataccaaagcatgtcattgaaactccaagactgataacggaattaaattcggttttattgacgtaaggcaggtaaacggtcaggaatggggtgataacaaaattgattattgaacttaggatgagtacagaaaacagttccttctctgatttaatgtagcgcaaggcttcaaggaaataatgatgtggcagagaaggggtttccgttatctggtttatatcagcggaaaaatgttttttcagaataataataccaagggcaacaactaaaaaactgaccgcatcaaagtataatgcgttgattgtaccaagcatggcgataatgagtgagccaacagcagggccaacaagatcacaaatattttcaatggtgctatttatgccattgattaattcattctctcttttatgcagttttatttcctttgctagcataatatcttttgccagacgccctggtgcatccagaatagttgaaaatattaataaaatagctagaagataaaagtgaagaatatccattgtatagaatacagggattaataacacactcaggaaattaacgacatccgataatactgagatccgaaattcgccgtatctatcaactaactgtgcactgaaaaaaacagataatattaatggcagcattttggctgacatcacagcagcaaccagtaatggactgcctgatatttccagaattaaccaaggaatagcgatttctgtgatggtgtttcccagaatagaaacaccatttaatgccagtaagccacttatctgaacagggatgcgccttaccatatttttgttctctttttccctaaattaaattatagatctcccggtttacgtggaagattgcgacctgatgtattggttgtagcactgcggatctcctgtccgaaaatatcaacacgagcctgaaatggtgggaatggcagggtgatattgtggttatggaattcctgcaaaatatactgatgtacttcatgacgagcaggcatacgatgccccatttctgcggcataagctcgcagttcataaatctgaatcccttgttgcaggtcaaccagataggcttcaggcatcggattatcgataattaacgggcatcgtcttgctgcggtcagtaatatctctgttgctttcgcagattctgtctctacgggaacagggatcgtcaggacaatacgggtgatggtatcagacaatgaccagtttataaattgttcagtaataaatgctctattgggaacgatgatctcttttctatcccagtcagtcagagtagttgcccgtgtattaatttttgtgatgctaccggtcagcccgcgaatagtgacggtatcgccaatacggattggtttttcgaacaggatcatcagcccggaaataatattggcaaaaatttcctgtaacccaaaaccaagcccaacccccattgctgcaactaaccattgcagttttgaccattcaatacccactaatgagaaaccgacaatactgccgatcaatgtaataccgtatttggttaatgtggtgatggcgtagcctgtaccgggagtcagttccagatgttgtaacagtgccagttccagtaatgcagggagattacggacaagctgagtcgtaataataatgaccagaatggcaatcaggatagaacccagagtgattgactggatagtatcaataccgttgatgcttgtggtgacatcccataaccggatattttcaaggaaagagaacgcagaatgtagttctgaccataacaggataagtgaaaccagtgccagcatcgtcaggatggagcgtaccagacctaaagactgggcactgattgcatccagatcgataactggctcttcaacttcaatcaccccttcaacactactgttaatgttgctggaatcttcttcacttttagcacgttgggcaaggatatcggctcggcgttgttttgccctttcgaacgcaattttacgacgctggattaacatccatcgacgggttatgtgatagatgaccagcagggagaaccagatggcaacggaggtttccaaccgtgccaacagggcctgcgaagtttgcagataacccagtacagaagccagcgcggccagaattggtgcagagagcagtatccaccataaaacagagttgataacgttttcacctgacccatgtttatccatgtacagtggaatacctgcccgtttcaggctggttgtgaccagactcagcgagacgcagagcattagaaaacataatctgccgagggttgcaccaaactcacgatcactgtaattgttaaaggtaattagcgccatcatcaatggcacaatcaggaaaattgatacccgataaaaacgcattgcccgtttgacacgttcttccggccagcggaaatgagcaataaataaaccattcggatgggcaaacgctgcgctgagcatgaaaatccataggataggcgttgtttcactgacaccattaccgatagcggttgccattgggtactgccaggcatttttcaggccgtagccaatcgctgaccagagcattggcagaggcaaagccgctacaacagaccagaacacggttcttatggtcagggagaagtgatcttgtgtcaccttgccgatacggttgctggagcgttcaaggaaagcgtgatactggcggtgtgaactgatgctgaatatcaccagcaacaacgtacccagcagataaagcaaggtatcctgcgttgtcagcatcacatggattgcaatgcctaattgggaaattgtatccagagagagtaatcgggttaaatctcgtacaaccaacagaggataattcagtgaaatgggattgacatctgctacccagaacagatagcggtgtgtggcatccttaacttctttcaatgcctcatttaactggctggtagaaactttgagttttgttaattccaatatttcgctgtcataaccggaaagcagggaattaagtaactcttttctggtacggataagggaatcataaacctgtttttgggttggcgtcaggctgctatttgtaataggagtatgttcgctttcccgctgagagtgttccagcatttcttcatattttagcctttcaacccgtaattcaactatatttcggtctagctgctgagattttgggacatccgggatgcgggttaactgcgcccttaacgcggctcctaatgttgttgaatcacccagccactgcgcctgttcgcggatggtattaagggtctgacgtacccgcagaatatcatcggcagctttgcgttgctgagaaccaatggaatccatgcgttgagtttgctgattgagcatttgtgaaaggtggcggttttgctgaagttcatccagtagaaactgagggagttttccaccattctgttctgccagcatttcagtatgctcaagagctgattctgccttttgctgccgcttggcgtttaactggctacgaagttgctggagctgaatatccagattttgatagcgttttttaaataattctgctcgtaagcgggcaatctcctgccgattattggcagaaagttgtgccatctccagttcactggtcgcggttttgcgggcattcacttctgcctgagcaagcgttaactgtgcttcactcagtcccggtgaaggtgtatttaatgactgaagccgggaagttgcctcagctaacaagcgccttgcttctgtttgctgttgaggcatgagatttacggattcactaatctcccggattttctcctgttcttgttgtaactgccgttcctgctccagtaattgactgttcagctggataatctgctgttccaggctgctgatggcctgattagcctgaatagcaggaggtggttcactggttgccagtattttctgacgtaattctttgattaattttgggaagtcatcaattgactgttgatattttgcaatccgttccttggaggattttgtgtcactaatccaagtgatagccccttgcagtgcttgcgcaatttcagcgtcctgcggatttttactgccttcaacctgtttcagctcctgtttaagctggttttcatccaactgtgttgtggaggcgaaagccagattcgcaataagcagactaagaaataaactgataatcaggcgcacaataaggggctccttggtaataaattaactggcgctattttgattcacggaaacatcgtcagttgtgtgctcagtatgctcttcatcgtttgagatagtttgtgccagcaggccacccatcagggtttgtgaaccactgtataagttattggcaaactgaatctgattaggggcaaacagattgattacggttgaacccagtttgaaacggcccatttcttctcctttcttgagagaaaccgccccttcctcgccttctgccggatagacccagcgtttgataatcccttcgcgtggtggggtaacacagccactccagacagtttctatactacccacaattgtggcaccaaccagaatttgtgccattgggccaaaggctgtatcaaatatacagataacacgttcattacgtgcaaacaaattcggtacattggcggcagtcagcgggttgactgaaaacagatcgccgggaacataaatcatctctttcaatacgccgtcacatggcatatgaacacggtgataatctttcggtgataagtaaattgtcacaaaatggccattacggaactgctcagcaagttgatgttggccggccaacagtgcttctaccgtatagtagtgacctttagcctgaataatctgctcttcccggatggcacccaattggctgacggctccatctgcgggcagtgccaacaggtgtgtttcattgacgacgggacgaatgtcctcttttaatggtcggacaaagaattcgttaaaggttgaataagcctgaaaagatggattctgggcttcattcatatcaactttataaactttggcaaaagccttaatgacaagctgtgtcaaccagcctgcttttttattggcgaaccagcctgctaagtgagtaatacattgctttggcagtaaatattgtagtctgattttaatattatccagcacgtcaacctcttgaagtgttttatcggccaatgtcttataggaaaattgggcaaaagtccgctattctacctgcccttatcttgaatgtcagggcaacgtattgctaattattgccttatttttgaccttcagtgaaatttttgcgtggtttaacctgagccatgctttccaggatccggtggtagttttcaaagcgctcttctgcaataacccctcgttccagtgcatcgcgtaatgcgcaaccgggatcatcaagatgtttgcaatcgcggaatttacagcttccaaggtaatcccgaaattcaataaatccttgtaccacctgttctggcgtcaaatgccataagccgaattcccggacgccgggagaatcaatgacatctcctccctgtggaaaatggtagagacgcgctgttgttgtcgtatgctgaccaaggccggagttatctgagacttcattaaccagaatggtgttttcgttgtccggaagcagggtgttcagcaggctggattttccgacccctgattgaccggcgaatatactaattttatcagccagtaattggactagttcaggaatgccttctccggtatggctggaaacttccagcacccgatacccgatatggcggtaaatatccataacaccgttgacccattcacgactttcttcatccagaaggtcgattttattaagcactatcaagggttcaatattgagtgtttcacatgcgaccagatagcgatcgataatattcagtgagagttcaggcaggatagcggaaacaatcacaatttggttgatattagcggcaatgggtttgataccatcataataatcaggacgggtgagcacggaagttcgttcgtgaacggcttctacgatcccattgactttaacatctgactggagctgtaaagcaggacgccatacgacacgatcaccggtcaccagtgaacgaattgtcctgcggatattacagcgttgtatggaggcgtctgcggcctcaatatctgcatgttgcccgaatcggctgataaccagcccttcttgtggctcaccgaactggctgtcgtccagttctggtttttgggcgtcattcctgctgagcggctgttttagcctgcgctggtgattggcctgcacacggcgttgctgccctttggagagtttacttttagccaccgaacctcacttatttcatctatcttgctggttatcgctgtgggtgatcaaaaacgctatgatacacctctgatacagattacctgttttaaaggaacctaggatatatcatgtcaaaaagtgagaacaatcttatctggatagatttagagatgacgggtctggatcccgagcgcgatcgcataattgaaattgcaactatcgtgactgattcagagctgaatattcttgcagaagggccggttattgcggtacaccagccagctgagcaacttgccctgatggatgagtggaacgtcaggactcacactgctagtggcttggtggagcgtgtaaagcagagttcgtttagtgaggctgaagctgaaaaagcgacgattgcgtttctggaacagtgggttccggcaggaaaatcccctatctgcggtaacagcattggtcaggatcgtcgtttcctgttccgttatatgcctgaactggaaaaatatttccactatcgctatctggatgtcagcacacttaaagaattggcccgtcgctggaagccagaaatgctggcaggtttaagcaagaaaaatactcatcaggcattggatgatatccgggagtcaattgccgagttggtttactatcgcgaacattttattcagaaataaatggcggtattttgctgacatgagttgattaagtgggtctaaaatcccacttaatcaacgtttatcatgacttgcgttgctagcaatttaaaataggtctgagtgtgttcctgtccgttcaaatcggagaaggtcactggttattttgtagatgaggatccaatctggttctatgtgagcgtccctatagcctttatagttaccatttagcggatgatctttgtatacagtaggcaatggcaactcattgttaatcaagagtttcattagctctttcagtttttctatgtctttatgtcttttctgagctaatttcacatctttttgaaactgagtggaatattcaatagccctttgtttcatgagttatcagatacccaatttatcaaagatatcatcagcatcttttgcttggtgaacatcaatgcctttttcactattggcaatggttttagctgttagctcattaggaatacgcatatcaaatggtaaagctttttctgttgcgactttagtgagtgttatgcgaactaggtcggaaacggttaaccccatgcttgctagtacagctgctgcttcatttttcaatttttcatctatgcgagcgcgaacaaatgcatttgcggccatatttaaacctcctttggttaataagtatactgtagctcatttgagcaacgcgatcaaatatggatatgtatcaatcaaagtaagatatccatatctgaatcactaaacagatctttcgttcgataactgaccaattaaaaataaagcccgatttttttcgtcttggtacttgccagaaggtgaattatttgtataatgcgctccccgtaccgatgaataatttcgaaagtacagcacaccaaaattaagcgggaatagctcagttggtagagcacaaccttgccaaggttggggtcgcgagttcgagtctcgtttcccgctccaaatcttttttatcaggctcagccctaatttcttaccactctccgaattctggtaatactcctgatacacactgcttttaaataaattttttgttcagggcaatgtcattgcagttctgacactacgcggcgtaagcgaaagtaaagcaacaatagccataattaagccaatccaaagtggtgatattaatccatacccggcagcaatacttaatcctccggcccatgagatgaaggcagaaccactattaatgaaagagacatggacgctgttcaccaaagggccagcatttgccacgcgcataacccgtgtaatcagtgccgggctcatagagacacctacaatgccaatgattagaaaagcgatcacactgatatagcggttttccgggaaaagcgcgaatatcagcagcgatatggttagtatactgatcccgattgtcagtaccgcaaaggtgtgccgatcagcaaaacgacctgtg

SEQ ID NO: 2786 - DNA, 17739 bp, Xenorhabdus sp.; identical to SEQ ID NO: 2785
  CDS (15759)..(16304)

SEQ ID NO: 2787 - DNA, 17739 bp, Xenorhabdus sp.; identical to SEQ ID NO: 2785
  CDS (8447)..(8800)

SEQ ID NO: 2788 - DNA, 17739 bp, Xenorhabdus sp.; identical to SEQ ID NO: 2785
  CDS (5982)..(6755)

SEQ ID NO: 2789 - DNA, 17739 bp, Xenorhabdus sp.; identical to SEQ ID NO: 2785
  CDS (4814)..(5614)

SEQ ID NO: 2790 - DNA, 17739 bp, Xenorhabdus sp.; identical to SEQ ID NO: 2785
  CDS (3797)..(4792)

SEQ ID NO: 2791 - DNA, 17739 bp, Xenorhabdus sp.; identical to SEQ ID NO: 2785
  CDS (1910)..(3736)

SEQ ID NO: 2792 - DNA, 17739 bp, Xenorhabdus sp.; identical to SEQ ID NO: 2785
  CDS (875)..(1723)

SEQ ID NO: 2793 - DNA, 17362 bp, Xenorhabdus sp.
  CDS (16895)..(17362)
gtgctctaaaggcacaggaattacgccagtttccttcagaatccgtgctttatttgggcgcattgcctgaattatccgtcagttttttacgtgaacaagggttccgcgaagcatgggaaaatgatccgcgtcaggtgagttatctctatgcgaacagctatgaacgtgaagcagcggctgacgtttttgcttcatggctggaaaaaaatcctttgcctcaggtactttacacgacttcatttgccttgcttcagggggtgatggataccatcctgaaacgcagcggacggttgccagaacagttagtcattgcaacatttggtgatcatgagttgcttgattttcttgagtgcccggtattatcggtagcacagcggcatcgtgatgttgctgaacaggctttgtcactggtattagctagccttgatgaaaaacagaggccggaacccggaataacccgtatgcgtcgtcacttatgccgtcggggaagtctgagtcgtaaagactgattggtgtgccctcattttaggtgggggtgcaatatgatgctccaaaaatcattcaaatagattcgttgatttaattttgagactattccgactaaaatttttctgaacgaaaatctatgagtgaaaaaatggcaaataggctatcgaaggtgaaaagaacgatatcttcgcttaagaaatatattataaagataagttatttcttttgtgtgagatatttagttatatactttatattcaagtaattgcaggtttttttgttctactttatttcagtttattattactttttatactattttgatctgagtatatttttataattgatagattacgattgattaacaattgtgcaataatgagatatggattgcataaattaatttaagtgataattatttgtcctaaaaaatttttttcaggttagtctttgtatcatctataaataacttagttttatcatagtgttagctgataataatcttgccaaatctaaaaaatccttctttttctctcttaaatctttctgtaaatctagctaaagcacactggctctggcttgacaaggttttcataccatccgtaaactcttaattgtggtgatttgtgggataatgtggagatttcggccatcaaggggtaacctgagtatgtttcgtggagcaacgctggttaatctcgatactaaagggcgacttactgtacctgcccgatatagggaaacgctgaatacggaatcaaaaggtcaaatggtttgtactattgatcttcaccagccgtgtctgttgctttatacattacccgaatgggaaatcatcgaagaaaaattatctcgcttatccagcatgaacccagccgaacgtcgtgttcaacgtttgttattaggacacgccagtgaatgccaaatggacagtgcaggacgtcttttgttagcccatacattgcgtcagcatgcagggctaacaaaagaggtcatgctggttgggcaatttaataaatttgaattgtgggatgagcaggtctggtatcagcaagtacaaagtgacatcgctgctgaacaatctacacaagaacctttatcagcaaggctacaggatttatcactataaacatggcaaatagtcatttcaagcataccagtgtattactggatgaagctgtcaatggactgaatatccgggaagatggaatttatattgatggaacattcgggcgaggggggcactctcgcctgattttatcaaaattagggccgaatggtcgtttgatggcaattgatcgcgacccgcaggccattgaagcatcaaaggcgattactgacccgcgtttttccattacacatgggccattttcagatttggcgacctatgtaaaagatgcaggtctggctggaaagattgatggtgtactgttggatttaggggtgtcttcaccgcagctggatgatcctgaacgtggtttctcatttatgcgtgacgggccactggatatgcggatggatacaacccgagggcaatcagcctcagagtggctgatgaaggctgaagcagatgatatcgcgtgggtactgaaaacgtttggtgaagagcgttttgccaaacgtattgcaagagccattgttgctcgcaatcaggaagaaccgattacgcgaaccagagaattggcagagttaattgcgaaggcaagtccaattaaggagaagcataagcatcctgcgacacgcagttttcaggctatcagaatctacattaacagtgaactggaagaaatagaacgtgcattggacggtgcattgcaagttttagcaccacaagggcgattatcagtcatcagtttccattcgttggaagatcgcatagtgaaacgctttatccagcaacatagtcaggggcctaaggtgccggcaggtctgccgcttaccgaagtacaattgagggcattgggaggacgtagtctgaaatcaattggcaggttaaaaccctcagaggatgaagtggcaaccaatccgagagcaagaagttcggtattgcgatttgctgaaaaggcaggtgatgagaaggcaggtgaatagtggcaggtgaacgtcatggattagtgggggttattggcagggatttgttccgtaatgccaaaatcccactgattttactggtagctgttgtggtttcagccatcagtgtagtgacggtcacccatcagacccgcttattgactgcggagaaagaacgtcaggcaattcagattgatgctcaggatattgaatggcgtaacttgctccttgaagaaaatgcattgggtgaccacagtcggatcgaatctatagcgactgaaaaatttcacatgcaacatgtcgatccagcacaagaaaatattgtgatcactcaataaagtccagttgacaactaaaaggtaggcgatgaaagctgcacgctctttaaagttgaaaaaacaagaagataaagccagttttgttaagtggcgttttgtcttgctctgcgggggcatttcgcttgctttaatcgggcttttgattcgagtggcttatttgcagattatcaaccctgaccgtttggtgaaagagggggattcccgctctttgcgtgtccagtccattcctacctctcgtggcatgattaacgaccgcaatgggcgtccgctggctgtcagcgtaccggtagatgccgtctgggcggatccgaaagaagtctttgaaaaaggtgggattacggatgatacccgctggcaggcactggctgatgcactctctattcccctagaccaactcaccagtaaaattaatgaatatcccaaaggtcgattcgtctatcttgcccgtcaggttaatacctcaattggcgattatgtcggaaaactgaaactccccggtatctatctgcgtcaggagtcccgtcgttattacccggcaggccaggtgacggcacacattatcggtgtgaccaatattgatggcaatggtattgaaggggtggaaaagagttttgatagctggctgacgggtaaaccgggtagccggactgtccgtaaggatcgtaacggccgggttattgaggatatttcatctgtagacagcagggctgcccatgatctggcgctcagtattgatgaacgactacagacattggtctatcgggaattaaccaaagccgtcgtacttaacaaggccgaatccggtacagccgtattggtagacgttaataccggtgaagtactggcaatggcaaacagcccgtcctataacccgaataatctggctggcactcccaaagatgcgatgcgtaaccgggctatcactgacatgtttgaacccggctccacgataaaaccgctggttgtgatgagtgcgctgaataatgggattgtcaaagaaaataccgtattggataccagaccctaccggttgatgtacggttcgagaggccatgaaattaaagatgttgcccctcgctctgaattaaccatcacggggatcttacagaagtcgagtaacgttggtgtttctaaactggcgttagcgatgcctgcctcagagctggtagatgtgtattaccgctttgggatgggaaaaccgaccgatttggggttggtcggagaaaagagtggcgtatttccaaaaaatagacaaaggtggtcagatcttgagagggccaccttctccttcggctacgggctgatggtaacaccgttacagttagcgcgagcctatgcaacgataggcagtctgggtgtttatcgcccattatcgattaccaaagttgacccacctgttccgggaacccgggtatttcctgagcatattatgcgcactgtggtacacatgatggaaagcgtggcactgcccggtggtggtggggtacgtgcggcgataaaaggctatcgtattgcgattaaaaccggtacggctaaaaaagtcgggccggacggtaaatatgtaaataaatatatttcctataccgcaggtattgcgcctgcgagtaatccacgttttgcactggttgtgattatcgatgatccacaggcaggaaaatattatggcggtgcagtttcagcgcctatcttcggtgccatcatgagtggtgttctccgtacgatgaatgttgagcctgatgctttgcctgcggacgataaaaaagagtttgtagttgataactaattaataactaatctgtgttgaataaataaaaagaggataaaagtggaagatcgtaatttacgcgatttgttggctctctgggggattaatgcccctgagcttccgctacgagaaatgacattggacagccgcaaagcggctgccggagatctgtttgttgcggttaaagggcatcagacagatggtcgaaaatacattcctcaagccatcgctcagggggtcgctgcggtgatcgctgaagcggagggaaaagcggataacggcactattcaggaaatgcatggtgttccggttatctatcttgatgatttaaataataaactgtcgaaattggcaggtgaattttatcagcacccgggtaacaaattaaagctggttggcgtcacaggaaccaacggtaaaacaacaacaacacaattgttggcacagtggagtcaggggctgggagaaaccagtgccgtgatgggaacggtgggaaatggtctgctgggcatgactgttcctactgaaaacacgacaggttcagccgttgacattcagcttgacttacagcaactcgtcaatcagaaagcaacgtttgcggcaatggaagtttcatcacatggcttaatacaaagccgtgtagcatcgttaccgtatcaggccgctgtttttactaatttgagccgtgatcaccttgattatcatggcgatatggaaagctacgaagaagccaaatggctgctgttcagcacacataacgttaaacaaaaaattattaatgctgatgatgacatcggtctgaaatggttatcccgattacctgatgcggtgttatctgaaactgtcgccgtcacgatggaaaatcgtctgccggaaaactggcaggggcggtggttatcggcaacggacattcattaccatgataaaggcgcgtctattaccttcacatccagctggggaagcggaactctcgaaagtcctctgatgggagcctttaatgtcagcaacctgttattagctcttgcaacgctattatcactggaatatccgttagaaaaactgctggcaactgtatcttgtctgatcccggtttgtgggcgaatggaagtattttcagcctcaggccgtccgacggtagtcgtcgattatgctcacacaccggatgcactggaaaaagcactggcagcggcaaggctgcactgtaaggggcagctctggtgtgtattcggttgcggaggcgatcgcgataaaggcaaacgcccactaatgggaggcgttgctgagcaagaggcagatcgggtggttgttactgatgacaatccacgcagtgaagagcctcagtctattgttgcggatattctgacaggtttcatcgatccgggccgtgcgatggttattcatgggcgtgttgaagctgtaaccagtgccattatgcaggcggcagaagacgatgttgtactggtagcaggtaaaggccatgaagactatcaattggtagggaaccgccgtctggattattcagatcgtctgactgttgcgcgtctgctgggggtgacagcatgatcccactgactctacaacaattagcacaagtgaccgaaggaacgttacatcacgtttccgggcagcaggcggccattatccgcattgaggcggtgacaactgacagccgcaaaatcacaggtggtgatctgttcattgctttaaaaggggaaaactttgatgcccatcacttcgcggctgatgtagcgaagcaaggcgccgctgttttgttggtcgagcgacctcttgaagtggattgtcctcaggtggttgtagaagacacccgtttggcgatgggcaaactggcgggctgggttcgcgggcaaagcaatgcacgaattgttgcattgacggggtcttccggcaaaacctccgtgaaagagatgaccgctgcgattttacgtcaatgcggtaatacgctttataccgcaggcaactttaataacgatatcggtgtaccgttaaccctgttccgccttacgctggaacaccagtttgcggttattgagctgggtgctaaccatattggtgaaattgcttataccacggagatggttcggcctgaaagtgcgctggttaataacctgttttctgcccatctggaagggtttggttcgctggcgggagtggccaaagcaaaaggtgaaatttttgcagggctttcgtccacaggaactgccattatcaatctggatagcaatgactggcataactggcagcagagcatcagtgatcagcagacggtatggcgtttttccattacacctgcggcagacgccgatttttatgtgacagatattcaggagcagccgctggaaacgcatttctgcctgcatacaccaatcggtaattgtgaaatcgcgttgccgttgcccggaaaacacaatatagccaatgtattagccgccagtgcactggcgatttccgtcggagcatcccttgataatatccgtacgggtttattagggctgaaagctgtgccggggcggttattcccggttcctctggctgccggaaaagtggtgctggatgatacttataacgcgaatcccggctctatgattgccgcggcacaggtattagcccggatgcccggttatcgagtgatggttgtcagcgatatgggtgagttgggtgatcaggcgattgagtgccaccgtcaggttggtgaagctgttgcatcgacagacattgaacaactgcttagcgtcgggcctttaagtgcccatattagtgatgcaagtggtcgtggtcagcatttttccagcaaggccgagttagttgcagcactgcttcctgtattgaagcaacacgaaacgatttctgtattaattaaaggttcacgcagcgccaaaatggaagaggtagtggactcactgaaggagaacttccaatgttagtttggctggctgagtatctggttaagtatcatacaggatttaacgtcttttcctatttgacgttcagagcgattgtcggcttgctgactgcgttgtctattgcattgtggatggggccaactctgattgcttatctgcaaaagttacagattggtcaggttgtacgtaacgatgggccggaatcccatttcagcaagcgtggaacaccgacgatgggtgggttgctgatcctgttttcgattactatttctgtcctgttatgggcgcgtctggataacccttatgtctggtgtgtactagctgtattgctgggttacggcatcgtcgggttcgttgatgattaccggaaggttgtccgtaaagacactaaagggctgattgcccgctggaaatatttctggcagtccgtactggctcttggtgtggcatttgcgatgtacagcattggtaaagacacaccggcaacacaattagttgtgccgtttttcaaagatgtgatgccgcagcttggcctgctgtacatcttgctgacttactttgtgattgtcggaaccagtaatgccgttaacctgaccgatgggctggatggtctggcaattatgccaaccgtgctggtggcagccggttttgcattagtggcatgggcaacaggtaacgtcaattttgccaattatctgcatattccttacctgagccatgccggtgaattagtgattgtctgcaccgcaatagtcggggcagggctgggtttcctgtggttcaacacctacccggctcaggttttcatgggcgatgttggttcactggctctgggcggagcactgggaacgattgcggtgttactgcgtcaggagtttctgctggtcattatggggggagtgtttgttgtggaaacactgtccgttattttgcaggtcggctctttcaaattacgcggtcagcgtattttccgtatggcgcctattcaccatcactatgagctgaaaggctggccggagccacgcgttattgtacgtttctggattatttccctgatgctggtactgattggtctggcaacactgaaggtacgctaatcatgactgaacggatcatgacaaaatacgaaggtaaaaaagtcgttattgttgggctgggattaaccggcctttcctgcgttgactttttcatggcgcgtggagtgattcctcgtgtgatggatacccgtatcgtaccgccgggaagtgacaagctgcctgataatgttgaatgccacaccggcagcttcaacaaacaatggctgatggaagctgacttaatcgtctccagcccgggtattgcgctggcaacacctgaactacaggccgcgattgatgctggtattgaaatagtcggagatattgaactgttctgccgtgaagcaacagggccgattgtggcgattacgggctcaaatggcaaaagtacagtaaccactctggtgggggaaatggcgaaagccgccggatggcaggttggagttggagggaatatcggtgtcccggctctggagttactgaagcaaccgtgtcagctatatgtcttggaactttccagttttcagcttgagacaacttacaacctgcgggcagctgctgcgaccgtgcttaatgtcacggaagaccatatggttcgctaccctgaagggctggctcaatatcgcgcagccaagctgcgcatctatgatcaggccaaagtgtgcgtagtgaatgagcaggatgatttgaccctgccggtagcaggtaaagacagccgttgtattagttttggtgtcggaagtggtgattaccggcttgacagtgagcagcaacaattagttgccaatcaacagcccgtcctgtctacacgtgagatgtgtctgacaggtcagcataactacactaacgggcttgctgcgctggctctggccgatgcggttaatatcccccgtgaagcaagtctgctggctctgcgtacttatcaggggctggctcaccgttttcaggtagttcatatgagaaacggtattcgctgggtcaacgattccaaagcaacaaatgtcggcagcactcaggcagcattgagtggcctgatgctggagggcacgctttacctgttagtcggtggcgacgggaaagaggctgatttcacccctcttcggtcttatttatccggaaataacattcgtctttattgttttggtcgtgatggaaatcaactggcgcagctgcgtcctgaaatttccacactgacggatacgatggaacaggccatgagggagattacccccaaattggttagcggagacatggtgttattgtcaccagcctgtgcgagctttgatcagtttagtggttttgaacagcggggttatgagttctcccgtttggcggaggagttgggttaatgatcattccgggcctcggtaaatttaaaaattggctggcgggtaatgtggagacagatcccacagatatcgtcatgtatgatcgtaccctggtctggatggtgcttgggttagcggcgattggttttgtgatggtgacatcggcttcaatgccagtcggtcagcgtcttgctcaggatccatttatcttctcgaatcgcgatgcaacttatctggggctgtcattcggcctgtcgctgattacgttgcgtattccgatggcgttctggcagcgttacagcattgttatgttattaatgacgatcatgatgctggttgtcgtgctgtttgtgggtagctcggtaaatggtgcatctcgttgggtagccattggccctttacgtattcagccggcggaattgtcgaagttgtcactcttttgttacctctccagctatctggtgagaaaagtcgaagaggtgagaaacaacttctgggggttctgtaagccgatgggcgtcatgattgcgctggctgtcctgctactagcccaacccgatttgggaaccgtggttgtactgtttgtaacaactctggctctgttatttttggcgggggcaaaactgtggcagtttcttgccatcattggctgcgggatctttgcggttatcgtgctgattattgccgagccataccgtgtgcgcagggtaacttctttcctaaatccgtgggatgatcctttcggtagtggctatcagcttacacaatccctgatggcatttggtcgcggagactttttcgggcaagggcttggaaattcagttcagaaactggaatatctgccggaagcacacactgactttattttctccattttaggggaagaattaggttatttaggtgtggttttggtgttggcaatggtattcttcgtcgctttccgcgcaatgatgattggccgccgcgcgttgcagctcgatcagcgatttgcaggttttctggcctgtgccattggtctctggttcagctttcaggcattcatcaatgtgggtgcagcttcagggatgttaccgacaaaagggctgacattgcctcttgtcagttatggtggctcgagcctgatcgtgatgtcaacggccatcgttttattattgcgaattgattatgaagtgcgtctggcaaaagcgcaggcgttcgtaaggagccctaaatgagtggcaaaaaccggcggttgatggtaatggcgggcggaaccggaggccatgtgtttccggggctggcggttgcccattatttgaaagaacagggctgggagattcgctggttgggaacagctgatcgcatggaggctgatttagttccgaaacatggcatagagatcgaatttattcagatttcaggtttgcggggcaaagggataaaagcgctacttgctgcacctatcagaatttttaaggcgatccggcaggcaaaagcgattatccgacgttatcagccggacgtcgtgctgggaatgggtggatacgtttcagggccgggtggtattgctgcatggttgtgtggtgttccggttgtgctccatgagcagaacggtattgcaggattaactaaccgctggctggctaaaattgcaaaaacagttttgcaggcttttccgggggcatttcctgatgctccggtggttggtaatccggttcgtaaagatgtattggcattacctgcaccagcacagcgcctcgcagacagacaagggcctgtgtgcgttcttattgttggtggcagtcagggtgcaagaattctgaaccagacaatgccagaagccgcttcccgtctgggagagagtatctctgtatggcatcaggcgggcaaaggtgcacaggcagaaacacagaaaaaatataccgacttagctgtcgctgattttagggtgactgagtttattgatgatatggcgcaggcttacgcatgggctgatatcgtcatttgtcgttccggtgcattgaccgtcagtgaaatttcagcggcaggtttacctgcgattttcgtaccgtttcagcataaagatcgccagcaatactggaatgcgttgccgctggaacaagcaggagcagcaaaaatacttgaacagcctcaatttacggcggatgccgtcgtggaattgctgaaacagtggaagcgtccgcaattgcaggaaatggcagaaaaagctcattctgttgccattatcgatgcaactgaacgagtagctgcggcattgactgacgccgctaaaaaatagtattcaggccgttttgtgggtttttaagataccggcagagcggagaagtaaacataactagtgaagattaaaacgtgaatatacaacagttggcgaaattaagagcttcagtgcctgaaatgagaaaagtcaggcatatccactttgttggcattggtggtgctggcatgggtgggatcgccgaggtgttggccaatgaaggttatcagataagtggttctgatctcgctcccaatcctgttacgcagcaactgattgaactgggagcaactatttattttaatcaccgcgcggagaatgttcgcaatgccagtgtggtcgttgcatcaacagcaattcctgccgataacccagaaattattgcggctcgtgaagcccgtatcccggttatccgccgtgcagagatgctggcagagctgatgcgctaccgacatggcatcgctgttgcgggaactcatggcaaaacgacgacgacagcaatgattgccggcatttatgctcaggctggtcttgatcctacctttgttaatggcggactggtcaaagctgcgggtacgcatgctcgtcttggtaccagccgttatctgatcgctgaagcggatgaaagcgatgcgtctttcctgcacttacaacccatgatggcagtggtaaccaatattgaacccgatcatatggatacctatcagggagactttgaaaacctgaagcagacttttgtcaacttcctgtataatttgccattttatggtcgggccgtgatgtgtattgatgatccggttgtgaaggagttaattccgcgtatcggtcgttatgtgacgacttatggcttcagcaaagaggctgacgttcgcattacccattatgaacagaagggagcacagggtttctttaccatcagccgtgaagatttacctgaacttcatgttgtcctgaatgcgccgggaaaacataacgcactgaatgcaacagccgcggtggctgtcgcgactgaagaaggcattgatgatgccgcgattctggcatcgctggctgaatttcagggaaccggacgccgctttgacttcctgggggatttttctctcaggaatattaataacaaagaaggcagtgtcatgttggttgatgattatggccatcatccgactgaagttgatgcgacagttaaggctgcgcgagccggctggccggataaacgtatcgttatggtattccagcctcaccgttataccagaacgcgtgatttgtacgatgactttgccaatgtattgaatcaggtggatgttctgttaatgctggatgtttattctgccggggaaactccgataccgggtgcggacagccgttccttatgtcgtactattcgcggtcgagggaagttagatccgatactggtgtcagaaccggagcaaatttcggtcatgctgtcacaaataatggaaaacaacgacttagtattagtacagggtgccggtaatatcggtaaaatagcgcgcaatttggctgaaacaaaattacagccgtcttttaatgaaggggagcatcatggctgataaggtcgctgtcttgttgggagggacttctgctgaacgtgaagtttcactgcaatccgggcaggctgttgtagctgggttgaaggaagcaggtattaatgcacattcagtcgatacaaaatactttgatgtgactaaactcaaggaagaagggttcagcaaagtctttatcgccctgcatggacgtggtggtgaagatggtacagtacagggtgtactggaatttttgcagctcccttataccggcagcggcgtaatggcatccgctttatcaatggataaattgcgcacaaagcagctatggcaaggggcaaaactgcctgtttctccctatgttgtgattaattctcatcaatttgaacaacttaatgattttcaaatcaaagaatatgttcaagaattagggctgccattaatggttaagccaaatctggaaggttccagtgttggcatgaccaaagtgaatgactactccgagttgcgtggagcactggagctggcatttcaatatgaccaaattatcttggttgagaaatggatgtttggcccggaatatacagtggcatttcttggtgatgaagttcttccctccattcgtattcaggcaccggaagtattttatgactatgatgcgaaatatatctcaaacgaaactaaatatttctgccctagtggtttaagtgtagaaaaagagcaagagttggcggatctcgcattaagagcctacaagatagtgggatgcagtggctggggaagggttgatatcatggatgatggaaatggcaatttctatctactggaagtgaacacttctccgggcatgacaagtcatagtctggtgcctcaggctgcgcgtcagacgggattaagtttttcacaattagtagcgagaattctggagctggctgattgatatgtcacaggcagcccggaatacgcgggaaattgaagttcggagttcccgccccagtaatggttattatctggcagggttcctcttctttctgatggtggttggtactgtcatatgggggagctgggtaaccttagagtggatgaaggattcaaaccggctgccactctcaaaactggtattgacaggccagcggcattacaccacggatgatgatgtcaggcaggcaatcctgtcactgggcacgccagagacatttatgacacaggatgtcaatgtcattcagggccagatagagcggctgccatggatccgtcaggtcactgtacgtaaacaatggcctgatgaactgaaaattcatctggtagaatacgtcccttatgtgcgttggaatgatacgcacatgctggataaagaaggaagagtattcagtttgcctattgaacgtagcgccggagggcattattccatgctctatggcccggaaggcaaagaaaaagtcgtattggcagaatatcgcacaatggctgaacagcttgctgcacataaaatgaaattgaaagcagtgatcatgacggctcgtaattcctggcaactggtactggataatgacgtccggctggaattgggtaataaagatcaagaagggcgcattcagcgttttattgaactttaccctgtgttgcagaaaaacacgcaaaaacgtgtggcttatgtggacttacgttatgacagtggtgctgcggttggctgggctcctttattaactgacgcaccggctttaatgaacgggcaagaaaataaatagtgactggcaataatacagagacaggcagaacaacgatgatcaaatcaacggacagaaaattggtagttggccttgaaatcgggacagcaaatgtatctgccctggttggtgaaattctgcccgatggtatggttaatattatcggagtgggaaattgcccatcccgcggcatggataaaggcggcgtcaacgatcttgaatcagtcgttaaatgcgtccagcgtgcgattgatcaggctgagttaatggcagattgccaaatatcttcagtttatctggcgctgtctggcaaacatattagttgccagaacgaaattggcatggtgccaatttcagaagaagaagtaacacaggatgatgtggacagtgttgtccatacagccaaatcggttcgtgttcgcgatgaacaccgtattttgcatgtgatcccacaggaatacgctatcgattatcaggaaggtatcaaaaacccagtcgggctttccggtgtgcgtatgcaggcgaaagtgcatttgattacctgccataacgacatggcaaaaaatattgtaaaagctgttgagcgttgtgggctgaaagttgaccagcttatttttgcaggattagcggcaagttatgctgttttgacagaagatgagcgtgaattaggggtatgtgtcgttgatatcggcggcggaacgatggatatcgcggtatatactggcggtgcattgcgtcataccaaagtgatcccatatgcaggaaatgttgttaccagtgatattgcctatgcatttggtacaccgccgagtgacgctgagaccatcaaggtacgccacggttgtgcactgggttcgatagtcagcaaggatgaaagcgttgaagttccgagtgtgggaggacgccctccccgcagtttgcaacggcagactctggctgaggttattgagccacgttataccgaactgctgaatttagtcaatgatgaaattttacgattgcaggagcaattgcgtcagcagggggtaaaacatcatctggccgcagggatcgttttaacaggtgggggggctcagatagatgggttggctgagtgtgcccaaagagtatttcatactcaggtacgtattggacgtcccctgaacattaccggcctgacagattacgtgcaggagccttgctactcaacagcagtcgggcttctgcattatggcaaagaatcccaccttggcggtgattctgatgctgataaaagaacttcagtaagcggctggttcaaaaaagtcagtagctggctgagaaaagaattttgattttttatacagaggccgtgaaaatgatgtcggcctcgacataaaggcacaaaacggagagaaattatgtttgaaccactggaattaaccaatgacgcggtgattaaagtcatcggcgtcggcggtggcggcggtaatgctgttgaacatatggtgcgtgagcgtattgaaggtgtcgatttctttgcggttaacactgatgctcaggcattgcgtaaaacagctgtcggtcagaccatccagattggcaacggcattacaaaaggattgggcgctggtgcaaaccctgaggtcggacgtacagcggctgaagaagaccgcgaatcactgcgtacggcactggaaggggccgatatggtatttatcgctgccggtatgggtggcggtacaggaaccggtgctgctcccgttgtggctgagattgccaaagagcttggaattctgaccgttgctgttgtcaccaagccatttaattttgaaggcaaaaaacgtatggccttcgcggagcaggggatcactgagctgtgtaaacat

SEQ ID NO: 2794 - DNA, 17362 bp, Xenorhabdus sp.; identical to SEQ ID NO: 2793
  CDS (15572)..(16828)

SEQ ID NO: 2795 - DNA, 17362 bp, Xenorhabdus sp.; identical to SEQ ID NO: 2793
  CDS (13808)..(14728)

SEQ ID NO: 2796 - DNA, 17362 bp, Xenorhabdus sp.; identical to SEQ ID NO: 2793
  CDS (12451)..(13815)

SEQ ID NO: 2797 - DNA, 17362 bp, Xenorhabdus sp.; identical to SEQ ID NO: 2793
  CDS (11252)..(12265)

SEQ ID NO: 2798 - DNA, 17362 bp, Xenorhabdus sp.; identical to SEQ ID NO: 2793
  CDS (10035)..(11201)

SEQ ID NO: 2799 - DNA, 17362 bp, Xenorhabdus sp.; identical to SEQ ID NO: 2793
  CDS (8698)..(10008)

SEQ ID NO: 2800 - DNA, 17362 bp, Xenorhabdus sp.; identical to SEQ ID NO: 2793
  CDS (7598)..(8680)

SEQ ID NO: 2801 - DNA, 17362 bp, Xenorhabdus sp.; identical to SEQ ID NO: 2793
  CDS (6222)..(7604)

SEQ ID NO: 2802 - DNA, 17362 bp, Xenorhabdus sp.; identical to SEQ ID NO: 2793
  CDS (4723)..(6225)

SEQ ID NO: 2803 - DNA, 17362 bp, Xenorhabdus sp.; identical to SEQ ID NO: 2793
  CDS (2926)..(4680)

SEQ ID NO: 2804 - DNA, 17362 bp, Xenorhabdus sp.; identical to SEQ ID NO: 2793
  CDS (2691)..(2897)

SEQ ID NO: 2805 - DNA, 17362 bp, Xenorhabdus sp.; identical to SEQ ID NO: 2793
  CDS (1621)..(2580)

SEQ ID NO: 2806 - DNA, 17362 bp, Xenorhabdus sp.; identical to SEQ ID NO: 2793
  CDS (1160)..(1618)

SEQ ID NO: 2807 - DNA, 17362 bp, Xenorhabdus sp.; identical to SEQ ID NO: 2793
  CDS (3)..(509)

SEQ ID NO: 2808 - DNA, 18688 bp, Xenorhabdus sp.; identical to SEQ ID NO: 99
  CDS (834)..(2834)

SEQ ID NO: 2809 - DNA, 18688 bp, Xenorhabdus sp.; identical to SEQ ID NO: 99
  CDS (3232)..(3537)

SEQ ID NO: 2810 - DNA, 18688 bp, Xenorhabdus sp.; identical to SEQ ID NO: 99
  CDS (4603)..(5874)

SEQ ID NO: 2811 - DNA, 18688 bp, Xenorhabdus sp.; identical to SEQ ID NO: 99
  CDS (6053)..(8437)

SEQ ID NO: 2812 - DNA, 18688 bp, Xenorhabdus sp.; identical to SEQ ID NO: 99
  CDS (8678)..(8953)

SEQ ID NO: 2813 - DNA, 18688 bp, Xenorhabdus sp.; identical to SEQ ID NO: 99
  CDS (9181)..(11046)

SEQ ID NO: 2814 - DNA, 18688 bp, Xenorhabdus sp.; identical to SEQ ID NO: 99
  CDS (11248)..(11571)

SEQ ID NO: 2815 - DNA, 18688 bp, Xenorhabdus sp.; identical to SEQ ID NO: 99
  CDS (11718)..(12128)

SEQ ID NO: 2816 - DNA, 18688 bp, Xenorhabdus sp.; identical to SEQ ID NO: 99
  CDS (14076)..(14339)

SEQ ID NO: 2817 - DNA, 18688 bp, Xenorhabdus sp.; identical to SEQ ID NO: 99
  CDS (18395)..(18652)

SEQ ID NO: 2818 - DNA, 18688 bp, Xenorhabdus sp.
  CDS (5820)..(6518)
taattaattgctgtgttctcatttctcttcccccattcacaatgccgcatcattaacttcacctgtcctaatcctgacggcatgctgtaattcaaagacaaagatcttgccatcacccatttttcccgtgaaagcagcctgctttatcacatgaataatttcttctactcgttcatcatgagtggcaatatcaagttttacttttggtaggaagttgacactgtactcagctccccgataaagctctgaatgacctttttgacgaccaaagccctttacttcagtaattgtcatgccctgtatgcctatatctgaaagggcttcccttacctcttctaatttaaaaggcttaatgatggtagtgatcaacttcatatctcccccgctttttatctgtacttaccaaatagtatttacaagaatgaattacaggagatagttgcaaagggaatgccaaaaattaaaaatcttttttagtcattgggttataaatgaattgtgttaaaagaagatgtaagaacgggagcaacctgttcagccactcccgatatgcacactaaatgtgcagaggttcgtttaatgtttcgcctacttgctggagctgatacatctggtaataacggccacgcctttccagtagctgttgatgctgcccctgctctacaattgcaccacgatgcagcacaaatatggaatcagcctcaacaatcgttgaaagacgatgcgctataactaccaaggttgtctgtttgcggatcatccgtaatgcctgttgaacggattgttctgttcctgaatcaatatttgctgtcgcttcatccagaatcagaatttgtggtgtttgcaccaagacccgagccattgctaaaagttgcttttgcccggcagaaagcgtatttccctgctctcccagtcttgaataaataccttccggtaatttgcgtacaaactccgccagttgcaccacttccagtacctgccagactttttcctcacaaatatctcgtcctaacgtgatattatcgaaaaatgaggtagccagaataacaggatcctgctgaaccattgccacaccattgcgcaaggtggtatgggaaagcgaagataccgaccgcccatcaagataaatttcaccgctttgccatgggtaataccccatcagcaaattagccagtgtacttttaccactgccagtatgcccaactaaagcaataaaaccccgtgatggtacatgcagattgatattatctaatacaactttgtcattacgataagcaaagcttaaattttcaacatcaattctgccactctctagaatctgtttatcaacaccatactgctgctgagggctatccattaattcaaaaacgcgttcacctgaaaccaccgcctgctgtaataacgactgctgagctgtcagctcaatcagtggctcattcaagcgtccaaggtaactgataaatgcatacaatacccctactccaataaagtctgttccctgaaaaccaaacaacagtaataaaccacacaatactgcagcagaaaacaggcttaacaaaggccttaacagaacgccatccaagcgcaatgcttgcattcgcgcctgatagtgagcccggttagtagcaaacaatttctcaccaaagcgcgcctgctgacgaaactgctggataactgtcataccattaatggcttcattaaaaacattattgatgtcagcgaggtattctcttacctgacgaataataggcgtactgaaacgctgataaagtatcatgacaagaaaaacagcagggaaaatagtcagcgcaacactcgccatacgccaatctaaaaagaacattgccattagcattgcgccaatcagtgcaacgctacgaaaaaccgtaggaatgacattcacaaacagatctttgataacttccgtatcatttgtcacacgggaaattaactgcccgacaggttggttatcaaaagtactcagcggctgacgcagagctgaatccataacatctgttcgaatttgctgcacgactcctactgatgcctgattaaacagtagagattggaaataatgtaacgcagcagctaccacctgtaatatcaaaaatacaaccgcaaggccactggcaataccaagcgggatgtggccggttgaaaccatattatcgataaaataactgatgagcattggaccactgacttctgccagagcagctacccataacataattacagccagaacaatgggcttgcgatgatttttactgtaagacagcaggcgctttaaagacggccagagtttgcgtgtattaggcttttccataccagtgttactcatattcaccatccaatgcagcttcaagttgttggtattgatacatttctgaataccaaccagattgtgcaatgagctgtttatgctgcccctgttgagaaatcataccattttgcataaccagaacattatcagcttctactaaagcagataatcgatgcgcactgataataacagttcgctgctgccgccattgactgaggtttttcatgatctgatgctcagtctgaccatctacagcagaaagggcatcatccaaaatcaaaatttctgcatctaatagaagtgctcttgcgatagaaatacgttgcttttgaccgccagaaagcatcacaccccgttctccgacttctgtttgataaccttgtggtaaccgcagaatatcatcatgaacatttgctaaacgggcaacttcctcaatttgttcttgagtagcatctggacgccctaaagcaatattccctgcaaccgtatctgaaaacaaaaaaggtgtctggttcacaacagccagtcgtgagcgccattcatccatcctcaatgtagaaacattttgtgactggaatagaatttcaccatcagtaatatcaaactgacgttgcaatacagcgagtaatgtacttttacctgacccagtcggcccacaaatacctaataactgccccggcaataactgaaaatagatattctgcaaaacaggttcactataaccgggataaataaaggtgttgatatccgcagttaatgcgccacgctccgcagataaggagtgtgaaccgtcttcgatcaccaaaggttcctgtaacagactgagaatacgcgtatatgccgcactaccacgctcaacaatgttgaacatccatgccagcgctaacataggccaaatcatcaaccctaagtacatgacaaagcttgtcagctcccccagtgtcagagaaccatttactaccatccagcttcctccaccgactgccagtaagttagaaaaaccgatggcaataaagatagtgggatcaaaacgagcatccacccgtgcaacacgcatatttttgcggccagcttcggtggcgacttcttcaaactgactggattgtaggtcttccaatccaaaagctttgatcatgcgaatactggttaaactttcctgagcatggttattcagtgcagaaaaagcaccttgggctaatttaaaacgatggtgaagctgttgaccgtaccgtttaattactaatgccataataggcataggtaacaatgataatagggttaattgccagcttatctctacgctcatcacaataagtacagcgcatcccatgactaaggcatcaacaaaagtaagtactccctcacctgcggcaaaaacaactctatcaacgtcatttgttgaccgggcaattaaatcccccgttctgtgacgtaaataaaattcaggatcctgacggctcaatctctggtaaaaatcactacgcagcttaacagccaaacgataggaggctccaaataaccatacccgccaaacgtatcgcagaccatatatagctaccgctataacgagcatgatgcctatccacatcaataactgattggatgacattgttttggtactgatgccatcaacaataactccaaccagacgcggaggaattaattgcaatatcgcaaccatcaccaggaaaataatggctcctaaatagcggcgccattcactaagaaaataccaacgtaattgagaaaataatctcacaaaactattcccgaggtaaaaaatgaaaggatcagcgcccacttcaccaaagagattttagtcattgtctaatctggtataggtaacgccgttgtatattttattttttccattgcaaagtttgaggttacatctatcaagccaggtatcccattaaccatgcgtttgtagaatcgatcataacttttcatatcaacaacttctacatgcattaaataatcatattctccagccatacgatagaacgttaaaacctccggcatctctttaacaaaagataacaaactgctcgtaccactcactactgtgttgctgagtttttatcatgacaatcactgtcaggcctaatccaagcttctctccattaagcaacgcaacttttccaacgatatatccttcatcttcaagccttttaagacgtttccagcaaggtgtagaagtcaaattaacggcttctgccagcgtattcaaggacagactacagtcctgttggagcagctttaatagcttgcggtctgttttatctaacatacctatatcctgtagaaaattttcctaaaaataaagtacagcttcaaaaagataacaacctatttctccaaatgtaagagtattctatacattgaaaatatattttacccagggtcaatttatgtcatctttatgggctgctaatgccataaaatctattcaagctgattatcaacgtagtgctgatacccatctaattaaactcaatctacccatgtttccagggattgatctgtatcttaaagatgaaagtactcatcctaccggtagccttaaacaccgactggctcgctcacttttcctttatgcactcagtaatggctggatagatgaaggaacccccattattgaagcttcatccggcagcaccgctgtttctgaagcttactttgcccgtttacttggcctgccttttattgcagtaatgcctacctgcaccgctaaacgcaaaattcaggaaatagaattttacggtggaaaatgtcactttgtagaacattcagccctgatttatgaagaatcggaacgtctggcaaaagaattgaatggccattatatggatcaattcacttatgctgaacgcgcaactgactggcgaggtaacaataacattgccgaaagcattttccgccagatggaattagaaccctttcctgaaccaacttatattgtgatgggagcaggaactggcggaacctccgcaacactgggccgttatatgcgctatcagggacacactaccaagcttattgttgttgatcctgaaaactccgttttctatgattgctaccaacagaattgccgacaaatccgtagcagtaccagcagtagaatcgaaggtattggacgccctcgcgctgaaccttcttttatacccgatgtaatcaatgacatgatgcaagttcctgattgtgcgtctatcgctactatccactggctggaaaaactcattggcagaaaaacaggtgcctcaacaggaactaatgtctggggagctttacagttagccaagcaaatgcatgataacaaccagcaaggttcaatcgtaactttgttatgtgatagcggcgaacgctaccttgatacctattacaatcccgactgggtaaaaaataatatcggtgacctcacgcaatatctcacacaactacccaaattaaatagttatgagtaacatacctccttcaatttaaaaaggtaggtatcatgaaacgagccgttgttgtattcagtggtgggcaagattccaccacttgcttaattcaggcactccgccaatatgatgaagtccattgtgtcacttttgactatggtcaacgccaccgtgctgagattgatgttgccagccgcatcagtaaagagcttggtgcagccgcccatagggtacttgatgttactttattgaatgagcttgcagtcagcagcctgacaagagataacattcctgtacccgattttagtgaaagcgaaaaaaatggcctaccaaatacgtttgttcctggccgcaatatactgttcttaactctggctgcaatttatgcatatcaggttgaagctgaagccgttattactggcgtttgtgaaactgatttttccggttaccctgactgccgtgatgagtttgtcaaatccctgaacaatgcagtctgtcttggcatcgctcgcaagatacgctttgaaactcccttaatgtggctcaacaaagcggaaacctgggcgttagcggattattaccaaaaactggactttgttcgttctcagactctcacttgctataacggtatccagggcgatggctgtggtgagtgcgcagcctgccatcttcgtgctaacggattaaatgtttatttaaataatgccgagtcgacaatggcagaaatgaaatccaaaacgcaactgaactaatacaaataattcagtctatcagtgggagataccaaatatctctcacttcactgtttcatttttaaactcatttaatctttcgcgtaattcaccttccagcactaacgattgttgtgtctttaaatcaacgcaaacaaatgtactcaaagcatcagcgataatcctgttatcacctttacgtataattttctgaaaaaaagtaccacttttgttacgtaattcctgcatggatgaatgtacttccaattcatctcctaacacggctggatgacgatagttaatattaatattggctataataaaagcaattttattattatttaaccactgcaacgtgtcactgtcggaaaacaaatcccaacgagcagcctccataaactctaagtaacgcccattatttacatgttggaaaacatcaatatgataacctctgactttgataattgtactcattactcttttccttaaactcatctgaccagaaagtgattaacaatagcagaacattttaattacaatattgtttaatcaatgattcttgatcagtatcacagcccccttgataaaatcatttgtgtatttaccaagaaagcttttaatcagtggattaatttatctcgatttttttctataaatgctggaccaataccttgcacttcctgtagctgctcaatggctgtaaatgagccatatttttcacgatactcaataattgcctgtgcttttttggcaccaacaccattaagttctttcgctaattgttcaacactcgctgtattgatattgactttgcctgagagcgttttttcttccttgttatttaattcacttttttcaaccgttatcttatgagagtcagttggttgaagctgtgtcgttttattaacaagctcttctgctgcaacagcataagacaatggcatactgatacccagaataagaacaaatgaattaaatagtccctttagatacttcataaaaattcctccatgttttgttgacggataaaagagtgccataacaaaatttcaacacaacagggaagatccatatatgcgaaaggccacgaaagtggcctttttcaattactattttgcaagagaaattgcgaatagcatcgcaatttaatcaatttgccctaatttaatctcagcattatcacgcaaattattaatcagggattcaaacatagtattgctaatctgatactgctccatcatcattgcctgtttaatctgctcttccgaaatagagcctggaatgactttatctaattgaatcagaacagcattaccaactccatcatacgctaacccatatacaggtttaccgtctttagggtgaggtagcgtaaataatacatcagtaaccggactggtttttcgtgccattaccgttggttcaccaaactgaattcctgccgttttcagtgcttgatcgcccttgcctgcttttaatgctgtaagcaggttttcactatcaacctgtaactgtttttcagctttctgacgtttaaccaactcagtcacctcagttttggcttcttcaaatggcaaaatagattcaggtttaacctcatcaacgcgaatgataaaggccctgtcaccatcaacagatatcacgtcagaattggttcctgaagggcttttatcatcaaccaaattaccgaagaaaatagcctgaacgacctgactgaaattgatatctgccggaacgtggtctctatcaaaccagtctgtagtgactgctttataacctgccgcctgctctgccgctgctaaagactcattatcattggctgcagcttcactcacttttctctgtaatgcataaaatgcatcaatcgctttttcctgcttaaccgttttctctatggctgagcgctcatcagcaagtggcttcactacctgaggcttaatatcatccagacggaaaactgcataaccattagacaattttataacagcagaaagttgccctttttctgttaaatgagctgatttgatttcgtcaggtgaggagctctcttccatccaaccaagatcccctccttgtttagcagaatatttatctgttgatttttcttctgctaatttgctgaaatcagccccttttttcaattcatccagaaccgattttgcatcagcttcagatgccagctgaataagactgtatttctttctttctggctgcgtatattttgacaggttgtttttatagtacttttcaatatcagcatcagtcacggtaacatttttcagttcatccgcagcatccatcttgatgtagctgattttgactttctcaggaacagtgaaatgcttactgttcatattgtagtaatttttcagctcttgatctgtcacagactgctgtgcttcgattgatttcagttcaagagttgctagacgagccgttctttcctgtagcgataactgcgcaagctgcttaatttctgctggtaaagcaatttcggtactcattaatattgtacgcaactggcgggaaatcagatcctgccgaatctgctccgcataattatccggattcaggccagcgtttgtgagcacctgtaaatatttttcgttatcaaatttaccgtcagtctggaaataacgctgcttacggatttcttcctttacctgttcgtcgctagctgatagtcccagcttatttgcatattgttcaagcaaaacggtattgataatactgtccaatgactggcgcttcaaagctctcacttcctgctcattacttaacagggcagagaattgatcccccagcctttcttgtagtgacattttatcttgttgaaatacctgctctaactgagcacgactaatggtttgaccattcactttggcagcataattaccgccttcacttgacaggtagcctgttaaacccgtcaccaaaaaggtcaggataattagagccaacacgattttaagcactgggccatttgccgctgtgcgtaggttgtccatcataaagacgtaaaactccgctttagtgaaaaagaaactgccatattacgctaattcgaacgctaagagaaaaaaagcgcatcaatcaagtgacgcgcttatatttttaacctacagattccagccagtcagttcaatctgtacggtacttacaaacgacagctttgtttgacaacatcttgaacccatagggtataactgtaatggtaaataaggtggctatttaacaattacccgttaacagcatcttttaagccttttccggcacggaaagcaggtacgtttgctgctgcgattttgatttctttgcctgtctgagggttacgtcctatgcgagcggcccgctcacgtacagtaaatgtcccaaaccctaccaaaacgacatcatcaccgcctttcaatgctccagaaactgaagaaatgaatgcatctactacacgcccggctgctgctttagagatattcacatcagcagcaattttgtcaatcagttgtgacttattcacgcttatcatccccattttgttttgctatcgtaacaaacgcctatttataacggctaacacgacagtcttgccgttatatcaatcaattccagtattagcaagaaatcatagaacagcaaaatatttaatcagatctttagattaagataacttaatgagacaaaaaaaggctggcaagcctgaattagcttaccaaccttattttcatacagtgtcttgattcagctcactatttttgtactattttagtgatatcacttctgcaccaaatgcaggctcctgcaaagcaatagtcaaaacatcttctatacgcttaacagggtggatttccaaatcctgaattacgttctgagggatttcttccaaatcgcgtttattctcatcagggatgatgaccgttttaattccgccacgatgagctgccagcaatttttctttcaaaccaccaataggcagaacgagcccacgcagagtaatttcaccagtcatcgccacattggcattaaccggattaccagtcaggcaggaaaccaacgctgtacacattgcgatacctgcactcgggccatctttaggtgttgcgccctcagggacatgaacatgaatatcgcgcttttcgtggaaatcagaactgatgcccagcttatccgcgcgagcccggactactgtcaatgcagcctgaatggattcctgcataacttcacccaacgaaccagtgtaagtcaatttacctttacccggaacactggctgtttccacggtcagtagatcaccaccaacttcagtccatgcaagcccggttacctgaccaacacggttttcagtgtcagcacgaccataatccactttctgaacacccagataatttttcaggttttcagcattgatctcgatatgcttaagcgctttatccatcaacaatgctttaaccgccttacgacacagtttggaaatttcacgttccagactacgtacaccggcttcacgggtgtaataacggataatgccgagaatcgcaccatcatcgatggtcagttcaccttttttcaatgcattgcgttcaatctgtttaggtaacaaatgacgcttggcaatattcagtttttcgtcttcggtgtaacctgacaagcggatcacttccatacgatccagcaaaggtgccggaatattcatggaattggatgtcgccacaaacatcacatcagacagatcataatccacttcaagataatgatcgttgaatgtcacgttctgttcaggatcaagtacttccagcaaagccgatgctggatcaccgcgcatatcagacgacattttgtcaatttcatctaacaggaacagtgggtttttaaccccgattttagacattttctggattaacttacccggcattgagccgatgtaagtacggcgatgtccacgtatttcagcttcatcacgtactccacccagtgccatgcggacgtatttacggccagttgcacgagcaatagaacgccccagtgaggttttacccacacccggaggcccaaccagacatagtattggccccttgattttactgacacgactttgtaccgccagatactcaaggatacgatctttaactcgttccagaccgtaatgatcggtgtccagtatttcctgggctttcaccaaatcttttttcactttgctgcgtgcgttccacggaacctgcactatccagtcaatgtagctacgtacaaccgtcgcttccgctgacattggggacatcatttttaatttttgcagctcagcttctgctttttcccgtgcctctttaggcatcttggcattttcgatcttacgtttcagcgtctcatattcgtcaggtgcatcatccatctcacctaattctttctgaatcgccttcatttgctcattcaagtagtattcgcgctggcttttttccatctgttttttaacgcgattacgaattcgtttttctacctgtagcagatcgatttctgattccatcattgcaatcagatattcaatgcgctcaacaacatcagacatttctaaaacagcctgtttgtcattgatttttaacggcatgtgagcagcaatggtatcagccagttttgcggcatcttcaatactgtgtagtgatgtcagcacttccggcgggatttttttattcagtttgatatagccttcaaactgattaatcgcggttcttaccaaaacttcctgctcgcgctcatcaacgatcggggagtcctgatattcaacctgcgcataaaagtattcaccgttatctgtcagtgttgtaatgcgggcacgctgcaagccttcaaccagaaccttcactgtgccatctggtaatttcagcatctgtagaacagaagccactgtgcctaccgagaatagatcattgactcccggttcatcagtggatgcttctttctgcgctaccaacatgacctgtttgtcatgatccattgctgcttccagacaatgaatcgacttctctcgcccaacaaacagagggatcaccatatgtgggtaaaccactacatcgcgcaaaggcaatacagggatttctatgcgttcggaacgctcaggattcatagagctctctcttcgtttagctttcgccagtttttaggaatctcgtgaaacacggttttcacgagtttcacttcaaagaatataaaatatatggggacaggaatccgacattcaatagcctgagtctgcaaaaagcaaaatgagggagaatccctcattttattttttcaatgcgaattgatggccggtacttcttaccctattttcatcactcaccagaaacttgagcatccggtttgctatatatcaataatggtgcggatttatcttcaacaaccgtctcatcaacgacaactttttctacatgttccattgatgggagatcgtacattgtgtccaataaaacaccttccacaattgagcgaagaccacgagcacccgttttacgcaccattgcttttttagcaatcgctgtcagagcttcttttctgaactccagctcaacgccttccagattaaataaagcctgatactgttttgtcaacgcgttttttggctcttgcagaatctggattaaagcttcttcattaagttcacccaacgttgccacaaccggcagacggccaatgaactcaggaatcaagccgaatttgattaaatcttccggttcaacctgagcaagcaattcaccttcagttgctttctctgattcacctttaactgtagcactaaaacctattccagagctgacattcaaacgctggctaacaaccttgctcaacccggcaaacgcgccgccacaaatgaacagaattttagatgtatcaacctgaaggaactcctgctgtggatgcttacgaccaccctgaggaggaacagctgctactgtgccttcaatcagtttcaacagtgcctgctgaacgccttcacctgacacatcacgtgttattgaaggattatcagatttgcgggagattttatctatttcatcaatataaacgataccacgctgcgctttctgtacatcgtagtcacatttttgcaaaagcttttgaataatgttttctacgtcttccccaacataacctgcttcagtcagggtcgtagcatcagccatagtaaatggtacatctaaataacgggcaagtgtttctgccagcaaagttttaccactaccggttggcccgattagcagaatattacttttgcctaattccacaccgttattagtatccccattacgcaggcgcttataatggttataaacggctaccgctagtacttttttcgccatttcctgaccgatgacataatcatccagatgttggcgaatttcatgaggggtaggcaatgtactacgctcacgatgtggtactagctctttaatttcttcgcgaatgatatcattacataaatcgacacattcatcgcagatatacactgacgggccagctattaatttccggacttcatgttggcttttcccgcagaaagagcaatacagcagctttcctgaaccgtctttgcgcttatctgtcatcagtcaacctcactttatgagctgttatcccagtctatctggcataacagaaaaaacgctgtcattactccgcataatcaggtgattgtacaaaaattcacctttaaattatagtgttggagtaataaattaattatcaataaattagttgcgctgggtgaatatgctatcaaccaatccgtattctacggcttccccggctgataagaaacgatcacgttctgtatcttcgactatcttctcaagcgattgccccgtatgttttgccatcaattcattcatacgtgctttaactttgagtatttcctgcgcatggatttcaatatctgttgcctgcccctgaaatccacctaatggctgatggatcatcactctggaatttggcaaacagaaacgtttcccttttgcaccagctgttaacaagaacgctcccattgagcaggcttgccccatacaaatagtactcacatctggcttaataaattgcatggtgtcataaatagacataccagctgtgataaccccacccggcgagttgatatataagtgaatgtctttttctgggttttctgcttccaggaagagcatctgagcgacaattaaattcgccatatggtcttctacctgacccgtcagaaaaataattcgatcttttaataagcgggaataaatatcaaatgcacgttccccacgtgctgtctgttcaaccaccatcggcaccaaagacatgttaggtgcatattgatcttgcttgccactgtatgacatttccgtctcctaatagaactcacgctggtgccattcataactgattctacttgagataagcgatgatgaccatgatccaaagttaactaacagagggcttccctctataaaaagtagtaagccattacataatagtaagaaaggatatgaggttaaatctgtttttttcaagaacaataaatcataaccacccgtataacgggtggtttgctcttgccctataagggcttgttaccgactgcgcctaaatgacgctgctttctcttcgttcaagctaagtgtctttgctgctttggcctaccccttgaaggggtctacatgctctttactactcaatttatccgagattaaatccgacttttcttgctctctgatatacttttgaattgtcgcttcatttagccctaccgtactgacatagaacccttccgcccaaaactttctgttgccaaatttatattttaaattggcgtgtctatcaaagatcatcaacgaacttttacccttcaaatatcccataaagcttgaaacgcttagctttggtggaatactcaccaacatatgaacatgatctggcatgagatgaccttcgattatttccacacctttatacttacaaaggtctctgaggatctctcccacacttgaacgaatattattaaaaatcactttccgtctatatttcggcgaaaagacgatatggtatttacacagccactttgtatgcgctgagctttgtgctttaatgcccataaacacctttccttatttgagttacgaatattagcttgtacatctatatcgtaacggaaaggtgtttttcttggtataacctttgaactccacccgcaaagcgggtggttttatgtttaagacgctaacgcgacttaaactggctaaagccataaagaaaagccctttctccagtaagaagaaagggcctctttctatcaatatttcagtgtgttaccactaacacaaagcaacactcaatggcgtattacacgttaccattgcttggttgctggcggcgacgctgaccaccgttgaaatcgtcattgccacggccacggaaagaaccgcgctcaccgccaccacgacgttcattgttattaaagcgacgaccaccaccgttgccgttgctaaaaccgtcacgatcacgacgtgcaccgttaccgccgttgccaccattaccgccattacgaccaccaccacgacgctcacgacgttcacgacgttcaaatggttgtgcatcacctagcagctgcatattcagtggcttgttcaggatacgggtacgagtgaagtgtgacagcaggtctcccggcattccttttggcagctcaatggtagagtgagttgcgaacagtttgatgttaccgatgtaacggctgctgatatcaccttcgttagcaatcgcaccaacaatgtggcgaacttcaacaccatcatcacggcccacttcaatacggtacagttccatatcgccaacatcacgacgctcacgacgaggacgatcaccacggtcgcctctgtcacctctgtcgccacgatcacgctcaccgaagctattaccattacgacgacggtcatcacgatcattgaattcacgacgaggacgacggacaggatctggtggcaggatcagtgggcgttcaccctgtgccattttcagcagtgctgctgccagtgtttccatatccagttcttcaccggtacccagcttagacagcagagcgcggtattgatccagatcgctgctttccagttgttgctgaacgttacctgcaaatttctccagacggcgctggctcagcagttctgcattcggcagttctacttctgggattgtcagcttcattgtgcgttcaatgttacgcagcagacgacgttcgcggttttcaacaaacagcagcgcgcgacctgcacggccagcacggcctgtacgaccgatacggtgtacataagactccgcatccattgggatgtcgtagttaacaaccaggctaatacggtcaacatccaaaccacgagcagcaacgtcagtcgcgatcagaatatccagacgaccattcttcagacgctccagagtctgctcacgcagagcctgattcatgtcaccgttcagtgccgcagagttataaccgttacgctcaagggtttctgccacttccagcgttgcattcttggtacgtacgaaaataatcgccgcatcaaaatcttctgcttcaaggaaacgtaccagtgcttcgtttttacgtacaccaccgtaaacagaccagtagctctggctgatatccggacggttggttacgctggactggatacgaacttcctgtggctccttcatgaaacgacgagtaatacgacgaatcgcttcaggcatagttgctgagaacagagcagtctgatgttccgccgggatctggctcatgatgttttcaacatcttcgataaagcccatacgcagcatttcgtcagcttcgtccagtaccagacctttcaggttggacagatccagcgtaccacgcttcaggtgatccagcagacgacccggtgtacctacaacaacttgtggcccctgacgcaaagcacgcagctgaacgtcataacgctgtccaccataaagtgcgacaacattcacactgcgcatgtgtttagaaaaatctgaacatgcttcagcaacctgtaccgccagttcacgggtcggtgctaacacaaggatctgtggagctctaagctcagcatcaatattatgtagtagaggtaagctaaatgccgcagttttaccactaccagtctgtgccatacccagcacgtcacgaccatttaataggtgaggaatgcattgctgttgaattggagaaggcttctcatagcccatgtcttgcaacgcagaaagaataggtgctgataaccctaaatcagcaaaagagatttcagtctcagtggtcatgtaatggtgcctcattaatcgtggcggccagtctacataacacagtgaaaagaatttctgtcattttcatttaaaatgtgaactggctcaaattatgttattaaacgaacaaacaagcccccaccccttaagatgtggacttaaaaatctgtcgtgaaaatgttcgtcagctattgttggttcgattccgataagtcatcttgtctttggcctagcagcgccaattccaacaatgcatagcggtgctcaacaaagttatggacattgttagctaccgtcagcttgaataacgcaaccgcgctatcctcatcccccagacttaggtaatgtttacctaaatagaagtcagtttcactgagatgctcagcgagcgaagtgttatctgtcgaatcctgcttcaggcgttccatcagtgttttttcactgattttacctaaatagaattcaacgatattccagccccatagcccccggttcgctttgtcaaaacgatttgacaaactagttattgcaaccttgggatcgagtttctcttccacaaggtacaaccacaacgaacggaagggatcatttggatcgtcttgataaaacgcctgcagatcatcctgcgctaaacgataacggccgccgtagtacaatgcgatgccgcgattcattcgcgcgtagttgtaagttggatccagctcttaaacagaaatcaaacgcttcataggcagaatcaaaattgcctgcctgcgtaaaataaatccctaaataattaaaaaactcaagaactatcgggacggatagacaaaaccccctgaaaaatcattttgtgccaatgccctcagccccaggctattatccgcacacctctttatataaaagccgggcgtcct

SEQ ID NO: 2819 - DNA, 18688 bp, Xenorhabdus sp.; identical to SEQ ID NO: 2818
  CDS (4771)..(5787)

SEQ ID NO: 2820 - DNA, 21094 bp, Xenorhabdus sp.; identical to SEQ ID NO: 100
  CDS (453)..(1124)

SEQ ID NO: 2821 - DNA, 21094 bp, Xenorhabdus sp.; identical to SEQ ID NO: 100
  CDS (1348)..(2448)

SEQ ID NO: 2822 - DNA, 21094 bp, Xenorhabdus sp.; identical to SEQ ID NO: 100
  CDS (12543)..(13898)

SEQ ID NO: 2823 - DNA, 21094 bp, Xenorhabdus sp.; identical to SEQ ID NO: 100
  CDS (14097)..(15152)

SEQ ID NO: 2824 - DNA, 21094 bp, Xenorhabdus sp.; identical to SEQ ID NO: 100
  CDS (17604)..(19400)

SEQ ID NO: 2825 - DNA, 21094 bp, Xenorhabdus sp.; identical to SEQ ID NO: 100
  CDS (19417)..(20127)

SEQ ID NO: 2826 - DNA, 21094 bp, Xenorhabdus sp.; identical to SEQ ID NO: 100
  CDS (20133)..(20534)

SEQ ID NO: 2827 - DNA, 21094 bp, Xenorhabdus sp.; identical to SEQ ID NO: 100
  CDS (20803)..(20904)

SEQ ID NO: 2828 - DNA, 21094 bp, Xenorhabdus sp.; identical to SEQ ID NO: 339
  CDS (20819)..(21061)

SEQ ID NO: 2829 - DNA, 21094 bp, Xenorhabdus sp.; identical to SEQ ID NO: 339
  CDS (17484)..(18599)

SEQ ID NO: 2830 - DNA, 21094 bp, Xenorhabdus sp.; identical to SEQ ID NO: 339
  CDS (16173)..(17357)

SEQ ID NO: 2831 - DNA, 21094 bp, Xenorhabdus sp.; identical to SEQ ID NO: 339
  CDS (13172)..(14878)

SEQ ID NO: 2832 - DNA, 21094 bp, Xenorhabdus sp.; identical to SEQ ID NO: 339
  CDS (12633)..(12833)

SEQ ID NO: 2833 - DNA, 21094 bp, Xenorhabdus sp.; identical to SEQ ID NO: 339
  CDS (4916)..(5893)

SEQ ID NO: 2834 - DNA, 21094 bp, Xenorhabdus sp.; identical to SEQ ID NO: 339
  CDS (4458)..(4613)

SEQ ID NO: 2835 - DNA, 20421 bp, Xenorhabdus sp.; identical to SEQ ID NO: 101
  CDS (5021)..(5254)

SEQ ID NO: 2836 - DNA, 20421 bp, Xenorhabdus sp.; identical to SEQ ID NO: 101
  CDS (431)..(829)

SEQ ID NO: 2837 - DNA, 20421 bp, Xenorhabdus sp.; identical to SEQ ID NO: 101
  CDS (1569)..(1832)

SEQ ID NO: 2838 - DNA, 20421 bp, Xenorhabdus sp.; identical to SEQ ID NO: 101
  CDS (2009)..(2344)

SEQ ID NO: 2839 - DNA, 20421 bp, Xenorhabdus sp.; identical to SEQ ID NO: 101
  CDS (3567)..(3956)

SEQ ID NO: 2840 - DNA, 20421 bp, Xenorhabdus sp.; identical to SEQ ID NO: 101
  CDS (4704)..(5003)

SEQ ID NO: 2841 - DNA, 20421 bp, Xenorhabdus sp.; identical to SEQ ID NO: 101
  CDS (7046)..(7312)

SEQ ID NO: 2842 - DNA, 20421 bp, Xenorhabdus sp.; identical to SEQ ID NO: 101
  CDS (16991)..(17092)

SEQ ID NO: 2843 - DNA, 20421 bp, Xenorhabdus sp.; identical to SEQ ID NO: 101
  CDS (17094)..(17711)

SEQ ID NO: 2844 - DNA, 20421 bp, Xenorhabdus sp.; identical to SEQ ID NO: 101
  CDS (18058)..(19113)

SEQ ID NO: 2845 - DNA, 21876 bp, Xenorhabdus sp.
  CDS (83)..(979)
aaagtgctaaaaacactgcgagttgaatgatagaggatttatcttaatgaattttgagctattttctcatgctgaacattgtatgtcatctggctcaaagagttttgatgcggcttctcgtctatttaataatgatacgcgtagaagtacgttaatgttatatacatggtgcaggtattgtgatgatgttattgatagtcaggatttgggggggcaatgtttaattaatccactggaaaataaaattaataaacttaattttctaaaaaaaatgactaatgacgtttatctgggtcttccgatggaagtacctgcattttctgcactccaagaagttgtcactaaacaccaaattccgttatctcaggctcttgaacatctggagggatttgctatggatgttcggggagtaaagtataaaagtcttaatgatactttagattattgctaccatgttgcaggtgttgttggattgatgatggccagaattatgggagttaaagagcctttagtattagatagagcctgtgatctcggaattgcgttccaattaacaaatatagctcgtgatataatcgacgatgcgaaaataggtcgttgttatcttccccttgattggcttgaacaagaaggtttagaaccgacagtgacatcactgacagcaagggaaaatcgtatagcgttatcccatgtttcaaatcgaattcttactgcggcggaatcatattatgcttccgcattaatggggctacgttatttaccaattcgctctgcgtgggcaatagccagcgcatataagtgttaccataaaattggagtaaaagtgcagcgggcaggagaagaggcgtgggatcatcgccaacatacttctcatttagaaaagctgtctttacttttttctggtggtattttggctttaattttacgtaacacaaatataattcccaggtcttcttccttatggcaaagacctaagtgaaaatattgccgctaatagtagttgtcacataatagttgtaacgatggaatctcataaaatgatgaatatagtcaaaaacaaatatccggcagcagaacactggaagtttggtgattctcctgaactacaggacgttcttgctgaattagtctccaaagaaattaaaactgcaaccagctgttcattttcctcctataaacactgtagcagcagtattttaattggtaatgaatacattgtattgaacagcaaagatacgccagcctgtgttgtcagagtgatggccttacacctcataaaattctcagaaatgacaaccgaactcgcctggaaagaaggcgagggagatcgttcggtgaagcactggcaacaggaacatcaacatttctttgaacgtgaaggctcattttcacctgaaatggaagttgttgtcatcgaattcaaagtgattgatgctctgtaacgccattatgtatatcagatttctgcccggtcagctgaccattttccagcttgatgcaatgatccgctaaatggaaaaaacggtcgtcatgagtaatagccagtacagctttaccgcgtgccgccaattcgggcaatagatcctgatagaatacaatcttaaatagtgggtcctgatcagcggcccactcatcgaacagatagaatggccgatcttccaaataagcaaccactaaagcgaggcgtttccgttgcccttgtgaaagctcacgagttgaaaaacaaccatcctgaattttaaccttgtgctccaaatgtaatttagcgagcagggcgttcgctcgtgcatccagtactgaatcagtatcagtcagacctatcagtgtttcgaagagatgaaaatccgagaaaatggcggagaacagctgacgatagttagctctgttactatcagtaatcaaatttccgtcaacagtaattgtgccgctttccggtgtatacagcccgcttaacagcttggccagtgtcgttttcccactgccgttaccgccaatcagaaaagtgatttctccgcgtttaagcgtcatatcgattggaccaagctgaaacatatcgtcttctttctcacgataataattgtgtgtaatgcctgacagttgcagtaagttagcttcaccaaattcactggcagaaacctgctcgtccaagtgatcctgctcagtcagttcagacagaacataaccgatgcggtttagcgatacgcgagccgcattcagtgatggaatactgttcagcagactgtccagcggcatcaatataaacagaaagacaatcacgtaacctgcgattgtagtgactttcagtcccactattaccgccggagcgaaaataaccagcccaagaaatatataaaatagaagatacatccagccggcaccaaaggcataaacactgaaagcacggatacgatgctgtctaaccgcaccaatttcacgaccaagtgaatgggtgaagaaagcctgagcgcgtgaaaaatgtaactttagctctttcgctccggtaaataaggcgttgaaatgattgaacaggcgatcttgtgacttacctgctgcttttagtgatgcgagcgcgctggttccaccgatagcataaccaagtgagccaatcactatcaccgttaacacaagaaaaaacactgaccatgacagccaagccagatagatcaggcaacccagtataatggaactctgcgtcacgatattgggtagggtgaaaaacaacagtgaaacattggttgtatcatcggtgatgatagactgggcacgggaagcgcccagtatttctatctggcgaaaaggagcacgggtaatacgctcagagataaactcacgcatccttgcgatggtattctggctgagtctggcgaaaatcaccccgctcattacatgactgacaatagccagcaccgcaataatacagaaatatacggcgagtaagtgataactattgccagacgtggtgactattctgttaaccaacgtgatgaggaaaacgttggaaataccattaacgatactggctaaaatggcaataagcaggatccaacgtgaacgatttaaaagtgagaacaaaatccggtaagccggttgtttaatggttgacgtcatcatttctgctccggtatctcggtcattaatttttcccgcagaattttccacagcaaagtcgccagctgtttaacctgaggattggatagcatagtcatgtgattaccgggcacaatctcagtatttaactgagtcacatactgacgccagatattttctcgagtagctatttcatcaatattctccccctgggcattaatcaaataaacggggccgttatagcagttttggggggtatagtttgaattcaggttggcctgcataacctgaacgataccctgtaacaaaggtttctctgtattttcagggaatagctctacatccaccaaagcctgaagcaagagcatgatctgttcgtcttcagtcagattctcgaaatcctgccttgttagcgttaatggctgagttagcatcatgttatagatatcaatcagactcattaacgtttcaatccggtcaataaccttaggagggctgttttttgaagcgctctcctgtggttcaggcccatcggaatcaataagggtgagagccgcaatctcttccccttgcttttgtaattgtaatgctatttcaaaagcaagccagccgccgtaagagtgcccgagcagataataggggccatgaggctgtgcctgacgaattgccttaatgtaagcgcgggctgtgccttccacactgatataaggcgggaggtctgtatttatcaggccacgagcctgcaaagcatggacaggcaactgtgggggaagggctaatgccagctcaataaaactggaaacactggcacctgcgccgggaatacagaaaagtggtgaaacagagtcatctccatgttgaataatgatgtgcggtgagtaagaagccggtaataaatgctcagtcattgaatcggccagatggtttatccaaggcggctgcataatggtgtaatgccctccgccaatagggtggcgttcagagcggtcactaacaatgtcgtgccagccatgccagcagtcggatccggccgctaaatcatcgcaggtatagagatgaatggggagagaggaagcagaaattctatattttttctcaagttgcaggatcagtttctgggtattcaagcggaagagaatatcctcttttttaacgtccgcaggcaaccattgcagagcttcacaatcgcggaaatcataaagatcatccgaatcgtctccctcaagttgctctccgtaattattcagagactggataagcagattgatatctttctgccagtctgtttcatgatcactgaaattgtaagaatctaagttgtaagaatcgatcataccaaggtaatcgattttttcgccatcgctaaccaattgcagggcgatctcgtaagcgatagttcctccgatggaccagcctgccagacgataaggaccatgcggctggatccggcgaatagcatcaatatggtaagtagcaagctcctcaatggacgctggtggattctccactgtgtgtagacccatcgcctgcaatgtataaacgggcagttcggctggcagcaaagttgccagtcgcgaatacaccagcggatcacctgtggtttcgtgtatcaggaataatggtggtaaatgaccttcaggccttaaaggcacgggattggcatcaagaggagagcttagtttagctgattgactattaatcgcctgagccagatcacataatatcgggtaagagaataatgttgccagtgataccgccatgccttgcttgttcatacagtttattaaccgtaccgcgataagagaatgaccacccagctcaaagaagtgatcgtgacgactgatccgttccagccccagtaattcttgccagatttgtgccaatgcaatttccacgtcaccaatcggtgcttcataatcccgggtgagaactgctgacaactctggtgcaggcagcgccttgcggtcgagctttccgctgggggtcagcggcaaggtatctaacatgacaaaggcattgggcagcatataatccgccagactacttctcagctgctcgcgcagatcggctgcttccagcgtaacgtcaggttgaggcaccagataagccaccaggcgttgttcacccttatccgtcttatgggcaataaccacggcatccctgacaccctgacaggcgactaattgtgcttcaatttcccccggctcgatgcgaaagccccggatcttgacctgaaaatcattacgccccagatattcgatattaccgtccggtagccagcgccccagatcgccggttttatacattctggcattcggttcggcactgaacggatcagcaacaaagcgctcagcaatcaagtcagagcgattcaggtaaccccgtgcaacgccctcaccaccgatataaatttcacccgtcacgcccagaggcaccagttgttgtgttttatccagtagataaattcgacagttggcgattgggcgaccaatggacaacgtttcagccgcatcgagtaaggcgccaccattgagtgacagagaggttacaatgacagtcgcttccgttgggccgtaggtgtctgtccagcgacagtcttgtgtttcaggcagggattgccagtcggcaagagagtgaaggttagttttttccccgccgaccgtaattgaacgcagggttgaactgaacccactgcgaccagctttgatttcctgtccccactgatgccagaaagcggtcggtatatcgataacgctgatagcttgttcttgcaggaagtggccgaaagcggcatccggtatctgaaggtgagagggtcgcagaattaaggtggcacccgttgccagtgtcgggaaaatttcggccacggacgcatcaaaggcgattgtggcaaattgcaggacgcgatctgccgcattaagcgcggttatctgacactgggcctgaataaagttcaccacattacgatgttcaaccatcacgcctttggggagccccgtcgaacccgaggtataaatgacataggccagatgatgattctgtaatcccagttgttccggttcagggttagcgacagcgtattgggcgacccgttccagataatccgcctcatctaataaccagacaggaatatcagggttctgagcctgtggctgtaaatgctgttgggtgagcagtaatttaggcgtactgtcagacaggatataagcccgtcgcttatccgggtgattcggatcaagcggtacatacgccgcaccggcttttaagatacccagtataccaatcatcatatccggacagcgttcaacacacagagcgacccgatcatccggccggatacccgcttcaatcagagcattggctagctggttagctcgccggttcagttcatcataactgaaggagccttgctcagaaatgatggcgatggcctccggagtctgctgtgtccgttgctcaaacaacgtatggataagtgcgtttgacgggaggaagtcagtttgtgtggcattgaagacttccagtaactgttgacgttcagctaccggcagaatggacagcgccaacacaggctgtctgggattgttttgcagtgcctcagtcagcccacaaagagcagtgtacagataattcaccacccgacgtggatcgacgctgttcactgcttgaacgaccagtgcaaaatcgtccccaaaatcatccaccgacagatccagcggatagtttgtccattctttagcagacaacagacgaacaccttcccagctggatttatccgtggaatctgacgaattgtgggacgaagtatggcgatagttaagcagggtactgaataacggctggggaggtataacaccgctgcaacgctgggcgagagcgagtggaaattgctcatgttccagcaggtcagccagatcttttgccgttgcctgaaccacttcaagtacagtctgattgttcagggatattttgaccggcagggtgttgataaacatccccactacctgatcggctcctgtggtaccttgcagccgtcccgacagtaccgtgccgaacaccacgtcatcacgtccgctggtgtgggccagcacttgtgcccaggcgacatggaacagcacactcgggctgatccccagttggcgggccagcgcgcggagggtttgcgacaaagttgcttccagcgacagttgtgcttctgtcacatcggtgccattcccctgtacattaagcaaaccgaagggggcggtgggttcatcaatctcggccagtcgctgccggaagtaattctcgtgcactgaagcgggtacaatcagcatttgggcaataaaatcgcggtacggcagtggcacaggcagggattcctctcgtccctgtaagacttgttggatttcatccatgattaattccagtgtgacatggtcgctgaccagatgatggaaattcagcgttaacagccattcgtcactgtccggatcatgggtggtactggcagcgaacaacggagcttgactgatatccaaccgacacggcatgtttgcctgtaattgtgccgggatattctctgctgatgtaggaatgaacggtgttacaaacaacttcgcctgccgccagaccacctgtacaggttggctcaatccttgccagcaaaaagccgtccgcaaaatatcatggcgatcgatgacctgttgcagagctgcaaggaaagcatccaaacgcgagcgggtatcaaaagccagtatgctgtttgacaggtaagcatcgccactttcctgtaactggtgatggaacagaataccttcctgtaaaggggataggggatagatatcctgtacgttggcggctccatcgggaacagttgcaataataatatcaatttcttcttgtgacagtgtcactaagggtaagagatcaggcgtaatgacagtacaatcggcaggaatgcggttgggtggcaccacagaatcagatatgttttgccgggtctgtattgtctgcgccatatctgtaagtcgtggtgctgaaaagacgctacgtacatccagtgcgtatccccggcagcgcaaccgttcaatcaggctgaccgcgatcaacgaatgcccgcccagctcaaagaaatggtcatgacggccaacccgttccagccccagtaattcctgccagatttctgtcagtgccgtttccacatcacccactggtgcttcatagtttcgggtaatgaccgctgactgttcgtgtgcggggagagcctgacgatcaagtttgccgttcggggtcaatgggaaagcatctaagataacaaatgcactgggaagcataaattccgccagatgttgcattaattgctgacgtaattcagccgggattagttcaacaccgggctgaggtaagatataggcaattagccgcttctgcgcgccagcattattttctcctttatgtacttctccttcacgtgccaatactactgcttcgtgtacaccgggacattgcaataactgactctcgatttctcccagttcaatgcggaatccccttagtttgacctgaaaatcattacggcctaagtatttaatattaccatccggtaaccagctacccagatcgccggttttgtacatacgggcctctggctcggtggaaaatgggtcgggcagaaaacgttcggcagtcagttcaggacggttgagatatcctcgggctacacctatgcccccgatataaatttcaccgaccacacccaaaggagcaagttgaccaaagggatcaagaatataaattcgggtattagctatcgggctaccgataggcggtgctatatcatcctgactattacactgataagtagttgcacaaatcgtaatttcagttggtccatatccattaatcatgttccgcccctcagaccagcgcctgacctgcgaaagtggacaagcttcaccagctgtgatcagcgtttttaatgtggcagggagggtatccatcgccgctaacgcagtaggtgacagcgtcaaatgcgtgatggcatgggtttctaaagttcttaacagggcggcaccgggcaggatatcttcgcgctcagcaagatagagactggctccactcagcaaagccatcacacattcgaaaatacaggcatcaaaactatgtgaagcaaattgcaggatacggtcggtcggttctgccgccaaaatatccagatgcgacaaggctaaattgcaaagactgcgatgttcaatcatgacgcccttcggttgaccggttgaaccagaggtgtaaatcacataggccagatggcgtgaattaagcccgcatgcccgacggtcagggtttgtttctggcatgtcatcaagggcatataaagtaggctcgtcaaacaggatagttggtaattgattatccagtttttccgtcagggcggattgagtgagaagaacgacaggagcagcatcattgagcatataactcaggcgatcctgcggataggccgggtcgaggggaacgtaggcaccacctgccttcaggatagccaataatcctacgaccatgtccgggctacgttcaacacaaacagcgacacgatcatccggttttacacccagtttaattaaataatgggcgagttgattggcccggcgattgagctcgtcgtagctcagtttctgttctttgaacacaacagcgatagctgttggagtttgtatcacctgctgttcaaattgttcatgggtcagagtagcctgcgggaaatcggtttgcgtgttattgaactcgaccagtaactgctgacgttcagacaccggtagaataggcagctcctgcacgagctgccggggctcattgatcagcgcatgaatcagctctctgagcgctgtgtgcaagtaattgactattcgttcagcatctattccggttacagactgggctaccagagagaaatcttcccctgaatcatctaccgcgagagccaggggataatttgttctctcctctgataccagcagacgcacgtctttcaaaacagaattttcgatagaatctgatgagttgtgacgatagttaaacaaaacattaaacagaggcatgggaggggagacgttgctgcaacgctgagccaaagctaacggagcctgttcatgagtcagcaagaccgccagatctgctgcggtcgcctttactacatccagcacgctgagatttttcagggatattctgaccggcagggtgttgataaacatccccatcacctgatcggctccggttgtaccttgcagccgtcccgacaataccgtgccgaacaccacgtcatcacgcccgctggtatgggccaacacctgtgcgcaagcgacatggaacagcacactcgggctgatccccagttggcgggccagcgcgcggagagtttgcgacaaagttgcttccagcgacagttgtgcatccgttacatctgtaccatccccctgtacattaagtaaaccaaaaggtgctgtgggttcatcgatatccccaagtcgctgacgaaaatagtcctcatgctccgaagccggtacgctcagcatttgggcaataaagttgcggtacggcagtggcacaggtagtgactcggtttctccttgtaataattgctgaatctcacccatgatcaactctagtgttacatggtcactaaccagatgatgaaaactcagtcccagtaaccattcgtcactgtcaggatcgtaaacggtactggccgcgaacaagggcgcctgagtgatatttatggggatgacaatatgcgcctgtaattgtgccgagatgttctctggcgatgtcgggataaaaggagtcaccggtaagcgcgttttccgccaaaccacttgtactggctgactcagattttgccaacaaaaagcagtacgcaggatatcatggcggtctatcacctgttgcagagccgtaaggaaagtctccatacgcgcttgggtatcaaaagccagcagggcattcaataagtaagcatcactgttttcctgtaactggtggtggaataaaataccttcctgcaagggcgatagcggatagatatcctgtacattagcagccccgccgcttaccgtcgcaatgatggtgtcaatttcggtttgtgacagcgtcaccagtggcaacatctcaggcgtaatagctgtgcatccatcgggaatgcggttgggtgggatcagaaccggtggagtatctatccctgtctgtattgcctgcgccatatctgccagcaacggtgtggcaaaaacgctgcgtacttccagtgaatatccacggttgcgtaattgttcaatcagactgacggcaatcagcgagtgcccgcccagttcaaagaaatggtcatgacgaccgacgcgctctaatcccagtaactcctgccagatttgtgccagtgcaatttccacgtcacccacaggttcagcatagtcacgcgttatcaccgcagacagatcaggtgcaggtagtgcattgcggtcaagtttaccgttgggcgtcagcgggaaggtatctaacatgacaaatgcactgggtagcatatagtctgccagatgctgagtgagatactgccgcagtttggttggcatcagttcaatatccggctgagtttgcacgtaagcgaccaaacgcttgtccccgggaatgtcttcacgtgcgataacaatggattcattgatccccgggtattgattcagacgcgcctcgatttcatccagttcaatgcggaaaccgcgtaatttaacctgaaaatcattgcgacccagatattcaatattaccatccggcaaccagcgaccaaggtcaccggttttatacagccgggcatccgcttcggcagagaaccgatccggcaggaaacgcgcccgcgtaagttcaggccggttaagataaccgcgggctacaccggcgccaccgatatagatttcgcccactaccccaagaggagtaggttggccagaagagtcaagaatatagatttgggtgttagcaatggggcgtccgattggaatggtatatgcagcattaacagccggtgttattgcataagtggtggctattgtggtggattctgtcggaccataagcattaatcagatgggttggccgggattcagataattgtacctgttgtatttttttcggattgagcacttctccaccgacaagcagatagcgcaattgcctgaacaggggagagagtatttccagataagcattgaacagtcccaccgttaacaacattgccgtgacttcaccgctgattaattcgtcacgaaaacgttcagggttgagtaatacggcttgtgggatcacatgcaggcgtccgccgtttaacagggctgaccagatttcccatgttgaggcatcaaacgcaatattggaacagtgcgcgacgcagtcattcggcccgatatccgcataacccccattgatagccaaccgattaacattacggtgctcaatcatcacgcctttaggttgcccggttgaaccggaggtgtatatcacataagccagatggcgcgatgtcagtcccaatgcttgtgcatccgggttatggctcggttgtgtgaccaatgacagggtttcagatgaccgggtttctaatgaggtatcctgagcatcaattacgcgcacaggtacgatatccggtaacttatcgcgctgggcgacctgagtcagtaagatgaccggagcggcatctttcagcatataggtcaaccgttctgcggggtatgtcggatcgaggggaacataagcaccgcccgctttcaggatacccagcaggcagacgatcaatgccgggctgcgctcgacacagatagccacccgatcatccggttgtatccccaatccaatcagataatgggccagttgattagcctgacggttaagttgtttataactcagtgtttgcccttcatagacgacagcaatagcttccggcgtttgggtcacttgctgttcaaacagttcatgaatgagggcattctgcggaaagtcggcttgcgtgacattaaaatccactaataattgttgttgttccattgcggataacataggcagtgatgaaatcgtctgattcacatcagcgatcattgcggttatcacgttttgaaaataacccgcaatacgaaccacggtttccctatcgaataaatcagttgcgtatattagcgttccgattaagcccgaatttccggctgtttcagtgaacgacagcgttaaatcacattgagcactgtattgcggttgttcgataatagaaagttcaagcccgggaagtttcaattcctgagccggagtgttgtccagtgccagcatcacctgaaagatagggctatgactcaggctgcgttcgggttgtaacacttccaccacctgctcaaaaggcagatcctgatgagcataagccgccagtgtctgtttacgaacatgggccagtagttccgctattgtatgacattggcctgattcaatacgtaaggcgagcgtgttgacgaaaaaaccaatcagattatccagttcggtgcgagtacgattggcaatgggaagaccgataacaatatcgttttgaccactcaaacgggagagaacaatagcccacgccgtgaggagagtcataaataatgtggctccctgattttgtgcaaatgttttcagggcagtgagtaattccccatcgaggtgaacaggtattttacttcctctatagctctgcacagagggacgagggcgatccgttggcagttccagcagggatggcgctccattaagctggtgataccaataatctcgctgtacggtcagttcatcgcaatgcaatgcgctgcgttgccaggcagcatagtcggcgtactggataggcagtggtggcaaatcagcgtcgtgtccggtcagggcagcctgataaaatgccgccagttcgcggattaaaataccactggaccagccatcagaaatgatgtgatgctgagtgaacaacaggacgtgttcttcattatccaactgcaatagctgcccccggattaacggaccctgagtaagatcaaaaggcatccgggcttcagattcagccagttcgtcaacacgggctgaacgttcgtcttcactcagagaacgtaaatccagataactcattgaaaagccagtatccggaggggctattttctgacaaggttgatcatccaccaatgtaaagtgggtgcgcaaactttcctgacgggccacaaggttatcaagagcggagatgagtgcctgatgttcaagtttccccgtaagacgcaatgcgacagggatatgataggcccggcttgcggctgaatcgaattgtccgataaaccataatcgttgttgggcaaaggataatactaaaggcgcatggcgatctgtcttcgttatcggcatgtgcaatgaacgagtttcattagcgcactgtttaattttttctttaacttttttctctaaaacagctcgttttaacatttcgatattgatattagctttgctcattcttcagtatctccacttaaaattgcgattaattcttctgcggacattgaatcgaggtttttcatgattaactctgagtcatctccccatgctgaattcatttgggcagagagaatgagttcagatagctctgataatcgggatgactggaaaattgaaacgataggtatctggactaaaaattcggtttgtatacgggctatcagccttgcggctaaaagtgagtgtccgccgatttcaaaaaagctgtcatgccgcccgattcgttccagacccagcagttcctgccagatttgtgccagtctgttttctacgtcacccacaggttcgacatagtcactggttattaccgccgacaaatcaggagcgggtagtgctttacggtcgagctttccgttgggagtcaacgggaaggtatccagcattacaaaagcgctgggtagcatataattgggcaaacagagtttcagttcttcgcgtaagttggcagcttccaacgtaacgtctggttgtgccaccaggtaggctatcaggcgcttctcaccgttatctgtctcatggacaataaccatcgcttctttaattccatcacaggccagcagttgtgcctcaatttctcccggttcaatccggaaaccacgcagtttgatctgaaaatcgttacgccccagatagtcgatattgccatccggtcgccagcgtcctaaatcaccggttttgtacattctggcatcaagttgtgggctgaaaggatcggccacaaaccgttctgctgtgagttcaggctggttcagatatccccggaccacacccgctcccccgatataaatctcgccagtgacgccaaggggcacaggctgaccataagcatcaagcagatagattcgggcattggctatcggatgaccgatactcggcgacgacagggaatgatctatcacacaaaaagtcgtatcaacggtacattctgtggggccgtagacattgataaagcgcgacgtttttatttgttgcaagcgcgaccataagacaggagaaatggcctcgccgccgattaacgccagtttgggctgataatccgtatcggtacccagccccgcattcaacagccattgcagttgcacgggagtacagtcaaacagatccaccgcgtgatgtgccagataacgccagagttgctccgtattggcacgaatagcctccggaatgataactagtgtatggcctgcaagtaattgcagccaactctgtaccgaagcgtcaaatacaatgctggcattcagggcagtacgacacggtggcgtgatatcgatcaccgattgcagcccggtatacagattgatgacattgcggtgggtcaccataactcccttgggttgtccggtcgagccagaggtataaatgacataggccagatggtgggaattcagccccaacgaggttgcatcggggttatggtcaggctggatatcaaaaagcgaagtttggttatccagttgcaccgtggggatcggataggtcaattgacccgccagcccagtttgcgtcagcaacgccacaggagctgcatcttccagcatataggccagccgctcaggtggataagccggatcaagggggacataagccccacccgctttgagaatagccagtaatcccaccaccatctctaagctgcgttcgacacaaatagccacccgatcatccggtttaacgcccaatgccatcagataatgggccaattggttggcctgacggttaagggcttcatagctcagggtttgttcttcaaagagtacggcgatagcatcgggtgtccgggagacttgctgttcaaacaattcatggataagggcatgctgcggaaaatcgacctgtgttgcgttgaaatccaccagtaactgctgacgttctgcggccggcaggatggataaactgagcacagattgctgagcgtcagcggtcagtgcatccgccagctcactgagggaagtgtgcagataatgtacgattctgtccggattaattccgtctacggtctgagccaccagcgtgaaatcgttcccgtgatcatccacggaaagagtaatgggatagtttgtccgttcctcagactgtaatacgcgtatgcccggccaaccgatattctcgcccaattctgacgggctatatcgatagttaaacagagcactaaacaagggtaagggggggatcactccgctgcaccgttgagccagtgccaacggagcctgctcatgttccagtagttcagccagatttgcggctgtcgcccgcactacctcccacacattgagattattcagggatatcctgatcggcaatgtattgataaacatccccataacctgatcagccccggctgaaccgtgcaatcgtcccagcagtacagtaccgaatacgacttcttcacggtcgctgatatgagccaacatctgagcaaaagcgacatgaaacagcacactggggctgatccccagacggcgagactgcgcacgcagagtctgggccagcgtatcattcagaagcaaacgggcttccgacacgtttgcgccattcccctgtatatccagcaggccaaaaggtgccgtaggttcttcaatatcggcaaaccgctcacggaagtaactttcatgtactgaattcggcattttcaggatctgggcgataaaattacgataaggcagtggtgtaggcagagattcctctttaccgtctaataacagaaaaatctccttcataataaattccagtgtcatatgatcactgaccagatggtgaaaattcagcgccagaagccattcgttactgtccgagtcgagggcaatactggcggcaaacaacggagcctgagtgatatccagtcgggagatgctatgcgcctgttgttgtgcttgaatagattgtgtttgaatagattgtgctggaacaaacgatgtcactggcagttttgcttgccgccagaccacctgtaccggctgactcagtccctgccagcaaaacgcggtgcgcagaatatcatggcggtctatcacttgttgcagagcgttcagaaaggtatccagacgggagcgggtatcaaacgctaacagcgtgtttaataaataagtatcactgttttcctgcaactggtggtggaataaaatcccttcctgcaagggtgacagcggatagatatcctgtacattagccacgccacccatcacagttgcggcaatcgaatcaatctccgtgtgtgacagtgttaccagcggcaacatgtcggggataatacgtgtgcaatcgtcaggaatacgattgggtgggacaagaatatccggcgaatcttgccgggcctgtatcgcctgcgccatctctgaaagcaacggggtggcaaaaatactacgcacctccagtaaatatccccggctgcgtaactgttctatcaggctgacagcaatcagggaatgcccgcccagttcaaagaaatggtcgtgacgtccgacccgttccagccccagtaactcctgccagatttgtgccagtgcaatttcgacgtcaccgatcggtgcttcataatcccgggtgatcacagcgtataaatccggcgcaggcagggccttacggtcgagcttgccgttaggtgtcagcgggaaggtatccagcatcacaaaggcactggggatcatatattccgccagatgttgtgccagttgtctgcgcagatcaaccggcaccagttccgtacctgcttcagcacagagataggccaccagacgggtattcccttcagcgtcttcacgggctatcacgacggcctcctgtacgcccgggcactgcatcagacctgcttcaatttcccctaattcaatgcggaaaccacgcagtttcacctgaaaatcattccggccgaggtattcgagattgccatccggcagccagcgggccagatcaccagttttgtacatacgcatcccgggattatcggagaacacgtcaggcaggaaacgctctgaggttagttccggtcggttcagataaccacgtgccacgcctgcaccggcaacatagagttcgcccgccacgcccagaggggcaggctgaccataggcatcaaggatatagatacgtaaatcgtcaaggggctgaccaatcaagctgcctttccctgaataaatatccggttcggtcagttcccgataggtggcatgtacagtaatttccgtgatgccatacatattcaccagacgcgtctgatcggtgggattgcggtcaacccacggcgcaagggtatgcaactctaacgcttcaccgccaaagataatgcaacgcagggtgtgttgcgcgtgcggcattgcattctgcgcgacaattaactgacggaaggcgctgggagtctggttcagaacagtcacttgctcacggcacagcagctcatagaactggtgtggtgagcgggcacattcagccggaataacgaccagccgccccccgtaagccagcgctccccataattcccatacggagaaatcgaaggcaaaagagtggaacagcgtccagatgtcgttgttatcaaaccggaacctcacctgtgtcgctgccagcaggcgggtgacattggtatgttctaccatcacgccttttggttgacccgtggacccggaggtataaatcacatacgccagatggtgtggagtgagtccctgcactgtggccagcggattggtttccggtaggtttgctagcatggatgagggcaggtcatcaaatctgacagtaggtaatgcagaattgccagtgatttcgcccagtgtggtttgcgtcagcaacaccacaggttcggcatcatccagcatataagttaatcggtcagcgggataggccggatcaaagggcacataagcaccgccagccttgagaatagccaatatccccacgatcatgtctaagctgcgttcgacacagatagccacccgatcatccggttttacgcccaattcaatcagataatgggccaactggttagcctgacgattcagttcgccataactgagcgtttccgcctcccacatcacggcaatcgcttccggcgttcgaacaacctgttgttcaaacaattcgtggatcaaggtatctggtgggaaatcagcctgtatggcattgaaattctccaacagtagctgacgttcagccgcaggcagaatagataaatcaagcgcaggccgctggggttcagccgtcagtgtgttaactaattcactcagggcagtatgcaggtaattcaccaatcggcaggggtcggcacccgccacgctctgagccaccaacgtgaaaccatcctctgtatcatccactgaaagggtgatgggatagtttgttctctctgtggatgccagcaggcgcactcctttccagacagttttctctgcctccacgggaacggatgagccgtgacgatagttgaacaatacactgaacagtggcatcggagggataacaccactgcaattctgcgcaagtgccagcggagcttgttcatgctccagtaggtttgccagatttttggctgtcgcctgcacgacttccaatacactgaaattactcaaggagactcggattggcagggtattaataagcatccccatcatctgatcggcattggccgagccgtgtaatcgtcccaatagcactgtaccgaatacgactttttcttgtccgcagattttagccaagacttgtgcccaggcgacatggaacagcacactcgcactgatgcctaaacaccgagcctgtgcacgcagagtatgagccagcgttttatccagtgataaacgggattccgtcacatcagtgccattgccttgtacattaagaaaaccgaaaggcgcggtgggttcatcaatgtccgcaagctgttgacggaaatattcttcatgtaccgaatccggtacgttaagggtctgggcaataaaattgtggtacagcagtggcggagttagctcaatcgactgaccctgtaccgtctgtttctgtaatagctgttgaatttcatccatgatcaacgtcagtgtcatattatcgcagaccagatgatggaaactcagtgccaacaaccattcctcagaggcgggatcatagacagtactggcagtaaacaacggagcctgagtgatatccaaccggttggtgatatgtgcctgcaattgtgacggaatattttctgccgatatgggaacaaacgacatcaccggcagttttgcttctcgccagactacctgcatgggtttgcacagtccctgccagcagaaagctgtccgcagaatatcatggcggtctatcacttgttgcagagcattcagaaaggtatccagacgggaacgggtatcaaaagccagcaggctatttgacagataggcatccccattttcctgtaactggtggtggaataaaagaccttcctgcaagggcgacagcgggtagatatcctgtacattagccacacctcccgccacagttgcaacaatcgtgttaatttcagtttgtgacagcgtcaccaacggtagcatatccggggtgataaccgtgcaaccatcgggaatacgattggcgggaacaaaaatatcggaagtatcctgttgtgagtgtattgcttgcgtcatttccgaaagcaatggggttgcaaaaatgctgcgtacctccagtgaatatccccgacggcgtaactgttcaatcaggctgaccgcgatcaacgaatgtccgcccagctcaaagaaatggtcgtgacggccgacccgttccagccccagtaactcctgccagatttctgtcagtgccgtttccacatcacccactggtgcttcatagtttcgggtaatgaccgctgacaagtccggcgcgggcagcgccttgcggtcgagctttccgctgggggtcagcggcaaggtatctaacatgacaaaggcattgggcagcatataatccgccagactacttctcagctgctcgcgcagatcggctgcttccagcgtaacgtcaggttgaggcaccagataagccaccaggcgttgttcacccttatccgtcttatgggcaataaccacggcatccctgacaccctgacaggcgactaattgtgcttcaatttcccccggctcgatgcgaaagccccggatcttgacctgaaaatcattacgccccagatattcgatattaccgtccggtagccagcgccccagatcgccggttttatacattctagcattcg

SEQ ID NO: 2846 - DNA, 21876 bp, Xenorhabdus sp.; identical to SEQ ID NO: 2845
  CDS (1335)..(1442)

SEQ ID NO: 2847 - DNA, 21876 bp, Xenorhabdus sp.; identical to SEQ ID NO: 340
  CDS (18784)..(20457)

SEQ ID NO: 2848 - DNA, 21876 bp, Xenorhabdus sp.; identical to SEQ ID NO: 340
  CDS (3)..(7265)

SEQ ID NO: 2849 - DNA, 21271 bp, Xenorhabdus sp.; identical to SEQ ID NO: 102
  CDS (3536)..(6013)

SEQ ID NO: 2850 - DNA, 21271 bp, Xenorhabdus sp.; identical to SEQ ID NO: 102
  CDS (6721)..(7461)

SEQ ID NO: 2851 - DNA, 21271 bp, Xenorhabdus sp.; identical to SEQ ID NO: 102
  CDS (7553)..(7858)

SEQ ID NO: 2852 - DNA, 21271 bp, Xenorhabdus sp.; identical to SEQ ID NO: 102
  CDS (9447)..(9791)

SEQ ID NO: 2853 - DNA, 21271 bp, Xenorhabdus sp.; identical to SEQ ID NO: 102
  CDS (12741)..(14288)

SEQ ID NO: 2854 - DNA, 21271 bp, Xenorhabdus sp.; identical to SEQ ID NO: 102
  CDS (16683)..(18026)

SEQ ID NO: 2855 - DNA, 21271 bp, Xenorhabdus sp.; identical to SEQ ID NO: 102
  CDS (18036)..(20273)

SEQ ID NO: 2856 - DNA, 21271 bp, Xenorhabdus sp.; identical to SEQ ID NO: 102
  CDS (20313)..(21110)

SEQ ID NO: 2857 - DNA, 21271 bp, Xenorhabdus sp.
  CDS (20384)..(21094)
atatgatgaaaatcctgacagtgggattttcatctgtataaattagacccgtttgccctccctttatctatttaagtgtagcaatttccaagagaaattaatcacggcccagatcaaaaaaagtccggcttctccagagataaccggacttttatgtagaatcaagctttctgctttttcacctgctcccacattttatccatttcctctaatgtggcagtttccattgttaatccgctatcgaggatgagcttttcaacattacggaagcggttttcgaatttctggcaggctttctgaagcgccatttcaggtttatgccccaaatgacgggataagttaactaccgcaaataacaaatcacccagttcttcttctacgcgctcatcatccacaactgcctgtttagcttcatccattacctcgtcaatttcttcatacaccttgtctaacacagggccgacggtatcccagtcaaacccgacagaggcacagcgtttctggattttataggctttcatcagtgatggcaggctggtaggaatatcatccagaactgagtgctggtctttttccgctctttctgcggttttgcgctgctcccagctaccaatagcttcctcgctgctgatacccgcctgttgattgaaaatatgtggatgcctgcgttccagtttgttacagacagcctcacagatatcatcgaaatcaaactgttgttcttcctgcgccatttgggcataaaacacaatatggaacagcaggtcacccaactcttctttcagggcatgggcatcattgcgctcaatggcatcgatgacttcataagtctcttccagcgtgtaaggtgcaatagtcgctgaggtttgtaccttatcccacgggcaaccgtgctgaggatggcgcaactgcgccataatctctttcagtctttcaatgcttttcatactatcagtcatatttgcaactgagtgcgtgtttactttatccataactgtttaatttccatgcagacgtctggcttcaatcacatcaggcagttgattcagttttgccagaacccgacccagcacctgcaagttgtaaatctcaatattcatatcgatagtggccagttgctgcttcacatcactgcgactactgacacctaatacattcactttttcgttggcaaggattgtcgtgatatcacgcagtaatccgctgcgatcattggcaagcactctcaccaccagagaatagccactggagtaactttctccccataccgcatccaccacacgttctggcgcacttgcttccagttcagttaattgatcacaatctgcccgatgaatggaaataccgcgtccgcgtgtaataaatccggtaatatcatcccccggaatcggctggcagcagcgggcgatatggtgcatcaggttacctacgccttccacaacaacccgaccattatccttcttactattccgctgtgtgaatgttttgttctcaagagtgcgtagcgcttcccgatccgcctcttcagccgtagttttattaaatttgctttgcaggaaattcgccaactgatgaattcggatatcaccaacaccaatacccgccaacacttcctccagcgaattcacgttataacgggctatcagctctttttctgcttctttgatcgtgacacccaaatgcgccagttcactatccagcatctggcgaccggcaataatgtttttatcgcgatcctgcttacggaaccaattgtggatcttcgcccgtccacgggtggtcgtgacatagccaaaattaggattcagccagtcacggcttgggttcggttgtttctgggtgataatttcaatctgatctcccatctggagctgataactgaacggcacgatacgaccgccgattttcgccccgatacagcgatgaccaacatcgctatgaatgtgataggcaaaatccagcggtgttgaacccgtcggtaaatcaatcacatcgccttttggcgtgaaaacataaacacgatcatcgaatacctgactgcggacttcatccagcatctctccggtatccgccatctcttgctgccatgcaatcagcttgcgtagccatgcaatccgactttcatagctgccggatttacccccgccaatcgccgtaccttctttatatttccagtgagcagccacacccagttcagcatcatcatgcatctggcgggtgcggatttggatttcaagtgttttaccgtttggccccaacaccacagtatggattgactgataaccgtttggtttcggattggcaacgtaatcatcaaactcatccggcaaatggcggtagtgagtatgcactattcccaatgcggcatagcaatcctgtaaacgttcaacgacaatgcgaacggcacgcacatcaaacaactcatcaaacgccagcgattttttctgcatcttgcgccagatgctataaatatgtttgggacgcccgtaaatttctcccgaaatcccttctttgagcatataacggcgcagcgtcgtgataaatttttcgatgtattgttcgcggtcaatcctgcgctcatgtaaaagtttagcaatttttttatattcatcgggatgcagatagcggaagcagaaatcttccaactcccactttaactgaccaatccctaagcggttggcaagaggtgcataaatattggagcactcttttgcaaccaatacccgttcatcttcactcgcatccttaacttcccgcagataggcgatccgctccgccagtttaataatcacacagcggaaatcttctaccattgccaacaacatccggcgtacattatccacctgcactgagcaggtagcatcggtatgcgtggctttcaactggcggatagcatccatttccagcacaccatgaaccagatccacgatgggttgaccaaacgtttctgtcacagtttcgttgttaagcaagcgggcatcaagaaggggaaaaagcagtgccgcacgcatgctgtcattatccatgctcagtgtggacagaatttccaccatttcaaccccacgccacaataacaactcggcattagggtgattctgaactttttcgtgacagtaatgccatgtttcggctaatttttcactggattgtggattaacaatatttaaactcgcaatccacttatcgacagcaaattcacctgccggtgtgagatgagcacttcttactgcaaccataatttctccctactcgatagtcatcggctctcggctgaataaagccatagattccagatgaccggtgtgcggaaacatatccagcatccgcacactgacaagatgataaccggcctccagcagaactttgctgtcccgcgccagggttgtgggattacaagaaacataaaccactttttcaggagccagttttactatatgtgacatgacaccagcagcacctgcacgagcgggatccaataatactttattgaagccctgtgcggcccacggctgctgatggatatccgattccagattttcgtggaaaaaattgacgttactaagcccatttaaccgagcattatattgcccgcttgcaaccaatgccgcaacgccttccacaccaacaaccgcctgaactttagccgctattggcagagtgaaatttcccataccacagaagagatccagtacgcggtcttccggctgcaaatccagccatgaaagggcctgagcgaccattttctggttaaccgcatcattcacctgaataaaatcctgcgggctgaatactaattttaaaccatccacctgataccacggctcagattgctcttcttcaggagacaacggctcaagaggagtttcatcgccagccagataaatcatcacctgattttgcttcgcaaaaacccgcagtatttctttatcttcatgctttatggggacgagatgacgtaaaacaactaacgggccattatctgccagcactaattcaacatgtcccagtcgtttcaccactttcaggctgtttaaacacagggatagaggctgcaataatttttccagttcagggtgcataaccgggcaatgcccgatatccaccaaatcattggtctggctctgacggaatcccatcactaatttaccctgtctggcctgatattgcaggccaagccttgccctgcgccgatacccatactcagggctgtgaataatgggctgcgcactgatactgatgcctgtctcccgctggatcagatgttccagtacactggctttcgttttcgcctgtaactcaggtgcgacatgctgctgctggcaacctccgcacattttgaaatgtggacagcgcggattcacacgaaacgggctgtctgataagcgcttaactattttggctttagcaaactggcgtttctcttctgtcagttgaacttgcgcctgctcaccgggcaataaccccggaataaagatcgtttttccttgatggcgggcaataccctgcccctgagcatcaagattgtctgcggtaacggaaataatgcttcggtttacggagcggcgatttggggagtaaaattgcaccatgattctgactgactttgaaaaattgagttttgattttcccacaatggatgcttatgaccaaatatagcctgcgcacccgtatgatgagcctgattttggttcctgtcttattggtcggaacacttgtgagtatatcatttatctcataccgctattatgagttgaagagcctgatagtccgcagtgggatcagcattattgagcctctgtccattgccagcaaggtaggaataaatctggataacagtaagggcgtaaaatcattgataaatcgccttcatcgccggaattttgaaatcgttatggccattgcgatttttgatgaacaccatcagctgttcgaaatttccaatgataaatatgatgtcaatctgttgcgactcaggccgaatgatcctattccgacaacactgactaaagaagaagacagcaacagcattatcctgaaaatgccgattatctcggaaagcagcgcttctaacgggtggccggaaacaccacataaacccgtccccatcggttatatcgccattgatttggatttacgggccgctcaactccagcaatacaaggagattgcaacctctatcattttgctgatcctctgcctcggcggaacggcactgtttgcccatattctggtgcgtaaagttacagagcctctggaatgtatggtcaaagccgttaaccgtatccggcaggggcagttgaatacacgagtaacgggagccatgccgggcgagttatccgcactccagaatgggattaataccgtcgcggaatcgctgtcaaaatataaagacgaaatgcagttgcatatcgatcaggcgacttctgacctacaaattacaatggaacagttggaaattcaaaatgtggaactgactatcgctaaaaaacgggcacaggaagcagtcaggataaaaaccgaatttctggcgaatatgtctcatgaactgcgaaccccgcttaacggtgttatcggttttacccgccagatgctgaaaacaccgataacctatcaacaggcagaatatcttcatgtcattgaacgttccgccaacaatctgctgaaaatcatcaatgacattctggatttttctcgtctggaatccaataaactaatattagatcaaatacctttcttactgcgtgataccgtcaatgaggtgatagaattactgacaccttctgccagtgcgaaaaatcttcccctgcaccactatatcgatgaccagctaccaaacctgatgattggtgatcccatccgtttgcagcaaatactcactaacttaattggcaatgcgattaaattcacagatgaaggcaatatcacactggaaataaagttgcgccagcaaaagcaccatatggtgcaaatcgattttaccgtaactgataccgggattggtattaaatcagagtaccgccctattctgtttcaggcattcaatcaggccgatgccagcattacacgtcattacggcggcactgggttagggttaagcattaccaagcggctggttaatgaaatggacggagaaatcgatttcatcagtgaacccaccagagggacagtcttttattttgatatctggctggaaaaagaggagttcctgttagattcagtgcctgcacatttatctcagccccactcgtcattccgcctgcctatgacggttatggcagtcgatgataatccggctaatctgaaattaatcggcacacttttaagcgaacaagtggataacactattctgtgcagcagtggtatggaagccctgaaaatggcgaaaaaacattctctggatctcatcctgatggatattcagatggcagatatggatggaatccagacttcagagcaaattcatcaattgccggaacataaacaaacccccattgttgctgtcaccgcttttatctgcgatgaaacctgcaatcagggacattctccttttatcgactgtttgtctaaaccactggatgaggctcgcttaaaagacttactgcatcaatacagtccaaccaaaaaaccacaagccatagactggaagctggctttacagcaaaccgccggcaaagaatcactggcgctggaaatgctggcaatgctggtgcaatctctgccggagatgaaaacgagaattgagcaggcattgaccgtggaaggtgaagcccaccgtaaacagtttttgcatcatgttcatcagctgcacggcagttgctgctataacggcgtacctaaattaaagatggtttgcgaactgatcgaaaaacagttgaaacagaatatttctctggctgatttagagcctgaactactggagtttattgacgaaatcgaccatgttattgcggcagctcctgacatactgagagccaccagagcactcacttcgataccataaacttgcgatactcctcgtaagcataatggtctgtcatgccactaatgtaatcctgaatcagacgtgcccgatagtaaaattcgatcacgtctttttcaatttcgtcagtggcaataattccctctaccgcttcgttataagccagccggtgtttagttgaaagcttgtgtaacaggcgggtttcgataaagtattttgtgtggaagttattctggtgtaactcccagaaatcttctcgggatagttccagtaacgggctataaacatccagcaaaccggtaataatccggtagccctgtaattccagttcttccacttccgggtgattgaatacccgtttgcgcgtcacgctctttaaggtactcagtaaacggtgctcttcgccgttggcttccagtaaagcataattgaaagttccggcataaatttccggtaaatgttcaataaaacgctgtgccgtataagggactaatttgccggtaataaacacccgcagatacataaaaaattgttcatgaatattacggcgggcttcattattggttgtttttttataagcctgaattaccgtcgattcgaacaaatcgcctttatggtgaccaccattctctttccattcctgtttcaggtattccaccagctgctcaacattaaaaatacctttctcaaccgcatcatccagatcagcgatacaataagaaatatcatcggcagcttccataatataggtcagtggaaaacggcagaaatctcccaattgcagctctttctttaattcacggataaaacaatcttctgaccagtaatagccttttttcttcatcaggtaactgaattcttccggagattcttcgagacgataagccggacaggtatatttgagaatacagccgatttgagcatacgtcagattcagtttaagcagactgtgtgccagccggatagcctgcgcgtttccttcaaactggcatagatccatcctcaactggcgtcggaacagatcttttttctcttccccgctcaagcgtaatgctgcaacctgacaattatcctgccgtttgctctgtccggtctcaggtaattcagtctcaggtaaatagtcaggatctaaccggcgggagaaccagtccttaatcgctgcctcaccaaaatgaccaaacgggggattaccaatatcatgcatcagacaggccatctcaatcaggctttcaaaagcgctcagacgctcactcagcccatatttttccagcaaattctgttttgtcagttcggcaataatggttttagagatataacgaccaatttgctgcacttccagtgaatgcgttaaccggctgcgcaccgccgcattacgctccagcggaaacacctgtgttttctgctgcaaccgccggatagccgcagagttgatgatccgcccgcgatcactttcaaactgccggtttatctgctcttcattagcatcatggatagaagcatttttgtacttgcgctgaaaattcagtttttgcttgaaatcaatcttaagcatcaatcccccatatcgaatgatatgattatttatagccggaatctctggcagacggttatttaatgatacactgccgcattaatcaggcctatataagtaggcacaacccactaatattcccaatggatttcaggttgtatcgcggcggcaagagagctcatccccggaagcatagataactatgtgaccggggtgagtgaacgcagccaacaaagagacaacttgaaagacgacgggaataacaaagagagtatgacacatgaaagtcggtgtaataggtgcaatggaacaggaagtgactttgttacgcgatcagatagaaggtctgcaaacattgtcgcgcggtggatgtgaaatctataccggtaagctgaatggtgttgatatcgccttgctgaaatccgggatcggtaaagtctcttccgcacttggcactactctgttaattgaacactgtcagccggatatcgtaattaacaccggttcagcaggcggtctggatccgaaactgaaagtgggtgatattgtggtatctgaagaagtacgttaccacgatgccgaccttaccgcttttggttatgaaccgggccagatggcgcaatgccctgccgcatttattgctgatgaaaaattaattactttagctgaaaaatgtatccagtctctggaactgaacgctgtccgtggcctggtttgcagtggcgatgcctttatcaacggttcagaaccactggcacgcatccgggcgactttcccgaacgttgcagcggttgagatggaagcagccgcaattggtcatgtttgtcatcaatataaagtgcctttcgttgttgttcgcgctatttctgacgttgcagatcaggaatctcatattagctttgatgagtttctggttgtcgcggcacaggaatccacacggatgatcaacgcaatgctgactgaactcagcaagcagtaattgattagagcctattttataggctctaaagtctggaatatcacttaatgaaattctatttgaaaaccaccgcttatcactcggtttggatggtattcttatttctgctgtatagctttgtaagtgttttcagtgcgccactgtacgcagcagcgtcccgtgttatcagccttgccccctccaccactgaacttgcctataccgcaggcatgggcgatcagcttgtcgctgtcagtgcttactccgattatcctgaagcagcaaaaaaactggagcaggtcgcagactggcagggtatcaatgttgagcggatcatcgccctgaaacctgatttaatcttggcatggcgcggtggcaatccacaaaggccactggagcaactcgctgcactcggtattccgattttttactctgatgtgaaaaaagtagaggatgttgccactgatttagagcggctggcagcctatagttcacatccggatacagccaaaaaagccgctgcggatatccggcaaaaattcagtcagctaaaacaaacttatgccaaagcaaaccctacaccagtatttatccaatttggtataaatcccattttcacttcatccagccataccattcagagtgaaattgtttctgcatgtggaggcagaaatatctttgccgatagccccgtaccgtggcctcaggttaaccgtgaacaggttctggtgcgcaaaccggaagttattgtgatgggcggaacagaagatcaaaaacagcgagtagccgaattctggcagccacagttgaatgtcagaattgttaccatcaatgatgactggttcagccgtgccgggccgaggattattctggcgactgagcaattgtgtattcagttaaataatataggacaggctataaaaacattgcgttaaacttataaaagggccccacctaactgtataaaaaacttgcatttaagcccccttggtattagtgtaaatatcaactggcaactgatactcagtggccatcaatcccaagaggacgagcaaatgtcagctttgacaatgagcacacacaatgccattaaagccctgaaagaatccgggatggatgaaacacaagcagaaaagattgtcgaaattataacagatttacaaaatattagcgtagcaacaaaagaagatataaaacaaaccgaagccaatttaaaagctgatttaactgctattaaaaccgatattgattggttgaaaaaattaattatcactatcggggttgctgtcgttatcgctgctataaaatacattttcataggttaatatcggagactgtaatgtctcattttaacggaagaactatgcgattaattgataattatattccaccatcaatagactctttgacttgtctcaaaagtaagctgcgttttactggacaacaaatggcagaattagcagggatatctaacagtaaccaatggagaaaatatactggtggtgaaaaaccacgagcattgaatcaacatatcctatttttcattgcagcccaattagctctggatgaaactactttgtctattattttggatgaaatgcacaaattaggtgctgaattcgaaaaaaaaccagaaaattgatataacgcggaataaaactgataaacataaatatatacacaatggatttcaagatgcgtcgcggcggcaaggaagagaatccccgggagcatagataactatgtgactggggtgaacgagcgcagccaacaaagaggcaacctgaaagacgaagtgtataagggcaatatttccattgcccccacattctgaacttcgataacttaactaccacctactgaagtaggtgggttagcgcacttcggtgctgacgactgaaagtcgtcgaaccacgcacctcgtaaacgcgcgtaggtcaaaacattaaagtcaaagtcaccgtctaaagacggtggttttaacctgtcatatggaaaaataaataccaaaatcagatactaaaagaagagccacaaccacaagtcgtttttgcgttcggattagtgacgataaagcgggagccttccagaccttcggtataatcgacacagccgcctactaaatattgcaggctcatcgggtcaactaccagttcaacaccctgtttctgaattgtcatatcaccttcgttcatttgatcatcgaaagtgaaaccatactggaaaccgctacaaccaccacctgtaatataaacccgcaaacgcagattcgggttctcttcatcagcaaccaatactttcactttgttggctgcggcatcagtaaactgcaaaggtaatgcagcatcatcgctcatatttttactccagtccggttttccggtaaaaattctcggaaagttactgtatacccaatagggggcataaaccttcagatcagttagtggcgattatctaatacctgactgattcgttcaagttttgccagacatacttattcctttgcttctaatttggcttacctacttgggtgatttagaatggcgaatctacatatctgttgtctttcaggagcattgattaatgagccagtccgaaacactttactctcaggcaaaacatgttatccccggcggtgtaaactctccggttcgcgctttcaatggcgttggcggtacacctgtatttatccaacgtgccaatggtgcctatctttatgatgtcgatggtcatgcctatatcgattatgtcggctcatggggaccaatggttctgggacataatcaccctgctatccgcaacgctgtcattgaagctgctgaacgtggtctgagttttggtgctccaacggctgccgaagtagaaatggcaaaactggtaacagagctgattccttcaatggatatggttcgtatggtgaactctggtacggaagcaacgatgagtgccatccgtctggctcgtggctatactcagcgcgataaaatcatcaaattcgaaggctgctatcatggccacgcagattgcctgctggtaaaagccggttccggtgctctgactatcggacaaccgaattctccgggagttcctgccgatttcgccaaacatactctgacctgcgtctacaatgacttaaattcagtgcgtgaagcattcgaaaaattcccggaagagattgcctgtattatcgtcgaaccggttgccggaaatatgaactgcatcccaccgcaaccagagtttttgccggggctacgtaaactgtgtgatgaattcggcgctctgttgattatcgatgaagtgatgactggttttcgtgttgctttaggtggcgcacaggaatattacggagttaaacctgacctcacttctcttggaaaaatcatcggtggtggtatgcctgtcggtgcattcggtggtcgtcaggaaattatggaaaaactggctccaaccggccctgtttatcaggcgggaaccctttctggcaacccgattgcgatggcggcaggtttggcctgcctgaaagaagttgctcagattggtgtccatcaacgcctgagtgaactgacggataaactggcaacgggattaaaaaatgcggctgctaaagctgatattcctctggttattaaccacgttggcggtatgttcggtattttctttaccgatgcggaaaacgttacctgctatcaggatgtgatgaaatgtgatgttgaacgattcaagaagttcttccatttcatgctggatgaaggcgtctatctggcaccatccgcattcgaagccggttttatgtctatcgctcattcagaggaagatattcagcgtaccgttgatgctgctgctcgttgttttgctaagctgaaataagttttttgttatggcaccacaattcagtggtgccgaataaatagcaccagattatgaaaacacactcaattttctgttttaattagatggagtttgaccaaacttgagtagattcccgctgggatcaaatagatacatttctaatcctccccaactagtttcttttatatctgatatttcaactttatctttaagttcatcaaatacttcctgaatactttctacgtatatataacatgaagtattttccgctatatatttatcatcacaagaccaaaaatgtaattctgtatctcctctcgatactattccatattgttcaccgaattgagagtcacaggtaaaacctaatcttgcggtataaaactggatcatttcatccatatctaatgctgctaaaatgggtacagattcccaagaactcatcttgctgactccttaaatcagaatatttttctctgaaaaatacattgcactacaccaacacccgtatcgcctgagttgcagacattactgccaatactcccagcaaaatcagcatcagccaacgaaaatgctgtgcacttattcgagttctcagacgagtaccaataaagagaaaaaggacagataatactgtcaataacagtacaggccacaaataatccgaagagaatagttcaaaggcttcgttacgcaatactaccagttggctgatttttccgagcaaaaaacagagattagccgcccgtgcgatttcatgacgatcactgctcattgccagcagacacattatcaatataggtgacatggcatttgtcgccccaccaataatgcccgctaccaagccgaatagtgacaaaacaaccggatttggagataaacggaggttcgtgctacgaatactattgataatgtaaaatgcaataattccacttaatagtaattgcaaataagcgggattaaccagaaataaaagctttgcaccaataaaactgccgactaaggaaaatagtgccagcaaactgtatttatgtaatatcgagccaatttttccgccggaaatgacacttaacaaattaaccaataatgttggccataaggctaaaaccaccgccgcttttaatggcataaatagacttagtgccgttgtactggcaatggggaaaccaatgccgctgatgccatgtaataaagcagcggtaataaataatagagataggataacgatattcatatcctgtctttcacatgaaatatgacgacattctttaatttatatcccatagcaactcccaacgatttaaccttattcaataaatgaatattaattccaaaattgtgccatagcctatagcaggcaagatatcttgatgcttaatttttgcgaaggggattgagtttctgagtaagataccagctcgctatcttgacttaattcagttctccatgaataaaggagaaattaactccattcgtatctggttggaaagcttaggaataaaaccatgatgaataatacacttaaaatcgatggtcacactgctgttatctctttcgacccagaaatagaaatgtttcgtggcgaatttatcggtttaaatggtggtgcagatttctacgcttatagtgtcgatgagctgaaaaaggaagcagtgatatcactgacaatttttctagatgaatgtaaaaaagacggaataaaaccctataagaattacagtggtaaaattgcagctcgtctgactcctgagcgacaccatgctttggcaattacagctcaagcaacgggccaatccctgaatgaacttttaaatgaaggtgttgatttggtgatagaaaaacactcttgaacttaatatcaagcataatgaaattcattaaaattccccacctgtaaaagtggggaattacatgtaattacagcctattaaagataactctttactgtccaaacatctctttcagccagcccggagcctcttcttggccctcctcaattggctgctgtacggattgctgacataacgcctgtggatcatccgtccagatcggtaatattctgataccctctccggtgcagttaaaggagccatcttcattaactgacatatcgacaataccttccggagcacgattatccagcgccaatggagtctcattcgccagataacgttcgtaaatcttcaatgctcctgttgctcccgtcagcctagtcggcttgttgttatccaatccagcccagacaatcgcgacttctttaccatcaatcccggcgaaccaggtatcacgcaattcattggtagttcccgtttttcctgccagattatatttaccatacttcccggtcagtgaacggcccgttccccgcgccacaacctgctgcataccatataacgtcagataagctgcctgagcaggtacggctctttccgcctgtgggtaactctggtaaaccactgtgccatcttcagcaatgatagagcgcagtgcggagagtttggctctatttcctccactggcaatggtctgaaactcctgagccatttccatcggggtcagatttatacctcccagcaacattgccggtactttctgaatctctttagcaggaatgcccagtaacaccaaggtattggcgatatgatccaatcccacgtccagccccagattgactgtcggaatgttgattgaacgtgccagcgcatcaaccagcatcactcgttcgctgaaatttcggctgaagtttctcggctcccacggttttcctcccgcctgaggtattgagataggttcatccgccaaccaggtattcagacgatatttatccggttcactcaatgcagtcagataagttgcaggcttggcaagcgaaccgattaaacgacgcgcatccatcgcgcggttaaaaccgggatattgtggctgcgagcctccaaccattgcccggacttcgccactgaaacggtcaacaacaaccattgcaccttccagattaggcaccggacgatttttatctttgcgcaatgcctcaataccgttttctatcgcgttttcagccgcatcctgcgccactggatctaatgttgtgaagattttgacaccggataaatcatcaatcttctcacccagcttttctcgtagttcctgacgtaccatctgcataaatgcaggttgaggtgctatcacatcgcttttcgattttacaccgagtggacgcgcacttaacaggtcatacagttcctgattaatcacttttcgattctggagaattttcaatacgacattacgacgttccaatgcacttttagggttacgccacgggttgtaatacgaagctcctttaaccatccctaccaacaatgcctgctgatccagactcagttcatcaatcggacgaccgaaatagtaaatactcgctaacggaaaaccgcggatctcttcatcgccactctgccccagaaaaacttcgttcagatagagttcgagaatacgatctttgctgtagcgagcctccagcagtacggacattaaggcttcattggctttacgactgaaagtccgtttgttcgtcaagaataaatttttgactaattgctgggttaaggtactgcccccctgcactgcacggcccgccagcaggttttccagtgcagctcgagcaatcgaaagtggcctgataccaccatgttcgtagaaatagcgatcttccgtttccagtaaggtctgaaccagtagatcaggaaaaccggaacgtggaacaaacaaacgctgctcaccgttcgcagactgcatcattgtgataagttttgggtcaagacggaagaaaccaaactggcgctggttctccatgttttcaatactggttaactgattgtcatcgaaagtcaggcgagcctgaatctggccttctttgccatccggaaaatcaaatggccgacgcagcatttcaatgctattgcctctgaccacaaattcacctgcacgggttgttttagttacctgccgatattgcatgccttccagtaaccgaatcatttcagccttactgtaattcataccgggttcaagatttaccatacgaccatacaccgccgcagggagctgccacactctaccatcaatgcgatgacggattttgccatccagataaaaaccatatatgccaatgagtactgccagcacaatcaagattttcaatagcagcagccagatccatttacttcccttttttacctgaggagatttcttcccttttttcgtcatgagttcctcctcatcggtgtcattttcgtcttcaacatcattatattcataatcatcatagtcatcccgccgatgacgtttgtttgcctgacgcccacgacgatattttgatttttgacccttacgtccgattggctgacgatcatcatcagacataccgaattctccagttaaatgctttatttaacaactaaatatatttttttacccgccttgtcggtgctgtgtttgccggatcatcgggccataagtgttttggataacgccctttcatctctttttgcacttcacggtaagccccctgccagaatgctgcaagatcctgcgtgatttgcaacggccgctgagccggagacaatagctcaacaacgacaggtacacgcccttttgccacagccggattttgctgttctccgtacatttcctgcatttttacggatagtacgggggatttatcataaaaatattcgataccaatccggcttccggttggcacagtgtaattagtaggcaattcattatccagtacttgccgttgctgccagtcaagtaaactcaccagagcggctgacagttcaacctgctgcaatcctttcaaatttctcacaccttccagcaccggttgtaaccactgttcaagagaagccaataacgcttcatcatcaaccgctggccattgcgtttccggcaaccattcctgcgcccgctgtaaacgaacacgcagctgcaatgcttcctgtgaccagttcagcgctgccagaccttcctgccgaatccagttcagcagagcttcctgcaattcggcatctgagggttttgctaaaggctgtgacctgaccgtcaatcgttcacatttcagtcttttccatgcccgcaaggtgcctttattatcatcccattcaatagctgtctgttctgtaaacaaagaagaatattgccggatgatttgctcaatatctaatggacaagcaagcaaaatatgtgcatctggcatcttattaccctgctgtaataaaggcgccaccagccatgtctcccccgaaagcggctcctcccgtgcaagcatagctcccagacctgtagccagttggaatcgcccgagattatcacgattttttgcaattctgtcggggaacccctgtaccagtaactcaggtatatacttcacattactatcggcaacatttgccatattattacccgccagttccctgagtaactgttttgaccgttgctgccagttcggttgaagagtattaaggcaatgagtgagatccaactgtccccggcgcggtggttcttcaaggattgcgacaagttttgctgccgttgccaatattccccgatctgaatcctgcctgtcatactgttctttagccaggcacaacatggcggctaagcgaggctcacaaccagattctgtcatttgccagccacgggcggttaactgctgcttatcatccagtgctcccagccgtacaagcagagtgcgggcaacagccagtgcagcctgtggtggattatccacccagcgtattagaccactgccgatgggtccccactgttttagactgatggcagaacgatactcaaatcggcatgcagaatctcaggttcgctgtgttccgctgcccgctcggccctgttcctgactgaacaaatgccagcagacacccgcttccagcctgccggctcgccccgtccgctgcaccattgatgcctgactgatacgctgagtgatcaaacgggttaatcctgtccggggttcaaaccggctggtacgttccagaccactatccaccaccagacgaatgccttcaatagtcaggctggtttctgcaatattggtcgccagtacaaccttacgctttcctgccggagctggcattatcgccatccgctgatctgttaacgataacgcaccatatagcggacacaataatgtatcgctaccgactttttcttctaagtaagcctgcacccgctgaatttccctcacaccgggtaaaaacagcagtaatgacccagactcctgctgcaacaaacgtaatactgttgacgccactgattgttcaaaaggcagatgagcaggcaggggatgatagcttctcgttaccggataactgcgcccttctgaaaccacaaccggtgcttctggtaataaagaagaaaggcgctggttatccagcgttgcagacatcaccagaatacgcaaatcatcccgtaatccttcctgtacatctaacaacagtgctaaagccaaatcagcctgtaagctacgttcgtgaaactcatcaaggataacgagagagacaccactcaattcaggatcctgttgcaacatccggttcagaataccttctgtgacgacttcaagacgtgtgtgagcactgacttttgtttccagacgcatccggtaacccaccgttctgccgacaggctcattcaattgttctgccagacgctccgcaacactacgtgccgcaatacgccggggttccagcatgatgatccgcccactaaaccgtgatttgttgagaattgccagcggtaggccggttgattttccggcaccggtcggggcatgcagtaatacctgttttgaagtttccagctgagctatgactgaatccacaacgtcataaatgggtaataacaaaggttcaccataatgattaactttcaatgagtgccattgtagcattagcgactttaatttcagtttccgtttaattttagttcatgtgactccgtgcaggttaagtcatcatgaaactgttggttcaggtataaaggaaagtttatggaattttcaccaccgctaaagcacgctacattaattcgccgttataaacgttttctggccgatgttctgactccggaaggtgaaacgctgaccatacactgtgccaataccggagcaatgaccggatgcgcaacaccgggtgataccgtttggtattccacctctgataacccaaaacgtaaataccccaatagctgggagttaacgcagactcaggacgggcactggatttgtgtcaatacacacagggccaacgatctggtttttcaggccattgaaaacgatctcatttcagaattatccggttacgaaaaaatcagccgtgaagtgggctatggaaaagagaaaagccggatagatttattgttagagtcaaaacaaaaagttaactgctatattgaagtgaaatcagtcaccctgttgcagggaaataatggttattttcctgatgctgtgacaattcgtgggcaaaaacatttacgtgaactatcattgatagcacaacagggacagcgggctgtcctgtgctttgccgtgctacattccggcattagtcacgttatggcagcaaaacatattgaccacgattatgcttttcttttggaacaagcatgcaatttaggggtcgaagtaatctgttacggggccagcatgacagaaaacaggatggttctaagtcacaaattgccttttgtatcaatgggatgatttgtaaacagatcatgctgatgaggtgagttttgcagcatatttaggcagtaaacacggctgccttcacaccattgcaaaactaatggtaggaataattgccaacctcgcagtcatctgctatttatagcggcctatttttttccccctactgtcagggggctcgtttgatagtgc

SEQ ID NO: 2858 - DNA, 21271 bp, Xenorhabdus sp.; identical to SEQ ID NO: 2857
  CDS (14889)..(15167)

SEQ ID NO: 2859 - DNA, 21271 bp, Xenorhabdus sp.; identical to SEQ ID NO: 2857
  CDS (12052)..(13335)

SEQ ID NO: 2860 - DNA, 21271 bp, Xenorhabdus sp.; identical to SEQ ID NO: 2857
  CDS (10832)..(11110)

SEQ ID NO: 2861 - DNA, 21271 bp, Xenorhabdus sp.; identical to SEQ ID NO: 2857
  CDS (10524)..(10793)

SEQ ID NO: 2862 - DNA, 21271 bp, Xenorhabdus sp.; identical to SEQ ID NO: 2857
  CDS (9624)..(10403)

SEQ ID NO: 2863 - DNA, 21271 bp, Xenorhabdus sp.; identical to SEQ ID NO: 2857
  CDS (8791)..(9489)

SEQ ID NO: 2864 - DNA, 21271 bp, Xenorhabdus sp.; identical to SEQ ID NO: 2857
  CDS (4643)..(7000)

SEQ ID NO: 2865 - DNA, 19145 bp, Xenorhabdus sp.
  CDS (94)..(1065)
taaagggtttttcaagtacaatcaataaaacgtgatatctattgatatactaattaatgagcacttctctgaatcagagtccgaagccaaaacatgaacttagaatcgataattaaacttacagctgatgatatggcagcggttaatgaaaccattcttaaccaattaaattctgatgttgcgcttatcaaccagcttggctattacattattagtggcggtggcaaacgcattcgcccaatgattgccgtgctggtcgctaaggcactgggtcatgagggagagaaacatatcaaagttgctgccctgatagaatttattcatacagcaaccctgcttcatgatgatgtcgtagatgaatccgacatgcgtcgcggtcgggcaacggctaatgccatgtatggcaatgcagccggggtactggtcggtgattttatctatacccgttcgtttcaaatgatgactgacctcaactcaatgcgcgtgctgaaactgatgtccgatgccacgaatgtcattgcagaaggcgaagtgatgcagttgatgaattgtaatgatccggatatttcagaagatgattacatgcgcgtcatttacagcaaaacggcgcgcctgtttgaagtggcatcacattcttccgctattttgtccaatgcaaccccggagcaggaagctgcactacgcgattatggtcgctatcttggtactgcattccagttgatcgatgatcttttagattacgattccgatgataatacgctcggaaaaaataccggggatgatctgaatgaaggtaagccgacgcttccgctcttgcatgcgatgaatcacggaactcctgagcagtcggcattgatccgcgaggcgattgaaaaaggtaatggccgccatttgttggatactgtgcttacaacgatgaaacagtgtggttcactcaattacacccgccaacgggccgaggaagaagctgataaggcaatttcagcgttacaagtacttgatgagtctccatacaaagcggcccttgtgggacttgcccatatcgctgtacagcgactttcctgagcttatgcaatcagtatctcagactgaacagtctgagatactgcctttgttttcaaattcttgaattcctgtgtattgtacaagactggctagtcctttgcgtaaaatgaacttaaccatgcgctccctttcgggcttggtcagttgataataagcttccacccaaatcataaacggatcttgccgtttgttccggtagtactcaacagagctttcactcacggccagtacattcagaacatcttcaggcagactgttgacatgatattcgagcgcttttccctgcaccccacgcttacgacgctgttcccaaccttcacgtcttgccatcaggtttaccccctgaggggatgatggcagaccagcgaggccaatgagctcctttgcagaataccattcttttttcatctctctctcctcgcttattaccggagcagtaaagagaaaaccaaattttataccctttgtttttcaatttggcttttcaaaagctgactcaggtagctagaattttttccaaaaaacttcttataccatctcttagtatcacttctgtaattacctccttttcttcatctgtgagtaaattaaatgcacttacccaaatagatagagggtcttgtttctgaacctgatattcaggcgatatttcattaagttcgagagctgctaatgttgtttcaggaaaacaagaatagtgatattcaattgctctgccctgaacacccgctcgcttttgtctcatccattcttcacgtttcgctctggcattcactccttgtggtgatctaggtaactcacctacaccggtcaactccattgccgtataccactcttttttcataatgtttctctatttttgtaaccaagttcaaaaaagaagttattaagaaaaaattagaaatatttttagaaaaaataatgttattttattttcttaataacagatccatgttcgttattaatttcactctaacgctttagttataccactaatgtggctctaaatttaataggaaaggattaaaaaaatgatttctatgaaatcggattggcatcctgctgatattattgctgctttacgtaaacgtggaacaactctggccgctgtttcccgtgaatcaggattaagctcatcaactttggcgaatactctttctcgcccatggcccaagggagaatggataatagcaaattatttaggtattcatccgtctgaaatatggcccagccgttatttcgatccccatactggagaattattagaaaggaaagtcagagagaaaaaagaataattagctatcaatataattattgaaaagaaaaaccgctaactctatttaagttagcggttttagttatctaatatatttaagttaattcgtatattaataaatttagaattaatttaattaaccattaataaatttttcgcctaattcaatatcttttttcagaacgtctaacatattattcagtgcgttttgttcaaactcactcagctgaccaatatctaaacgttcttcaataccatttttacctaagcgaataggttgtgcgaagaagcgagcgtgttcgccatcaccttctacatagctgcattcgataacattgctgtcaccctgcaaagcacggatcagggagaggccgaaacgggcagctgcttgtcccatagacaaagttgcagatccgccacccgcttttgcttcaacaacttcagtaccggcattctggatacgttttgtcagagcttcaacttcttcagcagtgaagctaacaccagggatctgagacagtaatggcagaatagttaccccagagtgaccaccaataacaggaacttccagctcttctggttttttgcctttcagttcagcaatgaaggtattagagcggataatatccagcgttgttataccaaacagacggtttttatcgtacacaccctcttttttcagaacttcagcagcgattgctacagtcgtgttcacagggttagtaataattccgattaatgctttcgggcatgttttagcgatctgctgaaccagattacggataatgcctgcattaatattaaatagatctgaacgatccataccaggtttacgcgctacaccagcagaaatcaatacaacatctgcgcctgccaatgcaggagttgcatcttcacccgcaaaaccagtgaccttcactgctgtcgggatatggctcagatcggcagcaacgcctggggttactggggcaatgtcatacaaagaaagttctgaacctgaaggaagctgggtcttgagtagaagggcaagtgcctgaccaataccaccggctgcaccgagaactgcaactttcatcctgatactcctttaaaaattaagtgctgtaataaactgaaatctgtctggttaagaggctcaatttaccatattcaatacaggtatgggataagccttctgccttactcatcactacgtattaaaaacaatctgttaacagccagattatctacctaatagcctgaggatggaacaccaaagttctttattttagacaaaatgcttatctgttaatgagataacgggcacttttttaggaattattcttgctatcttatgaattaatgagttaattaatctgttcttctcttttactgctagtgattccattttattaacaatacatttaccttgttcaatcatgtaattatgcatcctgtcacggtctttccgtcccttccttgcataaaaattcacacttttgcataatattgacttcataacggatttaacgatggtgaaatatgcgaattccttcgaaacaggaagatttggtaaaagcgttcaaagcattactgaaagaagaaaaattcagttctcagggtgagattgttgcagcacttcaggaagaaggctttgaaaacattaaccagtctaaagtttccagaatgctgacaaaatttggtgcagtcagaacccgcaatgcaaaaatggaaatggtctactgtctgccagctgaattaggtgttcctactgccaccagcccattaaaaaatctggtattggatgtcgattataatcattcagtcgtggttattcgcactagccccggcgcagctcagttgattgcacgtttactggattcattaggtaaagctgaagggatccttggcagcatcgcaggggatgatacggttttttctaccccgacaaaggccgttacaacggcacagctctatgaagcaatactcaatttgtttgatcaagaactgtaaattaataataggttaaacgctatttagccacacagaggatcgcccgatcattgcgatcctctcatatgaacaatcaggccgcctgttccttcttgttcaacgccgccagtaatttctcatgaataccaccaaaaccaccgttgctcataatcaagatatgatcgccgggctgagctgattcaacgatcatcctcaccaacgcatcaatatcagaacaccaacgggcgggttgaatacactgttcggcaatctcagcaacttgccacggaatattaccgggctgaaacaggaatacttcatctgcacggcccagagaaggagctatctcatttttgctcatgccgagtttcatcgtatttgagcgaggttccagaacagcaaggatacgagccataccccctgccttacttctcaacgcttccagcgttgccagaatggctgttgggtgatgagcaaaatcatcgtaaatcgaaatgccattcacctcacctactaactccagacggcgacgggcattaataaagtcactcaatacctgacaagcgtccgcaggttgcactccaacatggtaagctgctgcaatggccattaagccattatgcatattatgttcacccactaatgaccagctaactttaccgaccaactcaccatgatggaacacctgataagtactgctgtcctgagtcgtttttttggcctgccagctccctgtttcaccggtatattccaattcactccaacatcccatgccgataacctgtttcagattaatgtcatggtcgggggccaggatcttaccggttcccggcacaactctgacaaggtggtggaattgtttttgaatcgccgccaaattttcgaaaatatcagcatgatcgaactcaagattgttcataacgagcgtgcgggggctgtagtgaacgaattttgaacgcttgtcaaaaaaagcgcaatcatactcatccgcttcaatcacgaaaaacgggctttcacccagttgtgctgaaacttcaaaattacccggtacgccgccgatcaaaaatcccggcttataaccacaggcttccagaatccatgccagcattccggccgttgtcgttttgccatgtgttcctgcaaccgccagaacccaacgctccggcaaaacatgatcatgcagccattgcggaccggatgtataaggaataccacgatccaaaaccgcctcaacacaaggattgccccgtgtcatggcattaccgatgatcaccatatctggcacaggattgagttgtgaaggatcgtatccctggatcagttcaataccctgattttccaacagagtactcataggaggatacacattggcgtcggaaccggtcacttcgtggcctaacgagcgagcgaggatagccagccctcccatgaaagttccgcaaatgccaagaatatgaatacgcatttatttctatccgatatcatgaagtgtatcactattctaaccatcaaatcatagattagaaatgcaatgacctatcaatcattctattctttagctaaactgcccgcacttaagtgcaacacgcatgtgatgcactcttttaaaatcataaccaaatcagggccttcgtcatgaaaacattaggcgaattcatcgtcgaaaaacagcacgactttcctcatgctacaggtgaattgaccgcattactttctgctatcaaactgggtgccaagatcattcatcgggacatcaataaagcgggtctcgtggatattctgggcactagcggtgtttcaaatgttcagggtgaagttcagatgaagctggacttgtatgccaatgaaaaactcaaggcagcactgaaagctcgcggtgaagtagctggtatcgcttctgaagaagaagacgatatcgtcatctttgatggcgaccgggcagaaaatgcaaaatatgttgttttgatggatccactggatggttcttcgaatattgatgtaaacgtttccgttggtactattttctctatttaccaccgaattacaccaatcgggcaaccggttactgaagaagactttctgcaaccgggccatcgtcaggttgcggctggttatgtcgtctacggctcatccaccatgttggtttacactactggctgtggtgttcataccttcacttatgatccttctctgggtgtattctgcctgacccatgaaaaagttcagttcccggcaaaaggcaatatgtactccattaacgaagggaactacattaaattccctcaaggtgtgaagaaatacatcaaatattgtcaggagcaggatgaagaaactcagcgcccttacactacccgttatgtcggttcactcgttgctgacttccatcgcaacctgctgaaaggcggtatttacatttacccaagtacagccagccatccgaccggcaaattacgcctgttatatgagtgcaacccgattgcattcctggctgaacaggctggcggtaaagccagtgacggtacaaaccggatactggatatcgtaccaaatcagttgcaccagcgcgttccactgtttgtcggaaccaaatcgatggtggaaaaagccgaaagttttatggctgagtttcccgaagaataaatcgatttattaaatggttaattgaagagacggtgtttcgtctcttcttcataaagaaatacacctttcataaattatggttcactccgcggatcagaaaaatggaattactttaggcctgttttggctataataccccgcactccattttggtttgaaattgaaggaaaccttttatgagcctgaacaacgtaccggcgggtaaagaactgccagaagacatctacgttatcattgagatcccggcaaatgcggatccaattaaatatgaagtcgacaaagactccggcgctctgtttgtagaccgtttcatgtcaacggctatgttctatccgtgcaactacggttacatcaacaacactctgtcccttgatggtgacccggttgacgtactggttccaactccatacccattgcagccaggctccgttattcgctgccgcccggttggtatgctgaaaatgaccgatgaatccggtgaagatgctaaactgattgctgttcctcatactaaactgagcaaagaatacgatcacattaaagatgtgaacgatctgccagaattgctgcgctctcagattactcatttctttgaacactacaaagatctggaaaaaggcaagtgggtaaaagttgacggctgggaaaatgttgaagcagctaaagctgaaatcctgacttctttcgaacgtgctgccaaaaaataatactgacggataacagcaagttttgatcgtaaaaaacctctgtgttcttataggcacagaggttttttgtttagttatacacttcgtctttctagttgcctctttgttggctgcgttcgttcaccccagtcacatagttatctatgctcccgggggttctctcttttgccgcctcaatgcaccttgaaatccattgtgtatagtcaattagagtgatcctccacaaatacaatacagatcgttatttttcttcgtgacgtttcagccagtcaccactttctattcgggtaagaccctcgacagataacatatataaataaatccatgcgctgccgtagggggttttgatcaattccctttgatattcctgagtgttctttttcaaatcatccagttcagtcaaaatggatgatgtaatgcgataaacttcacattcaagagtgccttcgccgcggactaccgcgggataatgccccaggtcataaatttcatacccctcaagccgatgctctcctaaaagttgggcataggtcatccagtggtgattgccttgtttgcgcctcaggctaccataaacaataactcgcatcgttaaaactcaaactcatagagcagatctaaagcctgatcaataccagataccgcttccagatacaatcttggcatcacccggtaacgtagggtcagagttgccagtgagtcaaaaattccaacgccatatttcacctgtaagtcgttggtaatcttaccactcacaacaacctgcgatttatcaccaattccctgtgtatccagagccaaatcagagacaccaaaggtttcacctattttgcctactaatttaccgctctgggcaacgccgaggccgatcaacatagaagtcatctgggagttgtcagagcctcccttttctaagccttcaccacgcaacaagtaagaaagtgcttcctgttgcgatttaaccggctcagagaaaatttcaattttaggcttatctgccagccccattaccctcacaccagcgatgacattattcgctgtcgattcaggattgcggattgcttcaatattcaacagtggttgatccggtgggccagagaacataatcagccccttgcgcacctgcaaatcctgcccataagcacgaaattgaccatccggaatatcaatttgaccattcagcgccagaccttgttgatcctgaataactttcagatttcctttcaactgggcattcaagccaaatgcattcaagcgaacatcattacctatgtgaatatttaagtcactttgaatcaaaatggaagactttttcttttctatcggctgaagatttttatccaacattacttcgtcagaagaaatacctacggcagattcaggtaactcctgaacagtgatgcgggcccatggaatacccacattaccattgagtttcagtaaatgaggtgttgcctcaaaaaccaaatcaggacttacatctattttaaccatgggtggcacagtaacccgcagtttatccccataggcagtgactctggcagaccaggcatttaaattacgccagtctgcatttccgtggagattaagctgtccctgaggcgttttaatgatcccttccaaatctgaacggacaccatcaaaataaacggataactgactctggttaatatcaaatggcaaccagtggctattaacctgaaaaacatctgccttcagaaaaccatataacaatggattcttggcactcccgccaagattcaagtttgcattcaaagttccgtcagctttttcacctttgtccaaaatgggcttaatcagattaagagaaagaaaacgggcatcgacattaccagataatttacgccgtccatccagatcatctatctgaacatgaccatctaattggccattaccgaccagtttaaacaaccacgataaatcaacctttccgtttttcaggcctgcattcagagtcagcctttcgaaatcaacgggtaacgtagaaccttccacaacctgccgaagctgaacaccatcaccttcaagcgccatttttacctgtggtaattgatgcccttccatccatttaacattagcattaccgctaaatattccttttagctgagttgtcttatccaaatatggctggatcatagcaagatcaaaacgctccagtacgatatcagcctgcccgctgctacctgcttctatcggtttcgggatacagagctgagcattcggattcagccaacaatgagtaccaacgattactttctgctgtaaattttggtaatcaaacgtcactgctttacttaaacgccactcgccaacaggcgtatcaaaataggtattattgatattacctttccagcgttcctgtttgcggtcaaaactgccattcagggccaaatggcctgatacagggctgccatccactcgtaattgcaagtcatgctgtctttctgtgcccttggcgttcagctccagattattgatagccaaatcggcctgtttcagctgctgaatgatgactgataaccggccttcaatttgatccgttgaccgtaaatcccctttaataaccgcgctatctaccgataaatcattctgccagcgcacaccacgcgcgtttaagtctgcaacgacctgaggtgctttgaggttgccacgtagtttcaaatcccccataaccacaccagacagccccggcaacaggccatttagttgtggcgcatgaatatcgccatccaactcccatttttcatcagtaagacggcctttaacatccagcgtattacgaccaaatatgacgttaaattgggggatatcccattgccccgctgcattaccggaaactttgccatgcattttgatactgttctgctttacatgaccatcaagggctatttcaggaagctgaagctgccagctcccgccatataagctacctcgaaccgctaccttgccatctattctggcaggccattccggccactgtttttcagtatcaataccatgtagttgcaactgagcattccagctaatggctttactccagtcaaccacacctgtgagatcggcattaccctgtaatgccgacaggcgcaaacgagtgagccggagcagctcctcatttcccttcgcatccagaaccaataaggccggaggaagttcattccctttaatatcagaacgcagggaaaggtcataatcgctggctttaccattcaggtgtaacctgacatcattcagctgatattccgctttttccgttaatggccactgtaggtgtttactaaccagtgtcaggcgcataggcaggtttgctttagctaattccgtctgaacattcagatccgcatccaccggccctgcaagctttaatgctagattaagttgctgtaacaaagcaccatccagttttgcctgaaaatgttgtcctttcacgggttccagcgtagtactacccttaattgacaatttaaccggccactgttcagcaagttttgccgttccctgtattaccagagagccttccggcgcactcacgctaaagtttttgatctctacatcctgcccctgattactggctttcagctccacatcattgatggtgatatcagtatctcccgccaaacgaagctggcgaccgtgaatattttctaccgtgatatcaagaggaataggaaccgcaggcaagtctgccaaaagtggcttggcaaacagcgtctttaaaacttcacccaatgattgttcagattcagtttttggccggggtttttgttcagtaggctcaataggctttttgggtagtgcaaccaaaagattactgatttgtatcggttttaatgtcagatgcttttcctgccactgtgctcccgcattaaattcacctaaatcaatcgcgatatcgtcgactttgacgtggatattctttaaggaaagaagatccaactcgataggatacggcgttttcaattcagttaatggctcagaatccggcgatttttctgaaggcggaagttcagcggtattaaccagaacagagaccccttccgttgtcagggcattggcgcagatatgactgcgatgtaaacaggaaagccgtagtgagaggtgaaaattatcagcattaacatcaatacccggcatcttatatttaatgcctttcagtgttaaatcacgccagccgccactgacacttgctatctccagccccggaaccaaacgcgttgcactgttgatcataaaatgcaggccggtttgtgtagtcaccaatcccacaactgtgatgagcaacaggccaacaatcagcaggaaagcaatactaactctttttacccacctcatagttcagcccctaagccaatgtaaaactgaacctcatgattatttttgtcccctacaggagaagcaaggtcgaacttaatcggcccgacgggagaagcccagcgcacaccaatacctgcaccggttttgaagttactccttttgatatcattgactgcttcaccggtatccacaaacatagctccccaccaattaccatgaacattgtattgatactccagcgagccaataaccagttttgatgcacccgtcaatttaccatcactgtctttaggtgaaattttctgatatttgtaaccacgaatactgcgatcgcccccagcgaagaaacgcaaatcaggtggcactcgctcaaattgattggtttctatccagccaagatcgccgcgcacaacaaaacgatgtttatcacgtaacgtcctgacccagacgtggtgagcctgtaaaaccataaagtcgacatctgaatgccaggttgtatcagagatatcaattgagtagcgctggctatccccccagtaaggcatcgtgcctccacgctggcggattcggctgacattagctcccggataaagcaacgcagtggtgtttgtcacattagcctgcgtaaagtgactgaggctccagcgcagattgacaccataccgccagccggtggagagatcccagttgcgggagaggtttaaagttgctgtatcagaagtggtatcgttaagttctttacgtttataaccggtttgcaattcgtagtactgctcaagcgggttagccttaagtggcattttataagacgcgtcaatcacctgatcacgtctggaaacattgatactggtgcttaaactatgccctcgggaattcagccacggttttttccattttacctgaactcggggaccaacatctgttgcataccctccacctaactcaacatagttagcagagcgggggactaatgaagcatccagtggtaatattttatctttactctcgcgaccggttttaaaatcaggtacgacaaccgcggagttgaaccagccggtatctgccaaacgacggttaagttctgccagctcttccgaagagtagtaatcaccctctttaaatggcaccagattattcaggtagttttcgcggatttgtgaaccctgaaatttaacagggccaaaacgataacgctgcccgctatcgaaatcaaaatcccagtaagatacatgccgttctttagagacttccagctcactttttttcatttcggcatcaaaataccctttcctgagagcaagattattcagcgcactcttaaaactttcatattcaccatgattcaggatcgtcccatctttcggcatattttttttgatcattgccgcataatcaggatcagttctggctccaccttccaaatcaaccttaacaccggcaatccgaaccggttctcctaaagtgacttttgctgttaaaaccggacgggaaggaggcgtattttcctgataagtgaattcaattgtaggctcataatatcccagtggcctgagtccttttcgtatagctttctcgacacgggcacgaaaacgtccatcgggagaaacttcatcagtactaatatttgagagctgcactctggcatttttttccagttcgccagaaagtccttccactttcaatcgtaaatttgcactataaaccgatggagttgcgatagacacacaaagcacaaatatgaaagagtatcgtgacacgctaactcctaatacatttatttaggggtaatattcagcagtataaaaattctgccataaattaattttggtaaagctttatagatacacaagtaactctataaccataaaatagatgataaacaggagagaatcttgccaaattcaactaacgaaagccaacatgtttctgaacaaagtgcattacccggtagagaattaccattaactgtatcaccctatcattacgttacacagcatgcgatagataacattcctgaaaatatggaaattgcttatgtaggaatgggatgtttctggggtgtcgaacgcctgttctggcaacaggaaggggtttataccacttcagccggctacagtggcggcatcacgcccaatccgacctatgaagaggtttgttcaggattaaccggacatgctgaagttgtcagaattgtgtttgacccgacaaaaattacctatagccaattattaaaactgttctgggaaaatcacgatccggcacaggggatgcgtcagcatggtgatattggtacacaatatcgttcagctctttataccgtttctcctgagcaatatgctcaggcagtcgcaagtctcgaacaatatcagttggcgatggatgagaatggcgatcagcgcacgatcaccacagcgatccgggcagccggaccattctattttgcggaagattaccaccagcaatacctgatgaaaaaccctgaagggtactgtgggctgggaggaacggggatctgttttccacctacgtccagaaactagccagtttagtcaacccaatgttataattacttgactaaattcatttatcttacggcatattattagtgccgtaagtttttatttgtgtaatttttcactcctttcttcagtgttattcaaataaaaaactaccctgccactgaagataagacatggatactttatgttaaacagtttattaatcatactattgctttgtgctatcagcgcatttttttcgttatctgaaatttctctggctgcttcaagaagaataaaactaaaactaatggtgaacgaggggaatattaatgcagcccgcgttcttaagttacaggaaactccgggccggttttttactgtagtacaaattggtctgaatgcagtagcaatcctcgctggtgttgttggagaatcggcattttcgcctgccattaagtcactactgacccgtttcatgccccatgactgggcagagcaactcggctttatctgctcttttattatcgtaaccagccttttcattctacttgctgatctaacacccaaacgtcttgggatgattaagcctgaagccgttgctatccggattgttaacccaatgcgtttttgtctggcaatatcccggcctttagtctggctgttcaatgggcttgccgactgcatattcaagatctttaaaatcccgatggcccgtaatgaagatattacctctgatgatatttatgctgtcgttgaggctggagctgtcgctggtgtattacgtaagcaagagcatgagttaattgaaaatgttttcgagctggaatcccgtacggttccgtctgccatgacctcccgcgaaagtgtggtttattttgataagaatgaagacgaaaacagtatcaaagaaaagatttctactcatccacactcgaaattccttgtttgcgacggcgatatcgatcatgtcatgggctacgttgattccaaagatttactgaaccgtgtcctgagtgggcaaagtctcaacctgaaaaatggtgttcaaatccgcaatgcactgatgatccctgataccctttcgctatctgacacactggaaagcttcaaggctgccggagatgactttgccatcattctgaatgaatacgcactggtaatgggtgtgataacgctgaatgatgttatgacgactttaatgggcgatttaatcggtcaggggcaggaagaacagattgttgtccgtgatgaaaattcgtggttagtcgaaggcggcacacctatagaagatgtgttacgcgttctggatattgaagacttccccgattccagcaattatgaaacgattgctggttttatgatgttccgcctgcggaaaattccgaagcgtactgattatgtgaagttcagcggatataaattcgaagtggtagatattgataattataaaatcgaccaattactggtaaccaaaattgttgatactccacccccttccagtagcccaacagaatcggcaatatctgaataaatcccaataagaaacaccaacaaaaaacggccgaaaggccgttcattcagttcccaaaactattttattttggaactaccccatttcggcttgtagaagcaacacctgctggttaacttcactcatgacattgaaatggcgtttatcttttattttgggaggcagaattttcccataattaaattcaaaggcacccatgtctttgatgtataaccttccacggaatagggtttttacgtagagagcaatttttagtggattatagcgctgaaagattttcatctcttttttactcctccatgcttcttacgatactatttttctgtactgcacaattagtgaatcaaaaggcacatcacggctgtgtacgttctatagactctgcatctggaaattcgttcccgaatactgaagattcaaccgctgttttggcgtaacataatgaaaaaatagagcattatgttatccttgttgaaggtttacttatattttattttaaatgttaccaaattgttttattttatgagagcagaccagttaacagtcgctatgctgggtatgatactccctgataacatgtcacatcatgctaagtaaggaataaatatgctaagaaacatagtgttagctttaatattgagtttaacttcaattactgcatttgctcataacattactgtcgggcaacctgtgcctgccgtaattatagcagacaaaggtgaactccttctcaacaacggtaagtttagctatcagcaatggagcagtgcagaactgccggggaaagtcagaactatccagcatattgccggacgcagctctgccaaagagatgaatgaccctcttattcaggccctaaaagccgctgatctcccgaaagataaatatcagacaaccagcgttgtaaacactgatgatgctatcttcggcaccagtgctttcgtccgtagcagccttgaagacagtaagaaagaattcccgtggtcacaatttattgtcgatagtgacggtgttgccaaacaagcatggggtctggaacctaaaagttcagcaattattgtgttggataaaaacggtatcgtacagtttgtcaaagatggcaagttgaacaatgaagatatcaagcacgtccttgctttgatcaaagaagaactgaaaaactaatcggttatcttaaaaatatccgatgatattggctggtgataatggtttcgtcaggaaccattatcattttaccccattaaaaaatcgtcaccctaaatcccgggtttaaaaacgattcacgcggcgtatagtccagcgttttacctgcccagtcagtaacatgcccgcctgcagcaagtgcaacagcatggcctgcggcagtatcccagatatttgtcggcccgaagcgaggataaagctgggctttcccttcagctaccatacaaaatttaagtgatgatccgactgacagtgtttggtgagcccctaactgagtaagataatccctcagctcatcatccatatgagaacgactaaccacgacagtgggtggtgttgcagagacaactttgattgggaatttctgcccgttagtttccttccatgcatgccgctcatgccctgaataaaggacatcacgtactgggacatacacaacccccatgacaggaacaccctcttcaatcagtgcgatattgaccgtaaattcaccattccgattaatgaattctttcgtgccatccaatgggtcaaccagccagtaacgacgccagttttttctctcatcccatgtcggtgggtcttcctctgatatcaatggaatatcaggtgaaatacgtgtcagtcctgctttgatgatcttatgagcggcaatatccgcagcagtaacgggtgaatcatcggttttatgctttatttgcatcggttgctcatcatgataaacggacatgatggctgcgcctgcttcccgtgcaagttggcagatctgttgtaacatatacacctctgcattttctaaaataaaatagccggttatccagctattttattgttcagaattacaggatctcaagtaattctacttcaaagatcagagtgctgtaaggaggaatggaagcacctgcaccgcgctcaccgtaggccaggttgtgagggatatagagttcccacttggagccaacaggcatcagcgtcagagcttcaatccagcctgggataacgccgctgacaggaaattctgctggcgttccacgctgtacagaactgtcaaatacagtgccatcgatcagacgaccggtgtagtgaacacgaacacggtcactgcgagccggaattgcgccatcaccctgagtcagaacagagaactgcaaaccagactcagtgctgctcacaccttcacgctgtacgttttctgccaggaactttttgccttcttctgccatcgcctgctgacgctcacgacgaacaccatcggcacgctcatgtacttcacgcagagcacgatgcagttcttctacaggaagcgccggagcacggctttccagtgcatcacacagacctgccagtaaagcttctggctccagtccttgcaaaccggattcctgcaattgttgtccaacctgcaaaccaataccgtagcttgcacgtgcttcaatagattcaaaagaaggttttgtcatgaaattacctttattggataaataaaggctcaagcataacagccctgtctggatgggtaaacgcactaaggaattaaaaagagggagttttacttttgtaaaacattgtctattgctatactagagcataaattaagcaggaggagacacaattatggctgctgtcgttattcgtcaatctggaggagctaacattgttagtattccaaaagctattgtgaaaacactgaatctgcatactggctcaaagttagaactgtctattcaggataacagaattgtactcacaccaattgaagaagagttaactctggaatcactattagcaggaagtcccaaagaatgttttacaataacagaagaagataaagagtggcttaactccaagcctgttggtaaggaaatactctgatgtatgtaccaaaaaaaggaaaacattgttcattagattttgat

SEQ ID NO: 2866 - DNA, 19145 bp, Xenorhabdus sp.; identical to SEQ ID NO: 2865
  CDS (3863)..(4333)

SEQ ID NO: 2867 - DNA, 19145 bp, Xenorhabdus sp.; identical to SEQ ID NO: 2865
  CDS (5948)..(6952)

SEQ ID NO: 2868 - DNA, 19145 bp, Xenorhabdus sp.; identical to SEQ ID NO: 2865
  CDS (7129)..(7659)

SEQ ID NO: 2869 - DNA, 19145 bp, Xenorhabdus sp.; identical to SEQ ID NO: 2865
  CDS (13902)..(14534)

SEQ ID NO: 2870 - DNA, 19145 bp, Xenorhabdus sp.; identical to SEQ ID NO: 2865
  CDS (14698)..(16026)

SEQ ID NO: 2871 - DNA, 19145 bp, Xenorhabdus sp.; identical to SEQ ID NO: 2865
  CDS (16648)..(17190)

SEQ ID NO: 2872 - DNA, 19145 bp, Xenorhabdus sp.; identical to SEQ ID NO: 2865
  CDS (18844)..(19101)

SEQ ID NO: 2873 - DNA, 19145 bp, Xenorhabdus sp.
  CDS (17751)..(18062)
atcaaaatctaatgaacaatgttttcctttttttggtacatacatcagagtatttccttaccaacaggcttggagttaagccactctttatcttcttctgttattgtaaaacattctttgggacttcctgctaatagtgattccagagttaactcttcttcaattggtgtgagtacaattctgttatcctgaatagacagttctaactttgagccagtatgcagattcagtgttttcacaatagcttttggaatactaacaatgttagctcctccagattgacgaataacgacagcagccataattgtgtctcctcctgcttaatttatgctctagtatagcaatagacaatgttttacaaaagtaaaactccctctttttaattccttagtgcgtttacccatccagacagggctgttatgcttgagcctttatttatccaataaaggtaatttcatgacaaaaccttcttttgaatctattgaagcacgtgcaagctacggtattggtttgcaggttggacaacaattgcaggaatccggtttgcaaggactggagccagaagctttactggcaggtctgtgtgatgcactggaaagccgtgctccggcgcttcctgtagaagaactgcatcgtgctctgcgtgaagtacatgagcgtgccgatggtgttcgtcgtgagcgtcagcaggcgatggcagaagaaggcaaaaagttcctggcagaaaacgtacagcgtgaaggtgtgagcagcactgagtctggtttgcagttctctgttctgactcagggtgatggcgcaattccggctcgcagtgaccgtgttcgtgttcactacaccggtcgtctgatcgatggcactgtatttgacagttctgtacagcgtggaacgccagcagaatttcctgtcagcggcgttatcccaggctggattgaagctctgacgctgatgcctgttggctccaagtgggaactctatatccctcacaacctggcctacggtgagcgcggtgcaggtgcttccattcctccttacagcactctgatctttgaagtagaattacttgagatcctgtaattctgaacaataaaatagctggataaccggctattttattttagaaaatgcagaggtgtatatgttacaacagatctgccaacttgcacgggaagcaggcgcagccatcatgtccgtttatcatgatgagcaaccgatgcaaataaagcataaaaccgatgattcacccgttactgctgcggatattgccgctcataagatcatcaaagcaggactgacacgtatttcacctgatattccattgatatcagaggaagacccaccgacatgggatgagagaaaaaactggcgtcgttactggctggttgacccattggatggcacgaaagaattcattaatcggaatggtgaatttacggtcaatatcgcactgattgaagagggtgttcctgtcatgggggttgtgtatgtcccagtacgtgatgtcctttattcagggcatgagcggcatgcatggaaggaaactaacgggcagaaattcccaatcaaagttgtctctgcaacaccacccactgtcgtggttagtcgttctcatatggatgatgagctgagggattatcttactcagttaggggctcaccaaacactgtcagtcggatcatcacttaaattttgtatggtagctgaagggaaagcccagctttatcctcgcttcgggccgacaaatatctgggatactgccgcaggccatgctgttgcacttgctgcaggcgggcatgttactgactgggcaggtaaaacgctggactatacgccgcgtgaatcgtttttaaacccgggatttagggtgacgattttttaatggggtaaaatgataatggttcctgacgaaaccattatcaccagccaatatcatcggatatttttaagataaccgattagtttttcagttcttctttgatcaaagcaaggacgtgcttgatatcttcattgttcaacttgccatctttgacaaactgtacgataccgtttttatccaacacaataattgctgaacttttaggttccagaccccatgcttgtttggcaacaccgtcactatcgacaataaattgtgaccacgggaattctttcttactgtcttcaaggctgctacggacgaaagcactggtgccgaagatagcatcatcagtgtttacaacgctggttgtctgatatttatctttcgggagatcagcggcttttagggcctgaataagagggtcattcatctctttggcagagctgcgtccggcaatatgctggatagttctgactttccccggcagttctgcactgctccattgctgatagctaaacttaccgttgttgagaaggagttcacctttgtctgctataattacggcaggcacaggttgcccgacagtaatgttatgagcaaatgcagtaattgaagttaaactcaatattaaagctaacactatgtttcttagcatatttattccttacttagcatgatgtgacatgttatcagggagtatcatacccagcatagcgactgttaactggtctgctctcataaaataaaacaatttggtaacatttaaaataaaatataagtaaaccttcaacaaggataacataatgctctattttttcattatgttacgccaaaacagcggttgaatcttcagtattcgggaacgaatttccagatgcagagtctatagaacgtacacagccgtgatgtgccttttgattcactaattgtgcagtacagaaaaatagtatcgtaagaagcatggaggagtaaaaaagagatgaaaatctttcagcgctataatccactaaaaattgctctctacgtaaaaaccctattccgtggaaggttatacatcaaagacatgggtgcctttgaatttaattatgggaaaattctgcctcccaaaataaaagataaacgccatttcaatgtcatgagtgaagttaaccagcaggtgttgcttctacaagccgaaatggggtagttccaaaataaaatagttttgggaactgaatgaacggcctttcggccgttttttgttggtgtttcttattgggatttattcagatattgccgattctgttgggctactggaagggggtggagtatcaacaattttggttaccagtaattggtcgattttataattatcaatatctaccacttcgaatttatatccgctgaacttcacataatcagtacgcttcggaattttccgcaggcggaacatcataaaaccagcaatcgtttcataattgctggaatcggggaagtcttcaatatccagaacgcgtaacacatcttctataggtgtgccgccttcgactaaccacgaattttcatcacggacaacaatctgttcttcctgcccctgaccgattaaatcgcccattaaagtcgtcataacatcattcagcgttatcacacccattaccagtgcgtattcattcagaatgatggcaaagtcatctccggcagccttgaagctttccagtgtgtcagatagcgaaagggtatcagggatcatcagtgcattgcggatttgaacaccatttttcaggttgagactttgcccactcaggacacggttcagtaaatctttggaatcaacgtagcccatgacatgatcgatatcgccgtcgcaaacaaggaatttcgagtgtggatgagtagaaatcttttctttgatactgttttcgtcttcattcttatcaaaataaaccacactttcgcgggaggtcatggcagacggaaccgtacgggattccagctcgaaaacattttcaattaactcatgctcttgcttacgtaatacaccagcgacagctccagcctcaacgacagcataaatatcatcagaggtaatatcttcattacgggccatcgggattttaaagatcttgaatatgcagtcggcaagcccattgaacagccagactaaaggccgggatattgccagacaaaaacgcattgggttaacaatccggatagcaacggcttcaggcttaatcatcccaagacgtttgggtgttagatcagcaagtagaatgaaaaggctggttacgataataaaagagcagataaagccgagttgctctgcccagtcatggggcatgaaacgggtcagtagtgacttaatggcaggcgaaaatgccgattctccaacaacaccagcgaggattgctactgcattcagaccaatttgtactacagtaaaaaaccggcccggagtttcctgtaacttaagaacgcgggctgcattaatattcccctcgttcaccattagttttagttttattcttcttgaagcagccagagaaatttcagataacgaaaaaaatgcgctgatagcacaaagcaatagtatgattaataaactgtttaacataaagtatccatgtcttatcttcagtggcagggtagttttttatttgaataacactgaagaaaggagtgaaaaattacacaaataaaaacttacggcactaataatatgccgtaagataaatgaatttagtcaagtaattataacattgggttgactaaactggctagtttctggacgtaggtggaaaacagatccccgttcctcccagcccacagtacccttcagggtttttcatcaggtattgctggtggtaatcttccgcaaaatagaatggtccggctgcccggatcgctgtggtgatcgtgcgctgatcgccattctcatccatcgccaactgatattgttcgagacttgcgactgcctgagcatattgctcaggagaaacggtataaagagctgaacgatattgtgtaccaatatcaccatgctgacgcatcccctgtgccggatcgtgattttcccagaacagttttaataattggctataggtaatttttgtcgggtcaaacacaattctgacaacttcagcatgtccggttaatcctgaacaaacctcttcataggtcggattgggcgtgatgccgccactgtagccggctgaagtggtataaaccccttcctgttgccagaacaggcgttcgacaccccagaaacatcccattcctacataagcaatttccatattttcaggaatgttatctatcgcatgctgtgtaacgtaatgatagggtgatacagttaatggtaattctctaccgggtaatgcactttgttcagaaacatgttggctttcgttagttgaatttggcaagattctctcctgtttatcatctattttatggttatagagttacttgtgtatctataaagctttaccaaaattaatttatggcagaatttttatactgctgaatattacccctaaataaatgtattaggagttagcgtgtcacgatactctttcatatttgtgctttgtgtgtctatcgcaactccatcggtttatagtgcaaatttacgattgaaagtggaaggactttctggcgaactggaaaaaaatgccagagtgcagctctcaaatattagtactgatgaagtttctcccgatggacgttttcgtgcccgtgtcgagaaagctatacgaaaaggactcaggccactgggatattatgagcctacaattgaattcacttatcaggaaaatacgcctccttcccgtccggttttaacagcaaaagtcactttaggagaaccggttcggattgccggtgttaaggttgatttggaaggtggagccagaactgatcctgattatgcggcaatgatcaaaaaaaatatgccgaaagatgggacgatcctgaatcatggtgaatatgaaagttttaagagtgcgctgaataatcttgctctcaggaaagggtattttgatgccgaaatgaaaaaaagtgagctggaagtctctaaagaacggcatgtatcttactgggattttgatttcgatagcgggcagcgttatcgttttggccctgttaaatttcagggttcacaaatccgcgaaaactacctgaataatctggtgccatttaaagagggtgattactactcttcggaagagctggcagaacttaaccgtcgtttggcagataccggctggttcaactccgcggttgtcgtacctgattttaaaaccggtcgcgagagtaaagataaaatattaccactggatgcttcattagtcccccgctctgctaactatgttgagttaggtggagggtatgcaacagatgttggtccccgagttcaggtaaaatggaaaaaaccgtggctgaattcccgagggcatagtttaagcaccagtatcaatgtttccagacgtgatcaggtgattgacgcgtcttataaaatgccacttaaggctaacccgcttgagcagtactacgaattgcaaaccggttataaacgtaaagaacttaacgataccacttctgatacagcaactttaaacctctcccgcaactgggatctctccaccggctggcggtatggtgtcaatctgcgctggagcctcagtcactttacgcaggctaatgtgacaaacaccactgcgttgctttatccgggagctaatgtcagccgaatccgccagcgtggaggcacgatgccttactggggggatagccagcgctactcaattgatatctctgatacaacctggcattcagatgtcgactttatggttttacaggctcaccacgtctgggtcaggacgttacgtgataaacatcgttttgttgtgcgcggcgatcttggctggatagaaaccaatcaatttgagcgagtgccacctgatttgcgtttcttcgctgggggcgatcgcagtattcgtggttacaaatatcagaaaatttcacctaaagacagtgatggtaaattgacgggtgcatcaaaactggttattggctcgctggagtatcaatacaatgttcatggtaattggtggggagctatgtttgtggataccggtgaagcagtcaatgatatcaaaaggagtaacttcaaaaccggtgcaggtattggtgtgcgctgggcttctcccgtcgggccgattaagttcgaccttgcttctcctgtaggggacaaaaataatcatgaggttcagttttacattggcttaggggctgaactatgaggtgggtaaaaagagttagtattgctttcctgctgattgttggcctgttgctcatcacagttgtgggattggtgactacacaaaccggcctgcattttatgatcaacagtgcaacgcgtttggttccggggctggagatagcaagtgtcagtggcggctggcgtgatttaacactgaaaggcattaaatataagatgccgggtattgatgttaatgctgataattttcacctctcactacggctttcctgtttacatcgcagtcatatctgcgccaatgccctgacaacggaaggggtctctgttctggttaataccgctgaacttccgccttcagaaaaatcgccggattctgagccattaactgaattgaaaacgccgtatcctatcgagttggatcttctttccttaaagaatatccacgtcaaagtcgacgatatcgcgattgatttaggtgaatttaatgcgggagcacagtggcaggaaaagcatctgacattaaaaccgatacaaatcagtaatcttttggttgcactacccaaaaagcctattgagcctactgaacaaaaaccccggccaaaaactgaatctgaacaatcattgggtgaagttttaaagacgctgtttgccaagccacttttggcagacttgcctgcggttcctattcctcttgatatcacggtagaaaatattcacggtcgccagcttcgtttggcgggagatactgatatcaccatcaatgatgtggagctgaaagccagtaatcaggggcaggatgtagagatcaaaaactttagcgtgagtgcgccggaaggctctctggtaatacagggaacggcaaaacttgctgaacagtggccggttaaattgtcaattaagggtagtactacgctggaacccgtgaaaggacaacattttcaggcaaaactggatggtgctttgttacagcaacttaatctagcattaaagcttgcagggccggtggatgcggatctgaatgttcagacggaattagctaaagcaaacctgcctatgcgcctgacactggttagtaaacacctacagtggccattaacggaaaaagcggaatatcagctgaatgatgtcaggttacacctgaatggtaaagccagcgattatgacctttccctgcgttctgatattaaagggaatgaacttcctccggccttattggttctggatgcgaagggaaatgaggagctgctccggctcactcgtttgcgcctgtcggcattacagggtaatgccgatctcacaggtgtggttgactggagtaaagccattagctggaatgctcagttgcaactacatggtattgatactgaaaaacagtggccggaatggcctgccagaatagatggcaaggtagcggttcgaggtagcttatatggcgggagctggcagcttcagcttcctgaaatagcccttgatggtcatgtaaagcagaacagtatcaaaatgcatggcaaagtttccggtaatgcagcggggcaatgggatatcccccaatttaacgtcatatttggtcgtaatacgctggatgttaaaggccgtcttactgatgaaaaatgggagttggatggcgatattcatgcgccacaactaaatggcctgttgccggggctgtctggtgtggttatgggggatttgaaactacgtggcaacctcaaagcacctcaggtcgttgcagacttaaacgcgcgtggtgtgcgctggcagaatgatttatcggtagatagcgcggttattaaaggggatttacggtcaacggatcaaattgaaggccggttatcagtcatcattcagcagctgaaacaggccgatttggctatcaataatctggagctgaacgccaagggcacagaaagacagcatgacttgcaattacgagtggatggcagccctgtatcaggccatttggccctgaatggcagttttgaccgcaaacaggaacgctggaaaggtaatatcaataatacctattttgatacgcctgttggcgagtggcgtttaagtaaagcagtgacgtttgattaccaaaatttacagcagaaagtaatcgttggtactcattgttggctgaatccgaatgctcagctctgtatcccgaaaccgatagaagcaggtagcagcgggcaggctgatatcgtactggagcgttttgatcttgctatgatccagccatatttggataagacaactcagctaaaaggaatatttagcggtaatgctaatgttaaatggatggaagggcatcaattaccacaggtaaaaatggcgcttgaaggtgatggtgttcagcttcggcaggttgtggaaggttctacgttacccgttgatttcgaaaggctgactctgaatgcaggcctgaaaaacggaaaggttgatttatcgtggttgtttaaactggtcggtaatggccaattagatggtcatgttcagatagatgatctggatggacggcgtaaattatctggtaatgtcgatgcccgttttctttctcttaatctgattaagcccattttggacaaaggtgaaaaagctgacggaactttgaatgcaaacttgaatcttggcgggagtgccaagaatccattgttatatggttttctgaaggcagatgtttttcaggttaatagccactggttgccatttgatattaaccagagtcagttatccgtttattttgatggtgtccgttcagatttggaagggatcattaaaacgcctcagggacagcttaatctccacggaaatgcagactggcgtaatttaaatgcctggtctgccagagtcactgcctatggggataaactgcgggttactgtgccacccatggttaaaatagatgtaagtcctgatttggtttttgaggcaacacctcatttactgaaactcaatggtaatgtgggtattccatgggcccgcatcactgttcaggagttacctgaatctgccgtaggtatttcttctgacgaagtaatgttggataaaaatcttcagccgatagaaaagaaaaagtcttccattttgattcaaagtgacttaaatattcacataggtaatgatgttcgcttgaatgcatttggcttgaatgcccagttgaaaggaaatctgaaagttattcaggatcaacaaggtctggcgctgaatggtcaaattgatattccggatggtcaatttcgtgcttatgggcaggatttgcaggtgcgcaaggggctgattatgttctctggcccaccggatcaaccactgttgaatattgaagcaatccgcaatcctgaatcgacagcgaataatgtcatcgctggtgtgagggtaatggggctggcagataagcctaaaattgaaattttctctgagccggttaaatcgcaacaggaagcactttcttacttgttgcgtggtgaaggcttagaaaagggaggctctgacaactcccagatgacttctatgttgatcggcctcggcgttgcccagagcggtaaattagtaggcaaaataggtgaaacctttggtgtctctgatttggctctggatacacagggaattggtgataaatcgcaggttgttgtgagtggtaagattaccaacgacttacaggtgaaatatggcgttggaatttttgactcactggcaactctgaccctacgttaccgggtgatgccaagattgtatctggaagcggtatctggtattgatcaggctttagatctgctctatgagtttgagttttaacgatgcgagttattgtttatggtagcctgaggcgcaaacaaggcaatcaccactggatgacctatgcccaacttttaggagagcatcggcttgaggggtatgaaatttatgacctggggcattatcccgcggtagtccgcggcgaaggcactcttgaatgtgaagtttatcgcattacatcatccattttgactgaactggatgatttgaaaaagaacactcaggaatatcaaagggaattgatcaaaaccccctacggcagcgcatggatttatttatatatgttatctgtcgagggtcttacccgaatagaaagtggtgactggctgaaacgtcacgaagaaaaataacgatctgtattgtatttgtggaggatcactctaattgactatacacaatggatttcaaggtgcattgaggcggcaaaagagagaacccccgggagcatagataactatgtgactggggtgaacgaacgcagccaacaaagaggcaactagaaagacgaagtgtataactaaacaaaaaacctctgtgcctataagaacacagaggttttttacgatcaaaacttgctgttatccgtcagtattattttttggcagcacgttcgaaagaagtcaggatttcagctttagctgcttcaacattttcccagccgtcaacttttacccacttgcctttttccagatctttgtagtgttcaaagaaatgagtaatctgagagcgcagcaattctggcagatcgttcacatctttaatgtgatcgtattctttgctcagtttagtatgaggaacagcaatcagtttagcatcttcaccggattcatcggtcattttcagcataccaaccgggcggcagcgaataacggagcctggctgcaatgggtatggagttggaaccagtacgtcaaccgggtcaccatcaagggacagagtgttgttgatgtaaccgtagttgcacggatagaacatagccgttgacatgaaacggtctacaaacagagcgccggagtctttgtcgacttcatatttaattggatccgcatttgccgggatctcaatgataacgtagatgtcttctggcagttctttacccgccggtacgttgttcaggctcataaaaggtttccttcaatttcaaaccaaaatggagtgcggggtattatagccaaaacaggcctaaagtaattccatttttctgatccgcggagtgaaccataatttatgaaaggtgtatttctttatgaagaagagacgaaacaccgtctcttcaattaaccatttaataaatcgatttattcttcgggaaactcagccataaaactttcggctttttccaccatcgatttggttccgacaaacagtggaacgcgctggtgcaactgatttggtacgatatccagtatccggtttgtaccgtcactggctttaccgccagcctgttcagccaggaatgcaatcgggttgcactcatataacaggcgtaatttgccggtcggatggctggctgtacttgggtaaatgtaaataccgcctttcagcaggttgcgatggaagtcagcaacgagtgaaccgacataacgggtagtgtaagggcgctgagtttcttcatcctgctcctgacaatatttgatgtatttcttcacaccttgagggaatttaatgtagttcccttcgttaatggagtacatattgccttttgccgggaactgaactttttcatgggtcaggcagaatacacccagagaaggatcataagtgaaggtatgaacaccacagccagtagtgtaaaccaacatggtggatgagccgtagacgacataaccagccgcaacctgacgatggcccggttgcagaaagtcttcttcagtaaccggttgcccgattggtgtaattcggtggtaaatagagaaaatagtaccaacggaaacgtttacatcaatattcgaagaaccatccagtggatccatcaaaacaacatattttgcattttctgcccggtcgccatcaaagatgacgatatcgtcttcttcttcagaagcgataccagctacttcaccgcgagctttcagtgctgccttgagtttttcattggcatacaagtccagcttcatctgaacttcaccctgaacatttgaaacaccgctagtgcccagaatatccacgagacccgctttattgatgtcccgatgaatgatcttggcacccagtttgatagcagaaagtaatgcggtcaattcacctgtagcatgaggaaagtcgtgctgtttttcgacgatgaattcgcctaatgttttcatgacgaaggccctgatttggttatgattttaaaagagtgcatcacatgcgtgttgcacttaagtgcgggcagtttagctaaagaatagaatgattgataggtcattgcatttctaatctatgatttgatggttagaatagtgatacacttcatgatatcggatagaaataaatgcgtattcatattcttggcatttgcggaactttcatgggagggctggctatcctcgctcgctcgttaggccacgaagtgaccggttccgacgccaatgtgtatcctcctatgagtactctgttggaaaatcagggtattgaactgatccagggatacgatccttcacaactcaatcctgtgccagatatggtgatcatcggtaatgccatgacacggggcaatccttgtgttgaggcggttttggatcgtggtattccttatacatccggtccgcaatggctgcatgatcatgttttgccggagcgttgggttctggcggttgcaggaacacatggcaaaacgacaacggccggaatgctggcatggattctggaagcctgtggttataagccgggatttttgatcggcggcgtaccgggtaattttgaagtttcagcacaactgggtgaaagcccgtttttcgtgattgaagcggatgagtatgattgcgctttttttgacaagcgttcaaaattcgttcactacagcccccgcacgctcgttatgaacaatcttgagttcgatcatgctgatattttcgaaaatttggcggcgattcaaaaacaattccaccaccttgtcagagttgtgccgggaaccggtaagatcctggcccccgaccatgacattaatctgaaacaggttatcggcatgggatgttggagtgaattggaatataccggtgaaacagggagctggcaggccaaaaaaacgactcaggacagcagtacttatcaggtgttccatcatggtgagttggtcggtaaagttagctggtcattagtgggtgaacataatatgcataatggcttaatggccattgcagcagcttaccatgttggagtgcaacctgcggacgcttgtcaggtattgagtgactttattaatgcccgtcgccgtctggagttagtaggtgaggtgaatggcatttcgatttacgatgattttgctcatcacccaacagccattctggcaacgctggaagcgttgagaagtaaggcagggggtatggctcgtatccttgctgttctggaacctcgctcaaatacgatgaaactcggcatgagcaaaaatgagatagctccttctctgggccgtgcagatgaagtattcctgtttcagcccggtaatattccgtggcaagttgctgagattgccgaacagtgtattcaacccgcccgttggtgttctgatattgatgcgttggtgaggatgatcgttgaatcagctcagcccggcgatcatatcttgattatgagcaacggtggttttggtggtattcatgagaaattactggcggcgttgaacaagaaggaacaggcggcctgattgttcatatgagaggatcgcaatgatcgggcgatcctctgtgtggctaaatagcgtttaacctattattaatttacagttcttgatcaaacaaattgagtattgcttcatagagctgtgccgttgtaacggcctttgtcggggtagaaaaaaccgtatcatcccctgcgatgctgccaaggatcccttcagctttacctaatgaatccagtaaacgtgcaatcaactgagctgcgccggggctagtgcgaataaccacgactgaatgattataatcgacatccaataccagattttttaatgggctggtggcagtaggaacacctaattcagctggcagacagtagaccatttccatttttgcattgcgggttctgactgcaccaaattttgtcagcattctggaaactttagactggttaatgttttcaaagccttcttcctgaagtgctgcaacaatctcaccctgagaactgaatttttcttctttcagtaatgctttgaacgcttttaccaaatcttcctgtttcgaaggaattcgcatatttcaccatcgttaaatccgttatgaagtcaatattatgcaaaagtgtgaatttttatgcaaggaagggacggaaagaccgtgacaggatgcataattacatgattgaacaaggtaaatgtattgttaataaaatggaatcactagcagtaaaagagaagaacagattaattaactcattaattcataagatagcaagaataattcctaaaaaagtgcccgttatctcattaacagataagcattttgtctaaaataaagaactttggtgttccatcctcaggctattaggtagataatctggctgttaacagattgtttttaatacgtagtgatgagtaaggcagaaggcttatcccatacctgtattgaatatggtaaattgagcctcttaaccagacagatttcagtttattacagcacttaatttttaaaggagtatcaggatgaaagttgcagttctcggtgcagccggtggtattggtcaggcacttgcccttctactcaagacccagcttccttcaggttcagaactttctttgtatgacattgccccagtaaccccaggcgttgctgccgatctgagccatatcccgacagcagtgaaggtcactggttttgcgggtgaagatgcaactcctgcattggcaggcgcagatgttgtattgatttctgctggtgtagcgcgtaaacctggtatggatcgttcagatctatttaatattaatgcaggcattatccgtaatctggttcagcagatcgctaaaacatgcccgaaagcattaatcggaattattactaaccctgtgaacacgactgtagcaatcgctgctgaagttctgaaaaaagagggtgtgtacgataaaaaccgtctgtttggtataacaacgctggatattatccgctctaataccttcattgctgaactgaaaggcaaaaaaccagaagagctggaagttcctgttattggtggtcactctggggtaactattctgccattactgtctcagatccctggtgttagcttcactgctgaagaagttgaagctctgacaaaacgtatccagaatgccggtactgaagttgttgaagcaaaagcgggtggcggatctgcaactttgtctatgggacaagcagctgcccgtttcggcctctccctgatccgtgctttgcagggtgacagcaatgttatcgaatgcagctatgtagaaggtgatggcgaacacgctcgcttcttcgcacaacctattcgcttaggtaaaaatggtattgaagaacgtttagatattggtcagctgagtgagtttgaacaaaacgcactgaataatatgttagacgttctgaaaaaagatattgaattaggcgaaaaatttattaatggttaattaaattaattctaaatttattaatatacgaattaacttaaatatattagataactaaaaccgctaacttaaatagagttagcggtttttcttttcaataattatattgatagctaattattcttttttctctctgactttcctttctaataattctccagtatggggatcgaaataacggctgggccatatttcagacggatgaatacctaaataatttgctattatccattctcccttgggccatgggcgagaaagagtattcgccaaagttgatgagcttaatcctgattcacgggaaacagcggccagagttgttccacgtttacgtaaagcagcaataatatcagcaggatgccaatccgatttcatagaaatcatttttttaatcctttcctattaaatttagagccacattagtggtataactaaagcgttagagtgaaattaataacgaacatggatctgttattaagaaaataaaataacattattttttctaaaaatatttctaattttttcttaataacttcttttttgaacttggttacaaaaatagagaaacattatgaaaaaagagtggtatacggcaatggagttgaccggtgtaggtgagttacctagatcaccacaaggagtgaatgccagagcgaaacgtgaagaatggatgagacaaaagcgagcgggtgttcagggcagagcaattgaatatcactattcttgttttcctgaaacaacattagcagctctcgaacttaatgaaatatcgcctgaatatcaggttcagaaacaagaccctctatctatttgggtaagtgcatttaatttactcacagatgaagaaaaggaggtaattacagaagtgatactaagagatggtataagaagttttttggaaaaaattctagctacctgagtcagcttttgaaaagccaaattgaaaaacaaagggtataaaatttggttttctctttactgctccggtaataagcgaggagagagagatgaaaaaagaatggtattctgcaaaggagctcattggcctcgctggtctgccatcatcccctcagggggtaaacctgatggcaagacgtgaaggttgggaacagcgtcgtaagcgtggggtgcagggaaaagcgctcgaatatcatgtcaacagtctgcctgaagatgttctgaatgtactggccgtgagtgaaagctctgttgagtactaccggaacaaacggcaagatccgtttatgatttgggtggaagcttattatcaactgaccaagcccgaaagggagcgcatggttaagttcattttacgcaaaggactagccagtcttgtacaatacacaggaattcaagaatttgaaaacaaaggcagtatctcagactgttcagtctgagatactgattgcataagctcaggaaagtcgctgtacagcgatatgggcaagtcccacaagggccgctttgtatggagactcatcaagtacttgtaacgctgaaattgccttatcagcttcttcctcggcccgttggcgggtgtaattgagtgaaccacactgtttcatcgttgtaagcacagtatccaacaaatggcggccattacctttttcaatcgcctcgcggatcaatgccgactgctcaggagttccgtgattcatcgcatgcaagagcggaagcgtcggcttaccttcattcagatcatccccggtattttttccgagcgtattatcatcggaatcgtaatctaaaagatcatcgatcaactggaatgcagtaccaagatagcgaccataatcgcgtagtgcagcttcctgctccggggttgcattggacaaaatagcggaagaatgtgatgccacttcaaacaggcgcgccgttttgctgtaaatgacgcgcatgtaatcatcttctgaaatatccggatcattacaattcatcaactgcatcacttcgccttctgcaatgacattcgtggcatcggacatcagtttcagcacgcgcattgagttgaggtcagtcatcatttgaaacgaacgggtatagataaaatcaccgaccagtaccccggctgcattgccatacatggcattagccgttgcccgaccgcgacgcatgtcggattcatctacgacatcatcatgaagcagggttgctgtatgaataaattctatcagggcagcaactttgatatgtttctctccctcatgacccagtgccttagcgaccagcacggcaatcattgggcgaatgcgtttgccaccgccactaataatgtaatagccaagctggttgataagcgcaacatcagaatttaattggttaagaatggtttcattaaccgctgccatatcatcagctgtaagtttaattatcgattctaagttcatgttttggcttcggactctgattcagagaagtgctcattaattagtatatcaatagatatcacgttttattgattgtacttgaaaaacccttta

SEQ ID NO: 2874 - DNA, 19145 bp, Xenorhabdus sp.; identical to SEQ ID NO: 2873
  CDS (15730)..(16668)

SEQ ID NO: 2875 - DNA, 19145 bp, Xenorhabdus sp.; identical to SEQ ID NO: 2873
  CDS (13369)..(14739)

SEQ ID NO: 2876 - DNA, 19145 bp, Xenorhabdus sp.; identical to SEQ ID NO: 2873
  CDS (10952)..(11245)

SEQ ID NO: 2877 - DNA, 19145 bp, Xenorhabdus sp.; identical to SEQ ID NO: 2873
  CDS (7200)..(10895)

SEQ ID NO: 2878 - DNA, 19145 bp, Xenorhabdus sp.; identical to SEQ ID NO: 2873
  CDS (5425)..(7137)

SEQ ID NO: 2879 - DNA, 19145 bp, Xenorhabdus sp.; identical to SEQ ID NO: 2873
  CDS (1139)..(1879)

SEQ ID NO: 2880 - DNA, 19145 bp, Xenorhabdus sp.; identical to SEQ ID NO: 2873
  CDS (415)..(1077)

SEQ ID NO: 2881 - DNA, 18510 bp, Xenorhabdus sp.; identical to SEQ ID NO: 479
  CDS (18416)..(18508)

SEQ ID NO: 2882 - DNA, 18510 bp, Xenorhabdus sp.; identical to SEQ ID NO: 103
  CDS (5032)..(5211)

SEQ ID NO: 2883 - DNA, 18510 bp, Xenorhabdus sp.; identical to SEQ ID NO: 103
  CDS (8070)..(8915)

SEQ ID NO: 2884 - DNA, 18510 bp, Xenorhabdus sp.; identical to SEQ ID NO: 103
  CDS (12580)..(13152)

SEQ ID NO: 2885 - DNA, 18510 bp, Xenorhabdus sp.; identical to SEQ ID NO: 103
  CDS (13552)..(13857)

SEQ ID NO: 2886 - DNA, 18510 bp, Xenorhabdus sp.; identical to SEQ ID NO: 103
  CDS (16353)..(18131)

SEQ ID NO: 2887 - DNA, 18510 bp, Xenorhabdus sp.; identical to SEQ ID NO: 479
  CDS (17765)..(18241)

SEQ ID NO: 2888 - DNA, 18510 bp, Xenorhabdus sp.; identical to SEQ ID NO: 479
  CDS (14901)..(17714)

SEQ ID NO: 2889 - DNA, 18510 bp, Xenorhabdus sp.; identical to SEQ ID NO: 479
  CDS (13909)..(14841)

SEQ ID NO: 2890 - DNA, 18510 bp, Xenorhabdus sp.; identical to SEQ ID NO: 479
  CDS (10788)..(11972)

SEQ ID NO: 2891 - DNA, 18510 bp, Xenorhabdus sp.; identical to SEQ ID NO: 479
  CDS (8280)..(9437)

SEQ ID NO: 2892 - DNA, 18510 bp, Xenorhabdus sp.; identical to SEQ ID NO: 479
  CDS (6281)..(8194)

SEQ ID NO: 2893 - DNA, 941 bp, Xenorhabdus sp.
  CDS (414)..(542)
  unsure (1)..(941): unsure at all n locations
nnnnnnnnnnnnnnnnnnnnnnnnnnnnnnnnnnnnnnnnnnnnnnnnnnnnnnnnnnnnnnnnnnnnnnnnnnnnnnnnnnnnnnnnnnnnnnnnnnnnnnnnnnnnnnnnnnnnnnnnnnnnnnnnnnnnnnnnnnnnnnnnnnnnnnnnnnnnnnnnnnnnnnnnnnnnnnnnnnnnnnnnnnnnnnnnnnnnnnnnnnnnnnnnnnnnnnnnnnnnnnnnnnnnnnnnnnnnnnnnnnnnnnnnnnnnnnnnnnnnnnnnnnnnnnnnnnnnnnnnnnnnnnnnnnnnnnnnnnnnnnnnnnnnnnnnnnnnnnnnnnnnnnnnnnnnnnnnnnnnnnnnnnnnnnnnnnnnnnnnnnnnnnnnnnnnnnnnnnnnnnnnnnnnnnnnnnnnnnnnnnnnnnnnnnnnntgtacgcgggccatcaagcccggtgagcctgagcgcgccggacgatggtggtgggaaaacgacgagaagcgcgaatgcggtcttcacgtcgccggtgcggagcagacatccgccgtttccgccatcccgcaacgataatctttcagtacatctcccggagttcacaatgtccaacgcagtccacgagacggacagcaagaatactgtcgcatccaagccgccgctcgacccccatctaaaggcgcttgaaaacgaagccattcacatcttccgcgaagtcgccgccgaattcgacaaacccgtgatgctctattccatcggcaaggattcgtccgtgctgctgcacttagcgcgcaaggcgtttttccccggccgcattcccttcccgctgctgcatgtcaataccggctggaagttcaaggaaatgatcgaattccgcgacaatatcgtcaaggaatacgatctcgacctgatttcctacaccctttagagcacnnnnnnnnnnnnnnnnnnnnnnnnnnnnnnnnn

SEQ ID NO: 2894 - DNA, 678 bp, Xenorhabdus sp.
  CDS (3)..(296)
cttgtgccctacaggcccttcacctgtccatcgccgaggccggtcgaaatccctatttcaccagcctgttcaaacgcctgctggatgaggggcggcgcattctgcggctttattaccagtcttatgaggatcgtctgccgaggcgtttcgtcgatgatcacgaggcgatgatcgccgccatagccgcgcgtgacattgccctttccgaaaaactggcacgggaacatgccgaacagatcgtgcagcaggtgcagaaactgctggtgcgaaacgagcggctggaaataaatctgtagcttgtcgatttcttgtcgacaaataaaatacaagatagtaatgtccttgtcgaaagggtggcgcgaagctgcgtccattcctgagaaccatgtgccttaggagctaataatgacggccagcattttttccggcgtgattcccgccttgatgaccccctgcaaggatgatcgcacccctgatttcgatgcgcttgtgcgcaagggcaaggaactcattgcagatggcatgtcggccgtcgtttattgcggttccatgggcgactggccgctgctcaccgacgagcagcgcatggaatgcgtggagcgcctggtcaaggcccgcattcctgttatcgtcggcaccggcgcggtcaacaccgcgtctgccgtggcacatgccgcc

SEQ ID NO: 2895 - DNA, 678 bp, Xenorhabdus sp.; identical to SEQ ID NO: 2894
  CDS (586)..(678)

SEQ ID NO: 2896 - DNA, 23621 bp, Xenorhabdus sp.
  CDS (8669)..(9595)
caatgtgctctaaaggccctgcgtgacgaaatcaccctgcgtatcaatatagaggtgtttggaatcactgagcttagagttggacagtttgttgtacagttcgctgaagctgccttcacctgaacttctcagtgtcggctccgccagagtcatggattcagaaaggcgtccataaatttgggataatagttgttgcatcgccggagtccgttttgaatccgcgtgcccaagcacgtaaccttcaacctgctggcagagataggttaatttttcgatggcatccagtgaataatcccggtcttccatcagcgcctgctcataacgttgcagcgcgtcaatgacgttacggtaactctcacccatgggcttaccttttatgtaagccttttgttgcaattcatcggctgacatcaattcagcagatgggcggtaactccagcgaccgttaattttttcagccaaaatccgcgtacgccgttgatcataagaaacgatattattttcgatgaaatgcagttctttggggaactgatcataactctcataattagccagaatgaattgttcaatgactttaagctgtgccggatctttcgggttttccaccttaatcatcttaatcggagaatggcgattttccggccatgaatgcacttcaaaagtattatctgccccttcacgaataagaatattcagttcagaacgcagacgataaaacggcagtgctttattcagcatactatcaatagcacccagcctgacgttcaaatcaactaatgtatccggctgataatgatcggcatttatctcccgatatttttgttgctcaaccggattcagggcatcgaaacgtactttcatgccaatatcattatcgttcagacggctgcctatctgtttcaatggcagatgtttatattcagaagcgggtttatccagtaaacggatctcaccgaccatcccttcacgctgcaactggcggagtaccggcaattcaaggttccagaaggtgctgcccaacaataggccaccttctgctatcacataaacatccccgcgggctttagttgcatacactgaactccaaagccccatattgctgcggacagaagcctcaatggccgattgctgctctttttgacgaatatcatgagggtcaagcgaatgtgaggcccaatccagcaatctttcactcagtgtgttactgaacgcatgccccggtaaatcagtgtcataaacgactttctttccattaggctgggcagcattcagtaattcacggtattgctgggaattattccccgaacgcaatgtcactacgctctgttcaccgtcagccggatcaaaatggtagccgtactgctctaactgagccatgaaacggacacgtttatcccagtcataatcaatggtggattccacaaataattttgccagtgaggatacctgagcccgtggaatagtgtgtttaatactgttgagatgaccttcgatataatcgatcatcttttgtcggttactctcataaaactcggtatcaatacgggcaattcccggtacagggatataatcatccgctgaaaaatccatcaggcgctcagtgtcactgtccagccagcgatagatatccgcgactttttgtgcccttgccgtaatcgtggatagtgaggcagagtttgacggagtcagtctgttttgcggtaaaccataatccccgactaaacgctcattccccagtgcttccagcttatctgtcaccgtagctgaaatatcaggcaatgccctgctcagggtttcagacgcatcaatttcccgattaacctcatcaggcagagcgatattgcggggctgctcatctggctgccgggtaggcacaatatttgtctttctggaaataatgcttgctttaatttgtaaacggtccagcgcctgttttgcatcagccaatggcaccagactatcgtctgactccgggaggtccagcctgaaacgcccctcaccctgcacagatatatcctgagtaatatggctgccgatatgttctgcaccatttggttcataagccgggccgaataaaccactccccttgttttctctgcgggcggttttctggctgctgtttttcgcttcgattgcagcatcctgctctgcctgctgggcagtgttatatccatcagaggcagcctgtgcagcccgtttctgctgtgactgtgcctcttgcgaccggaattctgcccggttgcgggcatctgtaatatcctgctgcgcattccgttgattctgttcacttctgacaatacccgcttctgatttttccagagccgtatcgatttgattctggtgttgcagaatagatgaatttgaagactccagttgctgctcggcaatattttttgctttatccagttgtgactggagatcatccaacaacctgccgcataatcatgacgccattgtgtaccggaatctccctgatgatgcctgtttggcagattatcgagactttccagcgccttagcttttgccagtagatcatcagtaatagcctgctcctcttgcctgatgacatcacgctgtgccagaccgttcgtattcagggcatcaagatccgttgcttccagctgattctgagtatccgcaatggccgccagctgttgatctctttcctgcatcagtcgttcactgtcggcttcagcattttccttatcatccagcacctcaccagctactgaggtttgtggtgtctgcttcactttgacacttccagaacgatttgagcatgcaacaatattatccagaatgtaacctcggccatcacttctgccggtgccgctgaatgccagccggttactaccggcctgtgcaatgagtaccagctgtttatgccgccaggcgatcctatcgtccgaagctgagaaaacaacctgatcgttccagagcacttctataccgttatcatcggtgctgcctgcacgcagtgcaaagtcaaaatcaagggtaatgacttctcccgctttaagctgatggagatcctgataaatggtggtgttggcatgagcatccagttcagtcacatgactaccgtggcctgcgtcatccagcccataagacgccgccggatgctgggcttcaatcccgttggtggcttgccatccctgtgtaccggcctcgaaatccccgttaataatcagattaggcttctgatttttcgtgggttgctcttccccattcatgatggattccagcctgccgacatccggtgttttcagctggctcaccgaggcatgcagatcggcggaaagcgtggagctgacttcaccgatttccgtcagttcaaagcctttcagactgtttatttccggcaaattgatggcaccccgcccacggtaactacctgatgtatgagcttcatcaccctgcaccagaaagttaattccctgactgcccatagctcccagtaacgtctgtttgatattgccgaacagtgtcgccagtttatggctttccgtattgctggaggccagcgccagattgtaaaaatccccgttacctatctgaatagcgacgttattgcgggcataggaagcgtggatattcatcccgtcaccaacatggatgttggcattgccggtgcctttcattaccgagacattcagcccgtcacccactttggtgctgacattgagcttaccccaggccacattgaccgagatgccatcacccactttggtatttacgttcaaatcaccgtgggcagcaaccacgctcaggccattccccacgctggttgtgatattacttttaccctttgccgcggtaacctgcatcccatcacccactttggtgacaacattgctttggctccacagggcattaaagctgtcgccctgccccacgtgcgtgacaatattcgcatcgcctttcgccagtgtgacctgacggccattccccactttggtgatcacattcgctttaccccacgcgccggtgtaatcatcaccacggcctaaatgagtcaaaatgttagccgagccttgtacaacactaaccgcacgaccatcgccgatcttggtcaccagattggctttccctctggcaaagttatagtgatccccggctcccacatgggtcatgatattggcatcaccccaggctgcattgaccgccagaccgtctcccattttggtcatcagattcagcgtgcctttggcaaaacccacggtattgccatccccgacatgggtcataatattgccgaatttggaaacaagcaggccgaccgttgccccgttaccgactttagtcagcatattccccttgcccagcaaaacaccggcggtaacgccatgaccaacatgggtgatcacgttggatttagccgcggctaaaacccccataaactcatgtccgactttcgtcaccacattggcttcacctaatgccagtacgccggtcagcccgctgccagcgtgagtcatcacgttagcctgaccaaacatagctgccagtgttgtgccatccccgaccttggtcatgatattggcattaccggcaaacaacccgaggctggtgccctgacccacatgggtataaatgttcgccttgccaatcatcacagccgcagtcagttcattacccgctttagtgaaaatattggcttcccccaccatcgcagcaaaggtattaccgttgccaatatgggtcattacatttcccacaccaatcatggcagcaagactctcgccactccctactttggtggcaaggttgcctttcgccaccatcagagcgacactcaggccatcccccacatgggtgaacacattacccagcgccaccatcagcgccagcgcattgccgttacccactttggtaaagacattgccaccaccagccatcattgcgcagacttcaccgtccccgatataggtaaaaatattaccgacagcgagcatcgcggcaatagtttcgccgtcacccactttggtaaagatgttaccgacagcgcccatcgtacccagtgttctgccgttacccacatgagtcaggacattgcccagtcccagcatgatgccggtggtatcaccgtcacccactttggtcagaacattggcaccgcccatcatgacaccggttgtttcgccattcccgagatgagtcagtacattggcaccccctcccatcacagaaaagacccggccatgacctttacgggtcagaacattagcgccacccaaagcgataacccgactctggctgtcatcggtttttggtaaatcagacggggatgaatcggaggtaagatgagacgtactgatatgggtaataacattggcgataccgccaccgttgaaattcagatggccttttttgcctttcttgaaaataacatttgccgcaccagcgcccctgaattcggtatcacccatttccgagttgtgcagaataacattcgcaagaccggcccctttaaagtaaacattgccacgggccacattggatttaataacatttccccctcccgcgccttcgaaccggacatcaccgctgccgtcatttttttttatatcagacgtgaataatgcctgttcacgggcactgctcacatcagcaatagttccggatgttaccctgacggtattgacgctgtaatgcacatcactcagcgtataactgcctttacccaaagaggaataaccgtaattagggccgataaattgatcagccataactgccgtttgatcaccggctttgtaccacggtgtggcgatgtatttcagcttccctgtttcaggatcgtttttcagttgaacgaccacaaccttggtatattcccccaacacacgggcatacagataagtattttccatccgattggattttaccggttttacatcaaccgttgagccatcggtggaaatggcatatccccccattcgggcatctgacagcgtaatattttctgccgcgatctgaacaccgtcagcataagttacccactcattttccggcagttctttctccatcgcatgtatcgtaaatgcctgatgatattcagccttcaggccagacagggtataggcgttatcaaggttgataatctggaaaccgttacgttcggagatatcatgtgatgccagattattaaggtgattaccttccttgaaccacgatgtcgtgaaatatttcagtctgccggtttgcggatcattgctcagatggatcttattgactttggttacgtttccatcaacaagtgcaaagaggtgggtattggtttcccgtgctgatttaacggcggtgactttctgatggttctggatccagttgcctgccagcgttgccgacatcagaaccatctcttctgcttttgcataggccataccttctccgccgaaattatcatccgtgcctttccgcgtgatctggttatagccacccgctcccataaaatggatattgccgtgggtaacatctgagtagaaatggttataaccgccagcgccggaaaatgtgatattgccattttcaccatgacgattaaggctattgtaagcacccgcgcctgaatagttcagatgaccggatcggccattatgctggataaccgcaccaccggctgccccggaaaaaacaatattaccttcaccttctttttcgatttccgcatacccggatgcccctgttacattcaggttaccgctggtatcgctgattttcaggtatgctgaaccaccgactacagtatcattgcctgaaccggtataaaccgaggcagcaattgaacctaacgcgatatgatcattaccaccatacgcatgaatttggccgccaaatccgatagcaacaatattattatcaccatcatcagcggtgtagtttcctgtaaaaaagtattcaacacttcgccagaacggttttcccatagttcaatctctaaattaaatgccagaattaaagacaaaaacgcccaatcacaaaaagcaactgggcgttgatgtttatttcagtgttaataaaacaggttaaattaaaatgatgaaaaaatactcgacagccatttatttgctttcggtattggaaggagtcgtcgtatcagaaggccctgcaacctcagcaggaacagcgagaaagcccgcagtcattaatttattgatttcagcttccatgcgagggtcttccagcatattcttcaccatagaaaccatatacataaaaccagatgcaggcatatgaataacctgctttaactccagttcctgatcgttttcagctaatacaccatttgccattttattaggctctggcccgacaaagtagagggagaacacgcctttgttataattgacgctggaaatggtttgaacaaatttttcagacatacaactaaataccgttaaataggttttaaaatgtttcaatatcagttaataattaaccacatttagttgtatcaatttacgcagagcctaatcggataagctctatacacaatggatttcaagatgcgtcgcggcggcaagggagtaacaaattcgtcgggaacgaatttgcccagccaaaggctggcctccggtgagaggcaggagcctctcagtaatccccaggagcatagataaccgtatgtctataaaaacggtgaccggggtgaacgaacgcaaccaacaaagaggcaacctgaaagacgaagtgtataattcaataattgataacaaccagaataaagaatggtgaacttatcacttcaaatgaaaatatcttaaatttagatttaaaatcaacatacggtagagataaagtccgtttaaccactatagtgagtccgaataacctcacccaataagaataaaaaacattctattatttttaatctgctttcaaacaaccaacaatggattgaagtatgcatcccgacgataaaggaattctgccatctttattgtcacccataactcaccgataccaatgatagccccataaactgagcaagcagtttccgtctggcgcatccggtgtagtaacaagtgccacaacgtagtctggccggtgaaggctcgcttctttaaaaggatagctatccagagcaattaatccatctgcacggattacctccatcaccgaactctgctggcaactaaaatgtacgctgttcttactgccaggaatacatcagaactatgatgtccccgctcttattgaaaaaatacatatacttttgttcagatttactctttgtttgaaaaaaattaattttaaattaagcttaaaactatcccgttaattttaattaagcaggctaggatcattatatgaaatccaaaatcatcgtatccatttctttgattctctctgtagtagcttattttaaaagaagggaggataaggccgtaattcagcagttatttctctgatggtcaatccttttttctggattagattaaccggagaatgacagtattagcggcattgtagatgctgtacataactacaattaaggcaaaggtcatttggttaccctttaactgctatcattgccaatgaaaactctatgaaaaaaataaaatccatccttataactgctgttacctctctgcttatccctataagtcatgttgtaatagccgaagaaacaaaacctcaaggcgtaataaaaaacccaaatgtatatacggaagatgaaatattaaggcaacccagattacttgaaaatgcaattgtctcttttatttatgaacaaaatgataaccttgaaaaattacttaatctttacaaaagatcgcacagtcaagacccctacctgatcctttgggctgaggcgaaaattctcatgaaaaaaagagaatatcaggaggctatcaataagctagaacaatttgtcaaaaagtatgataacccaactgccaaatttgatttggctatactttacttactcaataaacgatacaatgaatccgaaaaagttttcaacgacttattactattaacccgtaatgaacaggaaaagaaaattttaaatgattatataaaacatatcgaaaagggaaaagaagttaaatttgatatgggtttctccttcaaaatagattcaaatatcacaagaattactgataaaagaacatatacgggtctccacgacaatataaggaaaaaagatgtcgggttttcctacaacccaagtatgagaaaaaaatattactttgattctggcttattctctgaatttgacattgatgtttatggaattaattatcggaaagaagaaagatttaatcaattcaacgccaggataggtaataaattcggatttgaagattattcaaattatttatacttcaaacctttttatatgaaggcattttatggtggtggtggttcatctaaagaagcaagtttaaaaccttattatgacgcaattggatttgacctgtttaagttatcgagtttaaatgataacttcaaatactctattttttatgaaaacagaaatgattattatagcaagagaaaagaacttaacggagacgttaatttcgttagcagctcattaatctttataccttttaatgatttatatatgtcattatccgggagctatggcataacagacagaaaatctaaagaagatagtcatcatgacaagggcgctggtcttctaatcagaaaactgtttttagatgattatttagtagagttaagctatcgaaagatgaaaacaaattaccagggtaatacttcaattaggatatttccggatatgaacctcaatgatcctactacttggaattcgtatatatatgaattcaaaagaaaagatgttactgattccatttctctttcactctcaaatgaaaatattaatttatttggtatttacccaaccctcactttttcttatataaaaaataaaagtacccattctctttattcctataatgaaaaagatatttttgttgatttcaggagtaatttttaatagtttaactgaacagagaggtttagatagaaacacgctgacttaataaaatgcacaaccattgtcatcaatatatactccggttatacgttatcatcgtatgaacggggtgaaaaccccaacagtaaatatggaacaaagttttccatcgctgatatctgcttgttttaatttgaaaaattaaatcctcctaaaatttgaaaaaaaaaatatttaacttaaacttaatctcaacagtatctccttagtttttcctaaaaaacagattggagtcattatatgaacgcaaagtctaaaatatttttagctctcgctctggttctttctgttacagcctgttctaaaggagggggatcccatggttcttggattgatcctagtggtaatggtggtaatggtggtaatggtgagcatggtggtactccaacgccaaaacaatcgcctgaaaacacctatatagcttatcaaccagatccgcctaatgtggccgaggatctggtaggtaacgacgttgggaataatgtgtggtttgccgcttctggtgattatgtgaaagggaccgctcagtccgaaaatcaaaaatattggggacaaaacacacaagctcccggtaagtattattatattcaacttggtccaacgggtgagtctatcgctataggacaagaccccgataagcccacttataagttatttaaaaacaaagctcgtaacgcaacattagggcataaagatccgcatgtattccttgcaagcccctggatggcgccgaaccctaagggtgatggtctcgtcacttataatggtcctgtagtattccagcaagctaaagacaatactcgccatgatttaactatgacgctagatgttaacaaacaatctaacgatgttacatttggtggctcaattcagcataatggcagtgcagtagctaatttggcttcagaaacacagaaaagtacgtggggtaatcatatgtttttcggtagtactccttttactgctacggattataaattctcttttttccaaggtaagaagatagtatggggatttactgataaagaggctaccggtgtaagcggaataattggcaaggtcggtgacaataatgagttcggtgctttccttctggataagcagtgaataaagaagtctttccgtaaggttaataaaaaacggctcacattagtgagccatttttattaaataacgatatatctacgaggctgcttcccgccccatcgagggtttacggcggattttgctaactggtaaagcgagattaattgccggtgttatctggtggataagcaaaacaccggaacaataaaatactgccagtcatcaggttaacttagatttcccgcttgtggtgtctgcccaggcagtaataatggttgattttgtctggctatccagaaaatcaataaacccactgtcaccaatatcaggtgcaaacccactcatagcctgtactaatgtatccactgcactggctgagagggcggtatactcgcactcaccctgagtatctttattccccatccgggtaatgatatccgcacgattgccattaaagtaatcagtgaaagttacagaccccaacgcttcaaattgcccttgttccgatgtatcgcaaatattgcgattagtcagcaatacaagatcatagccgctgcgctggaaccacaggttctgccagttgatattgttgaaaataatccggtcacccagtttgatatcttcaacgacgttatcaatcacatcaccactgacgacaaaactattgattccagaaccacctttgaagtggttctgatagccgcccaacaccagcagattattaccttcaccgccattaaaccggctgaatttagaaactacatctgcaatcagatgatcattaccagccccaccgttaatcactgcgtgatagcccatcagcttaatagcattattgcctgagatgccatctatccgggtatcgttgcccaatacggttgcaaaatcatcacccgcgcccagtaagacctgattgtgattaccgatggtgacaacataatcctgatcttcacccgcatcaatacggttggaattacctgaagccacgatatagtcacgtcctttaccaccttcaatcacgccatcttcgccaaaagcaaagacctgatcatccccctctcccatataggcgtaattaatgtgtccggccagcacagcaacatcattgcctgcccccccaaacatcatattttcacgccccatcagcaccccgaggtcattaccttcgccgccagcgaagatgttggaggttcctaccgagtaaaagacatcatcaccacggccaccccagacgttattgttttcgcccagatacgcgcccagatccttgccatcaccaccccagttaaaattgtagttaccgagggaaatgtgaatatcaccatcaccttgcagatgcccactgttacgcaggaaatcaaacgttttatcctgcatgttcagcaggtctgccgtcaggttttctttcagattactcaccagtgattgcatttctgcctgtttatcctgactgaacagcgtcgcaaacaggtttggcaggttcagggcattaaatccgaatgcgcgttccggctgctcactttcagtttgctctataggtttatctccttcattcagggatattttatcttctgaagtgtcatcaggggctttcgctttcagcccgtgactttcggcaaaggagttaatgccatcagtaccggtgttcaaccccgctttcaggccgtcgagtaacttttgcggatcagtaaatgacttcagctgatcaccgctgaattcaccaatgatttccagcatttcctgcatgatggcaacgccatccactggctggccgctacgggaaacaatacgtccgtccggtgtgtaatcaacgccaaaaatatccgccagcgtggtattcgcgctgacaccggccagatttcccagcagtttatttttaatctggcgcggcaaatcggtcgggctgaatgtaaacgtagtttttgccatgcctgtggcggtatattcctgcgtcatcaggccaaacactgaacccagattggtatccagtatcgactgaatgttgtcaccgaacatgaaattccagttaccggttgtcacctgaatatccgcaccctgcccgccaacggcaaagttaaaggccagtttctcattcgcctgacggaatttatccgcccgactaagttggctcagttcaggtttattaccttctcctaccagccactggttgtatttcttattcagcgtgttttcgagatcatttttcagcccacgactgctgcgctcattctctgtgttaagttccgtcagagtttcatatttgacactactggtcagatcaagaccggataaatcactgacgtatttcttcgcgccctccagtgtccactgttgatcctgcgccgtcagccagtctgctgaactaaacaaaccagtcgagttttgtgatgaaatactctgcaataccccggaaatacgtgctgcgccatcaaatggattaattaatggcggggtcggaatggatttttccagcatcacaatcagatcattgctgcgccccagattgaaactgatgttacggttacccacaaacagttgtgcgccttcaaatgcctgataaccaacgatatcaacactgtgtttgctgtctccgttcccgatgtgaaacatcacattgttatcaccgaaagccagcgatttgaaaccaccgttacccaccttgaacctcacattgctggttccccagttaatggtggtaaattcaccatcaccaacctgtccatcaatactgccggaataactcagatgacggtcagaagccgtatcattcggggcattgctattcggagcactgtcattctcttttttacgctgtttgggtgcatggaatgtctcggtattttcagcgattgctcctttcgcctcggcttcagcaccggagtgccccactcgagacagcgcaatatcactttcggagataccacggcgaatatgttcggaatatgactctagttcacccttattattccagcccaacacaattttgttgtccaccagcttgtgaacccactgttcctgagcatcccgtgtatgtttgcggccggtactgtctaccgcaacttcgctgctacgggctgataccgtagtacgcagtccctgagcgtcaagtgctgaaataaagcgacgggcaaaaccattacgcttgtcatcaccaatcagtgaacaaccaacaaggctgatatgttcaggcgttccggcctgtctgaagccttcactgaaccgtttcagtttcaacgccagctcatcggcactgtatcctcccatacgggtcaggttctgggctgattcatcacgcccgtgcccgactatctgccagcgtaatttaccggaaagctgagcaggatcaccgtaaaccacgcgatactgaccgttggcatcaagctggacaataacactggtatcagggtgtttccctgccagactcacagcggcttgcaaagcaacaggatcgttttctgtctgaataatgatctgactgttaaagcggctttctccgccttcagcatgaggtttaaccgcaactttctcccatgtttcgacatgctgattgttaaccacacgttcaacagcttctggcgtattatctttaagcggttttttcacctcactgatagctgtatcgttataatcttttgccggaagcagacctgatacaatctgttcagcatactggttcattaaccggttgctggctgtatgatcatagatagtctgttcacccgatacctgataaccctctgcgaccagtttagtacggagtttttcacccgcgtcacccagcccttcgttatcagtcagcaacatgattggtgtctgtttcgaaataccctgtagatttttctcaactgagaactgaccattcaccgcttttgccagtacaccagtgatacctgccgggtttggtactttatgggcagttatcgctttggtcatgcttggcatcggtctgtccagcaataaaccggataccggctgaccatgatgttctgcataacgggcaagatcggccgcaaccgcgccccccattgaataaccatgtatgatgatattttctggtttgataccacgatcattaaccagataatggaacatcgtacgggcatcctgatacaaccctttttcattcgggctgccatcgctggaaccatagccacgcatgttcactgccagtaaatcaataccttgcttctggtaatgattctgaatagcacctgactgttcttccgctgatgaaccggaaccatgaatgaaaagaaccacttttctggatggattctggctagtggctgcatcactcccttgttcagcctgcctttgatcagatacgtgataataacctgtcaggcgtccggcatctccacctagcgtgactttttccgccgtgccgctttccactgcataatccagcaggatttgcgtatcttcattgatattgcgacgggcatctttggcaccgaaaagttcatgattcaggaaacgtttcaccgggttaaacggttcctgatcctgtggtggtgtgccatcattctcaatagccaccttttccactcttttcgtttcaacgatttccggtatctggttcttgtcgttaccttcagtctgatcctgatctgtcagatcctcgcccatgcgacggttttgcttcctgaccgtattttctgcctgtgctgcctgtgattcctgtagagcctgcgcataattgaacagctcggttggtgtccagacgccaaaatgaggctgccatttatgcccgataacctgatccgcaccgcccgctttgagcactttggcaacaatgcttgagcagttaccggtcaacagctggtaacgagcgtcagggttctggctgattttatgccattcagcctgcattgcggccacatccagccccgccagattaatgcggaaaacacgcccctgatccggttcactggccttgaaatcctgaatattgctcagttcacgttctgcaaactggcggatcacattagccacgcgtttttcagtcagctctggtgtctgctgttttgccgctgtccgtaatgcctcagcaaagtttttacccacttccagcatatctatgctgccgtcttcccactgctgcatgaacgggcgggagatatgttccggcacgccggcagatttcagcaggttaggattggcaagggctgccatcgcaaaaccttcgctgatctcctcaaatcttgcatcaacgccttttgcgacctgtaatttttcaataaaccgctccagcttacgtgagccatcgtgcaggccgaagttatctttctcctcggaagcaacatccagctccagcgcgtcattttgtcccgccggctggctgagatcacgccagcgcagttttacatccggatgctctgcggtggaaacatcaaaaatacggcggacactggttgatttaccgcctttcggccaccagctgacatagtgtttttcattgaactcggcggcattttcagccgtaatttccatacgaccgtgcccgatttgcagggctgcatgtcccaatcggctgtgatcactgggtttccagataaacagtgtggcactgaccggagacaattgctgttcaatggccttgtggatttttttcaggccggagacatcaagtcctttaccatctttcgctaaatcacggggatgcaggttggagaaaaccgcttccgctactgactgaccatactctttagcaaccgaggttttaacctgttcaatcgctttttccgcccattccgttttcaccacagtctgaatattggattttccacgggtaacgaaattcccctgctcatcaatataaagatgcttggattctttcaggctggcattgctcagtttgttgtacagatcactgaaactgcctttcgcggtgctttctacagcggattcggcaatcgccagtgtttcattcaggcgcacctgaatttgtgatagcaggtttttcagtgccggagtacgttctgaatcagggtgccccagaagatagccttccacctgctggcgcagaccagaaagtttttcaatggattccagatcataatccctgctgtttttcagctcgttctcataatctgcgagtgcatccagcacgtgctgataactgtcaccacggatcttacctttaacgtatgccgctgcctgcaactcatcagcagacatcagctcagtttttggtttatagcgccaactaccgtctgttttttcagccagaatacgggtacgaccgttatcatgggaaacaatgcggtcttctaccagatacagcgtatcaggcagttgttggtagttgtcatagttggcaagaataaaacgttcgatcgctttgatctgttcggtattatctgtgtcttccacaataatgtttttgaagctggtgatttcagagccatcactgttcctgcccggccacgggcggatttcaaaaccatcgtaatcatcagattcacgcaccagcagattacgctcagtacgcaacccgtagaatggcagtgcctgattcagcaatgtgtcgatggcactggttttgatatccagatcaatcagggtatccggcttataacccgtaggattctgagccagcagcctttcctgttcttcaaagctgagtgaatcaaaacgtgctttgacagaaacaccggcatccgtcagtctgcgcccgatattttccggtaatacgccctgatattctttggctgctttgtccagcagacgaatttccccgaccagtccttcacgctgcaactggcgcaataccggcagttcaacattccagaaatagttacccagacgcaggccaccttctgcgatgacataaacatcatcacgtgagccggttgcgtacagagaactccagaaaccggtattactccgtgccgatgcgttaatcactgatttcagcgcattctgctcagcaacatccgggtcaaggaatatgcctccccaacgcatcagggttttgttgagttcgatggcaaatgaattaccttttacatcaatatcgtaaacaacctttttgccatccgtctgggcagcatcgagaatattacggtactgtttgaaatttctgcctgaccagaacgagactatgcttttatcgccatgcacaggctcaaaactataaccataatgttccagccttgagacgaattcgacccgcttatcccagttataatcaatggtggcatcaacaaacagttttgccagcgaggttctctgttctttcgggatgctgttttccgtgccattcaggtagccttcaacaaacgtcaccattttttgtctgagcgcatcgggaatatctgcatccacacgctcgaaacccggcaccggaatataattttccgttgcgaggttattatcgctatccagccactgataaatattagcgactttctgtgccctgagcgctgcaccggaattttcttgcgtatcagtatgttccggctggcttttgcctgctcccagtgcattcagcccactgagatccagaccggtaattgatagctctcttctgacagacgtggctggtgttttatccgtgctgacagtggatgatggcttactgacagacggctgcgctattcctgtattatctacgttcggggttatatgctgctttctggctcgtatacccgcattaatttgcaaacgatccaatgctgcttttgcattatccagctcacccagatcttcttccagatattgcagttccggagcaaattcgttttctgcctgaacagcagattcagcatcaataaaggagtgcgttttcccggcctgattttcagcctgctttttagtatcggtatcagcagggatctgtcctgacaacccgcttcccgccgctttctcacggttcggtagtttgttgctatcaagttttgcagctttggcatctgactgtacctgagctgtttttatctctgccgcagatacggcatgctgaccacgttgttccgccttctgggcagcggattttccgtcacggcctgccttctcagcctgctgctgatgagcaatagcctcctgctccctgaattcaatatcagcacgggcatcgtcaatcttctgcatggattgctgacgatcctgctcacctttatcagcccctgattcagatttggcaacggcgtctttcacttctcccagatgctccgctgaggcctgctgtgaatgttccagctgctgttgtgccgtctcttttgcactgtcgagctgagtctggatgttgcctaataaaccgtcagcatactgatcacgccactgctgaccggattgcccatcatgcgtagagtaatcattcagcgcttccagccctttggtttttgctatcaactcttgtgtgatcgactgggcttcatccctgatggcttcacgctgcaattgaccattggcattcagcgccgtcagatcggtattttccagttgagcctgagtaccggaaatggccgccagttgcttctctttttcctgtgccagccgctggcgatcagcttctgctttctccttgtcctgcaaggcatttgtggctgcctgatcctgttccacataatcagcaatatctttgtctgaccattcagagcgggcaacgacattatccagcacaaagcctaagccatcactcacaccagtaccggcaaattcgagccggttactgcctgcctgtgcagtgagggttaacgttttatttttccattccgctttaccggtatcatccgcccaagtggaaaaaaccagttccccgttccagagtacatctattccattatcgtcagacagaccggcacgcatggcgtaatcaaaactgacgctgataggttctccctcagccagtccgtcgatatcctgataaatacgggtgttgatatccacatcaagttcactgacccgctcaccatgcccctctttgcttaaaccataagatgcagcggaagagtgagcttcaatcccgttagtggaatgccaacccgcagaaccttgctcaaaatcaccattcacgatcagattatcagactgacgtttttcacggctgagactacgctgcattgcctcagtatccggtgtattcacctccgataccgcaccttgcagactgttgtgcaggtcagaagtaacttcattcacttctgtcagtttaaagccatccagtgaggaaacttcgggcagattaatagctccgcgccctttgcgggttcctgatgtgttggcctcatcaccgtttaccagataactgatgccctgactgcctgctgagccaagtaatgtctgtttgatgttatcaaacagtgcgcccagtttgttactctgggtattgctggttgccacagccagactataaaagtcaccattaccaacctgaacggcgacattattccgtgcgtaagaggcgttgatgttcagaccgtcacccacacggatattggcattaccagtgcctttcatgacagaaatattcaggccatcacccacgcgggtattaacgttgtatttaccccatgccacgttgacagagacaccatcacccactttggtattaacattcagatcaccatgaactgcggtgacactcaaaccatcaccaacggttgtggtgatattgcctttacctttggcgacggttgcctgaataccatcacccactttggtgacaacgttaccctgactccataatgcgttgaagctgtccccttcaccgatctgagtcacgatattggcatcacctttagccagtacaacattgcgtccatcaccgactttagtaatgatattcgctttgccccacgagccggtgtaatcatcaccattgccgatatgggtaataatattggcctgcccctgaacaacggtaatttcctgaccatcacccactttagtgatgacgttcgcttcccctttggcgaagttgtagcgctctccgtcaccataatgtgtcagaatattggctttaccccagaccgcattcacgcccgtgccatcacctactttggtaatgatgttggcttcgcctttggcaaacccgatcgtgtcaccatcaccaatgtgagtcatgatgttaccgattttggaaaccagcaggccaacagcggttccgtcacccactttggtcagaatattccctttaccgttcagcagggcggctgttgtgccttccccgatatgggttactacgttggcctctgaggacgctacaacgcccataaagtcattaccgactttcgtcacgatatttgctttacccagcgccagtacacccgtcataccatcaccgacgtgagtcatgatattggccttgccaaacatcgctgccagtgttgtgccatcaccgactttggtcataatgttggccgtaccggcaaacaaaccgatgctggtgccttctccgacatgggtataaatgttcgccttgcctatcattaatgccgcagtcaaatcattaccgacttttgtcagaatgttggctccgccaatcatggcggcaaaagtggaaccatgaccgatttgcgtaaagatattccctttgccgatcatggcagcaagtgcatcaccgttaccggctttagtcgcaatgttacctttggcgatcatcagggcaacactcataccatcaccgatatgagtgaatacgttgccgaatgacagcatcagtgccagcgcatcaccattccccactttagtgaagatattgccgccacccgccatcagtgcatacgcattaccctcaccgacatgagtaaaaatattaccgaaagcaagcatagcggcaatggtttcgccatcaccgactttagtgaagatatttcctgcccccgccatcacgcccagagtttgcccgtcaccgacatgagtcaggacgttgcccagccccagcatgatgccagtggtatctccgtcacccactttggtcaggatattcgccccgcccaacagaatgccggaagtccttccatccccgacatgagtcagaacgttagccccgccgcccatcacagacagcagatcacctctgccttttttggtcagaacgttagctccgcccaaagcaatgacttttgtattatcagatttggtcgcatctgagcgattgctgatgtgggtaataatattcgcgccacccagcatgccggattcaagagagccttcgccaatcttggtcagaatattggcgcctccggccagaatggcagacacttttccctgccccatctgagtcagaacattggcaccgccaacacccgaccagaccgcatcgccatgaccaatttgagtatgagtattgaaaccaccgcccattgagacgcggctgttaccatttcctttatggatggagatgttaccgacagccagaagatgggcaagatagcgcccgtcaccgacacgaaccagcacgttagctgcaccaccggcattgacctccatatccccgcgcttcccttgatgaagaagcacattggcaattccggcaccattaaatttcagattgccttccttgccttttttgatgataacgtttgcaccaccggcaccgttaaattccgtgttgccaaattcagaggtgtgctcaatcacgttggcaattccggcaccactgaaataaacgttgccttttgtaacattggatttgataacgttaccgccaccagcaccttcaaaacggacatcacctgaagtttcacgacgctcagtcaccggaaacagtgactggtcactgtattcgtgtgtgctggcaacacgctcggtagttgtctgtaccattctggcgctgtaatggagatcactcagtgagtaaccgccggttcccatcggggtataaccgtagctttctgagatgattttatctgccagattgaccgtatggtcgccttccttataccaggggcgggcaatgtattgcagtattccggtttcaggatggtttcttaactcgatcaccacaattttggtgtaaacacccagttttttggcatacacataggtgtttggctggcgatgggatttaaccgctgttacatcaaccttggtgccatcctgataaaccgcatagccgcccattttagcatcggataaaatgacatcggcagccttaatacgcacgccactgccatacttcatccattcgttttctgtcagtttttgttctactgcctgaatcgtggtggattgctggtgttcaacaaccagatttgacagggtataggctccgtcaattcccacatccacaaaaccgttctgcgcagagatatcctgtttttcaagcccctgaaggtgattaccctttttataccaggcggtagagtggtaggtcagttttccggttgcgggatcattgcgaagctggattttatgaattttggtgtaagtgccgtcagcaaaggcaaacagataagtgttcggctcccgtgttgacttaatgcctgacacctgattatcgctgccaatccatgacccattcatggtcgcactttttaagataatctttttggcattagcgtactctatcccttcg

SEQ ID NO: 2897 - DNA, 23621 bp, Xenorhabdus sp.; identical to SEQ ID NO: 104
  CDS (15507)..(15668)

SEQ ID NO: 2898 - DNA, 23621 bp, Xenorhabdus sp.; identical to SEQ ID NO: 104
  CDS (16240)..(16560)

SEQ ID NO: 2899 - DNA, 23621 bp, Xenorhabdus sp.; identical to SEQ ID NO: 104
  CDS (17173)..(21834)

SEQ ID NO: 2900 - DNA, 23621 bp, Xenorhabdus sp.; identical to SEQ ID NO: 104
  CDS (21669)..(23612)

SEQ ID NO: 2901 - DNA, 23621 bp, Xenorhabdus sp.; identical to SEQ ID NO: 2896
  CDS (10457)..(11119)

SEQ ID NO: 2902 - DNA, 26380 bp, Xenorhabdus sp.; identical to SEQ ID NO: 353
  CDS (7378)..(8190)

SEQ ID NO: 2903 - DNA, 26380 bp, Xenorhabdus sp.; identical to SEQ ID NO: 353
  CDS (16017)..(16550)

SEQ ID NO: 2904 - DNA, 26380 bp, Xenorhabdus sp.; identical to SEQ ID NO: 353
  CDS (16670)..(18313)

SEQ ID NO: 2905 - DNA, 26380 bp, Xenorhabdus sp.
  CDS (16783)..(18048)
tttaaaggtgcactaacgcctaatgcgacggcaccaatgcgccgcaagagaacctgatgccgggaatattcacgatacatagagacctcctcaaatgggcaataacttaataactgtaagacctgacaaattttactcgataaaatgaaaatttactactgatccgaccacttttttactgcttaaaatcactgtttttttatcttagcgtaattttattacaaataaacgatctaaacagaaacaaaaccaacatattaaaaacataaaattaacctgtcaggttttgctaaacttacttttcactgagtccaattaatcagtattacttatatttactttgtgctttcaggttctctttttatcacttcttgattggtcattttattctaatccggtttgttattaagaagtaacaaggagataaatagtgaataacttacttattattggcgctattctggtagtgttattacttttctatctggtttatgcattattgaatgcggaggatttctagatggaaacctctgcttttttacttgtcgctactttcttattattactatttatattaagtaaacctcttggacatttaatcgcaaatctcattgagggcgatttacctcatcggctcaccaataccgaaatgattttatggcgttgttgtggcttaaaaaaaccgggtgacaatgttaaagaaatgaactggtggcaatattcatttgctattattgcctttaaccttgcagggttattattactatttatcctattgataagccaaaaatatctgcctctcaatccccagcattttgctggtatgaaatgggatttagctctcaatacagccatcagctttgtcaccaacacgaactggcaggcctacagtggcgagaataccctcagttacctgagccagatggctgggttaaccgtacaaaatttcctgtctgctgcaacgggtattgccatcgcttttgcactgatacgggcattttcccgacaaggtgtgaaaactctgggaaatgcctggattgatattacccgcattacactctatctgctacttcctctggcgatcattatcgcgttgatccttgccagtcagggcgtgatccaaaatttctctccatatatttctgttcacacccttgaaggccatcagcaattacttccgatgggacctgtcgcctctcaagaagccatcaaaatattaggaacaaatggaggtggtgtatttggcgctaattcagctcatccttttgaaaatcctaatacgatcagtaatttcgtacagatgatttccatctttttgatccccagtgcgttgtgtttcgcctttggtctggttgttggagacaatcggcaagggtactccctgttatgggcaatggggattatttttgtgatttctgttgccatcgtgatgtgcgctgaaactatgggtaacccccatttcatgccatcaggcattaacagcaatatcaatatggaaggaaaggaatcccgctttggtattcttgcctcctccctctatggcgtagtcaccacttcagcctcctgcggagcggttaattccatgcatgattcctttacagcactgggaggcatgataccactctggctcatgcaaatcggcgaagtcgtctttggcggtgtaggtgccgggatttatggcatattgctatttgtcctactggctgtctttattgccggcctgatgattggccgtgctcccgagtatctgggtaaaaaaattgatgttcatgaaatgaaaatggtcgcattggcgattctggtcactccttcccttattctactgggaaccgcactgtcagtttcattcgaggcaggaagaaacgccgtgacaaacccaggggcacatggtttcaccgaaatactctatgctgtgacatctgcggctaataacaatggcagtgcttttgccggtctggccgctaacagtgtattttacaatctgcttttaggcaccatcatgctcctcggccgatttggcatcattctgcctgtactgtccatcgccggatcgatgagcagtaaaaaacggcagcctatcagcaacggtaccctgcccactcacaccacattattcattggcttattgattttagtcatcttattgattggagcactcactttcatacccgcactggctcttggtcctatcgcagagcatttacagctttggcaactatcacaataagtgaagttgtgaaataaattgtgagataagtgatgagaaataaaaagcaggcattatttgaatccggactagttcgtcaggcaattatcgattcagtaaaaaaatgtcatcctgccgtccaatggcataatccggttatgtttgtcgtttacctcggtagctgtttggccaccttattatggctcagtatcctgaccggccaaactacgggtgatgccctctttaccggctccattgctttatggttatggttcactgtattgtttgccaattttgcagaagcgctggcagaaggacgtagtcaagctcaggcctccagtctgaaaggtgtcaaaaaaacaacatgggcaatcaggctttcatcccccagccgcgatgcggcaaaagaaaaagtcacttccgattgtttacgcaaaggcgatattgtacttatagaagcgggtgaaattatcccctgcgatggcgaagtccttgaaggtggtgcatcagttaatgaaagcgccattaccggcgagtcagcaccagtgatacgggaatccggcggtgatttttcttccgtgacaggaggcacccaagtactgtcagactggttaatcgtggagtgttccgtcaatccgggagaaaccttcctcgatcggatgatctcaatggttgaaggagccaagcggcggaaaaccccgaatgaaattgccctgaccattttacttaccgcgctcaccatcattttcctgctaacctgtgccagcttactccctttttccctattcagtattgaagccaaccacactggtgcacctatcacagttaccgttctgattgcacttttagtgtgtttaattcccaccactattggcgggctgctttctgctattggtgtggcaggaatgagccgcatgctggaagccaatgtcattgccaccagcggacgtgccattgaagccgcaggtgatgtcgatgtgctgttactggataaaaccgggacaattacattgggaaatcgtcaggcctctcagtttctgcccgctcccggtgttacagaacggcaactggctgatgcagcacagctttcttctctggcagatgaaacaccggaaggtcgcagtatcgtcattctggcaaaacagcgcttcaatatgcgtgaacgtgatctgcgtacattaaatgctacatttgttcctttttctgccatgacccgcatgagcggagtcaacatcaacgatcgcatgatccgtaaaggtgctgttgatgccatccgacgccatattgaagccaaccgcagccagttccctgaagccattaatctgttggtacaacaggttgcaagcaaagggggaacaccgctggttgtcgcggaaaatcagcgggttttgggtgtcgttgccctgaaagatattattaagggcggtattaaggagcgtttcagtgaaatgcgcagaatggggatcaaaacggtgatgatcaccggtgataaccatctcacagccgcggccattgctgctgaagccggtgtcgatgattttctggcggaagcgacacccgaagcaaaactgactttgatccgccagtatcaatctgaagggcgtctggttgccatgaccggcgatggaacaaacgatgctcccgcactggctcaggctgatgtggccgttgccatgaattcaggaactcaggccgcaaaagaggccggtaatatggtggatctggattccaatcccacgaaattaattgaagtggtgcgtattggtaaacaaatgctaatgaccagaggctctttaaccacatttagcattgccaatgacattgctaaatatttcgccattattccagccgcattcgctgtcacttatccgcaacttaatgcgctgaatatcatgcacctccattcaccgcaatcagcagtgctgtcagcggttattttcaatgcgcttatcattatttttttactgccactcgctctgaaaggtatcagctatcgtccgatgaatgctctctcacttctgagacgtaatttatggatatatggtctggggggtttgctgatgccttttgcagcgatcaaactgatcgatatgctactcactgtattaggctttaaatagatcatcatcctctcaggatttgactatcaggtaaggtgaaaaaaatgacttggttacgttcttccattgttctgttgatatttctcactctgatcaccgggatcgcatatccgctgctgatcactggcctgtccacaaccttgtttcaccatcaggcgacaggttcactcattgaacaggatggtgagttgctcggttcagaattaatcggtcaggaatttaccaaagcgaactattttcatggacgtccttcaatgacggctgaacagccttataatgcacagtcatccgggggaagtaatctcgcaccaactaacccgcttttattccagaaaatacaacagcgcattattaaaatacgcctatttaatcacccggaaaatcatcctattcctgtcgatttagtcaccgcatccggtagtggccttgatccccatatttcacctgaagctgctgcatttcaggctcatcgtattgctacagcccggcacctgccggtagatttaatcaataagctgattgaggagaacatcgaatttccgccaatacattatttaggtcagcctgttgtcaacgtactgaaactcaatctggcgttagataaccagcgagcacaaggcaaataacgatgactgagacagaaccacaacgtcctgacccagacaatttgctgacgctggcaaatgaaaaaccacggggcaaactgaaaattttcttcggggcctgtgccggagtaggaaaaacctacgccatgttacaggaagctcaacgtctgctggctcaggggctggatattattgtcggcgtcgttgaaacccacggacggcaggaaaccgcggcactattaaaaggccttccacagttgccgccaaaatatatctactcggctcaacgcagagtcccggtatttgatattgatgcagctattgcccgtcatcctgccatcatcctgatggatgaattagcctacagtaatccgaagggttgtcggcatcccaaacgctggcaggatgtggaagaactgctggaagccgggattgatgtcctgactaccattaacgtacagcatctggaaagcctgaatgatattgtcggtggtattaccggtatccgggtgagagaaactattcccgatcatatctttgataatgccgacgatgttgttttagtggatcttccacccgatgatctgcgccagcggcttcacgaaggtaaagtttatattccggctcaggctgaacgggctattgaacattttttccgtaaaggaaacctgatcgccctgcgtgaactggccttgcgccgtaccgcagatcgtgtggatgatcagatgcgcgctttccgcgatacacgggggaaagagcctgtctggcatacgcgggataacctgctgttatgtatcggcgataatcatggtaatgaaaaattgatccgcaaggcggcccggcttgcagcgaaactggactgtacctggcatgctgtttatgttgaaacgcctaaattacaccggttgccggaaatcaaacgtcgaactattttaaaaacattgatgctggcacaggaactcggagcagaaacagccacactttcagagcctcataaagaaaaagccatccttcgctacgccagagaacacaacctcggaaaaatcatcgtcgggcgctaccatagtttatattccaccctctttagccatcgatggcgttctgattttgtcggacgtttaggtaaacttggccccgatctggacatcattattattgcccttgaagataaaaaacagcactggatcaaagagccggctgagcaacgattatccagtgacaagtggataaaccagcttcaggggttcatgatcgccattatactgtgtacctttattaccttattttcccgtaccgttttattccctctcgataaggccaacctgatcaccctttatctactgggcgttgttgttattgcgttattttacgggcgctggccctcagtattttctgctttcatcaatgttgccagtttcgatatcttttttgtcaaaccccacctgtcactggccgttaatgatatgcaatatctgcttacctttacggtcatgctgatcgtgggggttgtcgtcggaaatctgaccgcaggaatacgttatcaagccagaattgcgcgttatagggaacagcggacacggcatttatatgaaatcacccgtgaactcggccgggcactgaatgaagaagacgttgcccgcatcagttaccattttttatccaatagctttcaggcaaaaatagggttattactgccggatggcaataatcatctttatcaggtgaaagcctacaatggtgggcagatgttagttgatgaagccatcgccaaatggtgttttgataaaaaacaacctgcgggagcaggaacggatactctgccgggcgtgccttatcagttaattcccatcgctacgccatcacaaatttttgctgtccttgcgattgaatcatcaaatccccgccagctattggtgcctgagcaacaacgtttactacagatttttaccggaattattgctaacgcgctggagcgcttacatctggcccgtggtgcagaatccgccaagttggagagtgaatgggaacaattacgtaattcatttatgactgcgctgtcacatgatttgctgacaccattgacccgcctgtctgaacaaacagaagtactcagacagaatttgtccgttacaaactctcagcacgctaaacaatttcagcatattcatcagcaaatccttaatatttcacatctggtgaataacatgctggatatcgtgcgtatccaatcaggtagccttcagcccaattttggctgttattcactgcaagaaatcattgataacgctttacgctcactcgattatgccttaagccgttataagatagatctttccctgcctgctgatttgtccctacagtgcgatgcctctttattagagcgtgtctttatcaacctactggaaaatgccatcaaatatacagagaaaggttcagaactgggcatcagggcaacaattgaaaaagaaaaggtcaatatcgaagtctgggataccggctcaggattaccgggcggaaaggaaaaatccatttttgataaattctcacgtatcccccgcaaacatcgcaaacccacggccatgaattccgggttaggactaacaatttgttatcacattattgaaattcataatggaaaaatatgggcgacaaataatgagaaaggcggagccagtttccatttttcccttcccctttgttccaccaatgataatcgagaaaaatgacgtgcagatccaaataaacatccccgccgcaagcagcggggtattccgatatgaaatcacccgcttcgcatcgttcaactcttatttgctcgtcgcaagcgacggggaattaaaccctgagagattaaataataaggagataaccatatgaagcagctagtacccctatcgctatgtaccaccattctggtattaacatcatggagtacacatgcagcaccatcagggttatctaatacgccggaacaatgtcaggaacgtgcacacactatatgtaagaaacatatcaggcatcctaagaaataccaattttgccttaaagaaatctataacacatgcatacatcaataatgtttgttttaacaaaaagccgcagcaaaatcggcggcttttttcatcagtattcagcgctaattaacccgcagcaaatacttggttaacaattcctgagcttcctgctcgattttttcacggtgttctgcacccaggaaactctcgcaataaattttatatgcttcttctgtacctgaagggcgcgccgcaaaccagccattatcactcattacctttaggccgccaatggaagcaccattaccggaagcagttgtcaggcgagccgtaataggatcacctgccagagtgtcagctttcaccatttccggtgacagcttagctaactgtgctttctgctgatgacttgccggagcctgaagacggctataactcggtgtaccaaaacgggccgccaatttgtcatagcgctgttgtggattttcaccggtcactgccatcatttccgctgcaagcaggcaaagaatgatgccgtctttatctgttgaccacggagtaccatcaaaacgcaggaaagatgcgcccgcgctttcttctccaccaaagcccagttcacctttatatagtccgtcaacaaaccatttaaacccgacaggaacttccaccagttcacgccccagatcagccacaacccgatcgatcatggcactggaaaccagcgtcttacccacggccactttctcagaccattgcggacgatgacgaaacagataatccactgctgtcgccagataatggttaggattcatcaggccggctggggtaatgatgccgtggcggtcataatcaggatcattggcgaatgccaaatcgaatttatcccgcaactccagcaacccggccatcgcccagcgggatgaacaatccatccggatcacaccatcacgatccagcgtcatgaaacggaaagtctgatcaatgttatcattcaccagcgtcagatcgagattatagtactcaccaatacgctgccagtaagcaatacctgagccacccaagggatcaatcccgattttcagacccgctttctgaatcgcggccatatcgacaacctcacccagcgcggtgacataaggatcaactaaatcctgagggtgcagatattcactttttaatgcctgttcgtaagactgacgtttaacgcctttcagattaccggccaacaattcattcgcccgattttcaataacggaagtcagatccgtatcggccgggccaccattaggcggattatatttaataccaccatcttctggtggattatgggaaggggtaatcacaatgccatccgccagattttttccctgacggttataagacaaaatagcatgtgaaatagcaggcgttggcgtaaaaccattattctcctgcacgaccacatcaacaccattcgctgtcagtacttccagcacggaaataaaagcggcttcagaaagtgcatgtgtatctttcccgatataacacgggccagtaatatcatattgcttacgtacttctacaatcgcctgagaaattgccagaatatgcgcttcgttaaagctattacgcccggcactgccacgatgaccggaagtaccaaatttgactttatgagccggattttcgggattgggttgtaaggtgtaatactgtgatgtgaggagtgcaacattgatcagatcatgctgctgggccagttgccctgccctaggatgaatcgccactttatttctcctgaaaggctgcaccggacaatcgccagtgcagtataaaacagatacgctgaacggtttagagagttattgattcacagcagactgctgactaaacctaaacgccgaacctaaatagtgccacacactttttcaatcaaatttaccggcaaactcatatcctgcataacttgttcaatcatgctgcgtttacggtcagtattggtattggtgatcacccaaaaaggtgtgccggggatatggcgaggtttggtttgcttaccgctggccagcagtgtatgttcatcaccggcaaaatacgtgcgggtacgaccatgcattgcttctgttgttctggcgaaactttcgctgtccagactatacaacgtcgacaacactaacatgaaacgctcaacggattttttcttttcagcatattcatcggaaagcagtaattcacgtataacgcggacagtatctcggggacgtacagctggtattttgttgacgggtacaggttcactggcaggctgtgtagtttgtactggctgcccggcgtccaacttcagtatgcgccgtaaaatatcagatgcactttcaccgatatgcagggtttggcttgcaataaagcggtaaaggtcttcatcaacttctatcgttttcatttctatccagtactgttcttaatgaaaaaattatcctcagattataagatataatgcaacaaaacaaaacaattaaactttcaataacttaaagtgattctttcttaaattgagaatttaaaagaaagaaacttttcccctaaaataaatcaatcagttacagccgacatcccctcattttgtttgtctctgctgatgtgtcatgatattaaactctacaatattaaacattgtatgaacgtcattaaactcaggcaaattatgaagtcaaacaatcaattaaattatcatttacacaaacccgaaaatccgttgtcttccactcccattatccttatccatgggctttttggtgatttaaacaacttaggaatattagggcgtgatttacagcaaaattatccggtgattcagattgatgtacgaaatcacggtatttctcaccgcatggaaaatatggattatcgtgacatggcacaagatgtgctggcccttcttaacgaactcgatatagcaaaagccatcattataggtcattccatggggggaaaaatcgccatgagcatgacagcaattgccccggagcgcattgaaaaaatcgtggtgattgatatagctccggttgcttatcaggcaaggcgtcatgacagtatttttgcggcactgcacaaagtgacggaagcgggtgtgcaaacccggcaggcagctacagacatcatgcttgaggatattaaagaagatggcgtgatcccatttctactaaaatcattccgtcagggggaatggagatttaacctgcccgtactgcaaaaagaatacgaaaaaattatcggctgggaaacaattccggcatggcataaaccagctttatttattcgtggtgggaactccgattacattacggaagaataccgtcaggatattattaatcaattcccacaagccactgcctgggttgtcgcgggagccggtcattgggttcatgcagagaaacctgaagcagtactacgggcaattcaccgatttttaggcactgaataaaaaaataggatatcagtctagcgaaatatatgggttgatatccttactaaacttacccgatattattatagaataacaatatacttaaaataaaatatccaatttatttatcatgttccattaaaacaacatacctgatataaaaataatcatattaaactgggtatttatatattaaggtaaaacccagaaaaaaaacatcaaatattatatcactaacaaatttaattcttataaaacagcaaaaaattccgcttatttttaccttagttttgtttcttttatcttagttaaggacagaaagtaatgaatgaaaaaaacgtatataacgctatcgctgatgtttatgaaagattttcagattctgctccgcagatagaggtagaaatcaggacggtttttgagctggcaggtgagatacaaggaaaatcagtattagatttagcctgtggctatggcctgtttagccggctttataaaagtcgtggggcatcaaaggttgtcggtgctgatatctcaactaatatgattgaaattgcaagaaacaagtcccggcaatatggtgatggtatcgaatttcatgtcagagatgtctgcaacatggaatcactgggtaaatttgacatcattaacgcatcctggctattttgtaatgctatctcactcgaagaacttgaaatgatgttccgcactgttgctaataatctggcaccttccggtaaattaattgcttacactattgagcctaactaccggttaacaaaaggtaactgtaataattatctctgcgatattcttagcgaagagcactgtagaggcggtcttctctttaaagccgaatttacctttccatcacgtaatcctcctcttccccctgcgccttttacaatgtacagctggagccgtgaacaacacgcagaggcaagtcataaagcgggtttacagattgaatggcataaaccgatgctgtcacaaagtgatattgataaccagccagcaggtttttgggacacttaccagaataactgccacgaagccgcgtttgtttgtaaattcctataatatcaatcgaccaatctcttcatttttcaacattgactaaaatatatatcaacccaaatattaaaagggttgatatttcccctaaaaggggtaggaatatcattaatagaaaatataccctaatttaaaaaacttggttttatttttacattaaccaaaaaaaaaacacaaataacataaaaataattatataaaatttagttcttatacattaatgtaaagcacataaaagaaaaccactaaatattataacaacagtaaatttcttttttagaaaacagcaaagaatttctgcttatttattttatcttagtttaggactgtaaataatgaatgataaaaaattatatgaccctattgccggtgtttacgaaagtttttcagatgcagcccctcagattgaaatagggatcaggacagtccttgaactggcaggtgatatacaagggaaatcagtattagatttagcctgtggtcaaggtctttttagccggctttacaaaagccatggggcatcaaaagttatcggtgtcgatatctcagctaatatgcttgagattgcaaaaaacatctctcaacaacacggtgatggtatcgaatatcatgtcagagatgtctgcaaaatggaatcactgggtaaatttgacatcattaacgcatcctggctattttgccatgcagtatcacttgaagaacttgaaagcatgttccgggtcattgctgataacctggccccttcggggaaactggttgcttatacactttcgcctgactatcggttagcacaaggtaactgtaccaattatctctgcgatattcttagcgaagaaccccacggagaaggcctgttctatacagctaaatttatggctcccccacataattcctcttttccttttacgatgtatagctggagccgtgagcattttgcagaagccagtaaaaaagccggtttacagcttgaatggcataagcccatattgctacaaagcgacattgataagcaaccagccggtttttgggatacttaccagaataactgccatgaaacggcgattgtttgccgcttccggtaatatcagttagttattctcttcatctttcaacttgtcccaataaaatggaaaattgaaggatgaagaatataaatccatggctatacttctaatactgagatattgcgataaactttcccatttttcttaaataagaaaccattttatcttaataaagatcattcaaaagcgctcccttatgcggaaaaacaaaagtaaactccgtgacattattcctatctgattaatttcttaatatatccaacgggtttgccataatatttagcaagatcatatgcctgcttaaatgaacacatggcctatatacacttcgtctttcaagttgcctctttgttggctgcactcgttccccccagtcacatagctatctatgctcccggggatgaactcccttgccgccgcgacgcattttgaaatccattgtgtatactcaatgggggttcaatatctatcgcgtgggcatcagaaaaaaatttcttctttttgtcataccatattatatttttgacattcagttcacaatttgagcacatgactatgataaacatcgatctcaactcagacattggcgaaggcttcggcccgtggactatcggcgataatgtggatgaatcaattatggcattaatcagctcagccaatattgccaccggttttcatgcgggcgatccctgcattatgcgtaaaaccgtggaactggcgcaccaaaaaggtgtgtccattggtgctcatcccgggttccgcgatcttgtcggattcggccgccgccatatcaataccaccccacaggaattaaccaacgatgtgttatatcagctcggtgcattacgtgaattttctgcgctgtataaccttccgctaaggcatataaaaccacatggtgccttatatatgcatctggcccgtgacagcgatgctgcacattatttcgtctctacactgcataaacatgctcctgaactggccatattctgcatgcatggttcggctatctggcgtgaggctaccacactcggtcatccggtggtttgtgagttctacgctgaccgtgattacgatctcagtggctctattgtatttacccgccgggttgcgccgctcaatcctgaaataatcgctgataaagtgttacgagcctgtcaggagggtaaagtccgtaccgtagaaggagccgatattgacgttgaattttcctctgtctgcctgcatagcgatacccccggcgcactcccattacttcaggcaatagccacccgcttacagcaggcaggtatcacgattacacctccacatcggcacaaatgacggtgtaaatttaaatgaggggagtgctgatatgtctgactcagatttacgctacaccttcggcggcgacgaacatctttttattgaaatcagcgaagcaatgtctctgaaggcattttttcgcagtatgtcgttaacaaaagcgattaaaaaccttgcgttaccgggcatattcgatatttgtctggcaaatgcatcgtgccagatacgcttcaatccggatattctgccacccctaacattactggagaaagttcagtccgtagcggaacaagaaaacaccggggaaaaactctctacgcgcattatcgaaattccggtgctttacaatgatccctggacgcatgaaaccctgatgcgttttcgggaacgccaccaggatccacactccaccgatctggaatacgcagcgcgaatcaacggcctggctgatattgatgcatttatcgcccagcacagcggcgctccctggtttgtttctatggtcggctttgttgccggattaccctttatgtaccagatggtagaacaggaacaacaaattcaggtacctaaatatctgatcccccgtacggataccccacagctttcactgggacacggcggatgcttcggctgcatttactctgtacggggtgctgggggttatcagctctttggcgtgactccagcccctatttacgatacccaacagcgtctgccttatcttaaagattctatggtcttttttcgcacaggcgatatcgttcagttcaagcctatcaatcgcgatgagtatgatcaggctatttcacaagttgaacgagaagagtttgcattgcgtattcgtcctgttgagtttgaccttgcggcctttgaagcagatccacaatcttgcactgcaaatttgcaggaggtgctatatggcaattgaggtgttatatggcattaaggtgctgaaaccggggctgtcaagctcagtacaggacgctggccgggaaggctactatcacgtaggtattccgccttccggtacgctggatcgttttgggctggcagtcgcaaatctactggtagggaacacgccggatacagcgggcttggagtgtactctgatgggaccggaactgctctttgagcaggacaccgtttttgctgtcagcggggcaccaatgggcatacaactggatgggcagcccgtttcccttaatacctgcctgctggcgcaaaaagggcagcagctgaaaataaccggctcatctttaggtgcccgtagttatcttgccatcgcaggtggtatcgatgtacctctggtactgggaagccgctccacatacagcctcggctcgctgggtggatatcagggccgccggttacaggccggagatacgcttcctataacggcgcattgtgggcaaggccctgttggtcatcacctgccggaagagtttaaaccggaatttcataaacatgccgaacttcgggtggttcccggtatgtatatccatcgcctgacggcagaatccgttgacagttttttcagtgatgaatggaggatcagctctgaatctgatcgtatcggttaccgctttctggatgggcgtccactaaattttgtggagcgcacaccgccgtttggcgcaggctctgatccctccaatattgtggatgcctgctaccctattggttctattcaaattccatcggggcgtacccccattgtcttacatcgggatgccgtttccggaggtggctacatgacactgggcaccgtcgtcagcagcgatctggatattctcgggcagttacctcccggtgccaaagtaaaatttacccaagtgacattacaacaagcgctggctatccggcatacgtttcaggaaaaactgcaacggctggtcaccgcactatcctagtaaccctacaaatttatgccattttcaggagaataattgatgaaaaatacagagttgaatcaacgtcgtctgaatgctactccacgcggagtaggtgtgctgagtgactacttcgcgcaaaaggcggaaaatgctactctgtgggatgtggaaggtaacgaaatcatcgattttgcggctggcattgctgtgctgaatacaggtcatcgtcaccctgaaatcgtatccgcaattgaacaacaactaaaagcattcacccataccgcatatcaaatcgtaccttatgaaagctatgtgacactggcagaacgtattaacgcgctggcaccgatcaacggcccgacaaaaaccgcgttcttcaccaccggagcggaagctgtcgaaaatgccgtgaagatcgcccgcgcttatacccgtcggccgggagtgattactttcagtggtggctttcatggccgtacttttatgacgatggcgctcacaggcaaagtagcaccgtataaaatcggttttggcccattccccggttccgtttaccacgccaaatatccgaacgggcttcacagcgtatcagtcgataatgctctggcaagtctggaacatattttcaaagccgatatcgcaccggatcaggtagccgccattattattgagccagtacagggtgaaggcggattcaacatggcgcctaccgagtttatgcaggcgctacgtacattgtgcgatgagcatggcattctgttaatcgccgacgaagtacaaactggcttcgcccgcacgggaaaactgtttgcgatggaacaccacaatgtaaaagcagacctgatcacgatggcgaaaagtctggcgggagggatgccgctttccggcgtaacgggacgtgcagaagtgatggatgcaccggcacccggagggcttggcggtacctatgcgggcaatccactggcggtggcagccgcccatgcagtacttaacatcatcgaaaaagagcagttgtgcgaacgagctaatcagcttggtcagcatctggtggaaatactggcacaagcgcgtactcagtgcccggcaatcgccgaaattcgcgcactgggttctatggttgcagtggaatttaacgatccacaaaccggtaaaccctcaccagaatttacccgcgaagtacaaactcgagctaaacgcgaagggctgctattattgagctgcggtactcacggtaacgtgatccgtttcctctacccgctgacgataccggaggctcaattcggtaaggcactgcaaattctgtcacatattctgaaaaattaaaccacatagccccggatgtagtaccacatccgggattttctctcttacattacgtatatcgctaatgggtttcgagtttcatcgcgcccgtaaatgaatacagccaacaaagaggaaatgtaaaaaacagaggaattatcatttaattttttgtatcagcacgggagttcattatctctaccacctgatccagcaatgctgaattacaggccgaaaccagactgccaccaaacatagctcttttccggctgccatccagtgcacaaaaatcaccacccgcttctttaatacagggcaaaattgccgcgctatcccacggtttcattattgtatcaatagcacagtgcaaccttccggctgcgaccatcgtgtgctggtagcaatcattaacaaagacaaaatcacgggcagatttcactaccccatccagatcataaaccacagtgccattttccagatgataaccggaaccgtgtataccggaagctgcaatcacagcattgttaacagatgttggtgagttatccatcactttaagctggcgtaacggcttgccttccacactcatccagcacccttccccttgtgaagcataaacaacggtggaaattgccggaaaactgattaccccaagttttggttcaccattttcgacaaaagccagcaacgtactaaacaagggtacgccatacaaaaatgcccttgttccgtcaatgggatcaataatccagcctgattcgaatttatcactgccatccagcccaaattcttctcccagaataggaacacccgggctacgtttttccagtatgttacgaatctctgtttccagcattaaatcagtttgagtgacaacggagcgatccggtttgtagtcaaactgtccggctccgtcaaacgcatcctgagtccgttttttgattgtatttactgcttcaagggcaatttctagcatctttgtatcactcctcaaggtatcgtttaacgtcatttcagcgtggcaattctatgataaaagccataattatgtcttgttaaaaacatatttttagaaaaaaatataaatacattaagaaaataaaaaacataaaaagaaagtgaaagaggctttcacatcatattcatttaaagaaatcattgcttaataagcattaaattaaataaaataaaaaaatcatcacacttccctgtattttaaaaaaaaagaaataaataaaatttaaatgtataatgaattacaaagcactttctcggaaatattgacatattggtataagtgctataattaaaaacacacacaaccaagttgtttttttaaaaccaagcaaggaaaacattatgaggtctaataatatatttaaaattattgtatttttattaatatgccaaattggctctgtctatgcttattattcttgtccacctggagatcctgctgtaccacagggatacgtaggcactattttatattttgatgattatcaatctattttttttactataaaaaatcagccggaatattatataaaattaaacagattagatggaaaaatcactgatgaacaaaaaaatagctcttaatctattaatagatgccagaaacaatgatcacatagttaatgtgacctgtaagaatggatgggccaaatatatatctacattttaataaaataacacatcgtcattatttataaatttatttaacaaaaatcaataacattattaaaagttgatgatttgatatagctataatagtaacaaataatttaccagaaactttttaatatcataccgtatttctctattcattatgatataaaaatggcccactaatgtgagccatttttattacttaaataaaactatcaaaccagtctggatttgcccgttgtcgtatccgaccaggccatcataatggaagattgtgtttgtccatccagtgcatcaataaagccactgtcaccgattattggtgcaaagccgctcattgcctgaaccagtgaatccactgcattggcagaaagcgcggtatattcacgctcaccgtgggtatttttatcgcccagtcgggtaacaatatccgcacggttgccattgaagtaatccgtaaaggtcacagagccgattgcttcaaactgcccctgttcagaactgtcttccacatggcggttagtgagcatcaccaaatcgtaaccgctgcgctggaaccatagatcctgccagttgagttcattgaagacaatcttgtcaccgcgtttgagatcttcaaccacgttatcgatcacatctccgctgataacataactattcacgccagcaccgcctttaaagcggttctggtatcctcccagcaccagcaagtcatcaccatcaccgccgtcaaactggctgaacttggagataacatccgcaatcagatgatcatctcccgctccgccgctaatcaatgcatggtaacctattagttttatggcatcgttacctgccccgccatcgatccggttatagttgccgaaaaccgtagcaaaatcatgatcatcacccaggtcagcctgattattgttaccgatagcaacgacataatcctgaccttctccaccgtcaatacggttgaagttaccggaagcaacaatgtagtcacgccctctaccggtttcaatgaccccgccttcaccaaaggcaaagacctgatcatcaccctcgcccatgtaagcgtaatttatgcggcctgcaactacggcaacgtcattgccctgaccaccaaacatgatgttttcgcgccccatcagaacgcctgtgtcgttaccttcaccgccagtgaaaatattggaggttcccagagcgtaataaacatcatcaccacgaccaccccagaagttgttgttatcacccagataagcacccagatctttgccgtctccgccccagttaaagttatagttaccgagggaaacatggatgtctccatccccttgcaaatgaccgctggtacgcaggaaatcaaaggttttttcctgcatatgcagcagatcatcagtcaggttctgtttcagattagaaaccagatctttcatctcttcctgcttatcctgcttcagcagggttgcaaacaggtttggcaaattaagggaattaaagccgaatgtccgctctgattgtgtattttcgtcactggtattttcagccgatgtaatctgttctgtcggggctttttctttgatgccatgactttcaaggaacgaacttacaccgtctgcgccggctgacagattggttttcaggccattgagcaatgtttccggatcaacaaatgccgacaactggttaccactgaattcactgatcacctccagcatttcccgcaaaatggcaacaccgtctactgactgatttgttcgggagatgatagtcccatctgcggtgtagtctacgccaaagatatcacccagtgtggtatcagcattcacgctggcaaggtttctcaacagcttatttttaagctgacgaggcaaatccgccggattaaaggtgaatgtagtttttgctatccctgttgaggtgtattgctgagtcatcaggccaaacaatgaaccgaggttaatatccagaatcgagtgaatattgtcgccgaacatcaggttccagttaccggttgttacctgaatatccgcaccctgcccgccaacagcaaaattgaaggccagtttttcattcagctggcggagtttattggctctgctcaggttagccatttctggtttattccctgcaccactcagccactggttatatttcttgttcagtgtgctttcaatatcgctcttcaggccacgaccgctgcgtttatactgagaatcaagatctgtcagcgatgtgtaatccacgctgctggtcatatccagccctgacatatcctgtagatatttcttcacgctttcggttgtccactgtgcttcctgttcagacaaccagtcagaagtagtgtacgagccggcaatgttttgcagaatgcccgagacgcgggaaacattatcaaacgggttaagcatcggtggtgtcgggatggatttatccatcataaccagcaaatcattgctgcgtccctgattaaagctgatattccggttaccgatgaacagttgtgcgccttccagtgcctgataaccggcaatattcacgctgtgtttgctgtcaccgtctcccagatgaaccatgacattattatcgccaaacgccagtgacttgaatcctcccgtgccaactttaatacccacgttggtggttccccagttaatagaggtaaattcgccatcacccgcctgtagctgtacattgccggaatagctcagtcggttatcggaagacgtcccgaccggataatcctgatgctgatgttttttcggcgcatggaaagtttcggtattgtctgcaatcgcattcttctctgtcatcacctcatgcgggcgatgcttccggctattggtgctactacgtagactgcctacacggacaagtgaaacgttgttttcagaaacatgattacgtatacgttcggcattgccttcgacttctcctttatcggtccagctcaggacgattttattttccgtgatcttattttccgctttattgtgctcagaccgcgtatatttacgacctgatttaccgatcactacttcggttcgacgggcagagactgtcgtgcggatcccattttcatcaagagcagaaatcaggcgatacgcaaaaccatcgcgcttgtcatcactgagcagagaacacccgaccagactgatataatccagctttccgccatgctggaaactattctggaactgctttaaccgcattgccagttcaggagccttgtaatcactcattgtcgtgctgttgtagccatcaatctcatcaccaccgtgaccaacaacctgccagcgtattgtgccgctcaactgactcggatcgccatataccactttatactgaccattgcgatcaagctggacaagcacactctctttcggatgcttacccgccagataagagacagaatcagccacatggggatcatcttcaagctgaataataacctgaccatcaaaacgcatttttttgcgttccaatctcggcaacacctcgatctcttcccattcactcagatcgtggttattcagcggatgaagcctgttcagtgcatttctcatcggtgagccatcaaagatttccattgccagaatatctttcatggttgttctgtcaccgaataccggacgataagctgctagtgcctctccatccagaacaacaacccgcccgaacattctttcccgctggcggtttttagccatgttgtagctttttgccatgttcagaccggactgaccgaagaaacgcgtgacgtaatcgctgaatttctctgccgaggagaattcgacaatcccgacattaggatcatagaagccgtatgtccggttctcaccgctgccttttgaccacgccgccatcgcgtgtcccagagtattcagctccagcagaatcgggtttttccctgcattggcagccgtgattttttcaatcacaccttgtacactcagcgcttgttcaccgctcagtttctctttccatattttcgtggtgctatccagcatcggatctctggcatagagcgcagagagtgtccccagtaacttactggcgttggcctgttcaccctcggaatataattcgggattgttgagcactgaagccgcagagtacattttattcagcaggctacgtcctacgttttcctgaccgtcattttccagctgttttgccagcagaaccagttttgacagtggtacacaacgcccaccaaaaccatcattagacaagttgagtaacagcagttgtggcgccagatgttcgctggcttttgcatctaccgcccccatagaagtgacatcacggaaaaggcggctatatttctctacttttggtcgcagagtcattttcagtgcccgatgttcaatttcccacgccagtgcacctttctgttccgccgtccagtttcctttaaccagcatatccaccagctgcctgatatccatatccgaatggaagccatccacaatttggttagcgtgattatgccgataacctgacaggaaggcttttgtcgcgcgcaaatcctgctctcgaccctgattatccacctgaggttttagcgcctgcgtgtagcgcatcaaatcatttttgatgcctttgagaatagtgctttcctgctcatgtacttgagaaccggcttcagataaattggcaacaatttgtccggcatatttcaccattatctgataactggatgcatggctataatacgtgtgttcaccagagacgttataatcagaggccaccagtctggttcggagtttttcgccttcattgcccagaccttcattatctgtcagcaacataaccggcatctgcttcgagaccccgcgcagattctgctccacagagaatttaccattaacggcttttgccagtattccggtcaggccggaaggattcggtattccatgagccgtgatcgctttggtcatacttggcatcggtctgtccagcagtaagccggaaatcgacattcctttactatccacataacgggccagatcagccgcaaccggtgctcccatcgaataaccgtggataatgatattttccgggctgatatcacgttcattaaccagataatggaacatggtacgtacatcctgatacattccctgttcattcggatacccgtcgctggtgccataaccccgcatattaaccgacaacacatcaataccctgttgtcggtaatgcggctgaattttacccacctgctcttcagccgatgaaccggagccgtggataaacaagacgacttttttatccgaagtatccctctgtgatgtgttttgtcccttatggtaatagcctgccaaacgtccggcttcccctttcagggtaactttttcggtcacaccactattgattgctaagttgatcctgttctgcatctcctgactgatttggcgacgctcttcttttgtgccgtacagttcactgttcatgaagcgggttacaggattctttggcgttcgttcatgcggtgctgagccatcatcaggaatagctaatttctctgccctttccggttgctctccggttccgccatgatttaacgcagtatcaagacggtgatgtttttgtttaacccgctcactctgagtcgcttcctgcaatgactgaccgaaatcaaacagctcgcttggtgtccagataccaaagcctggccgccatgctttgccaagcactttatccgccccaccagccttaagaatacgggcaacaacacttgaacagttttgcgtcataagctgatagcgggcatccggatcactgctgattttgccccattcagcctgcattgccgctacatcaaggccttccagattgatgcgatagactcgatcagggtcaacggtgctgtttttgaaattagcaatctctgccagctctctttcagcaaactggctcataacactggcaatggctttctccatccgtctggaattctgtagtctcgctgccagacgtaaagcttccgcaaaattacggccgacctcatgcatatccatgccgggatcagcccattgagcaaggtacgggcgataaatgtattgcggtatttcagcagatttgagcagctccggattggcaagcgccgccatcgcaaatccttcgctgacatcactgaatttaacatccacgcctttggcaattttcagtttttcaaggaactctttcagttcagctgagccatccgccagaccaaagccatcatcttcttcggcctcaacatcaaatgtcagggtgggtgcctgaaaagcaggctggctcagatcatgccagcgaagtcgcaaatcaggctgatccggggtagcgatattcaggagttcccgtatatccgtcgatttattccctgccggccaccagctcacatagttgatttgattaagatgagtcgcatcttctgcattaacctgaacacgcccctgaccaatctgcattgcaacatggcccagcgtactgttttcactcggccgccagacaaacagtgtggcactgacaggggacaagtgttgttcaatcgccagatgaacttttttcagaccggcaatatcaatacctttgccatctttcgcaagatcatgggcagccagaccggcgaaaacagcattcgtgacatcctgaccatactctttggttaccgctgccatcacctgtttcagcccggcatctgcgg

SEQ ID NO: 2906 - DNA, 26380 bp, Xenorhabdus sp.; identical to SEQ ID NO: 2905
  CDS (15751)..(16743)

SEQ ID NO: 2907 - DNA, 26380 bp, Xenorhabdus sp.; identical to SEQ ID NO: 2905
  CDS (14880)..(15761)

SEQ ID NO: 2908 - DNA, 26380 bp, Xenorhabdus sp.; identical to SEQ ID NO: 2905
  CDS (14081)..(14848)

SEQ ID NO: 2909 - DNA, 26380 bp, Xenorhabdus sp.; identical to SEQ ID NO: 2905
  CDS (12797)..(13543)

SEQ ID NO: 2910 - DNA, 26380 bp, Xenorhabdus sp.; identical to SEQ ID NO: 2905
  CDS (11712)..(12467)

SEQ ID NO: 2911 - DNA, 26380 bp, Xenorhabdus sp.; identical to SEQ ID NO: 2905
  CDS (10641)..(11405)

SEQ ID NO: 2912 - DNA, 26380 bp, Xenorhabdus sp.; identical to SEQ ID NO: 2905
  CDS (4967)..(7657)

SEQ ID NO: 2913 - DNA, 26380 bp, Xenorhabdus sp.; identical to SEQ ID NO: 2905
  CDS (4371)..(4952)

SEQ ID NO: 2914 - DNA, 26380 bp, Xenorhabdus sp.; identical to SEQ ID NO: 2905
  CDS (2260)..(4326)

SEQ ID NO: 2915 - DNA, 26380 bp, Xenorhabdus sp.; identical to SEQ ID NO: 2905
  CDS (590)..(2227)

SEQ ID NO: 2916 - DNA, 13449 bp, Xenorhabdus sp.
  CDS (11395)..(11925)
tgctctaaagatccgctcagtatcctatcaaatacatcattacggcatgggtctgacactctaatatcaccagccatgacctgactagttacagtatcaactcccaatacttcagcttttttataaagaatataactgtcatgctttacaaaaggatgatcgccaatacctaaaatacacgtatcatcatatgcgatatcgcgataaatagtagttaggttgacagcaagaaaacactcttttgttaatgcaggataaaatacaggatcgttacaaataaagaacaggtgttcctttgcgcctgtaagcaacattattgctccttttttaacaggcacaaagtcaattgtcatgttaatccgctaataactcgatccagttcgttttgttcacgcatcctatttgcaagttgtatcgccgtctcatctgattttcccagcgcacgaaaaacgcttctggggtcaattgggtacgagctgccatggggatcgacccattcagggcaatgcgagtgagtgtagtcccttatctgccattttgtcatgtagccatattctgaatagacgtcactcaaaacacctatttcagcatctgttaactcatcatattcatcacggtcaaccgatgggagttttgtgattagctcataattactaacaccggcaatccattttccccagccatcgtctgaaccctgcacagagccattcattaaatcgagtgaatatgagaggactggcccctgaggcatagataccatacggtcaccgctgagtgattccccgtatttcctcatatactctctgtcagccagatacatgagtttcattagtttcagatatgccatgcgcccaccacctttcgatagcaggtacgcagccatttgggctacttttatttcgcaaaacatagaaacctccaatgaatctgcgttatcaaattgataactcttcatgacggagtatatcttaaggtataaatattctctattatttctatgctctttaagccatcttacaatcaatttaccttaaaaatagcgcttaatagattgattttactattaaaaataaatatgttgcaagtttattaattttgtgattgcgacactctatttacactgatctctaatatattcctgcaagtacttagtctgtcgttcgttctccgccatcatttctctgagacggtaataatcttgtcgagctggttcggtaagttgtggggctcctgcatcgcccacgctgccgggggaagaggcttcagacacaggacaggtggccttgatacgcagcttacgacgaccagcggcaacatcagcccgaagagtatcgatttcagtcttggcattggcgagttcctgagtgtgtttgctgtccagttcatgcagcatgtcaatgtgcgtgttctggtagttaattcggtcggtcagttgctggatttcggttgcttggtcattattgataccgagctgcttcttatatccagagcgatagaagtaagccgcacccgaagcaataattagcgcaataatcacgctataggtgagattgaatctcatgataaaaacatctggcgttcagatgccctgcgcttggtcagaccgttcatcactttacctgctgctttgttccatctctgaaattcatcggctgcaccttgatagtcaccggcattgagtttcttcagcaaggtagaacgaacaaagttacctgcaccacaattgaagatgaacgaacacagggcatcaaactgaccctgacttagtgataccttcacggcggattcaagggtgatgtagataggctgaaggtcatcatgcaggaatgcgtcggcctgctgttcggtgataacttgccccggcttgacgtcttttgtgtgaccgtagccaatcgtccacggaatgccacccgttgccggatcgggataggctttcagtttcaggccttcatattgtttgatgaagctcaatccactctcgctgattttcatctgtgtaccccgaacttgtttttgaagaaggtaaagaccgcatcaagaattgagccaatcttcttcgtacccaaaaagccaatcaggacaccgaagaactgagccagactcagtggtagttgtgcatactccagtgcgttaataatcccgacactgattgccgcacagataaaagcttcgactaatgaggctttccagcctgagccatcccttttctcccgggcaaatgcagttgatgccgctaaaaacataccacccagaaaaggtgcattgataattaaccagtcccagacatgcgcccagaactccgtgtctttttcagtcatacgcatatttccaccccatcataacaatgggcgtccgtggggtgagtctgtggtcgcccctgtgagttgtagtgagtaggttgccagccgcaatagcagatactgaggttatgggagtgattgcggtggcaaaaatagaaaaggccagttaagcgactggcagcgcatatccttctttgctatcgttacattgccaaaaataactgtacaaataaaggatatctatgagtaattattcagacctatggaatactattaaccgtcgtatcttttctgttagaaacattaaagttaatccacttataacgtcatttggtcaatctgccgaacaatccaaggtgtttttacgcacccttcaaatattcattttggaggatatacttaggcaacacagagaaaagtacgcgactatttttgaaccacttaatggtgaaaaagcgctgaatcacaaaatttttatcaaaacagggaataacatagatttaattaaatcaatgtctcttgaggataaaatattgaccttacaagacgagataaagattaaacatctatctcccgaagccaaacgctatactgaaatacatatgatgccggatgtatctataacttttgataactttcttcctgaagaatgggaacatgaggaaaacaaaatttttcttgctccactagaggttgatatttcttaatggcttcttcaatctcccgaagccgcgctaactctgcggcttttcgatttttagcatcaatgtacacttttaacatttccgcttgatatctcagccaataatacaaatcctcatcacttaatccatcccggataatataaggttggttgttttccagctcccttgatcgaactgaaatccaatatggcaataactcttcattgtcatcaagtgctatatcattttttttgattataccggtctctttcatgttattcctctagacgaaaaaaggccgcataagcagccttgaatttaggatgtagatttaggttatttccaattgatgcaaaagtgcagtgtattaccagcgttttcttgcaatagggtacctagtttttttgcatcatcatttttatatacattgtcaatttcatattcgtattttgaattagtggttaaatttaaacttttaccaagattataagtcacaccatcaactattatataaagttctttagtttgaaagaacgttattaatttctggaagctttcttgattggtatcagaattagcgacccaaagaatcacatcatcactatcgtcattgctcgtatgccaataaaatgacgaagtttccacaatacctgttttattttgaatgactttcaaatcaccaaaatatttcgaccactcatactcatcccattcatatcctgctttcacatatccccaggctttatgcccttctgatcctggtaatgttgctttcgcggttcctattgtaagatcaaaagacaacatacattcaactggtgttactttagacaacaacacccaatcgcaagctaccatatcttcctgctcaggcgtccaaggtaagatgtttccatctttatccaaccactggagataggtaacactacctgaatcatcgtatttaggcataaggtatatattagaatcccagtcgctacgccttactggtttattcaaatacacttgaattaccgcccatgggaaagaacccacaggtgctacatcgtcaacttcaatatcaatacttttcttatatttgtattgatcaggattaaatgagcattttttattatccagcttattaacgtcagacataaacacctcactttattattcgttaaaggtcatttcatcctactgctaactagccagttaatattactgaggccggatttttatctcaattgaataacctataacaagatcaatacgccttaaaatagggcagcgcatgataaagtttatctgttagtcgagtgcgtgattcagtgaagtgtatatttgaagtttggtgctgatgcatgccatgccagccattattcagatagtaactattgtctgagaacggggagcatggtctttcaacaatactgtcatccagacggtagcctgagtggacgcaccttaaacaggtcttcaagttcctaaaagggagaacaaggatattcctctgaacatcccgaacgcgcagaattttgaactagtcggtttcgccgacaggttgagttgttcggaatgaccgaacatgtgatactcatgctagattttaacatttaatataaaaggatttttatgcaaccgaacgataaaaacccactcaaacaaaagtcatttaaattcattcttgccggtgtgatattactttttatggcgggtattagatttattcaatatgatgattttttactgggtactgtcgaaagcttattggctattgggcttgttctctttgggcttaaattgaaaaaaggcgaaaataaaaagtagactactagattccctcgaattcgggggaattaaaatccatcgaactcattgcgccattcgaattcatctttcatgagtattctctcccgatcagtatgttgaccgaaacacctaaaataacacttaatatattgatttaactacaatataggtattgatcgtaacgttcactttgagctgtaaactctaagttgactattggcagatatgaaaaagccccacttgattagtgaggctttaatctgctttcggttttactgcccgagcataacatgaaatatacacctaaatttctcaaaatcaagttattttagaataataattgtatttagtgatgcttatcgcagttttcttttctaatttccctcttaattgcatagtgcatttcctcttccagtaactcttctgaccactcagagcgttttctagcccaatccactctacaaccggttagtcttgataattcacgggcaatcttttgcgggtatttgcgttcacaatatcgcttaatagcaatatcccgaataggattatcccgtttaaatgtcttattcaagacttgctcaatgaaagcagcatcatctgattctttggcgagagcgatgatgtcacttaatgattgtttagggtttaatatttcatgggctttttgaaatagctcttcaccttgatagcctgacttgttcaagtcttttactaccttaattattctttcaccttcggtatcactccattcagtgcggatcatcaatctgccaataacactagatgctccgccgtaatattcattccctccatattttcgcccccatatcatcattaaatatctgacccaaacacgttgacttggagtgatggtttttcgacctttaccccatactctgcgtaggtctttcttattagctacataagccaacaatgggaatgagtccttacccctcatcttacctccggcaatactgtatgctctttatcgagacgcgtcgtatacatcaaaattcccgccattgattttctatgtaccctaacaaccatccttccgccctccagttggagaatgcagcggtgatggcctgtttttcttttcagatatctggcctcttcgattgcaggctctagttcggtaaacatacctcctcccgtgcccgtaacggctaatctcgccaaaccacatatgagcggtcgcgttctgagattgacttctggtgtttttccaaggcttgatgatgatgcggtgaggttggtttgttgcgagaacttctttgagttgttgccaggctaattctttcgtcgatgcatggaagagaaaattacattccatcagccctctcttttattccataaattaatcgcattcttcatgcttaattttgacccaatatagtaaccgcatgataaacaggtcagctcacatttgaatccgggtttatcgtaatggtttactcgaattctagtcccattacacttactgcaatttttaatttcttcactcatacttctactctccattgttaggacgcaaaaaaaccgcactgggcggctttggaaaagaaaaatacgctggggaatgttatttatctattaatttcgctttatcttttgatgccgaagcctctatcaagtcatctaccgtcaagacaggttttattttatctagcatattcagaaatccgtctttatcgccatctgttgtcagcctcaatagcatcgtaacctctcccagatgtctggttaggtctccataccctgcgtgatcagtgagccattgatgcattttcccaccatttttcttttttaattcttgtaactttgttctaaccccgggagctaacctgtcataaacgatatctcttataacatgagcaaatacgggggggtatgcccctggtttttctggcatattatagccccagactctgcaaagctcctcaaaaaactcaagctgaaatgtccttaaccatgggcgcatttcttttgctatatatttttctaatagagatgctaatgcatcccttttcctatcacgctgataccctgttgcctcatcaactaaggctataatccccactttcgctaaagacctaaccaacacttcagctttgtgcgccacttcatgttgttcagatgttctgataacgcctgattctctagctttcaaataaaggtcaccaactaaaggcaatatcaatacgttatacccttcctttacagtaccagtatcagtcttgtattgaactttactcattacatcaatgagttcctgagtaatgaatggtattagattaatagcatccataaatggtggagtggaaataccatcgacaaccctttggtcagactgcgtttttttacttcctcttctagttctacctaaagcctcaaacacagatcctgcagcaacgactctatccccgttttccaaaacagccacatcgagaataacatcacctatcactaacgggccttcatttactaccaaaggcaacgctgctttggctttcttggcagcaacagccttcatcgatgatttttttctttcttcagcagttcttttttttgctaatgcgttaccaccattagctttcagtaatgatttttcgccttttaatttagtcatgttcacatctcttttcacgtaatcgtgcaaaattaaatcacaattcgttataacgtgcaatttaatttttttaacgtaaaaacaaacaaaaataaaataatgcgtatattaaataaatgcatttaatttcaattagttaaataatggatctgtaaagcggttttttcgtaataaacaataaaaaaacatttaaaaacatgtaattaaatggcggatccctgtccgatagaatgagtttttttatggtgtttaatcgtccctgtgttaatctcacatcgaaataacggcactcataaatgcaatggtggctgtgatttggtatttcattctgcctccagtagttcatcagggatgtaaacttcgtcgcctaatttaaaagagactacagcgcggcatatggcgatttgcggtgtttctgcataactccaaccgttcgaatagtaatattctttcgctgaccaagtggtaccggttgtttcgatttcacatgataaatcaattgagtaatcatcaatcaactgcccacactgtgtccaattgattgagggtttaaatgaataatatttgctttttttagctacaaaatatccgctggttaattccagaaaacgacccttactacaaatctctgctcctaaagacaaggccacagcccaatccaacgccttacctgtcagctcacttgttttgattttcattcgttaataaccctttttgtgttttctgttgctctcacataaccactcatgaaagcttaagtcagttttcttaagcatctctttcagatagtaaatctgccttaatgactcataggagtcggtaggcgtgtattttttctctatttgaacaactggctctggtattttttctcctgcctgaatgcgcttagccatgattttcaattcccggctacagagttttttaacctccgaatcagttaagttctggcgtaacatttcagcgtgaatatttgtcaccatccagtaacaggcgttagattgccactcgacatcacgccaaccacgatacttacaataatcacggaacatctcgtaaagctcgtcttcggttggcagtccgactgacaatgcttctccctgcttacaccattgcacgaattgacccggcgaaggccagaacggggactcactggcacgagcctgacgcattcccgcagataattgctctttggtgcgaatgccgttctcagcgaatgcggcgatccactgctgtttagccaatgcctcgtctgactcgttccgtagattggtctgcattgcagcaggaaatacctgtttcagttgcctgaataacgcattgaccaatcgttcggcgttctcgttcactaccggttgattactcggctgacggtcttctgacaagcgagataatgccgcaccatcacggttagcaatggcgttaaccagcttgcgattcatagaaattcctcccatgcctcagccgtgttccagttgttaactgactccgggttagggttggcaatttgcttacggttgggttgggtgctctgtgcttcgagcgtgtcccatttttcccgtaacttggtaggtgacaagatattgcaataccagaatgaatcctgatttgcccacttgaacaggcggcagatctccgcatgggttcgattgtcggattgcctcatcaagcgaatatcattggcccatgatgcccaattgggtgttttggtattcggcctgacaaccaagactttctgataaatccactcagcagcagtcaggtcttcggtagttccccacttatcacctttgggggaactgacagcagcatcaggattaaccttgccagacgatttagattttctcggacgatcatctaataatttattattagatatatattcttgttcatgatgtgcgggtttatgtgcgcctccatgtgcggggggctgctctgaggccgcgttattactgggttcgtcatgtgcggctgtatgtgcggccttatgtgcgggtaaattgtctattttttcgacataatcactgtaatttgtgatagtgatcactctgccttttcgcttctccccatcaattgaaatcattccctctttcacaaaaaatgccagcatccgttctactgcatcacgactggttggcttcccgttgcggtcacacagagatagccccagatcagccgccgttacgactaattgaccgggttgtaagtgccacactttccctttgaaattagcggtataaggttgtctggctgcatccataagcaaattttcccacagtgttctgagaaaaacgtctttagcccacggtttatttctgatgctccggtacaacgggatgaaaccagatttctgattctccatcctgttgctcctgctttttctagccgcattaaaatcataaacctccgctgtactcatacggcctccctaccattaaatcggattttcatgtatacttacctcgttgttggtggctttagagtgggcttgcatacctcttcttcatcgagataccaacactccaaactgtataaagaggccctagttgttcgtgcaactggggtttttctttttgtcccgcctgcaattcccatccgtaacattcctaaagtgaaatgacagttagactttgtttagaaaataaaaagagagatcaactatcctgagatagataaccgttaacctgactataatcaggttgataattctcccgttttcaaggagagcggtagattgttaaagagcgatgacatttacttcactgggaacaagtgcggaagatcaggtctaatttgatgcgccttaaccttccctcctgtagcacttacgatccgactaacatgttcaggagaaacctttgatttgttatgcagccacttatagaccgcttgttgcgttataccgcatgctaagcctagttttttctgtgacccaacaacatcaatagcggttttgattacatggttcatgaaaacctccgttgttatttatggataatataaaactatagttgttatttgacaacaactaaattcgtttgaaaaaacacaacccaagttgtattttggagatatgaaaacgacactggcagaaagattaaaaaaagcacgcaaacaggctggtctatcgcaaaaagcgttaggtgagcgtgttggtgtaactcaagcctccatccaaaaattggaaggaggaaatgctttaagctcaacaaaactgattgatatagctaaaactcttggcgttagccctgaatggctttctggtgctagagaagattctgacaccactttaggaatccgggcgggcacctccatagaggatgaatctaaacgtgattcccaatactacaaagttgaagtatttgatgtccaagcaagtgcgggaagaggcgttatggttcgagatgaatttattgaaacgattcgttctattgaatacgcaaatggggaagctaagtcactatttggtggtagaccagcagagcatataaaaatgattgctgttaatggtgattcgatggctggtacgtttgagtctaaggatcagatatttgttgatgtttcagtgaagcatttcgatggggatggaatatatatttttgttcttggtaatcaaatatatataaagaggttgcagctacaatacaaaaaaatggcgattatctcagacaataaaaagtatgaaacttggtacttagatgagcatgaagctagcgagctttttattcaaggaaaagttttagtcagtcaatcacgcgcatataagtttcacggttaacaccataggccgcaaggtgcggcctcatgctaaatccaagctcatctcacaaattaaacaatttctgatcaacatattagtggaggtgatctagtatgggttacatggtgatgtgatgaacataacctaatgtattttgttgtagctaaggagccatagctggctaactaacttgggttaattaattagagataatctatgcaagctcccgtaattagttttattaatatgaaaggtggcgttggtaaaacaactttgtgtattagcgttggtgaatatctagccaaccacaaagataagaaagtgctaattattgatatagatccacaattcaacgcaacccaatcctttattggaaaattagacttgatctcaaattatttaagtttggtaaaagaaaaaagaacaatcaagaaaatttttgaagtaaattcatcaatttacgaagatgactacgatctaaaaaaagaagaagtccttttaaatatatatcctaacttagatatcattcctggtgatataaatatcatgtttgagcataacacagttgataacaccagattgatacgcattcgcaattttatagatgataacaacttacaaaaaatatatgactatatattgattgactgcccaccaacgatttctatgtatacagaatcatctattatggcttcaagccactatataatgccaatgaaaatagaccaatactccgttttgggtactagtaatttactatcaataatatctaaattagctaaagatcaaaggcttagcataaagcctctcggtgtaatatatacaggaacatcaaaaagactgacaaaaaagacaaaagaaataaaaaattcaatagagacagaaaagggaattaaagagctgtattttttcacaaatcatttccataatgttagagatttacaggttggtcaacaaggaaattttgcttcctcctatgctcagtctagggttatgatagacgcaatctgccacgaaatggagcaaaaattaagcgaggtcaatgatgaagcagaaacaaaataaggcaataacaaacgataaactaatagaattaaaaaatagtgattctattgaattttttgttggttttgtttctcaaatcacattttcaaaagaattatttaagacaaatagcgaattgtcagaatttatcaaagaaatttttgggtttgagttcaaaagatatgttgtggcttcaagaactctaatgttcgctagaaccattaaagaaatatacaataagcttgataaaaaaagtataataaaagcaaaaaataacactgtattttatattaatattttaatcaacgacccccaaaaagaggcgttagaagataataacttgaagtctatacctaacaaaaaaggtaagaaaggaaaaaatacaacaacagaaagcatctcaaagtggatcaaggggttaaggggtgaatagttttttatcaactgatccatataatattttagaaaccgttaaaaaatttaaaaatgaatttacttcaattgaaaaccaatacgttagagactgtctaatttctaccgtaaaaaagacactactacttaaaataattcacaacaaaacattaacaaataatagatatcttttaagtgtcatttatgattttttatgctgcatctcctctatcaatttgaatgaagagcgttatttttactttaatctaagatcttcaattgaaaacattattcgattttctttaggcaaaccgaacgatgatgaaactggaataacaagattatttactcaatttaaagataagtataagaatacaagcggagtcagcagcttatctcgcgcatattctaatgcgtgtaactatgttcacaataacattaaagctgagctagagttatccaaaagttttagttacataaacggcacaaaaaaccttccaaccaagcggcttaagtcgctagctaaagaactgcacgaagtgcaatcatcaattgatgaaatactgatagcgaataacaaagctgatattacatacaccttcctttacttgaatgaaaatttaacttacctaactaataaaaaatttatagagaaattaaactgaccttaaccctcaccgcgagggcttttttgtacctgcctatccctcctttggtcaattcgttaccgcgatcacacctcagaaaaaacatttaaaaaaaatccctttaaaaacaaccgcaccaacttataaacaaccaaatatcaactttagagcacatggctcg

SEQ ID NO: 2917 - DNA, 13449 bp, Xenorhabdus sp.; identical to SEQ ID NO: 255
  CDS (3784)..(4605)

SEQ ID NO: 2918 - DNA, 13449 bp, Xenorhabdus sp.; identical to SEQ ID NO: 255
  CDS (5343)..(5717)

SEQ ID NO: 2919 - DNA, 13449 bp, Xenorhabdus sp.; identical to SEQ ID NO: 255
  CDS (7715)..(8329)

SEQ ID NO: 2920 - DNA, 13449 bp, Xenorhabdus sp.; identical to SEQ ID NO: 255
  CDS (9516)..(10130)

SEQ ID NO: 2921 - DNA, 13449 bp, Xenorhabdus sp.; identical to SEQ ID NO: 255
  CDS (10193)..(10531)

SEQ ID NO: 2922 - DNA, 13449 bp, Xenorhabdus sp.; identical to SEQ ID NO: 255
  CDS (11126)..(11461)

SEQ ID NO: 2923 - DNA, 13449 bp, Xenorhabdus sp.; identical to SEQ ID NO: 255
  CDS (12495)..(13100)

SEQ ID NO: 2924 - DNA, 13449 bp, Xenorhabdus sp.; identical to SEQ ID NO: 255
  CDS (13136)..(13447)

SEQ ID NO: 2925 - DNA, 13449 bp, Xenorhabdus sp.; identical to SEQ ID NO: 2916
  CDS (10480)..(11184)

SEQ ID NO: 2926 - DNA, 23596 bp, Xenorhabdus sp.; identical to SEQ ID NO: 260
  CDS (16369)..(16566)

SEQ ID NO: 2927 - DNA, 23596 bp, Xenorhabdus sp.; identical to SEQ ID NO: 105
  CDS (1710)..(1994)

SEQ ID NO: 2928 - DNA, 23596 bp, Xenorhabdus sp.; identical to SEQ ID NO: 105
  CDS (2012)..(2305)

SEQ ID NO: 2929 - DNA, 23596 bp, Xenorhabdus sp.; identical to SEQ ID NO: 105
  CDS (23209)..(23595)

SEQ ID NO: 2930 - DNA, 23596 bp, Xenorhabdus sp.; identical to SEQ ID NO: 260
  CDS (22134)..(22331)

SEQ ID NO: 2931 - DNA, 23596 bp, Xenorhabdus sp.; identical to SEQ ID NO: 260
  CDS (20434)..(21195)

SEQ ID NO: 2932 - DNA, 23596 bp, Xenorhabdus sp.; identical to SEQ ID NO: 260
  CDS (16102)..(16332)

SEQ ID NO: 2933 - DNA, 23596 bp, Xenorhabdus sp.; identical to SEQ ID NO: 260
  CDS (15227)..(16096)

SEQ ID NO: 2934 - DNA, 23596 bp, Xenorhabdus sp.; identical to SEQ ID NO: 260
  CDS (12945)..(13826)

SEQ ID NO: 2935 - DNA, 23596 bp, Xenorhabdus sp.; identical to SEQ ID NO: 260
  CDS (11870)..(12925)

SEQ ID NO: 2936 - DNA, 23596 bp, Xenorhabdus sp.; identical to SEQ ID NO: 260
  CDS (11022)..(11291)

SEQ ID NO: 2937 - DNA, 23596 bp, Xenorhabdus sp.; identical to SEQ ID NO: 260
  CDS (10294)..(11001)

SEQ ID NO: 2938 - DNA, 23596 bp, Xenorhabdus sp.; identical to SEQ ID NO: 260
  CDS (10001)..(10174)

SEQ ID NO: 2939 - DNA, 23596 bp, Xenorhabdus sp.; identical to SEQ ID NO: 260
  CDS (8203)..(9837)

SEQ ID NO: 2940 - DNA, 23596 bp, Xenorhabdus sp.; identical to SEQ ID NO: 260
  CDS (4784)..(4978)

SEQ ID NO: 2941 - DNA, 23596 bp, Xenorhabdus sp.; identical to SEQ ID NO: 260
  CDS (2613)..(2918)

SEQ ID NO: 2942 - DNA, 23596 bp, Xenorhabdus sp.; identical to SEQ ID NO: 260
  CDS (2326)..(2613)

SEQ ID NO: 2943 - DNA, 23596 bp, Xenorhabdus sp.; identical to SEQ ID NO: 260
  CDS (734)..(805)

SEQ ID NO: 2944 - DNA, 28207 bp, Xenorhabdus sp.; identical to SEQ ID NO: 341
  CDS (10066)..(17838)

SEQ ID NO: 2945 - DNA, 28207 bp, Xenorhabdus sp.; identical to SEQ ID NO: 341
  CDS (18056)..(19165)

SEQ ID NO: 2946 - DNA, 28207 bp, Xenorhabdus sp.; identical to SEQ ID NO: 341
  CDS (19237)..(19614)

SEQ ID NO: 2947 - DNA, 28207 bp, Xenorhabdus sp.; identical to SEQ ID NO: 341
  CDS (26348)..(28207)

SEQ ID NO: 2948 - DNA, 28207 bp, Xenorhabdus sp.
  CDS (27998)..(28207)
ggcctgacaagttgacggctgaaccaataatgcgaccggagcggaatctttgagcatataaaccagtcgttcggccggatacgccgggtcaagcggcacataagcaccacccgccttaagaatagccagtaatcccaccaccatttccggaccccgctcgacacagatagcaacccggtcatccgtgcgtacacccagggcaatcagatgatgagccagacggttggcatattgattcagttctgcatagctgattacctgatccccgtggatgatggctgtagtatcagggtgctgttctgcctgagcttcaaaaagcgtgtggatgagaacattttgagggttttctgtttggcgcgtttgtgttgcattaaactccactaacaatcgctgttgctctgaagcggacagcatcggcaatctggcaacgggttgcatggcatctgcggtcattgccatcaggacctgtttaagatacccgatcatacgttcaatggtggcagcatcgaacagatcagtggcatattccagttcacccaataaaccggctttggtttcagtcagcgataaagtcagatcaaaatgagtactgtaacgtacctgttccaccggcgtcagttgcaggccgggcagggttaatgtttttgccggtgtattattcagggccagcataacctgaaagattgggttataactcaggctacgttcgggttgtactatttcgaccacctgctcgaaaggcaattcctgatgggcataggcagcaagtgaccgttcacggatttgtgtgagtaactctgcaactgtcggggattcactgaatgtgacccgcaacgccagtgtattgacgaagaacccaattaaactctcaagctcatttcccggccgattggcgacgggggtgccgataacgatatcatcctgtccgctcattcgggagagaacgatactccagcctgccaacagcgtcataaacagagtagcctgctggcgttgtccgaataatttcagtgcctctgacaaggatgcatcaaattgaattggtatttgtccggcggtataacccggactggcaggacgagggcggtcggtggggagtgtcagtaaagccggcgcatctttaagctgacggctccagaaatcacgttgttccgcgagaacatcaccctgtaaccaattccgctgccagagcgcataatcggcgtactgaataggcagtggcgggagtgatgtatcattattattatcggagtcattattatctggatcgcattccatgcggtaaagggcactcagttcatgtgccagtacaccaattgaccagccatcgaaaataatatggtgctgagtgaacaacaagacatgatcgtcatcagctaattgtaatagcttaccccggatcagcgggccttgagtcaggtcgaagggggttcgggcttcaagtgcgccaatgtcggcgatatgctgcatatgcgtttctgaatccagcgtacgcagatcctgataagtcagggtaaagcccgtgtcagcagggtcaatatgctggtatggctgaccttcggtaagcataaaacgggtacggagaatttcgtggcgggcaaccagccgattgagggtggctatcagggcatggtgattcagttgtccggtcaggcgcagtgacatgggaatatgataagccagactggccgctggttcgagctggtgaagaaaccacagacgttgctgtgcaaaagataatggcaggggcagatcacggtcagcgtgatgaacaggtggtcgtttctggtgctgctgagtttgtaattgctctttaagtttctttttcaaaacagcccgtttcagatcctcaagattcatatcgctctttatcatttgtcgctgtctccacctaacatggccattaattcctctgcggacattgaatccagtgtgtcctgaagggagtcaatattgttttgtcccaccgcttccttttgtgctgcgaaaatgatttctgcctgatccgccagtctgggggaaaggaacagtgaagcgatggggatctcaaccaaaaattcattctgaatgcgggttgcgagctgacctaccatcagagagtgaccacccagttcaaaaaagtggtcaaagcggcctacacgctccagtcccagcaggctttgccagatttttgccagtgttgcctcttcttcatcgttcggtgcttcatactggcgcgtaacaatcgctgacatatcaggcgctggcagagcctgacgatccagtttgccattagaagtcagcgggaaagattcaagcttgacaaaaacgctgggcagcatatagtcggcaaggtgtcgggaaagctgccagcgcagttcagttggggttagttcaatgccatcctgagcaatcagataggcaaccagttgtttctgtcctgccccgtcttcgcgactcagaacaatcgcctcacgcacaccatgacactgcatcagtccggcttcaatttcgcccggctcaatgcggaaaccacgcagtttgatctgtttatccgtgcgaccgaggtaatcgatattgccatcggcacgccagcgccccaaatcaccggttttgtacatacgggcatcaggttcagaagagaatggatcaataataaagcgttccgcagtcagctcggggcgattcagataaccacgggcaacgcctttgcctgcgatatggatttcccctgtaacgccgataggtacaggttgaccacgtgaattaagaatgtagatccgggtactggcgattgggcggccaataggaatggagtgtgcgacatcaacaggcgattttatctcataagttgttgcaaacgttgtggtttctgtcgggccatagccattaatcagatgagcaggctgggattcagcctgttgcacctgttgtatctttccgggatcaagcacatccccaccaacgagtaaatgatgtaattgcccgaacagtggcttgagcgtattaaagtattcattaaacaacccagcggttaaccaaagtgcagtgacttttcctctaatcagcgaaacacagaaaagcaccggatcgagcaggacagattgtggaataatatacagacatcctccattcagcaggggtgaccaaacttcccatgttgatgcgtcaaatgcagtattggcacaatgggcaacacagtcattcgcaccgatatctgcataatgattattaatcaccagataattgacattaatatgttcaaccatgacccctttgggctgtcctgttgaaccagaggtgtaaatcacataggccagatggcgtgatgtcagccccaaagcctgtgtatcgggattatcagtcggctgagtgtccaatgaggtatctggcgaatcaagcacgaataccggtaccgtatcaggcaacttgtcgagctgcgttgtttgtgccagtaataccactggcgtagcatctttcagcatcaatgccagtcgttccgccggataagccggatcgagaggcacgtatgcaccacccgctttaagaatagcgagcaggccaactatcagttccgcgctgcgttcaacacaaattgcgacccggtcatccggacgtacacccagcgcaatcagataatgggccagacggttggcgcgctggttcagttcctcatagctgagtgtctgatcttcataagtcagcgcaacagcatcaggacgctgtaatacctgagcctcaaatagctggtggatcagcatatcctgtgagaggtcagcctgtccggttttacagctactcgcgttaaaatccactaacagctgttgtcgctcggtttccggcaggatcggcacatgcagaattaattgctggggatgatgcatcaaggcatcaactaaaccacagagggctgtttgcagatagtgagtaatccggacagggtcgatacccgctaccgcgtgggcggaaaggcagaaatctgagcctaaatcatccactgacagagtgatgggatagttagtgccttctttagccgcgataacccgcatacctgaccaacgatttttgggcgttttttcttcactggtctgagagtggcgataattcagcaaggtactgaatagcggtatggcgtgttctacaccgctgcaactttgtgccagtgttaacggggcctgttcatgttccagcagtgtgattaaatcctgataagtatcctgtaccacaacctgtacgctgcgatttgcgagggaaatccgaatcggcagagtgttgataaacattcccggtatatggtcagctccagctccgccttgcagacggcctgacaaaacggaaccaaaaactacatcatcgcgactactggtctgtgccagtacctgcgcccatgcgacatgaaacaggacactcggactgactttcaggtgccgtgacagtgcacggatggaacccgataattcaggagaaagcggaaggtgtgcttccgtaatagagttattctgttctgtttctggattttcgttattagatattgaaagtacgccaaatggcgcagttggtgcatcaatatcagccagccgggaacggaaataatcttcgtgtgctgagacaggcacactcaacgttcgggcaataaaattgcggtaaggcaatactgcgggcaaggcagtttcctgcttgtgcaagataagtgcaatttcatcgaaaatcagttccagtgtcacatgatcgctgaccagatgatgaaaacgtaataccagcagccattcattttgtgccgtatcatgagcgatatcagcagtgaataacggagcacgggtcagatcgatacgatgctggtgtgggtcggtgtgagccagcagttgtccctgaatattattttccgtattgggagtgaagacgttaatttccagtggtgcctgacgccagacgacctgaaccggatgctccagcccttgccagaaaacactgctgcgcaggatatcgtgacggttgataacttgctgtaaagcagataaaaactggttaagacgttcgcgattatcaaaagccagcaaactctgtaacaggtaggtatccccctcagtctgcatcagatggtggaacagaattccttcctgtaagggagatagcggataaatatcctgtacattaccagcgccaccggacacagttccgacaatggcatcaatctgagcctgagataatgtcaccaatggcagcatctcaggaacaatcgcagtgcaatcttcagggatcaggttctcaggcacaacaaaagaatcagcatcacggcggagagcctgcgccatatcagcgagaaccggcgtggagaatacgctgcggatatcaaggtgccagccaacgcggcgtagctcttcgatcaggctgacaatcatcagcgaatgaccacccagttcaaagaaatggtcatgacggctgatctgctccagtcttagcagttgttgccagatttgtgcgagcgaagtttctgtttcccctgtcggagattcatagtggcgaaccgcgaaagcggaagcctctggagcaggaagcgcatcacggtcaatttttccgttagcggtcagcgggaaattatccagcatgataaaagcactgggcaacatataatcagcaaggtgtctggcaagctgctgacgcaattcggccggttccggtatcactcccggctgaggctgtatataggcaatcaaccgtttctgacttcctgttttagcgcctgttttctcatcaccggcttcttcatgggcgagaaccagtgctttttgcaccccatgacactgggagaggcggctttcaatttcccccaactcaatgcggaaaccgcgtattttgacctgaaaatcattgcgaccacagtattcaatattgccatccggcagccagcgccccagatcgccggtcttatacattcgtgcatcaggctctgaggaaaacggattaaccagaaagtgctcagcggtgagttgcggacggttaagataaccacgagcaactccttcaccggcaatataaatttcgcccgttaccccaagaggaacaggttgcttgccggaatcaagaatatagatctgagtgttggcaatcgggccaccaatgggaatttttatctctttttcaatctgttcagtatgaaacctttcgataaaggggattttataagcggtggcaaaagtagtgacttccgttggcccgtacatgtgcaataaatgttgtggcgaatgatcagcccataactgaatagccgtgcggctatcggcctgttcgccgccaaacaaaacataacgcagacccggcaaggcaggggcaagcaagcctgcatattggttaaacagggcagtggtaagaaataaagttgtgatacctgcggatgacagacactgaccaagataaactggctgtaacaaggtattttccggtattaactggagtctggcgccatgtaccaacgtagaccagacttcccacgctgccgcatcaaatgaaatattggcgcaatgggcaacacaatcatcgggagtaatatcggcaacgttattattgataagtaagcgaattacgttgcggtgctcaatcatcacacctttaggctggcccgttgagcctgacgtataaatgatatatgccagatgatgcgaggtcagacctgatgtctgaatatccggattgtgagtgggatagccagccagaggtgcttcctgctcactcaataaattatccagcaaaacgacaggcacaaaggtgtccagtttgtcgtaccatgctagctgcgtcagcagagctacaggcctggcgtcctccagcatatagctcagccgttcagcagggtaatgaggatcgagtggcacataggcaccacccgctttcagtatggcaagcagactgactatcagctccgggctgcgttcggcacaaattgcaaccggatcgtccgggcgtatacccagtgccagcaggtgatgagccagacgattggcatggcagttaagctcagcataactcagtgtctgcccctcgtagcttatagcgatagcatcggggcgctgtaacacctgcgcttcaactaactggtgaatgagcgcatcttgtggaaatgctgtctgagtggcattgaaatccactaataattgttgccgctctgaatctggcaacatcggcaatgtgtttacgggctggttatcatcaaacaccattgcagctaatacatgggttaaataacccaccatacgctcagcagttgggtgatcgaacagatcggcggcatattctaaatccccggctaaacctgttccgatttcgttcagtgatagggttaaatcaaaatgcgcaccccgatgcttctgctcaatcggtgtgagttgcagttccggcagtgtaagctcctgagccggcgtgttatttaaggccatcatcacctgaaaaatcgggctgtagctgagactacgttcaggttgcagagcttccaccacctgctcaaagggcagatcctgatgggcataggccgccagtgattgctcccggatttgagtgagtaaatccgccacgctcagatcgttattgaaagtgatacgtaaagccagcgtattgacgaagaagcctatcagcccttcaagctcacggtgtggacggttagcaacaggagtgccgataacaatatcatcctgcccactaaggcggctcagtacgatactccatgcggtcaggagggtcataaacagcgtactgttatggcgtttccccagttctttcagtgatgccagtaaagggacatcaagatgaaaggagacgttgccgccgatatagctctgtactgccgggcgtgggcgatcaatggggagtgtcagtagcggcggagcatctttgagttgttcacaccagaaatcgcgttgtttcgtgaggctatttccctgcgcctgttcatgtagccagaccgcatagtcagcatattgaacaggtaatggtgataaagagatatcatgaccatcaagggcagcgcgatagaaatcccctaactcccgtatcagcacaccggtagaccagccgtcggtaataatatgatgcagggtcagtaataaaatatgctctttatcgctgagacgaagtagctggccgcgaatcagccgttcctgagtaaagtcgaaaggggtttgcgcttcggtatcaataaactcggtgatacgctcggcgtgtaaaaccggagccaactggctcaggtcatgataagacagagtacagccgatatcggccggatcaatgtgttgacagggttttccctccactgacacaaaacgggttctcaggctttcatggcgctcaaccagacggtcgagtgatgcgctcagcgcatggcggtcaagctgaccgctaaggcggagtattaccggcagatgataggccagactggcagccggttcgaactggcagagaaaccacagccgctgttgagcaaaagataatggcagtggctggttacgatccgcgggttttatcattgactgctgctgttgataaccccgtgctttcagttgctcttcaagccttttctccataacagcacgtttcagatcatcgagattcatagtagtccttgtcattatttgttatctccgccggtatcttttttacgggtatcgttttcgcctaaaattgccattaactcttcggctgacatcgcatcaagatcgctttgaattgattcaatgtcgttgtcgccgattgcactcatttgtgctgcaaagatgatgtctgcctgttccattaatttgggtgaaacaaacagggaggtcagaggaatactgaccatgaactgactttttatgtgggttatcagccggataaccatcagtgaatgaccacccagctcaaagaaattgtcatgacgactaatgcgtgtcagccctaacaattcttgccagatttgtgccagtgctgtttctatccttccctgtggcgcttcatattcatgtgtcaccaccgcagagagttcaggctccggcaacgctcggctgtccagtttgccattcggtgtgagagggaaagcggtcagcacgacataggcactgggcgcatatattccgccagatgttctgccagctggcggcgcagaaccgccggatcaagttcagcgccgttttggggcagcagataggcaacgaggcgtttattctcaggtttatcttcacgaaggataaccaccgcttcacgtacaccgtgacactgttcaagccttgtctcgatttcacccagctcaatacggaagccccgtatcttgacctgaaagtcattgcggccgagatattcgatattgccatccgatgaccagcggcctaaatcgccggttttatacatgcgcacacccggtttaccggagaacggatcgggcaggaaacgttcggtagtcagctcagggcggttcagatagccacgggcaacgccagcacctgaaatatagagttcgccagcaacgcctattggaacaggctgaccataagcatcaaggatatagatgcgtaaatcctccagaggctgcccaatcaggctgccatgccttgcgtggatgtccgcttccgtcagttcacgataggtagcatgtacggtaatttccgtgatgccatacatattcaccagacgggtctgttcggtaggattgcgttcaacccacggggcgatggtatgcagttccaatgcttcgccgccgaatatgatgcagcgcagtgtgtgctgctcatgcggcatcatctcctgagccgcaatcaactgacggaaggcacttggagtctggttcagaatagtgacctgcttccggcaaagcagctcatagaacatctgaggtgagcgggcacattcagtcggaatcaccaccagcttgccaccgtaagccagcgctccccacaattcccatactgagaagtcgaaagcaaaggagtgaaatagcgtccagacatcgttgctatcaaaccggaaccgcgcctgtgtcgccgccagcagacgggtaacattggtgtgttcaaccatcacgccttttggttgaccggtggagccggaggtataaatcacatacgccagatggtgtggcatcactcccagtgcttgagtatcagggttatcggttggttgttctgccagtaacgatgcctgagtgtccagttccataatcggaacagttatcaccgatgtcgagaggaacaatttttccgcttgtgctgcctgagtcagcaggatctgcggggatgaattttccagcatgtaggtcagtcgttcggtcgggtaagcagggtccagtgggacataacccccgccagccttgagaatagccagtatcccggccaccatatccaaactgggctcaaggcaaatggcgacgagattatcaggtttgacgccccagtgcaatcagatgatgggccaactggttggcgcggcggttgagttcgccatagctgatgctttgattttcaaaggtgattgcaatcgcattgggtcgctgaaccgcctgcgtttcaaacaactgtggcagggttttatcttgcggataaggcgcatccgtctggttccagcggtgcaataaggtatgacgttcctgtgctgataaaatatcaatactggataacggttgttgctggtcggcgacaaaggcggtcaatacccgttggaaactctctgcgatacgggtgatgctggtgtcgttaaacaggctcagggcgtagttcaggcaaccggtaatcgcggttttgccatcggacaaaaacaggctcaggtcaaatttggcgggactgtataacgtttcatccagtgcgaccgggctaaacggcagattgccgtctgacggactttcaccaaaagtttgtacactgaacatcacctgaaatagcggatggcgggcggtatcccgttcaatatttagcgcatccagaagttgttcaaacggcatatcctgatgggctttggcgtcggtaaccagtttgtgtgtctgcgtaatcaacgcggccacattgtcagtgtgttgcagctgtacccttaaggccagtgagttaacgaacatgcctaacaggggtagggtttgagcgtggtgacggttatcggtcggggtgccgataacgatatcgtcctgtccggataattttgccagcgtgacgtaaaacgcactgagcagcacggtatacagggtggtttcctgcgttcttgccagtgtccgtagctgttcagacaactgggtgttcagttcaaagtggacgtcccgtccctgataatggacctgtgccggtcgggggtgatcggtgggcagcgccagcgattcatagcctgccagcgtgtgctgccagtaagccagttgctgttcgcggatgtccccctgcaaataatcccgttgccaggccgcgtaatcgccgtaggtaatctctaactcagggagctggctgtcacggcctgcttgcagcgcgtggtaaatctccgccagttccgccataaagatatcaatggaccagccatccatcgcgatatggtgccataacagtaagagatagtgacggtctgcgacctgataatgccgcaggcgcaggctcggttcggtggttaaatcaaaggggatggctatctcgctgcggacgttagccagtaacgtcgccctgtcgtcacaggcctgagacgggatcacaaaatgcgtctccaatgcctgctgatacatctgatcgtgatcatcactgcgatacacggtgctcagcaccgcatgacgttccgctaatcggttaatggcggcttccagtacaggcagggaagcctcctgagccaactgaaccagatacggaatatgatagacatcagagccctgctcaaactgctcaataaacagcatccgctcctgcgcaaatgataagggatagcgcacttgtgccagcggcgggataaccgtgcgaatttgtgtgtccatctgtgtggctaacccggcgatggttttcagttcaaacagttgtgccagtgaaatatccgtagacagggtacggcgaatggcggcaatcaatttaatggcggtcagggaattgccgccgatacggaagaagttatcgtcaatcccgacccgctccagtgctaacacatcctgccaaatagcgcaaagctgggtttccagcgtattgcggggggcgacatagctgtctctgttaccgaaaaccggttccggtaaggctttgcggttcactttgccgtttggcgtcagcggaatagcgtccataaaagtaaaactggcgggtagcatataatccggcagacgatcagataagtgcgccagcagcatttcatcggagactgcgtcctcggcaaccagatacgccgccagtactttatgaccctgatgctcacggtcaatcacgaccgcctgtctgatctgtgaataggccatcagcgcactttcaatttcgcccagttcaatacggaaaccccgaattttaacttgaaaatcattgcgccccagatagtcaatattgccgtccggcaagtagcgccccagatctcccgttttatacatttttgcttctgacacggaagagaaagggtcaggaaggaagctttctgctgtgagtttgggctggttcagatagccgcgggcaacaccggctccgccgatataaagttccccgatggctcccggcgctaccatctgctgagcggcatcaagcaggtaaatccgggtattggcgatagggcgcccaatcgggatagactgcataccatcaattggcacggtgatcgcataggttgtggcaaaggtggtggattccgtcgggccatagccattaagcaggtgagcaggcggatggtctgccgacagcacctgttttattttctgcggattgaggacatcccccccgaccagcaggtagcggagctgcccgaacacaggctgtaatgtatcaaggtattcattaaataaaccggcagttaaccataatgcggttacttttcccctgattagtgcctcacgaaaatcggtgggttcgagtactaccgcctgaggcacaatatgcagacaactgccattcagcagggctgaccagatttcccaggtggcggcatcaaaggcagggttggcacaatgggcaacgcagtcatccgggccgatatccgcaaaaccattgttgatgatcagacgcagaacattacggtgctcgatcatcacgcctttgggttgtccggtggagccggaggtgtaaatcacgtaagccagatgatttgaagtcagccccagtgactgcgtatccaaattgctatcaggctgagcctcaaggtgcagagacgggttatccagccacacggtggggactgacgaggtcagtttatccgccagtgcggtttgagtcagtaaagctaccggtgctgcatcatccagcatataggccaatcgttccgcggggtaagccggatcgagaggcagataagccccgcctgccttgagaatagccagtatcccgaccaccatatccatactgcgttcaagacaaatggcgacgagattatctggtttgactcccagatttatcaagtgatgggccagccggttggcgcgccggttgagttcgctataactgatgctttggtcttcaaatacgattgccgtgctatccggacgttgagcggcctgtgcttcaaacaactgtgacaaggttttattctgcggataaggggtgtcagtctggttccagcggtgcaataaggtatgacgttcctgtgccgataaaatatcaatattggataacggttgttgctggtcggccacaaacgcgcgcaatacccgttggtaactttctgcgatacgggtgatgctggtgtcgttaaacaggctcagggcgtagttcaggcaaccggtaatcgcggttttgccatcggacaaaaacaggctcaggtcaaatttggccgggctgtataacgtttcatccagtgcgaccgggctaaacggcagattgccgtctgacgggttttcaccgaaagcctgcacactgaacatcacctgaaagagcggatggcgggcggtatcccgctcaatgttcagggctgcaatcagttgctcaaacggcatatcctgatgggctttggcaccgctaaccagtttgtgtacttgtgcaatcagcgcggtcacgccgtcggtgtgttgtagctgtgcccttaacgccagtgaattaacaaacatgcctaacaggggcagtgtttgcgcatggtggcggttatccgttggggtgccgataacgatatcatcctgtccggttaattttgccaacgtgacgtaaaacgcactgagcagcacggtatacagggtggtttcctgcgttcttgccagtgtccgtagctgttcagacaactgggtgttcagttcaaagtggacgtcccgtccctgataattgacctgtgccggtcgggggtgatcggtgggcagggctagcgtttcatagcctgccagcgtatgttgccagtaagccagttgctgttcgcggatgtccccctgcaaataatcccgttgccaggccgcgtaatcgccgtaggtaatctctaactcagggagctggctgtcacggcctgcttgcagcgcgtggtaaatctccgccagttccgccataaagatatcaatggaccagccatccattgcgatatggtgccataacagtaataagtagtgacggtctgcgacctgataatgccgcaggcgtaggctcggttcggtggctaaatcaaagggggtcgcgatttcgctgcggacgttagccagtaacgtcgccctgtcgtcacaggcctgagacgggatcacgaaatgcgtctccaatgcctgctgatacatctgatcgtgatcatcactgcgatacacggtgctcagcaccgcatgacgttccgctaatcggttaatggcggcttccagtacagtcagcgaagtatcctgagttaactgaaccagatacgggatatggtagacatcagaaccctgctcaaactgctcgataaacagcatgcgctcctgcgcaaatgataagggatagcgcgcttgtgccagcggcgggataaccgtgcgaatttgtgcgtccatctgtgtggctaacccggcgatggtctttaattcaaacagttgtgccagtgaaatatccgtagacagggtacggcgaatggcggcaatcagcttaatggcggtcagggaattgccgccgatacggaagaagttatcgtcaatcccgacccgttccagcgctaaaacatcctgccaaatcgcacaaagctgagtttccagcacattgcggggggcgacataactgtctctgttaccgaaaaccggctcgggcaaggctctgcggttgactttgccgtttgacgtcagcgggatcgcgtcgataaaggtaaagctggtgggcagcatgtagtccggcagacgcgcggataaatgcgtgagtagatcttcatcagctaagagaccctcaatgaccagataggccgccagtactttctgtccgtgatgatcacgatcaatcaccacggcctgtttgatctgcggatgtgccgctaacgcattctcaacttcccccagttcaatacggaagccacggattttaatctgaaaatcattgcgtcccagatagtcgatattgccgtccggcaagtagcgccccagatcccccgttttatacatttttgcctctgactcagaggaaaagggatcggcgaggaatcgttctgtggtcagttccggttggttcagataacctcgcgctactccttcaccactgatataaatttcacccggtgctcccatcggtacgggctgttgatgggcgtcaagcaggtaaatccgggtattggcgatagggcggccaatcgggatagactgcataccatcaattggcacggtgatcgcataggttgtggcaaaggtggtggattccgtcggaccatagccattaagcaggtgagcaggcggatggtctgccgacagcacctgttttattttctgcggattgaggacatcccccccgaccagcaggtagcggagctgcccgaacacaggctgtaatgtatcaaggtattcattaaacaaaccggcagttaaccataatgcggttacttttcccctgattagtgcctcacgaaaatcggtgggttcgagtactaccgtctgaggcacaatatgcagacaactgccattcagcagggctgaccagatttcccacgtggcggcatcgaaggcgggattggcacaatgggcaacgcagtcatccgggccgatatccgcaaaaccattgttgatgatcaggcgcaatacattacggtgctccaccatcacgcctttgggttgtccggtggagccggaggtgtaaatcacgtaagccaaatgacgtgaagtcagccccaaagcttgtgcatccgggttattgtccggctgcgtgtcaaagtcttgagccggattatccagccacacggtggggactgacgtggtcagtttatccgccagtgcggtttgcgtcagtaaagctaccggtgctgcatcatccagcatatagctcaatcgttcggtgggataatccgggtcgagaggcagatacgcaccgcctgccttgagaatagccagtatccctatcacgatatctaagctgcgttcaacacagatagctattcgatcatccggttctacgcccagtgcaatcagatgatgcgccagctggttggcgtgccggttgagttcgccatagctgatgctttgattttcaaagatgattgcagtcgcatccgggcgctgagcggcttgtgcttcaaacaactgtggcagggttttatcctgcggataaggggcatcggtctggttccagatatttaatagggtatggcgttcctgctctaacaggataggtaattcactgactaaaatagcagggttgtcaataatagccgttagcaggttatttaatcgctcaaggatattattgacctctgaatcactaaaataggtttgtaaatattggatggttaattttaattcctgatcatagccatgatctttcagccgaaataagatgggattaatattaaattcagtgtctatatgaaaatgctgaatttggtcagtttcagtatccgatgctgaaaaacggtcatataaaatcagaatgctgggtaaagaaaacccatcttggttcgcaagacgagtaagatgtgaattgggaaactttccgtggagatagctgtttttcagcgctgactctacttgcttaatttgcttaataatagaagaagttcgtgaaatagggcaatgtactggatacgtatttgcttgcatcccgacaacatatttttcagattttgttgttcttccatgggttgtcgtgttgaaaaccagctcttgttgcccggttaattcagccataacaatagaagcaagcgtggaaaagacggcaagtaaattagttttattttcgtgacaaaaagtacgtaaatcgtttttaactgagagtggtaatgtcagcgtctgattatcagagcctttattatggtaataaggtgttaattggtgtatttcatttttctttaaaaaattcagccaataattcttgtcatcttcataattaaaattatttaaataggttcttgatttttttactgccgtgagatattgcggaatttcagataaccacgttgtggatgttccatttttaaggcatgtatatagtttataaacatactcgtgaaatcggtataatccgacaccgtcaatgaaaatatggtggaatgtagtgaaaaaataatttttttcattggcgagacggattaatgtgaactggtagggtatttcatttaagtaatctatagcgatattgttttgttgcttcatccacagaagtgcgtgattttcaggatcaggcagttttgaaacatcgtattcattgattaacgtgggaatactttgttcctgaatgtattgaaccgcttcattgtcggcattgatgaatatacgtaaacgtaaagtatcgatatgctgatatagtaaattcaatgttttttgcaagagggtaatatcaacattttcctctattaaggtataccagtttagggtatgtactgggctattctcataaagaagttgttcgtaaaatatattctcctgagtagggtggaggtgatataaatctggattcaaatgatcctcagcttttctcataattatttatatgagtgtgttctgcttacaagttagtcatagttgatagtacaaaatgaatagggctgatgattttcctgaccttaatttgcacgttagaacgtagcatcatctctcatgatgtccttacaaataaccttgcaatctttcaacactcatcctcgtgaaatagagttcttatttaatagttagtattttgtttccccaaaataccagagtatattttttatgtgaatataattgttttatattacttatggaggctgttatttataatgtaatgctggttgttttttaattaatgtctatgttgttttttattatccttgtttttttattgcttataggagtatttaattattgatgctttttattgttagtgaagtgttggctgaaatatatatatagccaaaggttataattatctagctcgaggcagaagtatttttcttcgatagaccagaaacggattagttgcaactcataaccatgatgtcattcacgagatccggaacttcaggatgattagttccgtgggttactatttcagcgtgttcggtgatggaataagttaaacaaagaatatattatttctaaattctgaaatctattgaatacattttttaatacctgcgctggatggatatttcctgcaaatatcggctatttgttcttatctttttcacgtaatgatacccaccatgatttattaattataaaaacactaaatatacaaaatattggatattcggtgtttatatctctgatcggctattcagtcacgatctatcgaacaaaagttattcagtcaaaattttgttttttcttaatgccctgaattccgaccgaataatttgtcctgatagtttgccctgaatagtggcagatatatgtacaaggggatcactcatgaaaggattaagtaataaggtcgctattgttactggtggtgcaactaaaataggtgcggctgttgccagagtattgagtgaatatggtgttaaggttgctatttttgatattgatcgtgaaggcggaaaaaaagcctgcgatgtccgacctgatgatattcatttctggcctgttgatattactgatgacaaacagctctctcaggggatacaagaggttgcagcttactatggccaccttaactgtctcgttaatcttgctgcaacttatctggataatggtgccgactccggccgcgaaatgtggctgacggcactgaatattaatgtggtcagcgccatcaaggcagctcagtttgcacatccttattttatggcagccggaggtggagcaattgttaacttcaccagcgtttcatcctctgttgcccagacaggccgttggctatatcccgcctcaaaagccgctttattacaagctacccgcagcatggcaatggactatgccgctgatcgcattcgtgttaactccgtttcaccgggttggacttggtcccgggtcatggatgaactgactcagggcagtcgccggaaaacagatgaggttgccgcagattatcacttacttggccgtgcgggcgatcctgaagagattgcccaggtcgtgtcctttcttctttctgatttgtcgagttttgtgaccggagccgattactccgttgatggtggttattcagtgatgggacctgagcaggcaaaacctgccatttgccgtctggcggaatagtcgcaaatcgttcttgtcacaaaacacgattgttacaaaacatcgtcgtaatgaaacataaggtaggagaaaaataccatgcgtcgtatcgctattgtgggaggtggtcaggccggactgcctctggcccttggtctacttgacaagggctatcaggtaaccgtagttaccaatcgcacccctgatgatgtccggaatggtcgggtgatgtcgagccagtgtatgttcgattcttctttacagtttgagcggaagctgggactgaataaatgggaagcactatgctcgccagttgaaggtatcggtttcgctgttccgcatccggaaatgccgaatactaaagcaattgactggagcgcccggcttgataagtacgcacaggcggttgatcagcgtattaaaatgcctttctggatggagttgtttgcttcccgtggcggtaatttggtgattcttgatgtaggtgttaatgaattggagcaactggcatcgacccacgagctggttattctggcgggcgggaaaggggaagttgtgagattgctggagcgtgatgtaacccgttccccctatgataagccgcagcgtgcactggcactgacttatgtgaatggtatgctgccggtgcctgaatattcacgcgtttctttcaacctgatccccggagtgggcgagtatttcgtttttcctgctctgactctgagtggtccctgtgacattatggtctttgaagggataccgggaggagcaatggatggctggcaggaagccagaacgccgcaggaacatctggcttatagcctccacatccttaaaacctttctgccgtgggaagccgcacgttgcgaaaaagtagaactgaccgatgataacggcattctggccggacgtttcgcaccggtagtgcgcaaaccggtactgacattaccgtctggtcgtcaggtctttggactgggtgatgcggtagtgacaaacgatccgcttaccggacaaggctccaacaatgcgaccaaagcctgtcagatctattacgaatcgattcttgcccgtggtgataaactttttacggcagagtggatgaacgatacctttgagcgattctgggattacagccagtatgttgtggaatggacaaacagtctgctcattccacccaaacctcatatcctgcatctattaggcgcagctcagcagttgccggcacttgccagcacaattgccaatgctttcaaccatcctccggtactgtttccgtggtggcgggacagtgatgcctgtgaagcctacattaactcacagacacaacatgcacaggcggctaattcttaattaaggaagcgatttaacaagctacctgaaaagcagggttttagtgtggagaatttcagtgtggaaaaagtcaacatgaccatgaacatccagaacagcgaagccatgttacccggtactgaatggggaataaccgaatttgaagcaagggcattgcgtaccattctggggagctacccaaccggtgtcgccattgtggcgacacgaacggcggacgggcgcaatgtaggcctgactatcaattcatttgcatcactttcactggagccaccgctgatactctggagtctggtcaaccactctcccaatctggctgtattccagaactgtgaatattttacgatcagcattcttagctgtgaccatcaggaactggctctgcgttttgctaatccgagggttgaaaacaagtttcaggatattcctgtgcaggaaacgccggaggggatccctgcaatttgtggcgcaatagcaacactggtttgctcgaatcatcagcaaacccatgttggtgatcatttgttgatgattggtcaggtgaaacgtattgccagcctcgaaggtaagccgttggtttttcactgcggtatgtttacggaattgcatgatgtgggaagtaatatgggagaggatgcatgaaaagcctgctaaatatgttcactacagcgctggatcaggggggagtgaaggtgattgatcttacacagactttatcgcctgatttcccggctttacagttacctgaacaatatgggcaagtctggtcattcaaaatggagcgtatttcttgttacgacgaaaacgggccgggctggtattggaataatttcagttgtggagaacatacaggcacacactttgatgctccagcgcattgggtgagcggcaaagattattcagataataccgttgatagcattccgctgcataattttgtggcacccgcagtcgttgtggatgccagccaacaggtggcaaataatccggattggttgctgaccattgacttcctgcttgaatgggaaaatcgacacgggcagatccctgctggagcatggctgctgttccgtactgactggtcaaaacgagcagatgatcccacccgtttcctcaatatgcatggtgacggagcccatacaccggggcctgatcaggaaacagtagagtggcttatccataaacgtaatatccggggctttggggtggaaactatcaatactgatgccgggcagtcttattcatggcccgtggcttatccttgtcacactctgatgcacggagcaaataaatacggtctgcaatgcctgaaaaacctcgatttattacccccagtcggaaccgttattattgccgctccccttaaaattgcaggaggctcgggaagtccgctgcgagttctggcactggttgaacagcctgatggaacaaccctatgaacagttctaaaccacaagtcattatcatcggtagtggaataaactcactggtatgtgccgcactactgtctatctggggaaaatctgttctggtactggaacggaatgcggtgctgggaggatgtatccggacagaagaactttttcccggttatatccatgatgtgctctcctgctggtatccgttatttttgagtagcccggcttatcaggtgctgaagccggaattagaaaaagtgggcatagagttcatgcaaagtgattattccactggtctggttcagccgaatggccggggaattgcgttaaagcggggcgttttacctgctgcattgcagcttgatgaaattgccggaaaagacggagaagcatttcgctacatggtgcagcaaattcttcatgatgatgctgaattggtcttcagtttactggggcaaaacccttatggtttcagcgtactcaggttactgtttagtgaatggcgaaaacgtggtattgatggtctggtggaatttgccggtcattcactggaaacattccggcgctggtctgaacgtgaattgcagtccgatttcatccgtaccctgattgcaccatgggccttacatacaggtctggggccggatgatgccagttctgccctgattggaaaactcacttttgctgcggtggtagcgggaggaatgccggtagttaaagggggaagtatcagcattgttgaagcgttgaaaacgatcatagagcagcatgggggacagcttctcacgcataccaatgttgatcacattatcactcatcagcgggggcgaaagtaccgtgcttctggtgtcatcgccggggaaagggtttatcacgctaccgatgccgtggtttgcaatgtcactccgcaacagctttatggccacttactggataacgttcctcagacagttcaacaacatgcgaagggatatcgctatgggcgtggtggaatgcaggttcactttgccctgaattctcctccgtcatggagcgatcccaaattatgccatgtgccgcttattcacttaacagaaagtatgcaagaaatttgtctgtcggtaacacaggctaataatggttatttgccggagcacccgacattagctataggtcagccggttgcgcttgatccggggcgggctcctgaaggtggatggattttatggatccagatgcaggagttgcccactcatctgaaaggagatgcactgggagaaatccctgttcctgaagatggcagatggaatgatgttgttcgtgaagcgttcgcagatcgcgtacaggctcgtctggagagagtcattccggggttttcatccaccattgttggccgcagggcatattctccggcagatttacagacactgaactgtaatttggtggaaggagatccctattcagggatttgcacccctgaccaatttttctggctgcgtccctttgcgtcttcaaaaaggacgaaagcacatcagacttttattcgtaatgtctttcatattggcgcatcagcacatcccggacccggattagcaggaacctccggctatctggttgctcgcaggcttgcgcggcactgatcacattcattccctatttacgatatctgttcacttcccacttcggaggatctgtcatgataaaaatatacacggcaataaaagcaaaactgataaacacaggaataagaaagtatcggagagcgactcggcttaccgttttatcactactcagtatttccgttatgagtgctgtagttgcaagccatcctgttatggcgacagaaggcggtggtgttggtatctatccggatgggttagataattatctgtcaggcgccttgcctccgccgggtgtccatgtactgctttatggtggcaatattcactataaccaactcaggggaaataacggttcccggcttcctgttcccggttttaaagtgaatgtgaatgttcttgctccccggctagttctggtcacagatcaacaaattatgggggggcaactggcttatcatactattgtgcctttactgagtgtgacagcagaagctgggggtaaacgcagcgacagtaaagggattggggatatcacttttggcccggctcttgggtatcatccggctccggatttaggttatgttatcggtcttgatatcagtgcaccaacaggcagctataatcgtcatgatccttccagtccgggaaaaaatcactgggcatttcagcctgtctgggcgataagctactttccggcttacggttacaataccgacttaaaagtgatgtatgactttaatctgaaaaataaaaagaccaatacaacatccggtcgggcttttcatatagattatgcactgggctggggattcggcaatggtttggtcgctggggttggtggctatgcattccagcaggtcacaaatgaccgcggacccaattcagcgcagggtaaagcgagcgcatttggtctgggtccttccttccgttacgctaatgataaaggcttgctggtggccctgaaatggcaaaaagacctgatcgtgactaatcgcccggcaggctcgcaactctttttaaaagttgctcttccattttagaaatgatttttcatgtttcatcattatcatcatgtgttccagtaaaggaagctaccggctgacgatgaagtcagccggtaattatgcctatctctgtgttcactaaaatggggctacattataggttatttgttgaaccagtaattggggcgctgataatagaaccgtatatctggacagccgtgaaatctaatcctccggcattagcgttgtccaatgtgcatgaccaaggcatagggatgtgcaatcctgaagcgtttgcggtcactttaaccagacaccgaggcccttgtttagtggtaactttgacggtagcccccggagttgctgttccagagagggttatcttatcgttccggtcgcttgaatctttttgtttatgcactaatagaggagccgcagttttgacgctgaaagacgtttttgcggtcagggaaagaaatttacccaacgtattgagagaacaaatcttacgcttcgtatccggataaagaggctgaatagaaagacaataggttattccaaatccgaagagatgcatgacaaagtggtagggacgttcattgagcgtgaatactctatttcataacagatctaactattgggagcatgacagcggctggtagcccgtagaaatacaaccaggaacatgagttccagcatggcaacttatctgacgagtttgtacaggctgcatgattagtctcgcagcgtgaatttgaccctttatacgggcattcagatagtgagtagggtgcattttgatgttctccgatcaaataagttggtcagagctggcttatcaaagataagtccatcaaaacttatattaaataagacgttcatatcgcccccttttttgatgaaaatatttaaaataagaattcttattacttcatcactaatagagaactgaaatgacaatgaataatagcaaataggttatttacctatttgcgttagtataaagaagtccgacgaacaaacgtagctcaaaaaacaaacgataattaaagttatttaaatgtctcacctcgacttttaagctgtacccagttattggtttagctacacccaccacagaatcacccgcctcagcatgcctgaaatcttcgatccttctcacagattcgcataattttcctgccggaaatgcctgaaagttacacgtatgtatctaatggctcacgtatttttacattttttatacatatttgactgtggtgtaaccattaaatatattaatttgtaggttatattttatacattaaccctatcaggagataagcatgtcgatagccactctcaggcattttattaatggacagtatattgaatctaaaggctctgaatattttgatttgatcagcccggtcacgggtgaatcttatgcacgttctcctaatgcgaatgctgaagatgttaataatgcttatgcatctgctaaagcagcatttaaagtatggggccggagtaccccttctgagcgccagaaggcgcttttagcactggctgactcggtagaaaaaaacgctgaacgtctggttgaggtgcaaagccgcaataccgggcagctcaaacatctgattgcctctgaggaagtggcaacttcggctgatcatatccgctttttcgctggtgcagcccgctttttggaaagtaaggcaacaacggaatatctttccggtatgaccagtagtatccgccgcgagccgctgggtgtagtggggcaagtgactccatggaattacccattgatgatggcagcatggaagattgcccctgctctggccgctggcaatactattgtccttaagccgagtgatactacgccggagagcactttattgctggctgaactggctgcaacgttctttcctgccggtacgttcaacgtagtactgggcaatgccagcgcaggcgctctggttgtttcacacaaaaccccggctatggtttctatcactggctctgtgcgggctggtttgcaggtcgcttcttcggcagcagccaatctcacccgatcacatctggaattgggcggcaaagctccggtcattgtttttgccgatgcggatatggacaaagtggtggaaaccattgctattgcggggtacttcaacgccggtcaggactgcacagccgcttcgcgcgtgctggtgcatgaatcggtttacgataccttcgtgacgaaattagtcgcggcagctaaagcaacccgatttggcgatcctgaagatgaaaaagcgctatatgggccacttaacaatattcgccagctggaacaggttaagggatttattgcacgtcggcctgcttatgcccgtatcgaaacagggggacgtcaggctgaacgtccgggatattactttgaacctacggtaatcaccggtctggagcagcacgatgaaatgattcagaccgaaattttcggcccggttatcacagtacagaaattcagaacagaagaagaagctatcgagaaagccaacgacgtgaaatacgggttagcctccagtgtctggacccgtgaccatgctcgaacattgcgcctgtcccgtgagcttgattttggcacggtctggatcaacgcccatattcctcttgcggcagaagccccacacggtggttttaagcactccggatacggtaaagatctgtcggcttatagtttcgatgaatatacgcgtatcaaacacgtgatgagttccaacgactaatgcgggagcatccataatgaatcaggctatcaatcaggttatatcttcacgcgatgttgtagcacgcaatgtagtagctcgcgcgcaccgcgagctgtttactgaccgtgatgcaggagcacttgaacgttatttttcgccgaatttcatcgaacactccccgctagtcagagatgggcttgctggcttgcgtgaactggttcagacacatcctcagcttcaccac

SEQ ID NO: 2949 - DNA, 28207 bp, Xenorhabdus sp.; identical to SEQ ID NO: 2948
  CDS (26545)..(27981)

SEQ ID NO: 2950 - DNA, 28207 bp, Xenorhabdus sp.; identical to SEQ ID NO: 2948
  CDS (24602)..(25261)

SEQ ID NO: 2951 - DNA, 28207 bp, Xenorhabdus sp.; identical to SEQ ID NO: 2948
  CDS (22806)..(24239)

SEQ ID NO: 2952 - DNA, 28207 bp, Xenorhabdus sp.; identical to SEQ ID NO: 2948
  CDS (21895)..(22641)

SEQ ID NO: 2953 - DNA, 28207 bp, Xenorhabdus sp.; identical to SEQ ID NO: 2948
  CDS (21251)..(21844)

SEQ ID NO: 2954 - DNA, 28207 bp, Xenorhabdus sp.; identical to SEQ ID NO: 2948
  CDS (19955)..(21205)

SEQ ID NO: 2955 - DNA, 28207 bp, Xenorhabdus sp.; identical to SEQ ID NO: 2948
  CDS (19088)..(19876)

SEQ ID NO: 2956 - DNA, 30011 bp, Xenorhabdus sp.; identical to SEQ ID NO: 106
  CDS (8285)..(9598)

SEQ ID NO: 2957 - DNA, 30011 bp, Xenorhabdus sp.; identical to SEQ ID NO: 106
  CDS (10542)..(11261)

SEQ ID NO: 2958 - DNA, 30011 bp, Xenorhabdus sp.; identical to SEQ ID NO: 106
  CDS (13319)..(14386)

SEQ ID NO: 2959 - DNA, 30011 bp, Xenorhabdus sp.; identical to SEQ ID NO: 106
  CDS (14606)..(15472)

SEQ ID NO: 2960 - DNA, 30011 bp, Xenorhabdus sp.; identical to SEQ ID NO: 106
  CDS (16695)..(17489)

SEQ ID NO: 2961 - DNA, 30011 bp, Xenorhabdus sp.; identical to SEQ ID NO: 106
  CDS (17696)..(18244)

SEQ ID NO: 2962 - DNA, 30011 bp, Xenorhabdus sp.; identical to SEQ ID NO: 106
  CDS (18492)..(19406)

SEQ ID NO: 2963 - DNA, 30011 bp, Xenorhabdus sp.; identical to SEQ ID NO: 106
  CDS (20264)..(21196)

SEQ ID NO: 2964 - DNA, 30011 bp, Xenorhabdus sp.; identical to SEQ ID NO: 106
  CDS (24757)..(24906)

SEQ ID NO: 2965 - DNA, 30011 bp, Xenorhabdus sp.; identical to SEQ ID NO: 265
  CDS (27228)..(28760)

SEQ ID NO: 2966 - DNA, 30011 bp, Xenorhabdus sp.; identical to SEQ ID NO: 265
  CDS (25155)..(27224)

SEQ ID NO: 2967 - DNA, 30011 bp, Xenorhabdus sp.; identical to SEQ ID NO: 265
  CDS (24595)..(25131)

SEQ ID NO: 2968 - DNA, 30011 bp, Xenorhabdus sp.; identical to SEQ ID NO: 265
  CDS (23738)..(24367)

SEQ ID NO: 2969 - DNA, 30011 bp, Xenorhabdus sp.; identical to SEQ ID NO: 265
  CDS (22650)..(23693)

SEQ ID NO: 2970 - DNA, 30011 bp, Xenorhabdus sp.; identical to SEQ ID NO: 265
  CDS (18327)..(18686)

SEQ ID NO: 2971 - DNA, 30011 bp, Xenorhabdus sp.; identical to SEQ ID NO: 265
  CDS (16852)..(18315)

SEQ ID NO: 2972 - DNA, 30011 bp, Xenorhabdus sp.; identical to SEQ ID NO: 265
  CDS (9949)..(10563)

SEQ ID NO: 2973 - DNA, 30011 bp, Xenorhabdus sp.; identical to SEQ ID NO: 265
  CDS (4907)..(5194)

SEQ ID NO: 2974 - DNA, 30011 bp, Xenorhabdus sp.; identical to SEQ ID NO: 265
  CDS (4635)..(4910)

SEQ ID NO: 2975 - DNA, 30011 bp, Xenorhabdus sp.; identical to SEQ ID NO: 265
  CDS (4025)..(4555)

SEQ ID NO: 2976 - DNA, 30011 bp, Xenorhabdus sp.; identical to SEQ ID NO: 265
  CDS (3279)..(4028)

SEQ ID NO: 2977 - DNA, 30011 bp, Xenorhabdus sp.; identical to SEQ ID NO: 265
  CDS (2852)..(3250)

SEQ ID NO: 2978 - DNA, 30011 bp, Xenorhabdus sp.; identical to SEQ ID NO: 265
  CDS (2267)..(2584)

SEQ ID NO: 2979 - DNA, 30011 bp, Xenorhabdus sp.; identical to SEQ ID NO: 265
  CDS (1098)..(1238)

SEQ ID NO: 2980 - DNA, 23296 bp, Xenorhabdus sp.
  CDS (2450)..(3211)
cttatcatatgttttataacgattaatatttaaattttgagacaactaaccccaacttatgttgtctcaattactgccgtccttcttgcaaagaatgcgtatcaatttgataaataaagatttaatatcaaatttagtgttgtctcaatgtattactctaactcccaagcattcgaacaacaattttcgacatacattcagcgcctttttcaatccagagtgtcaatgatactgtatggctattaactgagtgaatatctttcacttggttgaccaccccttttaaaagggtgcagataactaattgatttatttcatgacgcaaagacgcgtgatcccaaagggtagcattcgccgtgctatccttttctttttgcacacctctaaatgatgactgcaaagtttgcgcacctcttaatgagttgtgcaaattctgtgagtcagcatgactgacgctcaaagtccgattatcggatattaggttttgcatcaacgaatttcgtcggaacaaactaaccctcttaaagaggggcagttcttgttccgggcaacgggacaactgacccacaaattgtaggccagttacgctatgagcaggttacatatttgcagtgcgctaatttgtcagccaatgaaataataattgcaaagtgagaactcagcagcaggtaggtatgttaaacgtgccgagttatttttgaccaacactctttaagagggtagcttctggaactgataattcattaacctcagtaaatcattaaagcccatttccacacctacatttgaaacagaaggattaagccaaagtgacggcctcggataaatcaatgagttactgtaggtgtccgaagattttcgtatacccatcagccaaagcgaggaccacggaagaatcaatgggttaaaagtgagatttctcacctttatgtaacttgttgatttttcttatttccggctcaggaacggaattaaattaaatcaatgagttaaaaggggagaattgtcctatttagataagtgattgatttttcttatttcctgcatggtgacagaaaatagataaatcaatgggttaaacgaatgtggatggctgaatgaattgatgggggggttgtgtgggaaatagaataattggggaagtaagagtaatgttacctgcatgaaaaaaccgcacgagaccggcttggcattatccatgattgtatagcgtgtaagttctatctaaccatacaatgaaaaaagtagaatcacgcctatacccaaccataggcttcatcccactgaatctaaaagagataaaatccacatcctcagtgatatgtttagggatacccgctctaattgcgttcctcgctatcttttcaaatccaagcgtgtgtcggtcttgctgttttatttggctccacgttaatttacttagccggaacaacttgtcagacaatgccgccttatcatccctttcacaactatttacacagtaattatcttgcaggtatcttaaggaaaattcaggcggtcttttttctgaatcatcatgaaattcagggccaagccgaagtctgccagattctgcctgaacgtcttgaggtacttttattcttctggaatttttctttgccatattaatttatacgagtcagaaagtaatctttaagctcttcatgagaaataacctgacacccgaccccttcgatataattatccttccatggcgcctcttcatgggtcatgttacgcagcttccaagctgaaaattgcccgaaaacatcataaacttcttccaaaagcgccagttcttccctgtcaaaattttcctcataatacccatcgttaggaagagcattatttttatgctttttatatttttggtaaagttcagggatcactggaccatgcatccacgcttctatttgctcctcaaataacggttttcccagcaacgctaaagagaagccttgtgcataataaaccaacttctgtaatttaagattggaaatagtgtcgccgctttcctcatcacagcatgctaaaaaatagtcagccacatcaaagcaagtaggcataacactctccatattagtttaataaaatcaaagaaataacacacgccaagtgtaacaaattgatataagggttatagttatattatatcacttaaccttaagttcaacagtataagctgtatttctttttgttccattggtgattaaatatgcctgtccgtttcggttttgctaaggttcaattttcatcagtactctgacaaattctattaattccccgcctgtcattttatgtcatcctgcccacaaaacattacctatcaaattttagtcaagccgtacttttctgtattgatgaacccttttattgatgttcaccggcggagaagtttcccaccgccttcatgttatttagcaatgtgtattgttgattagatgagggaatgaatatgagtactcaaaacagtaatagctcagttgacgttccaacaatggacgatgtcagaaaagcaattaaagaagccattgcagaacacgcggcaagccgtaatcatccgtatgccactcaggtagagcctggattggttacactgagtaatgataccgatagcgacagtgagataaccgttgcaacatctaaatctgttaaaaaagcatatgatttagccaatagcgccaatcaaaatgccagcagtgcaaatgataatgccaatactcgcttgtctaaagatcggaacggggctgatattcctgacaagactaattttttaaaaaatattgggttaggtgaaacagcaaatgtccgatttaatgatgtttacgccaacgttttgcatagttcaatcctcaacctgaccggcaatgtaacgggtgtccaattttattcaccggatggttctggaagacggcgcagaatagaaagggcattagactctgatccggtgatgtttagattcattgatcgggcaggagacgctgaaaataatcgaaatattgctgtcatagagatgcccagagttacgtatggtcaggtgttggtattgagaggaaactgtataaatgaccccaatggctacatacggatagcctcccctatcatcgaaattttctcttctggcgcattcaccaccaacgatgaatcagaagggactactgttgaatatttatcaaaaggtacatatctaattaaccccaattctggataagaaattgacgagaagcctgttcaaggagccgtgttttggtgcaagtcgaaacagctccggggaggaacaggctatgaacaacttagttgaaattttcatcgatgtcgatgacttttgtcgttttttcattccacaatgggaacagttttgtctcaataagggatatcgcctacgtcgtagaaaaggtcacatgtatcccagtgaaatcatgaccatcctgatcctctttcatctgtcgcattatcgtgattttaaaaatttttatctggagcatatttggcgatatcatcatcacgattttccaaccttgctcagttatactcgttttatcagtgtcgcgccttccgttttagtgcctctgtgcagctatctgactcaattaaaaggaaaccctacggggatcgcctttattgactccacgcgtttgagcgtgtgccataatatccgtattccccgccataaggtatttgaagggacagcatagcgaggaaaaacctcaatggggtggttttacggtttcaaattacacctgattattaaccatcttggcgaaattctggccctcaaaatcacggctggaaatacggatgacaggaaagtggttcgggaattagcaaaagaattaatcggttccttgtatggcgacaaaggttatcttagtcaggaactggcaaacgatttagcacaaaacggtgtcactttcatcacgaaaaagcggagtaatattaaagcgagtgtgctggaagattgggataagataatgttatcaaggcgttttattatcgagacggttaatgggcaattgaaaaatatctgtcaaatagaacattctcgtcatcgaagtataaaagggtttctgttgactgttttaacggggttaattgcttattgtcataaaaagaagaaaccatcactgaaagttttctactcagaagaagaagatattccagtgacagcttaaacagaattggggttaatttacacaatatggttcaggcagataaacagactctgaatcaaaatcgacaacaacgtcaacgtcaacgccaagtggcatggtaaacattgggtgtgtatggcaacaatcgaaatcagccagaacaggaacttctttctcattcagaacttctttcagcacatccagagagtttcttcctgtccctttatcatcaaattgttcgtgttttccaagaataattgctgaaactttatcaaagaccccacataacagcagatgggaaaaagcgcgttcaaccagctctattcctttgaaacagtcttcaataagtaaaatatcacctgttttaatttcaggcatatattcacttccccaaatcccacaaagagtatttaaattaccaccaattaatctgcctcggaacgttccttttccatcaaaaatccaattattaggatatgtatttttaggggttatctgtgtttcccagtcgatatattcatcagcccaatgttcaggctgtttatatataaaaggaagggagtgattattattgactatttgagaaaaattattgaatgtctcatcaactaaaggtggaaattcaccaaatgaagcaactaatgcagggccataaaaagtgactacattggttttctgatatattccaagtaaaagtgctgttatgtcagaataaccaataatgattttaggatcttttctgatggcatcataatcaatatatggcagcattgagtttgaattattacctcctatatacacaatggatttcaagatgcatcgcggcggcaagggagttcatccccgggagcatagataactatgtgactggggtgagcgagcgtagccaacaaagaggcaacttgaaagacgaaatgtatagtagacataacacaccttacttctgggtcacgaagcagggtattaaactcttccactcgttgcataatggtgcctgaacgataaaaatcgcttttaccggtgagtgttccggcttttgttttataacctttactttctaaataacggacacttctggcaaaacgagtcggtgcaaaagcagtagcaggagatgaagaggagaaaaaaccgatagtttcaccaatggataattttttagggaggatcatggcgctaccttttattcgaaaaataatgggtaccacacaatgaatactgtaccttaatcgccagacaggaggccaatcgtaatggcagagccgacattaaggtacagcaaaatgcacacttcagtgtgaagtgtgccagcgaattggtcagattatttttttaactgactgttaaaatctcgctctgcatgaccagtatacagttggcgaggacgagcgatcctcatgccttcatcatgcatttcattccagtgtgcaatccagccgattgtgcgggcaatagcgaagatcacagtaaacatggatgacggaattcccatcgctttcaaaataattcctgagtagaaatcgacattcgggtacagtttcttctcaatgaagtacgggtcattcagggcaatgcgttccagctccatggcaacttccagcaggctgtcattcagaccaagctcatccagtacttcatggcaggtttcacgcattacggttgcgcgtgggtcatagtttttatagacgcgatgaccaaagcccatcaggcggaaagcgtcatttttatctttggcccgggcaataaactcaggaatgtgatcgacagtctgaatctcttccagcatgcgcaggcaagcttcatttgctccgccatgtgctggtccccacaatgatgcaatccccgcagaaatacaggcaaacgggttagcaccagaagaacctgctgtacggactgtcgaagttgaagcattctgctcatggtctgcatgaagaataaaaatgcgatccattgcccgttccagtaccggattgaccttatattcctcacagggagttgagaacatcatgtacaggaaattaccggcgtaagagagatcattacgcgggtaaacaaaaggctgaccaacggaatatttgtaacacatcgccgctacagttggcattttagacatgagacggtatgcggtgatttctcggtggcggggattattaacatccagcgcatcatggtagaaggcagcgagagcgcctgtgacaccgcagagtatagccatagggtgagaatcacgacggaaaccatggaacaggcgggtaatctgttcgtgaatcatagtatgacgagtcaccgttgttttgaatttttcatactcctcaggagttggtggttcgccattaagcagaatataacaaacttccagataggttgatttcattgcaagctgatcgatgggaaaaccacggtgcaacaaaatgccttcattgccatcaatataggtgattttcgactcgcaggatgcagtggaagtgaaaccgggatcgtaggtatagaagccttttgagccgagggtacgaacgtcaattacttcagagcctagggttggcgttagtacgtctagttcgatagcagctgaaccatttatggtcaacgtagcctttttatcagccatttacatctccttagcgcttatttcttataacccctaacaacctaaataggcgtaatccttactgcgccgacggcattgtgctaccggagagaattaaaaatcaggctgtatataccctttgtttctgtcgggtatcgatttaatgctgaaatctcattttacggacgtcaatagtgttcaggttgttaaaaagtttccggatgtcaatctaaagtatttctaacataaaatgttaccattttgtgtcgtatcgatatttttacaaagcccacatttttcgtgaagtttgctttttcatcggaaaatgacggtaaatattatgcaccgtcatatatgtaagataaatgtttaatctttgtcaaacaagataatggtttttatgataaatgtttgaagcgtgatcttactcactgttcaagctaaatgttaataatcatattgtgtgggaattgtaataacaatgtgaagtacttatactgcgtcaaggtctccggattacctgatgtaggagcacccagcgtaatcaaatcacaacgtttgttgaaaacagtaaggattgttaatttaattatgttgtgtctttgtgtcctcttaacgctgtctgattcccacccagggccggaggatggaaaataaaaaaaagctgtgtgggcaaaattgtgaaaaaacaaagacctgtcaacctcgatctgcggacgataaatcaacctgtctccgcgatagcttcgatcttgcaccgtatctcaggcgtcatcacctttatagcagtcggcattctgctgtggttgttgggtatgtcactgtcttcgcaagagggcttccagcatgcttctgaaatcatgactggctttttcgccaaatttatcctgtgggggatattgacggcgttgggttaccacatttgtggtgggatccgccatgttttgatggactttggtctcttggaagagagtctcgccgctggtaaagcttctgctaaagtggcaatcgtgatcgcagttattctgtctattctggccggggtattagtatggtaagcaacgcatccgcattggggcgcacgggtattcaggactggctgttgttacgtgcatctgcaatcgttattgttttatatgttctttatttagttggttttgtagcaacaacgtcagacatcacctatgaagtctggagcagttttttctccttctctctcacaaaagtgttcaccgtactggctctgctttccattttggttcacgcatggattggagtgtggcaggtgctgacggattatgtaaagccactggcactgcgtctggtattgcaactggtcattattgttgcactgttgacttatttgatttacggaacaattgtggtgtggggtgtataaatgaaactgccggtaagagagtttgacgctgttgttattggtgctggtggcgcaggtatgcgtgctgcactgcaaatttcacaaatgggcctgtcctgtgccctgatttctaaagttttccctacccgatcccatacagtttctgctcagggtggtatcacagttgctctgggtaacactcatgaagataactgggaatggcatatgtatgacacggtaaaaggttccgattatatcggtgaccaggatgccatagaatacatgtgtaaaaccggtcctgaagccattctcgaattggaacacatggggctaccattctcacgtctggataatggccgcatttatcagcgcccgtttggtggtcaatccagaaattttggtggtgagcaggcagcccgtactgcggctgcggctgaccgtaccggccatgcattacttcataccctgtatcagcagaacctgaagaaccacacgactattttctctgagtggtattctctggatttagtcaaaaatcaggacggtgccattgttggctgtacagcaatctgtatcgaaacaggtgaagttgtctatttcaaagccaaggcaactattctggcgacaggtggtgctggtcgtattttccaatccacaacaaatgcgcatatcaatacaggtgatggtgttggtatggctctgcgtgccggtgttccggtgcaggatatggaaatgtggcaattccacccgacaggcattgcaggcgcgggtgtgctggtaacagaaggctgccgtggtgaaggtggttatctgctgaacaaagatggcgagcgctttatggagcgttacgcaccaaatgctaaagatctggctggccgtgatgtcgttgctcgatctatgatgatcgaaattcgtgaaggtcgtggttgtgaaggcccgtggggacctcacgtgaaactgaaactggaccatctgggtaaagatgttctggaatcccgcctgccgggtatccttgagctgtcccgtacctttgctcatgtagatcctgtaaaagaaccgattccggtgatcccaacctgtcactatatgatgggtggtattccaaccaagattaccggtcaggcactgactatcaatgataaaggcgaagatgttgtcattccgggtctgtttgccgtgggtgaaattgcctgtgtatccgtgcatggtgcaaaccgtctggggggtaactccttgcttgatttggtggtctttggtcgttctgctggtttgcacctgaaagagtgtctgatggagcagggaaccacccgtgatgccagtgagtctgatgttgatgtagcactgcaacgtctgaaccgttggaataatacccgttcaggcgaagatccggttgagattcgtaaagcattacaagcctgtatgcagcacaacttctctgtattccgtgaaggggaagcaatggcgagagggctggacgaactgaaagtcatccgtaaacgtctgcacaatgctcgtctggatgatacatcatcagaattcaatactcagcgtatcgaatgtctggagctggataacctgatggaaacagcttattcgactgctgttgctgcgaactatcgtacagaaagtcgtggagcacacagccgtttcgattatccagagcgtgacgatgcaaattggctgtgccacagcttgtatttaccgcagactgagagcatgacccgtcgagaagttaacatgcagccaaaactgcgtgaagccttcccgccgaaagtgcgttcttactaattgcgttgccgatgttccagttgcggagaaatagattatgaaacttgaattctcaatttatcgttataatccggatgtagacaacgcaccccgtatgcaggattacacgctggaagcggaagaagggcgtgacatgatgctgctggatgccctcattcagttgaaggagcaggatccaaccttgtcattccgccgttcatgccgtgaaggtgtatgtggttccgacggtttgaatatgaacggtaaaaatgggctggcctgtattacatccatttcagccttgcgccgtggaaacaaaaagattgttatccgtcctctgccgggtttgccggttgtccgtgatttggtcgttgatatgggccaattttatgcgcaatatgagaaaatccgtccttatttaattaatgacggtaaaaaccctcctgcgcgtgaacacctgcaatcaccagagcagcgtgaaaaactggatggcctttatgaatgtatcctgtgtgcctgctgttcgacgtcttgtccgtcattctggtggaatccggataaatttattgggccagcgggtctgttagcggcatatcgtttcctgattgatagccgggatactgaaacttcatcccgacttgatggtctgaatgatgcattcagtgtgttccgttgtcatggaattatgaactgcgtcaatgtatgtcctaaaggtctaaatccaacaaaagcgattggtcatattaagtctatgttgttaagacacagtgcttaattaaatattactgataggtcgatatatatctaatggatttcaggttgcatcgtggttaacaaagaagtggcttgaaagacaaaagataaagatatagtgcataaataacacataaattgtgtgcaaataatgcatataaggttgccctccacatttttgaaataaatatcaatctggtggagggcataaagaatgaaagatgataaattgcctgctgctaatgacggcgcatgtttcagtaaaataaggaacctttaaaaactgacttcagtttttaaaggttccttgaagggtaggataacccaaataaagaacatgcattaagcacgtccaaatgaaccttttatcaacaccgcttaataaagcggaatttgttaaccacggcgaaaactaaagcttttgaagcttaagggatcacaatgcagaacggtgcaatgaaggactggctggattcaagctttctggctggtgcaaaccagtcttacatagagcaaatctatgaagactatataaccgatcctaattctgttgatgcaggttggagagaaatattccaacaattaccggatgaaggacttcacggggaacaacttcactcacagacacgtgattacttccgtcgtctggcaaaggatgccactcgttaccacacttcagtcagcgatccagcaatggatgcaaaacaagttaaggttttgcagctaatcaacgcattccgcttccgcggtcatcaaaatgcgaaccttgatccattgggattatggaaacaggaacctgtaccagatctcgatcctgctttccataatttaaccaaagcagattttgaagaaacatttaacgtaggctcatttgctatcggcaaagagacgatgaaactggctgatttatatgacgccctgaagcgcatttattgtggttctattggtgcggaatatatgcatatcaccaatacagaggaaaagcgctggctccaacagcgtctggaatctgtggcggtgggttcacagttcaatacggaagaaaaacgtcgttttctggcagagctgacggcagcggaaggtttggaacgctatttaggtgctaagttcccgggggcgaaacgtttctcccttgaaggcggtgatgcgctgattccaatgctgaaagaacttatccgtcacgcaggtaaacaagatactcgtgaagttgtactgggaatggctcaccgtgggcgcctcaacgttctggtcaacttattcggtaaaaaaccagcggatctgtttgacgagtttgctggtaagcataaagagcatcttggcacgggtgacgtgaaataccatcagggtttttcttctgatttcgaaactgatggtggaccagtgcatctggcgctggcatttaacccatctcaccttgaaattgttagccctgttgttattggttctgtccgtgctcgccgtgaccgcctcgatgaaggccgcagtaacatggttctgccagtgaccattcatggtgactcagcagtaacagggcagggaattgttcaggaaacactgaatatgtctcaggcgcgcggctatgaagttggtggcacaattcgaattgtggttaacaaccagattggtttcacaacctctaatcctaaagatacccgttcaacagaatattgtactgatattgcgaagatggttcaggcacctatcttccacgttaatgcagatgatccggaagccgttactttcgtcacccgtcttgctctggatttccgtaatacgtttaaacgtgacgtgatgattgatttggtttgttaccgtcgtcatgggcataacgaagctgatgagccaagcgcaactcagcctttgatgtatcagaaaatcaagaaacacccaacaccacgcaagatctacgcagataaacttatcgcagaaaatctactgtcacctaatgatgtcactgaaatggccaacttatatcgtgacgcattagatcacggtgattgtgtcgtggatgaatggcgtccaatgggcctgcattccttcacatgggaaccttatctgaaccatgaatgggatgcagagtatccacatcaggtggatatgaaacgcttgcaagatcttggcaaacgtatcagctccattccggctgaagtcgcaatgcattcccgcgttgcaaaaatctacgctgaccgtgcagaaatggctaatggaaacaaattatttgactggggcgcggcagaaacactggcgtatgcaactctggttgatgaaggtgttccggtacgtctgtccggtgaagatgcgggtcgtggtacattcttccaccgtcatgcggttatccataatcagactgatgcctctgtttatgtgcctctggcaaatgttcacaatggtcagggtgaattcaacgtatgggattccgtgctgtctgaagaagcagtactggcgtttgaatacggttatgcaacaacagagccacgcacgctgaccatctgggaagctcagtttggtgattttgctaacgtagcacaggtcgttattgaccagttcatcagctctggcgagcagaaatggggccgtatgtgtggtctggttatgttgctgccgcatggatatgaagggcaaggcccagagcactcatctgcacgtctggaacgttatctgcaattatgtgcagaacagaacatgcaggtctgtgtgccatcaactccggctcaggtttatcacatgctgcgccgtcaggctctgcgtggtatgcgtcgtcctctgatcgttatgtcacctaagtcactgctgcgccatccattggcagtatccagtctggatgaactggctgacggtaagtttgagacagtgattggtgaagtcgacgctttagatccgaaaggtgtgaaacgcgttgtactttgctccggtaaagtctattacgatctgctggagcagcgtcgtaagaatgaacagagtgatgttgctattgttcgtattgagcagctatatccattccctcgtcaagatttgcagaatctgtttgagcagtatgctcatgttcatgatttcgtttggtgtcaggaagaacccctgaaccaaggggcttggtattgcagtcaacataatttccgtgaagcgatcccatttggggcttctttacgttatgcagggcgtccggcttctgcttccccggctgtgggctatacgtccgttcaccagaagcaacagcaagctctggtaaatgacgcactgaacgttgaataaattaaggatagaaaatgagtagcgtagaaattctggttccagaccttcctgaatctgttgcggatgcgactgttgcaacatggcacaaaaaaccgggtgatgctgtagagcgtgatgacattctggttgaaattgaaactgacaaagtgattttagaagtaccagcaagtgaagcaggtgttctggaagctgttttggaagaagaaggcgccactgtattgtctaagcaattgcttggccgtattagcctgagcaacagtgctggtatgcctactgctgtgaaggaaaccactgaagcaactccggcacagcgccagactgcctctttggaagatgagagtaacgatgctcttagcccggcagttcgccgtctgattgcagagcacgatttagatccggctgcgattaaaggcagtggtgtaggtggtcgtattgtgcgtgaagatgtagaaaaacatatcgctgcgaacaaaaaagagagcgctaaacctgctgcatctgcaccagccgctcaacagtctgaactgccacaccgcagtgaaaaacgtgtgccaatgacgcgtttacgtaaacgtgttgcagaacgtctgcttgaagcgaagaacaatacggcaatgttgacgactttcaatgaagtcaacatgaaaccaattcaggaactgcgtaagcaatacggcgatgtgtttgaaaaacgtcatggcgttcgtctgggcttcatgtccttctatgtgaaagctgttgttgaagcactgaaacgttatccagaagttaatgcttcaattgatggcactgacgtggtttaccacaactattttgatatcagcattgcggtatcgactccacgtggtctggtaacgccagtattacgtgatgcagatgccctgagcatggctgatctcgaaaaaaccatcaaagagctggctattaaaggccgtgacggtaaattgaccgttgatgaactcaccggtggtaatttcaccattactaatggtggtgttttcggctctctaatgtccactccgatcattaacccaccacaaagtgcgattctgggcatgcatgccattaaagatcgcccaatggcagtaaatggtcaggttgagatccttccaatgatgtatctggcactgtcttatgaccatcgtctgattgacggacgtgagtctgtaggcttcctggtgaccatcaaagaaatgctggaagatccaacacgtttgttgctggatgtatagcatcaccatcagggcggagggtgttaaattccgctcagtctgaagtacaacgatgttgatgtaaaaagtgttgatgtaacaaaccatgcggccagctttcgggctggccatatccgagcaacaaaatataccctgtgaatttcgaaatgcagtaaataaagctgtagcttgtaatgcgcaggtatagaaggttaattacctttcttagattaaattatggatagaacatcatgaatttacacgagtatcaggcaaaacaactttttgcacggtatggtttaccagcaccagctggttatgcctgcacaacgccgcgcgaagcagaagaagcagcatccaagattggttcaggtccttgggtcgttaaatgtcaggttcatgcaggcggtcgcggtaaggctggtggtgtgaaagtcgtcaatagcaaggaagatattcgtgcttttgctgaacaatggctgggtaaacggctggtaacctatcagactgacgtacaggggcaacctgttcaccagattctggtagaaggagcgactgatattgctaaggagctgtatctcggggctgttgttgaccgtggtacacgtcgtgtagtgttcatggcctctaccgaaggtggcgtcgaaatagaaaaagtggcggaagaaacgcccgaactgattcataaagcaatcatcgacccactggctggccctatgccctatcaaggccgtgaactggcgttcaagttaggtttgactggtaaacaagtcggtcaattcaccaagattttcatgggattggcaaaccttttccttgagcgtgatctggctctggttgaaattaacccattggttattacaactgaaggtgatcttatctgtttggatggaaagttgggtgcagatggtaacgcgatgttccgtcaggccgaactgcgtgaaatgcacgatcctttacaggaagatccacgtgaagctcaggctgcacaatgggaactgaattatgttgcattggatggcaacattggctgtatggtaaatggtgctggtctggcaatgggaacgatggacattgtcaaactgcacggtggtgcacctgctaacttccttgatgttggtggtggcgcaacaaaagagcgtgttactgaggcatttaaaatcatcctgtcagatgaaaatgtgaaagctgtcttggtaaatatctttggtgggatcgtccgttgtgatctgattgccgacggtattattggtgctgtggaagaagttggtgtacacgtaccggtagttgttcgtctggaaggaaacaatgctgaacagggtgcgaaaaaactggctgacagtggcttgaacattatagcagcaaccagtttgacagacgcagctaaacaggcagtcgcagcagcggggaataaataatgtctattttaatcgataaaaacaccaaagtgatttgtcagggttttactggtagtcagggtactttccactcagaacaggcgattgcttacggtactcagatggttggtggtgtcacaccgggtaaaggtggcactgaacaccttggcctgcctgtgtttaataccgttcgtgaagcggttgaagcaacaggtgcaacagcctctgttatttatgtaccggcaccattttgtaaagactccattctggaagctattgaagctggcattaaactgattattaccattactgaaggcattccaactctggatatgctgactgttaaggtaaaactggatgaagccggtgttcgcatgatcggccctaactgtccgggtgtgattactccgggtgaatgtaagatcggcattatgcctggtcatattcatcaagcaggtaaagtgggtattgtatcccgttcaggtactttgacatatgaagcggtgaaacagacaactgatgcaggattaggtcaatctacctgtgttggtatcggtggtgacccaattccgggttcaaacttcatcgatatcctgaaactattccagcaggatccacaaactgaagctatcgtcatgatcggcgagattggtggaacagcagaagaagaagctgctgcgtacatcaaagagcatgtaacgaaacctgtcgttgcttacatcgcgggtgtgacagcacctaaaggtaagcgcatggggcatgctggtgcgattatcgcgggtggtaaaggtactgcggatgagaaattcgcagcgctggaagccgcaggcgtgacaactgtccgtagccttgctgacatcggagatgcagtaaaagggttattggcaggaaaatagtcccaaaataagctatttttatataaaaaggctgcttaaaagcagcctttttatttttatttataatataaacagtatgttagtctttttatacagagtgatatttttaaattaaatttaacttgtttttagaaagctctatttaatcgattaatttaattataaatgctaataaaatatatttttctaataatgaaaatgaaaagttaattttataatgcttttcacagcaaaaaatatattaacaggcattgttggcaacaaataattaacactaaatcaactgtaatgaaataatagctgtaatacttaacaataaaatgaaaaaaatgactaaaatcaatttattactataaattctgttcgcttaaattgatttaattgatctagaataaagagatattacctcataaatgaacggcactattggtctgtattcagaattctagtctgagtcacgtaaaagctatttattgtgtgtgaatataggcgtaatattattgagatttatactggatttgatttacttaataatttgttgttgtgtttgaggcatttattgctggtagttacgagactttcatttaatgaagtcgggttgccgcaagtcggtgtcttcctgctaggagcaaggagtcaagatgtttgatattgtcgaactgtcacgattacagtttgccttaactgctatgtaccatttcctattcgtaccattgacgctcggcatggcgttcttgcttgcgataatggaaacggtatatgtcctgtctggcaagcaaatctataaagatatgacgaaattctggggtaagttatttggtattaactttgctctgggtgttgcaacaggtttgactatggagttccagttcggaacaaactggtcatatttctcacattatgttggtgatatttttggtgcaccattagccattgaaggcctgatggctttcttccttgaatccacatttgttggcttattctttttcggttgggatcgtctcagcaagaaacagcatctggcggtaacatggctggttgcattaggttctaacttctctgctttatggattctgattgcgaatggttggatgcaaaacccgattgcatctgatttcaattttgaaaccatgcgtatggaaatggtgagctttagcgagcttgtgctgaaccctgttgctcaggtgaaattcgttcatactgttgctgctggttatgtgacaggcgcggttttcgtcttgggaataagctcctactatctgcttaaagggcgcgatatttcgtttgctaagcgttcttttgcaattgcatcaagttttggtattgcggcagtattgtctgtcattgtattgggtgatgaatccggatacgaaatgggggacgtacaaaaaaccaaactggctgcgattgaagcagaatgggaaacacaggcacctccggctgcattcacactgataggaattcctgatcaggataaaatggaaaataaatactccatccatattccttacgtcttaggtcttatagcgacccgctcaactgatactcctgtgattggtctgcgtgacttgatgagtcagcacgagcaacgtatccgtaacggtcttaaagcctatgagttactggaagaattgcgagcaggcaatactgatccggcagtacgtagcgcattcaacgaaagtaagaaagatcttggctacggtatgctggtcaaacgttacactccagaggtaacaaacgcgacagaagaacagatcaaagcagctgcgaaagactctattccacgtgtagctccactctattttgcattccgtatcatggttgcctgtggctttatcatgctgttggttattggcctggcattcttcagtgttatccgtaaccgtatcggtcagcagaagtggttgttgcgtgcagcactgttcagtattccattgccgtggattgctgttgaagctggctggtttgttgcagagtatggccgtcagccgtgggcaattggtgaagtattaccaaccgcggttgctgcttcgacacgcagtgtcggggatctgattttctcaatggcactgatttgtggtctgtataccttattcttgattgctgaaatgttcctgatgttcaaatttgcccgtcttggcccaagtagtctcaaaacagggcgctatcattttgaacaaaaagccgtttcttcaacgaagaattcttcagtgaacagtattgagtaagcgggagtccacttatgcttgattatgaagtattacgatttatatggtggctgctgattggtgtgttgctaatcgggtttgcagtgaccgatggttttgatatgggtgttggtgtcctgttgcgggttattggcaaaaatgacactgaacgccgtatcatgattaactctgtagcccctcactgggatggcaatcaggtttggttaatcacagctggtggagcattatttgctgcctggccaatggtatatgctgctgctttctccggtttctacgtcgcgatgattctggtactggcggctctgttcttccgtccggttggttttgactatcgttcaaaactggaagacagaaaatggcgtaatatgtgggattgggggattgttgtcggcagtttcgtgccaccgttggtgattggcgtggcattcggcaacctgctacagggtgtgccactgtcggtagattcttatttacgcgtatcttatgaaggatctttcttcgggctactgaatccttatggtcttctcgccggtgttgtcagtttgatgatgatcattacgcagggagcaacttacctgcaaatgcgtactacaggtgaattacacctgcgttcccgtactgcgacacaggtttgtgcgttaatcacagcggtggctttcttactggcgggtgtgtggctgatttacggtatcgatggttatgttgtgactggcggtctggatgtaaacggcgtatctaatccattacataaagaagtggttcaacaggcaggtgcatggctgatcaactttaataaccagccgatattgtgggcgatacctgcactgggtgtggttttccctctgttgactatgttagccaccaaactggataaaggtgcctgggctttcctgttctcatcattgacggttgcctgcattattttgaccgcagggatatccatgttcccgtttgtgatgccatcaagccttgatccaaatgtcagtctgaccatgtgggatgcaacatccagtcagtggacgctacaaattatgttcgttgttgcgcttatctttgttccgattgttttgtcatacaccatctggtgttactacaaaaccttcgggcgtctggataagggttacattgaaaacaacaaacattcactgtactaaaggagcatagcacatgtggtattttgcctggattctcggaacgctcttagcttgtagttttgccattattgcggctttagctcttgagcacagtgagtcaaaaaaagtaactgagagtgacaaaaaataatgttggctgatagactttatcagctaataatgaataagggcctgttgagggcccttatcctcattatggctttagggcttgctttctgtattttgtgggatccgacccgatttgcatcgaacaccagttcgttgatgatatggcagggtattttactgatttgggcaatttgttccggggttattttcggcgttggatttaatcctaaacattttgtctggcgtcttttttttcatccattacccgcacttttaatccttatttttggcttatatcatttctttaagtaaactatttgtaattttacaggacactggcccataaatttttttgactagtttaataacaagtcattccaaagcgctattgtcttaagtatagtggcagcgtcaattagtctgattaggattatgtgtgagtaatatgttgttccgttggcctatccgtgtttattacgaagacacagatgctagtggtgtggtctatcacgctcaatatctggctttttatgaaagagcccgcacagaaatgttgcgtgataagggcttccaccagaagtatatgttggatgaacaaattggttttgttgtcagtcgcatgaccgttgactaccggaagccagccagattagatgataagctggttgtggagtgcgaagtgacgaatatccgcggtgcttcgctgacatttactcaacggataattgattgtaatgatgtagttatcagtaacgcagaatgtctggttgtctgcgtaaattcatctcaaatgaagcctattgcgcttccaaagtctattgtcgcggagtttaagcagtgactgacatgaacatcctagatttattcctgaaggcaggctttttagtacagctgatcatgttaattctgattggtttttctgtcgtctcttgggcgattattattcaaagaacaagaattctgaattccgccactcgggaagtggaagcatttgaagataaattctggtctgggattgaattgtcccgcctttataaagagagtcagtcacatcgtgattcattaagcggtactgaacaaattttctattctggctttaaagaattttctcgtttacatcaggcaaacagccatgcgcctgaagctattctgaccggggcctcccgtgctatgcgtatctccatgaaccgtgaattggaaacactggaaaatcatattccattcctgggtaccgtcggttctatcagcccttatatcggcctgttcgggactgtctggggaattatgcacgcttttattgcgttgggatcagtgaaacaggcaacgttacagatggttgcgcccggtatcgcagaagctctgattgcaacagcaatcggtctgtttgcagccattcctgccgttatggcttataaccgtctgaatcagcgtgtcaataaactggaacaaacttacgacaattttatggaagaatttctggcgatattacaccgtcaggcttttgtttctaatactaacaagtcgtaataaagagtaaggggaaaagctaatggcgcgcactcgcagtcgcagacgtgagctaaaatccgaaattaatatcgttcccttgctggacgtgttactggttttactgctgatttttatggcaaccgcaccaattattacgcaaagcgtagaagttgatctacctgactcagtggattcaaaaacggtttccagcactgataatcctcccgttatagtagaggtctctggggtagggcggtacaatatggttgttaatcaggagcgtctggaattattaccagagcaacaaattattgctgaagctcaaactctgataaaagctaaccctaaaacaattttcttgattgggggttcaaaagaagttccttatgatgaagtcatcaaggctctgaatatgcttcgtcaggcgggagtgaaatcagtgggtttaatgactcagcctattggcgcctgaatggcggcttacacttaaagtttctggatgtcgagcgtgggaaagacaaacaagcaaaacagcaggctaaatcgcgccattattatttcagttattttgcacattatcctgttcgggtttctgatttggggctctttagaacaaaaaactgagatgggcggtggtggagtcggtggtacagttattgatgcggttatggtcgatccaaatgccgtagttcaacaatataaccagcagcaacagcaacaggctaatgccaaactggctgagcagcagcggaagaaaaaagccgaacaacaggccgctgaattgcgggctaagcaggcggaagagcaagagcgcctgaaagctgcggaagaagagcggataaaggcacagcaggttgcgcaagagcagaaaaaacaggctgatgctgccgccgctaaagctcgtcaagagc

SEQ ID NO: 2981 - DNA, 23296 bp, Xenorhabdus sp.; identical to SEQ ID NO: 2980
  CDS (3564)..(3695)

SEQ ID NO: 2982 - DNA, 23296 bp, Xenorhabdus sp.; identical to SEQ ID NO: 2980
  CDS (3810)..(4172)

SEQ ID NO: 2983 - DNA, 23296 bp, Xenorhabdus sp.; identical to SEQ ID NO: 2980
  CDS (7683)..(7793)

SEQ ID NO: 2984 - DNA, 23296 bp, Xenorhabdus sp.; identical to SEQ ID NO: 2980
  CDS (7787)..(8134)

SEQ ID NO: 2985 - DNA, 23296 bp, Xenorhabdus sp.; identical to SEQ ID NO: 2980
  CDS (8135)..(9901)

SEQ ID NO: 2986 - DNA, 23296 bp, Xenorhabdus sp.; identical to SEQ ID NO: 2980
  CDS (9939)..(10655)

SEQ ID NO: 2987 - DNA, 23296 bp, Xenorhabdus sp.; identical to SEQ ID NO: 2980
  CDS (11075)..(13882)

SEQ ID NO: 2988 - DNA, 23296 bp, Xenorhabdus sp.; identical to SEQ ID NO: 2980
  CDS (13897)..(15114)

SEQ ID NO: 2989 - DNA, 23296 bp, Xenorhabdus sp.; identical to SEQ ID NO: 2980
  CDS (15345)..(16511)

SEQ ID NO: 2990 - DNA, 23296 bp, Xenorhabdus sp.; identical to SEQ ID NO: 2980
  CDS (16541)..(17386)

SEQ ID NO: 2991 - DNA, 23296 bp, Xenorhabdus sp.; identical to SEQ ID NO: 2980
  CDS (18028)..(19614)

SEQ ID NO: 2992 - DNA, 23296 bp, Xenorhabdus sp.; identical to SEQ ID NO: 2980
  CDS (19629)..(20768)

SEQ ID NO: 2993 - DNA, 23296 bp, Xenorhabdus sp.; identical to SEQ ID NO: 2980
  CDS (21322)..(21717)

SEQ ID NO: 2994 - DNA, 23296 bp, Xenorhabdus sp.; identical to SEQ ID NO: 2980
  CDS (21858)..(22403)

SEQ ID NO: 2995 - DNA, 23296 bp, Xenorhabdus sp.; identical to SEQ ID NO: 2980
  CDS (22519)..(22857)

SEQ ID NO: 2996 - DNA, 23296 bp, Xenorhabdus sp.; identical to SEQ ID NO: 2980
  CDS (23011)..(23295)

SEQ ID NO: 2997 - DNA, 23296 bp, Xenorhabdus sp.
  CDS (21219)..(21671)
gctcttgacgagctttagcggcggcagcatcagcctgttttttctgctcttgcgcaacctgctgtgcctttatccgctcttcttccgcagctttcaggcgctcttgctcttccgcctgcttagcccgcaattcagcggcctgttgttcggcttttttcttccgctgctgctcagccagtttggcattagcctgttgctgttgctgctggttatattgttgaactacggcatttggatcgaccataaccgcatcaataactgtaccaccgactccaccaccgcccatctcagttttttgttctaaagagccccaaatcagaaacccgaacaggataatgtgcaaaataactgaaataataatggcgcgatttagcctgctgttttgcttgtttgtctttcccacgctcgacatccagaaactttaagtgtaagccgccattcaggcgccaataggctgagtcattaaacccactgatttcactcccgcctgacgaagcatattcagagccttgatgacttcatcataaggaacttcttttgaacccccaatcaagaaaattgttttagggttagcttttatcagagtttgagcttcagcaataatttgttgctctggtaataattccagacgctcctgattaacaaccatattgtaccgccctaccccagagacctctactataacgggaggattatcagtgctggaaaccgtttttgaatccactgagtcaggtagatcaacttctacgctttgcgtaataattggtgcggttgccataaaaatcagcagtaaaaccagtaacacgtccagcaagggaacgatattaatttcggattttagctcacgtctgcgactgcgagtgcgcgccattagcttttccccttactctttattacgacttgttagtattagaaacaaaagcctgacggtgtaatatcgccagaaattcttccataaaattgtcgtaagtttgttccagtttattgacacgctgattcagacggttataagccataacggcaggaatggctgcaaacagaccgattgctgttgcaatcagagcttctgcgataccgggcgcaaccatctgtaacgttgcctgtttcactgatcccaacgcaataaaagcgtgcataattccccagacagtcccgaacaggccgatataagggctgatagaaccgacggtacccaggaatggaatatgattttccagtgtttccaattcacggttcatggagatacgcatagcacgggaggccccggtcagaatagcttcaggcgcatggctgtttgcctgatgtaaacgagaaaattctttaaagccagaatagaaaatttgttcagtaccgcttaatgaatcacgatgtgactgactctctttataaaggcgggacaattcaatcccagaccagaatttatcttcaaatgcttccacttcccgagtggcggaattcagaattcttgttctttgaataataatcgcccaagagacgacagaaaaaccaatcagaattaacatgatcagctgtactaaaaagcctgccttcaggaataaatctaggatgttcatgtcagtcactgcttaaactccgcgacaatagactttggaagcgcaataggcttcatttgagatgaatttacgcagacaaccagacattctgcgttactgataactacatcattacaatcaattatccgttgagtaaatgtcagcgaagcaccgcggatattcgtcacttcgcactccacaaccagcttatcatctaatctggctggcttccggtagtcaacggtcatgcgactgacaacaaaaccaatttgttcatccaacatatacttctggtggaagcccttatcacgcaacatttctgtgcgggctctttcataaaaagccagatattgagcgtgatagaccacaccactagcatctgtgtcttcgtaataaacacggataggccaacggaacaacatattactcacacataatcctaatcagactaattgacgctgccactatacttaagacaatagcgctttggaatgacttgttattaaactagtcaaaaaaatttatgggccagtgtcctgtaaaattacaaatagtttacttaaagaaatgatataagccaaaaataaggattaaaagtgcgggtaatggatgaaaaaaaagacgccagacaaaatgtttaggattaaatccaacgccgaaaataaccccggaacaaattgcccaaatcagtaaaataccctgccatatcatcaacgaactggtgttcgatgcaaatcgggtcggatcccacaaaatacagaaagcaagccctaaagccataatgaggataagggccctcaacaggcccttattcattattagctgataaagtctatcagccaacattattttttgtcactctcagttactttttttgactcactgtgctcaagagctaaagccgcaataatggcaaaactacaagctaagagcgttccgagaatccaggcaaaataccacatgtgctatgctcctttagtacagtgaatgtttgttgttttcaatgtaacccttatccagacgcccgaaggttttgtagtaacaccagatggtgtatgacaaaacaatcggaacaaagataagcgcaacaacgaacataatttgtagcgtccactgactggatgttgcatcccacatggtcagactgacatttggatcaaggcttgatggcatcacaaacgggaacatggatatccctgcggtcaaaataatgcaggcaaccgtcaatgatgagaacaggaaagcccaggcacctttatccagtttggtggctaacatagtcaacagagggaaaaccacacccagtgcaggtatcgcccacaatatcggctggttattaaagttgatcagccatgcacctgcctgttgaaccacttctttatgtaatggattagatacgccgtttacatccagaccgccagtcacaacataaccatcgataccgtaaatcagccacacacccgccagtaagaaagccaccgctgtgattaacgcacaaacctgtgtcgcagtacgggaacgcaggtgtaattcacctgtagtacgcatttgcaggtaagttgctccctgcgtaatgatcatcatcaaactgacaacaccggcgagaagaccataaggattcagtagcccgaagaaagatccttcataagatacgcgtaaataagaatctaccgacagtggcacaccctgtagcaggttgccgaatgccacgccaatcaccaacggtggcacgaaactgccgacaacaatcccccaatcccacatattacgccattttctgtcttccagttttgaacgatagtcaaaaccaaccggacggaagaacagagccgccagtaccagaatcatcgcgacgtagaaaccggagaaagcagcagcatataccattggccaggcagcaaataatgctccaccagctgtgattaaccaaacctgattgccatcccagtgaggggctacagagttaatcatgatacggcgttcagtgtcatttttgccaataacccgcaacaggacaccaacacccatatcaaaaccatcggtcactgcaaacccgattagcaacacaccaatcagcagccaccatataaatcgtaatacttcataatcaagcataagtggactcccgcttactcaatactgttcactgaagaattcttcgttgaagaaacggctttttgttcaaaatgatagcgccctgttttgagactacttgggccaagacgggcaaatttgaacatcaggaacatttcagcaatcaagaataaggtatacagaccacaaatcagtgccattgagaaaatcagatccccgacactgcgtgtcgaagcagcaaccgcggttggtaatacttcaccaattgcccacggctgacggccatactctgcaacaaaccagccagcttcaacagcaatccacggcaatggaatactgaacagtgctgcacgcaacaaccacttctgctgaccgatacggttacggataacactgaagaatgccaggccaataaccaacagcatgataaagccacaggcaaccatgatacggaatgcaaaatagagtggagctacacgtggaatagagtctttcgcagctgctttgatctgttcttctgtcgcgtttgttacctctggagtgtaacgtttgaccagcataccgtagccaagatctttcttactttcgttgaatgcgctacgtactgccggatcagtattgcctgctcgcaattcttccagtaactcataggctttaagaccgttacggatacgttgctcgtgctgactcatcaagtcacgcagaccaatcacaggagtatcagttgagcgggtcgctataagacctaagacgtaaggaatatggatggagtatttattttccattttatcctgatcaggaattcctatcagtgtgaatgcagccggaggtgcctgtgtttcccattctgcttcaatcgcagccagtttggttttttgtacgtcccccatttcgtatccggattcatcacccaatacaatgacagacaatactgccgcaataccaaaacttgatgcaattgcaaaagaacgcttagcaaacgaaatatcgcgccctttaagcagatagtaggagcttattcccaagacgaaaaccgcgcctgtcacataaccagcagcaacagtatgaacgaatttcacctgagcaacagggttcagcacaagctcgctaaagctcaccatttccatacgcatggtttcaaaattgaaatcagatgcaatcgggttttgcatccaaccattcgcaatcagaatccataaagcagagaagttagaacctaatgcaaccagccatgttaccgccagatgctgtttcttgctgagacgatcccaaccgaaaaagaataagccaacaaatgtggattcaaggaagaaagccatcaggccttcaatggctaatggtgcaccaaaaatatcaccaacataatgtgagaaatatgaccagtttgttccgaactggaactccatagtcaaacctgttgcaacacccagagcaaagttaataccaaataacttaccccagaatttcgtcatatctttatagatttgcttgccagacaggacatataccgtttccattatcgcaagcaagaacgccatgccgagcgtcaatggtacgaataggaaatggtacatagcagttaaggcaaactgtaatcgtgacagttcgacaatatcaaacatcttgactccttgctcctagcaggaagacaccgacttgcggcaacccgacttcattaaatgaaagtctcgtaactaccagcaataaatgcctcaaacacaacaacaaattattaagtaaatcaaatccagtataaatctcaataatattacgcctatattcacacacaataaatagcttttacgtgactcagactagaattctgaatacagaccaatagtgccgttcatttatgaggtaatatctctttattctagatcaattaaatcaatttaagcgaacagaatttatagtaataaattgattttagtcatttttttcattttattgttaagtattacagctattatttcattacagttgatttagtgttaattatttgttgccaacaatgcctgttaatatattttttgctgtgaaaagcattataaaattaacttttcattttcattattagaaaaatatattttattagcatttataattaaattaatcgattaaatagagctttctaaaaacaagttaaatttaatttaaaaatatcactctgtataaaaagactaacatactgtttatattataaataaaaataaaaaggctgcttttaagcagcctttttatataaaaatagcttattttgggactattttcctgccaataacccttttactgcatctccgatgtcagcaaggctacggacagttgtcacgcctgcggcttccagcgctgcgaatttctcatccgcagtacctttaccacccgcgataatcgcaccagcatgccccatgcgcttacctttaggtgctgtcacacccgcgatgtaagcaacgacaggtttcgttacatgctctttgatgtacgcagcagcttcttcttctgctgttccaccaatctcgccgatcatgacgatagcttcagtttgtggatcctgctggaatagtttcaggatatcgatgaagtttgaacccggaattgggtcaccaccgataccaacacaggtagattgacctaatcctgcatcagttgtctgtttcaccgcttcatatgtcaaagtacctgaacgggatacaatacccactttacctgcttgatgaatatgaccaggcataatgccgatcttacattcacccggagtaatcacacccggacagttagggccgatcatgcgaacaccggcttcatccagttttaccttaacagtcagcatatccagagttggaatgccttcagtaatggtaataatcagtttaatgccagcttcaatagcttccagaatggagtctttacaaaatggtgccggtacataaataacagaggctgttgcacctgttgcttcaaccgcttcacgaacggtattaaacacaggcaggccaaggtgttcagtgccacctttacccggtgtgacaccaccaaccatctgagtaccgtaagcaatcgcctgttctgagtggaaagtaccctgactaccagtaaaaccctgacaaatcactttggtgtttttatcgattaaaatagacattatttattccccgctgctgcgactgcctgtttagctgcgtctgtcaaactggttgctgctataatgttcaagccactgtcagccagttttttcgcaccctgttcagcattgtttccttccagacgaacaactaccggtacgtgtacaccaacttcttccacagcaccaataataccgtcggcaatcagatcacaacggacgatcccaccaaagatatttaccaagacagctttcacattttcatctgacaggatgattttaaatgcctcagtaacacgctcttttgttgcgccaccaccaacatcaaggaagttagcaggtgcaccaccgtgcagtttgacaatgtccatcgttcccattgccagaccagcaccatttaccatacagccaatgttgccatccaatgcaacataattcagttcccattgtgcagcctgagcttcacgtggatcttcctgtaaaggatcgtgcatttcacgcagttcggcctgacggaacatcgcgttaccatctgcacccaactttccatccaaacagataagatcaccttcagttgtaataaccaatgggttaatttcaaccagagccagatcacgctcaaggaaaaggtttgccaatcccatgaaaatcttggtgaattgaccgacttgtttaccagtcaaacctaacttgaacgccagttcacggccttgatagggcatagggccagccagtgggtcgatgattgctttatgaatcagttcgggcgtttcttccgccactttttctatttcgacgccaccttcggtagaggccatgaacactacacgacgtgtaccacggtcaacaacagccccgagatacagctccttagcaatatcagtcgctccttctaccagaatctggtgaacaggttgcccctgtacgtcagtctgataggttaccagccgtttacccagccattgttcagcaaaagcacgaatatcttccttgctattgacgactttcacaccaccagccttaccgcgaccgcctgcatgaacctgacatttaacgacccaaggacctgaaccaatcttggatgctgcttcttctgcttcgcgcggcgttgtgcaggcataaccagctggtgctggtaaaccataccgtgcaaaaagttgttttgcctgatactcgtgtaaattcatgatgttctatccataatttaatctaagaaaggtaattaaccttctatacctgcgcattacaagctacagctttatttactgcatttcgaaattcacagggtatattttgttgctcggatatggccagcccgaaagctggccgcatggtttgttacatcaacactttttacatcaacatcgttgtacttcagactgagcggaatttaacaccctccgccctgatggtgatgctatacatccagcaacaaacgtgttggatcttccagcatttctttgatggtcaccaggaagcctacagactcacgtccgtcaatcagacgatggtcataagacagtgccagatacatcattggaaggatctcaacctgaccatttactgccattgggcgatctttaatggcatgcatgcccagaatcgcactttgtggtgggttaatgatcggagtggacattagagagccgaaaacaccaccattagtaatggtgaaattaccaccggtgagttcatcaacggtcaatttaccgtcacggcctttaatagccagctctttgatggttttttcgagatcagccatgctcagggcatctgcatcacgtaatactggcgttaccagaccacgtggagtcgataccgcaatgctgatatcaaaatagttgtggtaaaccacgtcagtgccatcaattgaagcattaacttctggataacgtttcagtgcttcaacaacagctttcacatagaaggacatgaagcccagacgaacgccatgacgtttttcaaacacatcgccgtattgcttacgcagttcctgaattggtttcatgttgacttcattgaaagtcgtcaacattgccgtattgttcttcgcttcaagcagacgttctgcaacacgtttacgtaaacgcgtcattggcacacgtttttcactgcggtgtggcagttcagactgttgagcggctggtgcagatgcagcaggtttagcgctctcttttttgttcgcagcgatatgtttttctacatcttcacgcacaatacgaccacctacaccactgcctttaatcgcagccggatctaaatcgtgctctgcaatcagacggcgaactgccgggctaagagcatcgttactctcatcttccaaagaggcagtctggcgctgtgccggagttgcttcagtggtttccttcacagcagtaggcataccagcactgttgctcaggctaatacggccaagcaattgcttagacaatacagtggcgccttcttcttccaaaacagcttccagaacacctgcttcacttgctggtacttctaaaatcactttgtcagtttcaatttcaaccagaatgtcatcacgctctacagcatcacccggttttttgtgccatgttgcaacagtcgcatccgcaacagattcaggaaggtctggaaccagaatttctacgctactcattttctatccttaatttattcaacgttcagtgcgtcatttaccagagcttgctgttgcttctggtgaacggacgtatagcccacagccggggaagcagaagccggacgccctgcataacgtaaagaagccccaaatgggatcgcttcacggaaattatgttgactgcaataccaagccccttggttcaggggttcttcctgacaccaaacgaaatcatgaacatgagcatactgctcaaacagattctgcaaatcttgacgagggaatggatatagctgctcaatacgaacaatagcaacatcactctgttcattcttacgacgctgctccagcagatcgtaatagactttaccggagcaaagtacaacgcgtttcacacctttcggatctaaagcgtcgacttcaccaatcactgtctcaaacttaccgtcagccagttcatccagactggatactgccaatggatggcgcagcagtgacttaggtgacataacgatcagaggacgacgcataccacgcagagcctgacggcgcagcatgtgataaacctgagccggagttgatggcacacagacctgcatgttctgttctgcacataattgcagataacgttccagacgtgcagatgagtgctctgggccttgcccttcatatccatgcggcagcaacataaccagaccacacatacggccccatttctgctcgccagagctgatgaactggtcaataacgacctgtgctacgttagcaaaatcaccaaactgagcttcccagatggtcagcgtgcgtggctctgttgttgcataaccgtattcaaacgccagtactgcttcttcagacagcacggaatcccatacgttgaattcaccctgaccattgtgaacatttgccagaggcacataaacagaggcatcagtctgattatggataaccgcatgacggtggaagaatgtaccacgacccgcatcttcaccggacagacgtaccggaacaccttcatcaaccagagttgcatacgccagtgtttctgccgcgccccagtcaaataatttgtttccattagccatttctgcacggtcagcgtagatttttgcaacgcgggaatgcattgcgacttcagccggaatggagctgatacgtttgccaagatcttgcaagcgtttcatatccacctgatgtggatactctgcatcccattcatggttcagataaggttcccatgtgaaggaatgcaggcccattggacgccattcatccacgacacaatcaccgtgatctaatgcgtcacgatataagttggccatttcagtgacatcattaggtgacagtagattttctgcgataagtttatctgcgtagatcttgcgtggtgttgggtgtttcttgattttctgatacatcaaaggctgagttgcgcttggctcatcagcttcgttatgcccatgacgacggtaacaaaccaaatcaatcatcacgtcacgtttaaacgtattacggaaatccagagcaagacgggtgacgaaagtaacggcttccggatcatctgcattaacgtggaagataggtgcctgaaccatcttcgcaatatcagtacaatattctgttgaacgggtatctttaggattagaggttgtgaaaccaatctggttgttaaccacaattcgaattgtgccaccaacttcatagccgcgcgcctgagacatattcagtgtttcctgaacaattccctgccctgttactgctgagtcaccatgaatggtcactggcagaaccatgttactgcggccttcatcgaggcggtcacggcgagcacggacagaaccaataacaacagggctaacaatttcaaggtgagatgggttaaatgccagcgccagatgcactggtccaccatcagtttcgaaatcagaagaaaaaccctgatggtatttcacgtcacccgtgccaagatgctctttatgcttaccagcaaactcgtcaaacagatccgctggttttttaccgaataagttgaccagaacgttgaggcgcccacggtgagccattcccagtacaacttcacgagtatcttgtttacctgcgtgacggataagttctttcagcattggaatcagcgcatcaccgccttcaagggagaaacgtttcgcccccgggaacttagcacctaaatagcgttccaaaccttccgctgccgtcagctctgccagaaaacgacgtttttcttccgtattgaactgtgaacccaccgccacagattccagacgctgttggagccagcgcttttcctctgtattggtgatatgcatatattccgcaccaatagaaccacaataaatgcgcttcagggcgtcatataaatcagccagtttcatcgtctctttgccgatagcaaatgagcctacgttaaatgtttcttcaaaatctgctttggttaaattatggaaagcaggatcgagatctggtacaggttcctgtttccataatcccaatggatcaaggttcgcattttgatgaccgcggaagcggaatgcgttgattagctgcaaaaccttaacttgttttgcatccattgctggatcgctgactgaagtgtggtaacgagtggcatcctttgccagacgacggaagtaatcacgtgtctgtgagtgaagttgttccccgtgaagtccttcatccggtaattgttggaatatttctctccaacctgcatcaacagaattaggatcggttatatagtcttcatagatttgctctatgtaagactggtttgcaccagccagaaagcttgaatccagccagtccttcattgcaccgttctgcattgtgatcccttaagcttcaaaagctttagttttcgccgtggttaacaaattccgctttattaagcggtgttgataaaaggttcatttggacgtgcttaatgcatgttctttatttgggttatcctacccttcaaggaacctttaaaaactgaagtcagtttttaaaggttccttattttactgaaacatgcgccgtcattagcagcaggcaatttatcatctttcattctttatgccctccaccagattgatatttatttcaaaaatgtggagggcaaccttatatgcattatttgcacacaatttatgtgttatttatgcactatatctttatcttttgtctttcaagccacttctttgttaaccacgatgcaacctgaaatccattagatatatatcgacctatcagtaatatttaattaagcactgtgtcttaacaacatagacttaatatgaccaatcgcttttgttggatttagacctttaggacatacattgacgcagttcataattccatgacaacggaacacactgaatgcatcattcagaccatcaagtcgggatgaagtttcagtatcccggctatcaatcaggaaacgatatgccgctaacagacccgctggcccaataaatttatccggattccaccagaatgacggacaagacgtcgaacagcaggcacacaggatacattcataaaggccatccagtttttcacgctgctctggtgattgcaggtgttcacgcgcaggagggtttttaccgtcattaattaaataaggacggattttctcatattgcgcataaaattggcccatatcaacgaccaaatcacggacaaccggcaaacccggcagaggacggataacaatctttttgtttccacggcgcaaggctgaaatggatgtaatacaggccagcccatttttaccgttcatattcaaaccgtcggaaccacatacaccttcacggcatgaacggcggaatgacaaggttggatcctgctccttcaactgaatgagggcatccagcagcatcatgtcacgcccttcttccgcttccagcgtgtaatcctgcatacggggtgcgttgtctacatccggattataacgataaattgagaattcaagtttcataatctatttctccgcaactggaacatcggcaacgcaattagtaagaacgcactttcggcgggaaggcttcacgcagttttggctgcatgttaacttctcgacgggtcatgctctcagtctgcggtaaatacaagctgtggcacagccaatttgcatcgtcacgctctggataatcgaaacggctgtgtgctccacgactttctgtacgatagttcgcagcaacagcagtcgaataagctgtttccatcaggttatccagctccagacattcgatacgctgagtattgaattctgatgatgtatcatccagacgagcattgtgcagacgtttacggatgactttcagttcgtccagccctctcgccattgcttccccttcacggaatacagagaagttgtgctgcatacaggcttgtaatgctttacgaatctcaaccggatcttcgcctgaacgggtattattccaacggttcagacgttgcagtgctacatcaacatcagactcactggcatcacgggtggttccctgctccatcagacactctttcaggtgcaaaccagcagaacgaccaaagaccaccaaatcaagcaaggagttaccccccagacggtttgcaccatgcacggatacacaggcaatttcacccacggcaaacagacccggaatgacaacatcttcgcctttatcattgatagtcagtgcctgaccggtaatcttggttggaataccacccatcatatagtgacaggttgggatcaccggaatcggttcttttacaggatctacatgagcaaaggtacgggacagctcaaggatacccggcaggcgggattccagaacatctttacccagatggtccagtttcagtttcacgtgaggtccccacgggccttcacaaccacgaccttcacgaatttcgatcatcatagatcgagcaacgacatcacggccagccagatctttagcatttggtgcgtaacgctccataaagcgctcgccatctttgttcagcagataaccaccttcaccacggcagccttctgttaccagcacacccgcgcctgcaatgcctgtcgggtggaattgccacatttccatatcctgcaccggaacaccggcacgcagagccataccaacaccatcacctgtattgatatgcgcatttgttgtggattggaaaatacgaccagcaccacctgtcgccagaatagttgccttggctttgaaatagacaacttcacctgtttcgatacagattgctgtacagccaacaatggcaccgtcctgatttttgactaaatccagagaataccactcagagaaaatagtcgtgtggttcttcaggttctgctgatacagggtatgaagtaatgcatggccggtacggtcagccgcagccgcagtacgggctgcctgctcaccaccaaaatttctggattgaccaccaaacgggcgctgataaatgcggccattatccagacgtgagaatggtagccccatgtgttccaattcgagaatggcttcaggaccggttttacacatgtattctatggcatcctggtcaccgatataatcggaaccttttaccgtgtcatacatatgccattcccagttatcttcatgagtgttacccagagcaactgtgataccaccctgagcagaaactgtatgggatcgggtagggaaaactttagaaatcagggcacaggacaggcccatttgtgaaatttgcagtgcagcacgcatacctgcgccaccagcaccaataacaacagcgtcaaactctcttaccggcagtttcatttatacaccccacaccacaattgttccgtaaatcaaataagtcaacagtgcaacaataatgaccagttgcaataccagacgcagtgccagtggctttacataatccgtcagcacctgccacactccaatccatgcgtgaaccaaaatggaaagcagagccagtacggtgaacacttttgtgagagagaaggagaaaaaactgctccagacttcataggtgatgtctgacgttgttgctacaaaaccaactaaataaagaacatataaaacaataacgattgcagatgcacgtaacaacagccagtcctgaatacccgtgcgccccaatgcggatgcgttgcttaccatactaataccccggccagaatagacagaataactgcgatcacgattgccactttagcagaagctttaccagcggcgagactctcttccaagagaccaaagtccatcaaaacatggcggatcccaccacaaatgtggtaacccaacgccgtcaatatcccccacaggataaatttggcgaaaaagccagtcatgatttcagaagcatgctggaagccctcttgcgaagacagtgacatacccaacaaccacagcagaatgccgactgctataaaggtgatgacgcctgagatacggtgcaagatcgaagctatcgcggagacaggttgatttatcgtccgcagatcgaggttgacaggtctttgttttttcacaattttgcccacacagcttttttttattttccatcctccggccctgggtgggaatcagacagcgttaagaggacacaaagacacaacataattaaattaacaatccttactgttttcaacaaacgttgtgatttgattacgctgggtgctcctacatcaggtaatccggagaccttgacgcagtataagtacttcacattgttattacaattcccacacaatatgattattaacatttagcttgaacagtgagtaagatcacgcttcaaacatttatcataaaaaccattatcttgtttgacaaagattaaacatttatcttacatatatgacggtgcataatatttaccgtcattttccgatgaaaaagcaaacttcacgaaaaatgtgggctttgtaaaaatatcgatacgacacaaaatggtaacattttatgttagaaatactttagattgacatccggaaactttttaacaacctgaacactattgacgtccgtaaaatgagatttcagcattaaatcgatacccgacagaaacaaagggtatatacagcctgatttttaattctctccggtagcacaatgccgtcggcgcagtaaggattacgcctatttaggttgttaggggttataagaaataagcgctaaggagatgtaaatggctgataaaaaggctacgttgaccataaatggttcagctgctatcgaactagacgtactaacgccaaccctaggctctgaagtaattgacgttcgtaccctcggctcaaaaggcttctatacctacgatcccggtttcacttccactgcatcctgcgagtcgaaaatcacctatattgatggcaatgaaggcattttgttgcaccgtggttttcccatcgatcagcttgcaatgaaatcaacctatctggaagtttgttatattctgcttaatggcgaaccaccaactcctgaggagtatgaaaaattcaaaacaacggtgactcgtcatactatgattcacgaacagattacccgcctgttccatggtttccgtcgtgattctcaccctatggctatactctgcggtgtcacaggcgctctcgctgccttctaccatgatgcgctggatgttaataatccccgccaccgagaaatcaccgcataccgtctcatgtctaaaatgccaactgtagcggcgatgtgttacaaatattccgttggtcagccttttgtttacccgcgtaatgatctctcttacgccggtaatttcctgtacatgatgttctcaactccctgtgaggaatataaggtcaatccggtactggaacgggcaatggatcgcatttttattcttcatgcagaccatgagcagaatgcttcaacttcgacagtccgtacagcaggttcttctggtgctaacccgtttgcctgtatttctgcggggattgcatcattgtggggaccagcacatggcggagcaaatgaagcttgcctgcgcatgctggaagagattcagactgtcgatcacattcctgagtttattgcccgggccaaagataaaaatgacgctttccgcctgatgggctttggtcatcgcgtctataaaaactatgacccacgcgcaaccgtaatgcgtgaaacctgccatgaagtactggatgagcttggtctgaatgacagcctgctggaagttgccatggagctggaacgcattgccctgaatgacccgtacttcattgagaagaaactgtacccgaatgtcgatttctactcaggaattattttgaaagcgatgggaattccgtcatccatgtttactgtgatcttcgctattgcccgcacaatcggctggattgcacactggaatgaaatgcatgatgaaggcatgaggatcgctcgtcctcgccaactgtatactggtcatgcagagcgagattttaacagtcagttaaaaaaataatctgaccaattcgctggcacacttcacactgaagtgtgcattttgctgtaccttaatgtcggctctgccattacgattggcctcctgtctggcgattaaggtacagtattcattgtgtggtacccattatttttcgaataaaaggtagcgccatgatcctccctaaaaaattatccattggtgaaactatcggttttttctcctcttcatctcctgctactgcttttgcaccgactcgttttgccagaagtgtccgttatttagaaagtaaaggttataaaacaaaagccggaacactcaccggtaaaagcgatttttatcgttcaggcaccattatgcaacgagtggaagagtttaataccctgcttcgtgacccagaagtaaggtgtgttatgtctactatacatttcgtctttcaagttgcctctttgttggctacgctcgctcaccccagtcacatagttatctatgctcccggggatgaactcccttgccgccgcgatgcatcttgaaatccattgtgtatataggaggtaataattcaaactcaatgctgccatatattgattatgatgccatcagaaaagatcctaaaatcattattggttattctgacataacagcacttttacttggaatatatcagaaaaccaatgtagtcactttttatggccctgcattagttgcttcatttggtgaatttccacctttagttgatgagacattcaataatttttctcaaatagtcaataataatcactcccttccttttatatataaacagcctgaacattgggctgatgaatatatcgactgggaaacacagataacccctaaaaatacatatcctaataattggatttttgatggaaaaggaacgttccgaggcagattaattggtggtaatttaaatactctttgtgggatttggggaagtgaatatatgcctgaaattaaaacaggtgatattttacttattgaagactgtttcaaaggaatagagctggttgaacgcgctttttcccatctgctgttatgtggggtctttgataaagtttcagcaattattcttggaaaacacgaacaatttgatgataaagggacaggaagaaactctctggatgtgctgaaagaagttctgaatgagaaagaagttcctgttctggctgatttcgattgttgccatacacacccaatgtttaccatgccacttggcgttgacgttgacgttgttgtcgattttgattcagagtctgtttatctgcctgaaccatattgtgtaaattaaccccaattctgtttaagctgtcactggaatatcttcttcttctgagtagaaaactttcagtgatggtttcttctttttatgacaataagcaattaaccccgttaaaacagtcaacagaaacccttttatacttcgatgacgagaatgttctatttgacagatatttttcaattgcccattaaccgtctcgataataaaacgccttgataacattatcttatcccaatcttccagcacactcgctttaatattactccgctttttcgtgatgaaagtgacaccgttttgtgctaaatcgtttgccagttcctgactaagataacctttgtcgccatacaaggaaccgattaattcttttgctaattcccgaaccactttcctgtcatccgtatttccagccgtgattttgagggccagaatttcgccaagatggttaataatcaggtgtaatttgaaaccgtaaaaccaccccattgaggtttttcctcgctatgctgtcccttcaaataccttatggcggggaatacggatattatggcacacgctcaaacgcgtggagtcaataaaggcgatccccgtagggtttccttttaattgagtcagatagctgcacagaggcactaaaacggaaggcgcgacactgataaaacgagtataactgagcaaggttggaaaatcgtgatgatgatatcgccaaatatgctccagataaaaatttttaaaatcacgataatgcgacagatgaaagaggatcaggatggtcatgatttcactgggatacatgtgaccttttctacgacgtaggcgatatcccttattgagacaaaactgttcccattgtggaatgaaaaaacgacaaaagtcatcgacatcgatgaaaatttcaactaagttgttcatagcctgttcctccccggagctgtttcgacttgcaccaaaacacggctccttgaacaggcttctcgtcaatttcttatccagaattggggttaattagatatgtaccttttgataaatattcaacagtagtcccttctgattcatcgttggtggtgaatgcgccagaagagaaaatttcgatgataggggaggctatccgtatgtagccattggggtcatttatacagtttcctctcaataccaacacctgaccatacgtaactctgggcatctctatgacagcaatatttcgattattttcagcgtctcctgcccgatcaatgaatctaaacatcaccggatcagagtctaatgccctttctattctgcgccgtcttccagaaccatccggtgaataaaattggacacccgttacattgccggtcaggttgaggattgaactatgcaaaacgttggcgtaaacatcattaaatcggacatttgctgtttcacctaacccaatattttttaaaaaattagtcttgtcaggaatatcagccccgttccgatctttagacaagcgagtattggcattatcatttgcactgctggcattttgattggcgctattggctaaatcatatgcttttttaacagatttagatgttgcaacggttatctcactgtcgctatcggtatcattactcagtgtaaccaatccaggctctacctgagtggcatacggatgattacggcttgccgcgtgttctgcaatggcttctttaattgcttttctgacatcgtccattgttggaacgtcaactgagctattactgttttgagtactcatattcattccctcatctaatcaacaatacacattgctaaataacatgaaggcggtgggaaacttctccgccggtgaacatcaataaaagggttcatcaatacagaaaagtacggcttgactaaaatttgataggtaatgttttgtgggcaggatgacataaaatgacaggcggggaattaatagaatttgtcagagtactgatgaaaattgaaccttagcaaaaccgaaacggacaggcatatttaatcaccaatggaacaaaaagaaatacagcttatactgttgaacttaaggttaagtgatataatataactataacccttatatcaatttgttacacttggcgtgtgttatttctttgattttattaaactaatatggagagtgttatgcctacttgctttgatgtggctgactattttttagcatgctgtgatgaggaaagcggcgacactatttccaatcttaaattacagaagttggtttattatgcacaaggcttctctttagcgttgctgggaaaaccgttatttgaggagcaaatagaagcgtggatgcatggtccagtgatccctgaactttaccaaaaatataaaaagcataaaaataatgctcttcctaacgatgggtattatgaggaaaattttgacagggaagaactggcgcttttggaagaagtttatgatgttttcgggcaattttcagcttggaagctgcgtaacatgacccatgaagaggcgccatggaaggataattatatcgaaggggtcgggtgtcaggttatttctcatgaagagcttaaagattactttctgactcgtataaattaatatggcaaagaaaaattccagaagaataaaagtacctcaagacgttcaggcagaatctggcagacttcggcttggccctgaatttcatgatgattcagaaaaaagaccgcctgaattttccttaagatacctgcaagataattactgtgtaaatagttgtgaaagggatgataaggcggcattgtctgacaagttgttccggctaagtaaattaacgtggagccaaataaaacagcaagaccgacacacgcttggatttgaaaagatagcgaggaacgcaattagagcgggtatccctaaacatatcactgaggatgtggattttatctcttttagattcagtgggatgaagcctatggttgggtataggcgtgattctacttttttcattgtatggttagatagaacttacacgctatacaatcatggataatgccaagccggtctcgtgcggttttttcatgcaggtaacattactcttacttccccaattattctatttcccacacaacccccccatcaattcattcagccatccacattcgtttaacccattgatttatctattttctgtcaccatgcaggaaataagaaaaatcaatcacttatctaaataggacaattctccccttttaactcattgatttaatttaattccgttcctgagccggaaataagaaaaatcaacaagttacataaaggtgagaaatctcacttttaacccattgattcttccgtggtcctcgctttggctgatgggtatacgaaaatcttcggacacctacagtaactcattgatttatccgaggccgtcactttggcttaatccttctgtttcaaatgtaggtgtggaaatgggctttaatgatttactgaggttaatgaattatcagttccagaagctaccctcttaaagagtgttggtcaaaaataactcggcacgtttaacatacctacctgctgctgagttctcactttgcaattattatttcattggctgacaaattagcgcactgcaaatatgtaacctgctcatagcgtaactggcctacaatttgtgggtcagttgtcccgttgcccggaacaagaactgcccctctttaagagggttagtttgttccgacgaaattcgttgatgcaaaacctaatatccgataatcggactttgagcgtcagtcatgctgactcacagaatttgcacaactcattaagaggtgcgcaaactttgcagtcatcatttagaggtgtgcaaaaagaaaaggatagcacggcgaatgctaccctttgggatcacgcgtctttgcgtcatgaaataaatcaattagttatctgcacccttttaaaaggggtggtcaaccaagtgaaagatattcactcagttaatagccatacagtatcattgacactctggattgaaaaaggcgctgaatgtatgtcgaaaattgttgttcgaatgcttgggagttagagtaatacattgagacaacactaaatttgatattaaatctttatttatcaaattgatacgcattctttgcaagaaggacggcagtaattgagacaacataagttggggttagttgtctcaaaatttaaatattaatcgttataaaacatatgataag

SEQ ID NO: 2998 - DNA, 23296 bp, Xenorhabdus sp.; identical to SEQ ID NO: 2997
  CDS (18351)..(19112)

SEQ ID NO: 2999 - DNA, 23296 bp, Xenorhabdus sp.; identical to SEQ ID NO: 2997
  CDS (16541)..(17824)

SEQ ID NO: 3000 - DNA, 22514 bp, Xenorhabdus sp.; identical to SEQ ID NO: 107
  CDS (1072)..(2214)

SEQ ID NO: 3001 - DNA, 22514 bp, Xenorhabdus sp.; identical to SEQ ID NO: 107
  CDS (5370)..(6035)

SEQ ID NO: 3002 - DNA, 22514 bp, Xenorhabdus sp.; identical to SEQ ID NO: 107
  CDS (6949)..(7827)

SEQ ID NO: 3003 - DNA, 22514 bp, Xenorhabdus sp.; identical to SEQ ID NO: 107
  CDS (7943)..(8803)

SEQ ID NO: 3004 - DNA, 22514 bp, Xenorhabdus sp.; identical to SEQ ID NO: 107
  CDS (8959)..(9255)

SEQ ID NO: 3005 - DNA, 22514 bp, Xenorhabdus sp.; identical to SEQ ID NO: 107
  CDS (10399)..(10944)

SEQ ID NO: 3006 - DNA, 22514 bp, Xenorhabdus sp.; identical to SEQ ID NO: 107
  CDS (11747)..(14296)

SEQ ID NO: 3007 - DNA, 22514 bp, Xenorhabdus sp.; identical to SEQ ID NO: 107
  CDS (14496)..(15251)

SEQ ID NO: 3008 - DNA, 22514 bp, Xenorhabdus sp.; identical to SEQ ID NO: 107
  CDS (15294)..(15770)

SEQ ID NO: 3009 - DNA, 22514 bp, Xenorhabdus sp.; identical to SEQ ID NO: 267
  CDS (17766)..(20198)

SEQ ID NO: 3010 - DNA, 22514 bp, Xenorhabdus sp.; identical to SEQ ID NO: 267
  CDS (17083)..(17769)

SEQ ID NO: 3011 - DNA, 22514 bp, Xenorhabdus sp.; identical to SEQ ID NO: 267
  CDS (792)..(1145)

SEQ ID NO: 3012 - DNA, 25593 bp, Xenorhabdus sp.
  CDS (3866)..(4036)
gtgctctaaagggggttcaagtcccccccttcgcaccaaatcagatagttatcattaaacaaatcagataaataacagtacctgcgagggtggcggaattggtagacgcgctagcttcaggtgttagtgtcctaacggacgtgggggttcaagtcccccccttcgcaccactgttactatttatctgtcaattatctattcagcttaattccttttaatacgtctttcctttttattcttcacgtttttctattgtttcaaccccatcgcatcacgtatggtaaagaacaaatctgtctgatcagtcaagccaacgacattagcagcatgtggcccataagccgcaacacgtaactgcgtaccagtatgattctgtttgccttcttctgcgttgccatagttgaccgtaataaccgcaccatctttggtaatcaatgaacgggtcaggccgggtgatttaacatcattagcaataatctggctggaatgggcatgatcagcggtaacgataactaacgtatcttcatgctgtctggcaaatttcagcgcagcctgaacagcttcatccagtgccactgtttcccctatctgggtacatgggttagcttcatggtcttgcttatcaatcgaagcactttctacctgcaagaaaaacccatttttgttagtcttgagcaaatcaatcgctttctctgttagctgtaccaatgtcggttcatcagagctacgctttgcattaatttggcacttcaccggcgcttcattaagattaccgtgataaaccgcttttggtccctcccagaccacatccatatttccattattaaatatgcctaataacggctttttctggctggcttctttaatattgctcagtgattttatatccgttacccattgataaccctgatctagtgcctgttgcttcagggtatttcctttattagctccggctgttgattgttgatcaaaatatttagcccctcctcccagagtgacatcagcacgcgccgtcaaaagttgttctgtgatagaacctctgccacctttatccaacacttctgtcgggcatttttctgaagtttcctgtggatcccggcatttacggttggtgatatgcgcatatagcgcggcaggggttgcgtcctgaatttcagctgttgtcacatttcctgtggcttttccattctgctttgccaactccagtaatgactgatgcggcttgccgacaacatcaatgccgagcgcgccattataggttttcactcctgacgcccacgcggtagccgaagcagcggaatccgtgacataatccggtttcttcgtctctttatccagtgagtagtgtgtatattgccccgtgaaaggaagagcatcgattccctcgaaaaaaccaccagcaccttgtgcgtagttgcgggccagcgtaatttcagaatcccccatgccatcaccaataaataaaatgacattcttcgcttttgtattatttaaggctgctttaagtgcatcagtttgatcctgagtcaggcgacgggctccaccaaactgagtaagatcaccatgggcggaacgtttttctgccatgatattatccgcactattgttagcttgcgcagataaacatacgcctgacgctaatatagcgacagtcataacaagaatgttttttgtacgattatgaaatgtagagcgatgggacaggtcattacaggacataggtgattccttatgatcgggagaattaaaaaacaccttctagccaaatagtaaacacccaatatggcatttttgtgaaaccgcaatgacacatttatgacaatgcttatacagtattatggaaatattttttttggatcaacggctttgaaagcatcagcctaaaaccatttttcaacattgataaacgattaagttgcctcgttttgaccgcgacgaagcaactttaaaccgcttaagcatcaatatcctgcggctatcaataccgtatcatgactgatttcagttctgtgtaatactcgatgaatgccttgccaaactcgcggccgagtcctgatgattttattcctccgaatggaagagcaggatcaagatgagtatgcatgttaacccacaaaacaccggcctgaatacgcgggatcatccgcatcgccttgctgagatcattcgtccataagctggcggataaaccgaatggcgttgcgttcatcatagcaatcagctcctcctcatcatcgtaactgaggaaagtccctatcggcccgaatgtctcttctttcatcaacgtatcatctgcacttttggctcggatcacagtaggcattacaaaaaaacctttcccttccagtgcacgaccaccataaacaatttcattcccttcctgacgcgctttttcaaacagggacagaattttttcatagtgctctttattggctaaaggccccatttccgtcgtttcatcaaggggagagccaattttcatcgtagacaggcgttcggagagtaacttcaaaaccgcatccatatgaacagaaggaatatagaaacgttctgctgccgcacagatttgcccctgattcagatatccggcttccaatattccatcaactatcttctctacggggacatctgacaggaaagccgctgcgtttttgccgcccagctccagcgttgcacggaactgcccctgttccataacagatttacctataagtttacctgtaggtactgatccggtaaaagacactttggaacacagcggatgagttaacagtttagtccctacactggctccggagccattaacaatattaatcacgccatcaggaattccggcttcttttgccagttccgccacgcgcagcattgttaacggggtatattcgcttggtttcagaacaatcgtacaaccgcaggccaaagctgcccccagtttccagatggcaatcatgatcgagaaattccagggaataatcccgacgaccacgccgactggttcacgacgggtaaaggcggtatattcttcacccttgaaagatggcaaagaaacattcagtgtttcaccacttattttgctcgaccagccagcaaaataacgcaagtattgggcagaagctccaacctccagcatacgtgataactgaatggtttttcctgaacatagagtttccaactgggcaagttcttcgctatgtttttgcagcaaatccgccagccgtatcaggcaatttccacgttccatcggtgaagtccgggcccatgaaccatgaaaagcatcagatgcagcctgcatagcagcattggcttcgacctcacttccctgattaacggtagcgatcatctcatcagacgcggggttgacgactgaaaaggttttgtctccctgaccacgaacggattgtccattaatgtaatggccatgagaacgctgcaaaaaagccgtaacggacgccagcaaagtgatgtcactcatgatattaccctccgtcagccgaaaatctgagaattgatacacgccatataatgtttcacgaagcgttcactggtaatttcccacaaaacttccgtacctttggcagcaaaccatgaatcacctttgtgatattcggccacaacaccggttttaacatccgtcagtttcacagaaccttcatgcaccgttgccatttcatcaaagggataaaccatcttaaatttccctctggtacaggcaaaaataccgcaggtcagattatcatttggttccccgtgaaccatggcaacacttgcctgtggatcaccttctactacaacagaaccaagattagtcacactgccaatcggcattaattcaggaagtgatttctctaacaataacggctttatcatgacttttacctttcagaatttattgtgcaaaaaagaaatttattgtgcaaaaaacagtgaaaatccaaaaatcagtaaaactaacgacgccctttccagtagcctgaaagctgatgccagctctttccgagagaaagatagacatgtctcagttgctctttaccaataacattcatatgcgggatagagctcagcaaagaataacgatcggagccctcactcataccttctgccagcactttacagataatatgacttggtgttactccaaaccctgaatacccctgaacgtaaaagacattgttatgctgtggcaaagaacctatttgcgggaacaggctgacgctacagcacatcgggcctccccatgccagttcaatcttcacgtctttcaggtagggataaacatccagcatgcgattccggttccatgcttttaaatcagaagggatatattcgagatactgcgttgcgctaccaaacaatagccggttctctttagtcacccgccagtaattgatgatgggactgatatcactataagctccgtggatagggctgactctttcgatcatttcgtctgacagctcttctgtcattaactgaaatgcgtaagtattgattgtttttttataaattgttggttcaaggccattcagaaacgcattacatgcccacaacattttatttgcccgtacagaacccattgcggtacggacggtcactcttgggccatattcaacattcaaaacctgactgttttcgaaaattttgacgccatattctgtggcagccttagcttcccctaacaacagattcagagagtgaacatgcccacctcccatatgtttcaatgcagaggtgaacagatctgaaccgatgacttttttaacatctgaaccggtataaagctcaatttcattatcgggacaggaggcctgaaactctttcagccaaccttgcagcgtcttatcctgcctggagttataccctaaataaccataacccgggcaaaaatccgcattgatattatatttggcaatccgctcccggatgattcctgcgcccatattgctgattttaaatatggtctccagacctttctcaccgacatggtgtttaatccgatccaaatcatgaccaatgccagccataacctgcccgccattacgcccagttcctccatatccaagcgttcttccttccagaatcgcgatattggtaatgcctttttctgccagctctaatgctgtatttacaccagaaaacccaccaccaatgataacgacatcaacatccagatcttctgtcaatgttggaaagcgaagatcatattttttagttgctgcatagtatgttaatgaatcgatctgattattcatattacaccccgtgagcatcagtctattccctgatatgttcagggatacctgtgcattgactgaatgttatttattcaattaacgttttttattcaagcgatatgagaaagtgagattaaaaaacattaatcataaccacccgtataacgggtggtttgctcttgccctataagggcttgttaccgactgcgcctaaatgacgctgctttctcttcgttcaagctaagtgtctttgctgctttggcctaccccttgaaggggtctacatgctctttactactcaatttatccgagattaaatccgacttttcttgctctctgatatacttttgaattgtcgcttcatttagccctaccgtactgacatagaacccttccgcccaaaactttctgttgccaaatttatattttaaattggcgtgtctatcaaagatcatcaacgaacttttacccttcaaatatcccataaagcttgaaacgcttagctttggtggaatactcaccaacatatgaacatgagctggcatgagatgaccttcgattatttccacacctttatacttacaaaggtctctgaggatctctcccacacttgaacgaatattattaaaaatcactttccgtctatatttcgacgaaaagacgatatggtatttacacagccactttgtatgcgctgagctttgtgctttaatgcccataaacacctttccttatttgagttacgaatattagcttgaacatctatatcgtaacggaaaggtgtttttcttggtataacctttgaactccacccgcaaagcgggtggttttatgtttaagacgctaacgcgacttaaactggctaaagccataaatctgtcagtggctgctttggcagccacttgaaaaaacagataatagcaatattctactctggttttttgtttatttagttatatgaaaagttatatggaaagctatctgatataggaaatgtaaatattaacttatgagattataatatgttaaaaaatattccgtatattatttttgacgcagaaccattctgttttggcccgatatctactacattaaatattgtggagcaattaaagcatcgaaataaattgatatcagatgctaaattaattttattaggtacactcacttcctctcaattaggtgaaaaatcgaatttatttgatattatttatgagtgtgatacgacttctgttaccgagctttcacgctattctgagctgatttcaggagccagtctttacattaataataccaatcccggctcaatcaattttgtttcgcaactgggtacacctattgtctatatcgatacgctattttggatgtggagtaatctccacgctgatctgcgccaaactgaaaaaatgttcattcaggacttccatggaatagaacgaaatattgctaaattccgtgataaacttggtgattatcaagttataccccccattatttctgattctttgcaacaatgtttaatggatgatcatccattagaaggcgtattaattactcttggtggcattgacacggtttacagcgagacaacagatttttactaccattttcttcaggaattactctctattcccaatctgaaaaatgaaaaaaatattacgattgcaggtggaggaagaacaatcggaaacctgaagaatatactcgctgaaacacatcctcatatccatgttgattgtttttcaagacaggattttctcaaaaaattacggcgggcccgtaaagtattatcgaatgcggggcttaccacattttatgaatgtgttgtgcttaataaagatgtttttttcttgcccccacaaaattatagccagcaattgcagttagaaatatatcttcaacattattatccccctgagtatggttttctatggcagccggaatatggataccctgagctccccgcttacttatcagagagagaggggctagcgttaactgataaatgcatcgatttatttattaatcgtcctatagaaagaaaacgcgctctggagatgattgaccagtttctctcgaaagagaaaattaacgctcatttttcccgggatatctttgaacataatgcgagtgatattattgttgaatatattgaaaaaacgtttttaaccaaaaggttatagaattagcgagatatgaatatacgtagctgaatgaataaatgaagattgatgacaaatgcctaattaaatgctaattattagtcctttatacaggataataggtgtgtttgatatgaactccaaaaatatttggagaacctacggttcaacttctctttttgtcttattgtggagcagtggtgcaatcttttctcgttgggggttggattatagctcttcttttgccattttgacggtacgttttgccatcgcttttctatgccttttattactttgtgtgttcagaaaacattacttaccggcgtcaggaagtatcggaaaagttgcgggtactggcttattgatgattgccggatattctattttttattttcttgcattagagcatggcattacccccggaattttagcaacagtcatggggatccagcctattattactctgttggtgatagaaaaacatttttccgttcgccgtttactgggtttgttcttatctctaatgggattgatattagttgttttccaggggctggtaatgactaatttttcttttctgggtacgttttttgctttgtcagcattaggttgtatgagtttaggcgctatttttcagaaacaaattcagcagtcgtcttcagaagttctgcctttgcaatatggtgtaagtttaatagcatgcttattgtttgttccttttaaaccttttcatattgaattcaccactggttttattatctctgttttatggcttgggttagttatttctgtagctgcacagttattactttatcggcttattaatgcaggcaatttagttaatgtcactagtctgttttatcttgtaccgtgtgttaccgcattaatggattatttatttttaggtaatgcactctctacgttaagtatgattggaatggtagcgataatcacaggattattttttgttttccgcgaaaaaaagtaacaggaatatcgttattctgatttattgcgttcctgtttcttacgatacgagcgccagcgatatctgggccaataaaaactgtataggatcatcagtatggtcagtggtgttccgcaaaaagtgatcattgtatcaatgggaaagccggttcgatttgcaagaatataaatcccgacagcttttgaaaggtagaccaaaatccagacgatagaaacttcgtgccatactctgtcatagatgggcttgccataaactgagatagtttttaatcccggcatggcttgctccgccattgttttcgcagccggttttcctattagtgaataaaaacagaaaactgcaaccagtgatgcagcactgctaattgaaccgaaaacttcctccagttttttatcaaacagggtatatccgtgtatataaagataatgacttaaccctgatactaacaacagagcgatcactacccaaagactctgtgttttactgataatttttagaataactgaatatattgttgtcagcagcaaggcagtacctacaccgcctacagagaaagcaacatgatacagaataatcggtataatcatgttgagcatcacatcccgtgatattaaataacgccagatagataagtttgtttgctgcatttttttacctgatatttaagggtgttcgggttacatacaaaaggaaaactaaaagaagataaacgaatatgctgaatattaatatatagtcggaaatgtttatcccgcaagaaataaacagagttatatattttacttgggatgtttaaactattgttaaaccgatttgttttttgtttatgtatattcttaatattatttccaataaattatgcttgatgatatttaaagccagtaatatggtatatgatgatttccttttctatctcttcaattgttaagaatattctgaatgcaatgtgattttttttgtgtaattaacatcattatcagataaaaaaacttcactgttgctgcttgttattttcattttgtatttttataagtgaattgttttgtttttggatttttatcctgattgagagatgctttcaattcacttgaattattattgcgttaattggataaatatatctaattgatgcatgatggtttgttgagtaattttatcgctgttaaaagatgtattttgccattctgaactgaatatatccgagaattaattgggtattaataagataaaggagcgaaaacatgagcgtctgtgagtctaaagaaatatcagaaatacaactaacgcgttgcatacaaacattgacacgtgcttttgatggatattctttgatgcggcattttctggctgaggacagtcaccagcagagagtacagcgttatctggagacctttcttcgaaaagtcggtatggcagtagggcatgtgtgggctactgatgatggaacggctgtgtctatttggacggctcccggtattgaagatgcagcgtctgtttttgttccgctgtccgttgaatttgaaaagatcgcaggagaaagagcgaacataatgcaggcatctgaagcaattatggcgaaagaacgccctgattttccgtgctggtttttgggggtagtcgccgtagatcctgactttcagggaaagggactgagtcgtgcggttattgatcccggactcgagagagctgaacgtgaaggttttccggtgtttcttgaaacctcggatgaaaaaaacgtcagaatttatgagcggctggggtttgaagtcacagctgaatatccgcttcctttcaatggtcccatgatgtacgcaatgctcaggcaatgactcgactcagtgcagaagtatcaatattcttctgcacttttttctgtttcagttctctgaaaaagtacattccctttatttagttgattaacgggaagatcattcatgtaaccggaagttgttgaactatcatcaggccagtttatctgaatagtcatgataatatctgagattcaattagtgtaattgattgattttaaataattatatttatttttttgtaaaaattcgtatttgcaaatattttttaatatacctgattgtaaaatgtaccttcaataaatgaataattaccgagcaaaacacgactgtttttcgctctgcctaattatatacctccttttatttattttttatgcaaagtttatgcataaactgaataaaaaatcatttttataaattgtgaaaaacatcaaaaaagtaaattcattgtgattttgttgtgttgactttgttaaaaatcaaagagatgatgcgattaattgttaatcaggtctggcaatgaaaggtgttgaaagattaattttaagtttcagaaaagcattgattcaatgaatgaataaaactaaaaattaatagaaataattaatggaaaatatgagtatatccattaattttaaagactctttaaatacacgcctattaccacctttcttgttaattattcgaggtaaaacaaatgacgaaagaaattcagagaaattggtttgaacagtatatggttccttgtttcgcaccagctccatttattcctgtcagagctaaaggctccagagtatgggatcaggatgaaaaagaatacgttgattttgctggaggtattgctgttaacgcattaggacatgctaataatgaattaaaagaaacattaagcaatcaaatggaaaacctctggcatattggtaatggttacaccaatgaaccggtcttaaatctggcaaaagatttagtcgagaataccttttctgataaggtttttttctgtaactccggcgctgaagcaaatgaagctgcgctgaaaattgccagaaaatatgctttagataaacatggcagccataaaagcgaaattatctcatttgaaaactcttttcacggaagaacattatttacagtgacagtaggtgggcaacctaaatattcacaagattttgctcctcttccacaacaaatcactcatctcccttataacgatattgaagccattaaagcacatatttctgacaaaacctgtgccgtcattgttgaacccattatcggcgaaggtggtgttatcccggcaacgccagattttctgaaggcgttaagagagctgtgtgatcaatatcaggcattgctgatttatgacgaaatacagaccggaattggccgcacggggtatctgtatgcctatgaagaaacgggaattgagccggatatactgaccagtgcaaaaggattgggcggtgggttcccaatcggagcgatgctggttaaacagcatgtcgcagaagtattccagccgggctcacatggcacgacattcggtggtaacccactggcaagtgcagttgctcataaagtgctgaacatagtgaaccagaaggcgtttttggcaggtgtgcaggagcgccatcaggaattcatccggcatatgactgatttgaaccagcgttaccaagtgtttagtgaaatacgtggtaaaggattattgctgggcgcagaactggcggacaaatatcagggtaaagcgaaaacattaaccaatcttgctgcggaagaagggttaatcgcgctgattgctgggccgaatgtactgcgttttgctccggcattaaatattgaacaacaggatatcaacgacggttttgcccggcttgaaaatgccctcaagcgatttgttcaggaataaacgcagtttttgaggtgatatcatgatgctatttagatccgttcaacataaagatttgggggatatcctcgatctctcgtctcgcgctggagtgggtttgacgtcgttgccaaataatcaggaatatctggcggcccggatttcacgcagcattgattcattccacgatgggcgcgagagttcacaacagggattcttgtttactctggaagacacggaaaagcatcgtgttgttggggtgagtgcgctggaggttgcggttgggctggaggagcctttctacaattaccgtgttcataaatcggtgcgctcatcccgtgaattgggaatttacaattcgtttgagactttgattgtagggcaggatcacaccggatacagtgagttgtgcaccctgttccttgacccggcttatcatggggggcgcaatggtattttcctttccagaagccgctttttatttatttcagcgtttcgccatctttttccgaaaactatttttgcggaaatgcgcggagtagttaatgaacagggcgaatcaccattctggaatgcacttgggcaacactttttcaacgtcccgtttgcgcaggctgattatctgacaggcattggcaccaaaacatttattgctgaactcatgccgttccatccgatttatgttcctttgttgccggaagaggcacagcgggctatcgggcaggtacatgagaatacagtgccggcccgcgcgattctggaaaaagaaggtttttcctaccacggtatggtcgatatttttgatgccggcgctattttgcaggctgagatcgatgatgtgcgaaccgtaaaagccagccggctagtgtctgttaaaagaaaagagaatgccttcagacagagtgatggcaggctatgcattgtttctaacctacattttcaggattttaaagcgttgctgctgaatatctctgacgctattgatagtgatgaactgcacctgactggcgcagaaatggaagcacttcaggtagaggaaggggatttagttcgctgtgctgctcttttttccgaggaaacttcacaatgagtgatcaggcaaattacattgatggtaagtgggtaaccgggcagggtgtacaggtagttaaacattcgcctattgatcagcaaattctgtggcaggcccgcagtgcttctgttaagcaagtggaagaagctggtctggcagcacgcagggcattttcagactgggcaaagctggcagttgaaaaacgtattgccattgttcaggcattcgctgatttactggcaaaggaaaaagaaacaattgcccgtgtgataagtgaagaaaccagcaaaccattgtgggaaacccggacagaagttcagtctatgattggtaaagttgctatttccattgaggcatggcagcaacggacaggttattcagaaaccgccatgccggatggaaaggcaatattacagcatcgtcctcacggcgtgatggccgtttttgggccttataatttccccggtcatttacctaacggccatattgttcccgctttgattgccggtaacacattaatctttaagccaagtgaattaacgccgattacagcagaaaaaaccgtggagttatggatcaaagccggattacctgcgggagtattgaacctcgttcaggggggaagggaaaccggtggtgcgttactggattgtcgggaaatcgacggaatactgtttacgggcagtgcaacaaccggttttcacttccaccgtctgttagctggtcagccggaaaaaatgctggcactggagatgggggggaataatgccctgattgtcgatgattatgatgatcttgatgcggcagtttataccattatccagtctgcttttatttccgcgggtcagcgctgtacttgtgcccgccggttgttggtaaaacagggtgagaagggcgatgccctgattcaacggctgaccgaagcggctcgtcagatagtcccgtcccgctgggatgctgaacctcagccttttatgggcggtgtgatctctttggcagcggcagaaagtctgctgaatgctcaatcagggttgctggcactgggcggcaaggccctgctgacactcacacaaccggatccgcattcaacctttatgactcccggcattattgaactgacaggcgttagtcaggttcctgatgaagagtatttcggccctctgctgaccttacagcgttatgacacctttgaggaagctatttccatcgccaatgatacccgtttcggtctggcgacagggttgatttcacctgatgaaagccttttccttcgattacaggaagaagcaagagccgggattgtgaactggaacaaaccactgaccggcgcttccagtaaagcaccttttggtgggattggagcatcaggcaatcatcgccccagtgcttactatgctgctgattattgtgcatggccaatggcatctttggtgacagacaaactgtctctgccagacacattcgtccccgggcttgattttttccgctcttaattttttcagttagcttttttctgaccagccggcttccaaagaccagctggttttctaaggacagcagggagaacagaggtcactatgtcgggaattgaagcaaattttgatggattagtgggtatgacccaccattatgccgggttatcaatgggcaatgaagcctcgataaatcatcgtgggcagcaatccaatcctcgtaaggcagccttacaagggttaacaaagatgaaagcactgtcggatatgggattagtgcagggggttttacctccacaacagcggcctgatttatctgctttacggcagctagggtttacgggaaatgatgcacaggtgctgaataaagcggcaaaatactccccattgctgttatccaatctcagttcagcctcttccatgtggacagctaacgcagccacagtatctccttctgctgacagtgctgaccagcgtgtccatttcacagtggcaaacttaaataacaaactccatcgttcactggagagtgtgacgacatcccgggcgttaaaagcggttttttcagatccgaattactttgttcaccatgcaccattgcctcaacatgctgactggggagatgaaggcgcggcaaaccataaccgtttttgtggtgaatatgatgaagcgggtgtgcagctatttgtatatggccgcagtgctttccgggcagggcctgtaccagagcgttatcccgcccgccagacactggaagcgagtgaagcaattgcacgcttacatcagttagatgaaaggcaaactgtttttgctcaacagaaccctatcgccattgatagcggtgttttccataacgatgtcattgcggtcagcaacaggaatgtattcctttatcatgagcaagcatttttaaatcagcagtcagtcttggctgaaattgaggaaaagctggcgcacctcgggcaaaaactgatccctgttgaggtgcctgcatcaaaggtatccatgcaggatgcagtcagttcttatcttttcaacagccagttattaagcctgtcagatggcagtatggcgctgattttaccggaagagtgccgacagaataccaacgtatcatcctatctacagtctctggttgcgacggatgagagccctatcagtcaactccatttctttgatttgcgcgaaagtatgcgtaatggcggtgggcctgcttgcctgcgtcttcgggtggcgatgcaagaaaaagaactggcggcggttaatccggcagtgattatgacaccggatctgtatctgagcttaactgactgggttgagcgccattatcgagattctttatataccgctgatctggccgatccacagttgttgaccgaagtctgttccgctctggatgaattaacccagatcctcagactcggttcaatctatgaatttcagcgctaatcaggaggattgatggatttactttccccattacttgaaaagaagcttgaaaatacactgagtttcccgtctacattaaccgctaaatggctggcagatggtgtattacagctgatcccacaagagagtaaaagcgatacgctgattatttccgcaggaattcatggtaatgaaacggccccgattgaaatactgctccagttattaacacaactggtgcaggggagtctgtcgttgcagcataacctgctgctcattttcggcaatttgcctgccatgcgtgaaagtaagcgctatatccataacgatctcaatcgcatgtttggtggcaggtatcagaattttccttccggaaatgagactcaacgggcagttgagctggaatctgtgatacagcgattttttcaagagcctgcggttatggcatcaacacgccgctggcatcttgacctgcatacagcaattcgtggttcctgccatgaacaatttgccttgctgcctttccagcagcgtgaatattcgcctgaccttctacaatggctggaaggcagtgatattgatgcgatggtttttcataaaagtgaaggcggaacattcagccaatttaccagccagtatttcaatgtagacagttgtacgatggaagttggcaaagtctattctttcgggcagaacgatctggctaaattcagcaatattacaacagcattacagaagctgattgctggcgtattttctgtgaagcggcaaaaaccggaaataaaacgttaccgggcagtcgattccattatcaaacaggacagtagtttccggcttcatattccggaggatacaaaaaacttcacggccctgccggatggttttgaaattgccagtcaggaaaatcaatcctggaaaattacttctccggcaaactttattttatttcctaacgctaacgttgccattggtctgagggcaggcctgttattggagcaattaacctgatcaattcatatctactcatataataaaaagacaactgtggaggttactgatgacgaatacggtaaaaacacctgcggagcaatccgcaggtgcgcagaaacttcaccgtggattaggaaaacgtcatgtccagttgattgccattggcggtgccatcgggactggtctattcatgggaacagggaagactatagctgtatcaggaacttctattattctgacttatctgctgatcggcttttttgcctttatggttatgcgggcgatgggagagttgctgctctccaagttggattatcgtacgtttgctgattttgttgctgattatctaggggaaaaagccagttattttctcggctggacatactggatgagctgggtagtgagctgtattgcggatgttgtggtctgtggtggctatattcagtattggtttcctgatatttccctctggtttactgcgttgttcattcttggattaatgtgtttatgtaactttttttcagtcaggctgttcggtgagacggaattctggtttgccatgattaaggttgtggcgatagttgcactgattattgttggtgtgggtatggttgctattggctggacatcaccaaatggcgtcacggcttctgttcgccatctgacgaatccggaggtttttctgcccaatggcgtatttggttttctggccggttttcagattgcgattttctcttttactggtattgaactagtgggtactgttaccgctgagacgaaagagccggagaagattttaccgaaatctatcaacagtattcccattcgcattattatcttttatgtgttttccatgatgtgcattattgctgtaacttcatggcctcacatctctccggaagtcagcccgttcgttacgctatttgcactggcaggattaccggctgccgccgcagtgattaattttgtggcactgacatcggcaatgtcttcagcaaacagcggactatacgcctgtacccgtatgttatatggcctgtctactgaaaaattggctcatggttggttcgggcgactttcagtcaatagtgcaattcctgttttcagcctgatattttctgttgtttgcatggcaagtggtgtacttctgttgtttatcgttcccgatgtgatgaagctatttaccattgtttccactgtagccgccatcatggttgtttatagctggtgtatgatattgcttgcttatctggcttaccgtaaaaaacgccctgatttacatgagaagtccatctataaaatgccgatgggcattcctatgacatggtgcactctgatatttttcgcttttaccgtggttatcatgatctttgattacgatacacgtattgccttgtatggcacgccaatctggtttgttatccttgaggttttatggcgtatgcggaaaaagcgtaaggaatataaaaatagtgaagtttattgattagaagctaagtaaacagaataaatttcccttggctgacggtattttactgaatatcagccttgagaaattaaaagggcagtactgttttctattatagtaatgcaagttagatgtatttcgatcatttaagttacctatcaaagcattgaagtgattttctacttcgtgacgcataacaatagcactgagtggttattgttatacgtcactattgataaattaaaggtataattatacgaaatatatatcagttatgattggcgtgttattttttcaagcaggagaagaataaaatttaggagttatagttatatgaatgcttataacagaattattcttattatgtgagttaaagaaataaaacaactattattggtacaggtgttttacttgttggtatatttatttgttaatcacactcggtgaaaaaatggaatggatgtttttttaatatttctagtttaatataagaggcttcattggcttgatatataaaatcaatctgtttaacctttaggtttatctcacaatgaaccttaagggaaatgaaaatgccaaagaaaacattaaataatggtgttattttttatactggaaaaaattatagtggaagcttgtatgaatatccagaaaatagtaaagaagtaaatttgattggtacaccattaaatgataaatttctttctgttgaaataggaacaaattctattgtgtttgcctggagacatggcagtgatagccaatctgggcaaatttaccgtgaatgggatacaagccagccagatatcagtgatatcgaagggttatcaaaatttatagtctcttcggtaaaccgtgatttactggctataaaattaattaacaaatcaggtattaatcaagtgtttagggctaacattaggacttatacaattcctgatcctgtagattgtctttcaggcggagattatgaagttgttggtctaattcccaaagatggtcagatgtatattacctctgttgttgtttttgatcagaataatattccagtcactcaaggtgcggtttattttaaatataatggaactgatattgatattatcacttataatgaaaccaagcctctttatatgaaatttgaaaaagaagataattataggtttaattttatcttggaaaatcttcctgttaatcagtaaaataaaagcaattcactagtaaaaatcaaggcgatgtatttgaaatatatacctattcaacttcaagatgcgtgttatatctccccgcgccgcggggagatataaggactcatctcatattgcctgttgtaacttgaagtttatcgagtatatacacaatggatttcaaggcatgtagccaacaaagaggcaacctgtaagatgaaatgtatacatccctgataataaataagtcaatttccaagtcacataactgcatcgttagttatgtgacttgagtacttttattgcggtttctgaggcaccagaattctactgacagagtcggctagttggttaatcaggggttgtcgcataatcgaatagtgtgtgccaccgataggatggagtgtggaagagtttgccacaacgccctgccagccgtgccattcatctccatcaataataaagttttccgctttataaagatggatcggtaactctgacgcctgtggaatataatctgtgctcagctgatccagaaactcaatcgtaccaatatgcaggaagagattttcacgtgtgtaataggtaggtaaccattggcagtttatacaatgattaacgatctgttcaacatcattaaactgataaagcacttccagcgtatgatcattaatctctggtatggatatttgcagatatttgataatcctgttgatacgttgttgtgtcgtattcattaatttatcaggcagggtggaatatcgactgatgtttcccgaatcaatcatgcccaaaaatgtgacttcctcaccatcatgcattaattgcatggctatttcataggcgattacgcctcccagagaccatccggcaagacgataagggccgtgagtctgtacgtgccgaatagcctgtatatgacaggccgccagagcgttaatagatatcggtggttcggcgagtgtatgaataccaagcgcctgtagtgcataaatgggtaattcaggaggaagcagggcagccagagatgaataaaccagcgggttgccagtaagttcgtgtacaaaaaacagtggtggcaaacttccctcagggcttagcgggactggattgatattgcgggagaacgcaggggtaatcgtctgtttacgcacggcgattgccagttcacacaaagtcgggcaagtaaacaatgtggtcagaggaatttccatgccttgttgatgcatacgtgctagtagctgtgttgcattgagtgagtgaccacccagttcgaaaaaattgtcatagcgaccaacacgatctaaacccagtaatgtttgccagatttcagccagtgtagtttccagagcatccatcggtgcttcgtaattgtgggttataacggctgtctgatccggtgcgggtaatgcctgaagatttagtttgccgttgacggttagtggaaaggcatcaaggataacaaacgcactggggagcatataatcggcaagctcttgggagagttgctggcggagatcagcaggtatcagttttgcctccggttcagctatcccctgttcgggaatcaaataagctacaaggcgtttatcgccgtgctggtcttcacgggcgaccacaactgcctcgcgtactccgggatagcgagtcagtttagcctcaatttcccccggttcgatgcgaaaaccacgtagtttaatctgaaaatcattgcgtcccagatattcaatgttgccatcgggtaaccagcgccctaaatcgccggttttatacagtcgggctttggtttctgttgaaaacggatcaggcaaaaaacgctctgcggtcagttcagggcgattcaggtaaccacgggcaacgccgcttccaccgatatagagttctcccataacacccattgggacgggtttaccatgattatccagaatataaatttgcgtattggcaatgggataaccaatcggcagggtttctccggtataagcagaatgacgatcaacttgcaatacggtagcaataacagtcgtttccgtcgggccgtaagaattaatccagtggcatgactgggtttccggcaatgtctgccagatcatcaggtggcgtagttcagctttttcaccacccacaatcaccagccgcagagacgggctgaaaccacaacgtccggcgaccatttcctgtacccacagatgccagaatgccgtaggtaaatcagcgactgtgatttgctgctgttgcaggaatcgggcaaaagtattatccggaacacgcaattctgacgggcacatcactaaggttgcgccggtggcgagtgtggcgaagatatctgatacgctggtgtcgaatgcaacggaggtaaactggagtacgcggtcagctggtgttagttcattgatctggcgttgaacgtgtatgaaattaaccacattgtgatgttcaatcatcacgccttttggctgaccggtggagccggaagtatagataatataagccagatggtgtggtgccagccccagttgctgcgaatccggattatgtgtcggttgttgcgccatacattcggtatggttgttatcatccagcacccatatcggtatatcggcagataaacgggtttttaggtgttgttgggtcagtaataacgtcggtgtacagtctgacagaatatagttcagaagctcggtcgggtaattcgtatccagcggtacataacccgcgccggctttcaaaataccgaacaagccaatcaccatatcgacaccacgttcgacacaaatcacgacacgatcatccggtcgtacaccggcatcaatcagggcatgagccagctggttggctttttggttcagttcgcggtaggtgagctgaacttctcgattcattggctctgcgtgaatcagtgcgatgacatccggtgtgagggtcgcctgctgttcaaacaactgttggagtaacatatcctgtgggcagtcaattctggcactgttaaattcttccaataactgactgcgttctgccggtggcagaatactgagggattgaatattctgttgcggcatattttgcaatgttgtcaccagtgttttcaacgcagtattcatataagcgttaatgcgtgccggattaatctggtgattgcattgtgctgttaacgcaaaaccatcttcgaaatcatccacatccaatgacagtgggtaattactacgttcttcactgttgaatatctgaataccttcccataccggcgactcggctagttgattgctacgtgggctatgacggaagttaagcagactgttgaaaagggggtggggtgcctgaataccactgcaatgctgagcaatcgtcagcggagtctgttcatgttccagcaatttgctaagttgcaggtgagtctcctgtaccactttttgtacagtgcgttcctgcaacataatgcgcactggcagcgtgttaataaacataccaagaacctgagaagcacccgcaccttgtaatgaacgtcctaataaaacggtaccgaaaataacatcttcccgtccgctgcattgcgcaagaacctgtgcccatgcgatatggaacagaacggcagtactgacaccctgttgacgggtgcagtcacgtagctgatgcgttaattgatcacccagtgtcagtctggcttcctctatcttattgagtccttcatgatttccccgcacattgcgtaagttaaagggcagagttggttcgtccacatctcccagaagctggtggaaatagtcccgatgtttttcaatcggcacagtgcggatctgagcgataaaattacggtaaggcagggcgggaggtaatgttaggggatggtgctctttgccatgagcggacagtaattccctgatttccgtaataatcaatcctagcgtagtatgatcgctgaccagatggtggaagcacagggacagcagccactcgttcttatggggattataagcaatatcggcagagaaaagcggtgcctgattcagattgaggcaccgctggtgtggatcggtatgtgccagtaactgagatgaaacatcctgttcgttatccggagcagtaaaagtatttattttcagggtggcctgtcgccagaccacctgaacgggttgggtcaattcctgccagcagaaagcagtccgcaggatatcatggcggtctatcacttgttgcagggcctgaaggaaagcctcccgccgttcaccggaatcaaaggccagcaagctgcttaacacatacgcatcgccgttttcctgcatctggtgatggaacaggataccggcctgtaatggggaaagcgggtaaatatcctgcacattagccgcaccgccggtgacagtggcaacaatggtatcaatttcgttttgtgatagcgtcaccagtggcaacatatcgggtgttattgctgtgcaaccgtcaggaatgccattggggggaataagattgtccgacgttcctcgtcgcacctgtattgcctgcgccatatccataagtaatggtgcagtaaagatactgcgtacgtccaatgcatacccttggctgcgcagttgttcaatcaggctgacggcaatcagcgaatggccgcccagtccaaagaaatgatcgtgacgaccgacccgttccagccccaataaatcctgccagatgtccgccagtgtagtttctacctcacccaccggcgcaacataatcacgcgtgattatcgcggcggggtcagggacgggaagcgcccgacgatcaagtttgccgttaggggtcagcgggaaagactgtaagataataaacgcaccgggcagcatataatcggcaaggcgctgggatagttgcgcatacagttccgccggaatgagctcagcgccgtcctgcgccagcaggtaagccaccagttgtttctgggaactttcattatcgtcactggcattgtcacgaagcataacaacagcctcacgtactccctcgcaacgcatcaagctggcttcgatttctcccggttcaatgcggaaaccccgcagtttcacctgaaaatcattgcggccaaggtagtcaatattgccatccggcagccagcgcccgaggtcgccggttttgtacagtcggtcattcggttcagtggagaatgggtcgggcaggaaattctcagcggtcagatcagggcggttcagataaccccgcgccactccggcaccgccaatataaatttcaccggttacccccagcggcaccagtcgcctatgtgaatcaagaatatagatctgagtgttggcgatggggcaaccaatcggaatgggacatgcagcatcaacaggcgatgttatcgcataggtggttgcaaaagtggtggtttctgtcgggccgtagccgttaatcagatgagcaggccggcactcagccaattgcacccgctgtattttgcccggatcgaggacatccccgccgaccagcagatagcgcagttgcccgaacagctgcatcagcgtttcccgataagcattgaacaagccgctcgttaaccacagagccgtgactttcccgcagatcaaggtgtcacggaaatgctcggggttgagcagcacggattgggcaatcacatacagacgcccgccattgagcagaggcgcccagatttcccacgttgaggcatcaaacgcaatattagcgcaatgtgccacgcagtcatccgctccgatatccgcataactactgttgatcaccaaatgattcacattacggtgttcaaccataacgccttttggttgtcccgttgaaccggacgtgtaaatcacgtaagccagatggcgtgaggtcagcccccatgcctgagcattcgggttatgggttggcagttccgggggccgccctctaaagttccggaagcttt

SEQ ID NO: 3013 - DNA, 25593 bp, Xenorhabdus sp.; identical to SEQ ID NO: 3012
  CDS (6752)..(7414)

SEQ ID NO: 3014 - DNA, 25593 bp, Xenorhabdus sp.; identical to SEQ ID NO: 3012
  CDS (9791)..(10210)

SEQ ID NO: 3015 - DNA, 25593 bp, Xenorhabdus sp.; identical to SEQ ID NO: 3012
  CDS (10890)..(12101)

SEQ ID NO: 3016 - DNA, 25593 bp, Xenorhabdus sp.; identical to SEQ ID NO: 3012
  CDS (12340)..(13170)

SEQ ID NO: 3017 - DNA, 25593 bp, Xenorhabdus sp.; identical to SEQ ID NO: 3012
  CDS (13167)..(14645)

SEQ ID NO: 3018 - DNA, 25593 bp, Xenorhabdus sp.; identical to SEQ ID NO: 3012
  CDS (14730)..(16073)

SEQ ID NO: 3019 - DNA, 25593 bp, Xenorhabdus sp.; identical to SEQ ID NO: 3012
  CDS (16350)..(17060)

SEQ ID NO: 3020 - DNA, 25593 bp, Xenorhabdus sp.; identical to SEQ ID NO: 3012
  CDS (17110)..(18528)

SEQ ID NO: 3021 - DNA, 25593 bp, Xenorhabdus sp.; identical to SEQ ID NO: 3012
  CDS (19242)..(19709)

SEQ ID NO: 3022 - DNA, 25593 bp, Xenorhabdus sp.; identical to SEQ ID NO: 342
  CDS (23947)..(25344)

SEQ ID NO: 3023 - DNA, 25593 bp, Xenorhabdus sp.; identical to SEQ ID NO: 342
  CDS (22080)..(23615)

SEQ ID NO: 3024 - DNA, 25593 bp, Xenorhabdus sp.; identical to SEQ ID NO: 342
  CDS (21784)..(22107)

SEQ ID NO: 3025 - DNA, 25593 bp, Xenorhabdus sp.; identical to SEQ ID NO: 342
  CDS (20345)..(21646)

SEQ ID NO: 3026 - DNA, 25593 bp, Xenorhabdus sp.; identical to SEQ ID NO: 342
  CDS (19794)..(20099)

SEQ ID NO: 3027 - DNA, 24961 bp, Xenorhabdus sp.; identical to SEQ ID NO: 481
  CDS (338)..(1009)

SEQ ID NO: 3028 - DNA, 24961 bp, Xenorhabdus sp.; identical to SEQ ID NO: 481
  CDS (2388)..(3563)

SEQ ID NO: 3029 - DNA, 24961 bp, Xenorhabdus sp.; identical to SEQ ID NO: 481
  CDS (3565)..(3777)

SEQ ID NO: 3030 - DNA, 24961 bp, Xenorhabdus sp.; identical to SEQ ID NO: 481
  CDS (3774)..(5156)

SEQ ID NO: 3031 - DNA, 24961 bp, Xenorhabdus sp.; identical to SEQ ID NO: 481
  CDS (8332)..(9267)

SEQ ID NO: 3032 - DNA, 24961 bp, Xenorhabdus sp.; identical to SEQ ID NO: 481
  CDS (9363)..(9812)

SEQ ID NO: 3033 - DNA, 24961 bp, Xenorhabdus sp.; identical to SEQ ID NO: 481
  CDS (14859)..(15209)

SEQ ID NO: 3034 - DNA, 24961 bp, Xenorhabdus sp.; identical to SEQ ID NO: 481
  CDS (17425)..(18336)

SEQ ID NO: 3035 - DNA, 24961 bp, Xenorhabdus sp.; identical to SEQ ID NO: 481
  CDS (24357)..(24959)

SEQ ID NO: 3036 - DNA, 24961 bp, Xenorhabdus sp.
  CDS (23445)..(23852)
aatttaactgttcctatttcttttgtattgctcacatgcgtaccgcaacaaggcatttctatttcgttgcaacaccataatcttattccatcctgatatttaaaaactatctcgtgtccttgactgataaagcgattgacttcttgttccagtgcagagagggattgaggatcaatattctgtgaaagaaaatagtctgcacggtctttttcattattaacaaaagagccttcgatagacaaaaaagtgggcatttttcgcatgaagaattcgacaatatggctggcagtatgcagcctcattgtattcagtcttctggtactatcgatttgcccctcgattttctgcccgatactgaaattatcagttgtgacatagtgtcttatcggagcactaaaatctaatttcccttcatcggtattgtcgacatgtacagaggttaccggatattcgccaatggaaccaatatcgaaatcctgattcccggaaagaggataaaataatgtctgatccagaactatgtgatcatcacctacatagatgacagtagcttcgaattgtttttcatagggaatttcgtcaaataatcgttttgttgaaagcatggttactctctttatatcaagaataaaaaaatagaatcaaaaaagacgataactgagatgatttagctagagattcaatcaaaattaaaattaccggaacagcggagactattcaacgattcttatagaatttgtgtaacggaagcatggttattgtgtactaaattgaggggttccattttttccagatagttgctgcgtttatttcatctaattacctcaaaagtgtagcaagaaaaaatgatgtctaatactatatgcccgaatattggtgagtatgagtaattatctgttttttgaagttaattcattgtttttaaatataatttaaaaagtcagacttcttgtgaagttagcgtaatgtaatcaagccctatgttaattaaacacaaggctttagaggatatattatgagtattagttccttaggaaaccaaatcgataactctctggtttcaaacgcctttggcttcctgcgcttcccgttgaatttccagccttattccggtgatgcggagtgggttattaccggtgtaccctttgatatggcaacatccggccgggctggtagtcgccacgggccggccgctattcgtcaggtctcgacaaatctggcttgggaaagcagccgatggccatggaacttcagcctgcgcaagcgcctgaatgtggttgattgtggtgatctggtctttaattttggtgatgcgcaggatatgagcgataaactacaggctcatgctgagaaagtgctggcatcaggcaaaaagatgctgacttttggtggcgatcactttgtcacattacctctgttgcgcgctcatgcgaaacatttcggtaaaatggctctggttcatttcgatgctcataccgatacttaccctaatggcagtaagtttgatcacggtacgatgttttaccatgcgccaaacgaggggctgatcgatccggcgcattctgtccagatcggtattcgtactgaacacgatacagataatgatttcacggtattagatgcagggcaggtgaatgatcgcagcgttgaagatgttgtcgatcagatcaaatctgttgtcggtgatctgccggtatacctgacttttgatattgattgtcttgatccagcatttgcacctggtacgggaacgccagtgatcggtggtttgacttcagatcgtgcgctgaaaattctgcgggctttgcaaccgctgaatatcgttggaatggacgtggtggaagttgctccttcctatgatcagtcagaaattaccgcgctggcggcagcaacaatcggtctggaattgctgtatttgcaggcttctaaaaaagctgtctgatatattcagctatacataaacgttgtttgaaagctcgtcctgatgacgggcttttttcttttttattgcacctttaccgtgtttatagaggtaaaaaagtatataggggaaagtattcccaaacgcacctattgttcccaaattgaaacaatcccgcaaaaccatcgcttaaccttgcagcatcgaaaaactgcgttaggatgttttaaaaggcattcttatgaggatacaagcatgataatcacttcaactgaatttaagaataatgatttcctgagtaaagagcaggaattcaatgagtttggtggtaacggtggtaatcgctcacctgaacttgcctggacagatgcgcctgccggaacaaaaagttttgcggtcacggtttatgatcctgatgccccaacgggcagtggtttctggcattgggtggcatttgatattccgctggaaatacaggctttatccccggatgccggacggagtgatggcagcaaattaccggctggcatcattcagagcagaaatgattacgggcagtttggtttcggtggagcctgcccgccagagggagataaagcccatcgctatattttcacggtacatgccatgtcggtagaaaaactgggtattaacgctgaaataacaaatgcggtcacacgttttatgatctacgccaatagtctggcaaccgccactattacaggctattaccagcgttaactgtttcattattttccggttttaagatcttcagtttataaaaaaagggtatcaatatatgagcagcaattctttttcttctccaaagaaagttcaatggaatcagggattacaacaggaagcagtcgagatcctgtctaatgatggcggaatgattgtctgcccgactaaagtgggttacatcatcatgacgtccgatgcgaaagggctggagcgcaaatttgaggctaagcagcgcaatcgcaataagcccggagttgtattgtgtggatctctggaacagttgaaagagctggctcagcttaacccggaaattgaagagctttatcagaaacactgggatgcagatgtgttattgggctgtatcctgccgtggaaagaagaggcagttaatcgtattcccgatgatggttccaaagagctgatgatggatggccgtggtacaagctgttttgtcattaaatttggtaagcccggtgaaattctggcaaaagagctgtgggaaaaatacggtaaattctctttcgccagctcagctaacccatcaggcaaaggtaatcgtggtttggttgagtgtattggtgaacgcattgaggagcgggcagatctgattattaccgccaatgattatgtgaaatccattcagccgaatgagactgagcaaacccgctatgagcagggtgtgatgatttcaatggtcgatgacaacggtaaattagtaccgactcaaaatggtcagcgtgatattataccgtgcccggtattgatccgtaagggactggatgtccataagatcatggtaataatgtctgatattttcacgacatgggattaccgtcacggcaactattattaataatcgctgcgggtgcggaaccgtacccgctcaaatcacggcgcataaagccagaagaaactaattctgtccggttggtcacactggctttggcaaaaatattacgcagatgagtttttacagtagagagagaaatactgagctgtaatgctatgcgtttattactcgctccttccctgacccactgaataatttcctgttcttttgcggtgaacgtgacttgtgcatcaggcaaaatatcaaaagtcattaattccgccacaggaataatagagtgaagcctcattacttcctgatgctgaaacggacagtccctgaaaactgaaagacccgcgagaattttattcccacggcggataaagatttcgactctgtccgttaagttattgggttgcataaaatcatgataaaactgttggccactctctttcatattgtcattcatgctgacaagacgctgttcattgtgtctgaaattttctggatgcagcggatctaactgacaaaaatacgcgacatatgcctgatacacgtcggatgtgatgccatgcaggatatggttttcgggctgccacttttcattgacgagataatagatagtggcagacacaggaatgatgtgagcaattgtattcaggcagcaattaaccaatgtttgttgatgctggctgagcggtgatgtattcattgatcgtacctatctgatccagttgtgaattcatcatggcttttctgattatgaatacaaaatatacatgttaataatgtgagattgattgcattattaaaaacttattctttcatgttttagctgcttttagactgactttgtacatattgccttttatttattaacatattaattgattattttttcattatcgcctgatatttcttgagttacggtattttttatctttttctttggtacttttcggcaaaaaacggcatgagatacctctttggggtatcgttctttagaatgatggcaacacttttccccttatccctatagttaaatcacagtcacctttcgtttacaaaaaattcacaatcaaaccgactgtatttatgggtaaaggggggaagaaaaatgaatatgtcctcaaagttaatatcacatattgagaagggttaggttggttttccgacgacacttgccagttctgttggtgtgattatggcaagtccggttattttaaccgtcaccagcgggttcggaatagggggtgatacattcgctctggctgtgtttctcagctttattgtgatgcaggctcagttgacaacgtttgctgaagctgccgcgattttgcctacttccggctcagtatatgattatatttcttgtggtatgggacgtttctgggcaataaccggagcactttctgcctatttaatcgtgcatgtttttgccggtactgcggaaaccatcctttccggcattatggcattggtgaattttgaaagcctcaatactgtgatggagagcaataatgcgtcctggatggttggagtagggctagtgatcacctttggtctacttaatgcgtttgggatagaggcattcagtagagtggagattgtactgacgtttgccatgtggagtacgttagtgatctttagtttgtgtggtctgcttatgccatttcacacttcagttgatggctggtttggtgagtcgatgaatattgctgatccgaccgtgatattaagtctgattggcatggcgatgtttatgtttatgggctgtgagctggtgacgccaatggcaccagaaattaaaaattcagcaaaagtcatcccacgagcaatggcaatcgggttgtgtggtgtcgcgttctgtatgtttatgtacggcgctgcgatgacacatcaggtggaaaacgtcattgttgacccagcaaataatgtcaggttactggaaactccaatggcaattccggcttttgccgggcaggttatgggagattttggtaaatactggattggttttggcctgttgctggcgggagcggcaacgattaatacattgatggcagccgttccccgtattttatacgggatggcacttgacggtactttaccccgtattttcacttacctgcatccaaaatttaaaacacccgtgtttggtattttagtggctgttttgatcccctgtatccatgcttttgccattcagggcgatttgaaccgcattatgccgctggtactggctgcggtttgttcctggggaaccgcttatctgttagtcaccatttctgtcatcttgctgcgtattcgtcgtcctgacctgcatcgtgcctataaatcaccatttttccctttaccacagattatttccggtgtgggaattgtcatcgctcttatttacattacgcccccgggcatggataaagcggatgtttatattccgtttatgataatgcttggtttaacagcggcctatgccctggtgtggacgatatttgttcagaaagtcaacccgtttaaacctgtcgaggtggaagacgttctgtctaaaacgttctctgaaactgaattgaaggagattaaacttgagccattacgcagcctccgctaaatcttctttctggcaaaaaatcaataaacaacgcttgcctgccgactatcaggcaggcctgacacttaaccggctggagcgtgatcttcagccctatcactgtgaaaggccggggccgggagaactgattgtcagaccagaagagcagttggcaataggtgtcaacgaaagggtgaaaaaactgtttatggcattcatcgtctatacgcgcttttctgtttctggtgtgatagatcaacctttgaatgccgatatacaggtaaaaacggcaggtagcctgcggaaaaagcggatacaattcttttcaaaacaggaggatggacttaaatggattgaacaactggagcaatatcttgttattcgacagacgttagaggagctggattttcggtcatgcagcctgcaaatcaggaaaggaaaatggcgttgcgaaattgaacattttgctgcttctgaaattgtcagccggcttccggcaacccgccgttacctgcgtttaacctcagagcagcgtcatcgtttactcagtacgctgcatctgattcatcagcttatgctgcaaggtattggcaaaaagccgtacacgtgaagatagcgtttcttctgatttaaacaggatccaggattgatagatatccatgtcccattcgggcagaagcctgatcagttttccggctgtgacggattcatgggtgatatagtccggtaggtaagcaatacccgccccagccagcgccgaactcattaatgctacactattattaatacgaaaacggctgcgcacttcaatatcaaacttatttctctctttctgaaacggaagagagatggtgtgagcagggccgcgaaacagcagataatcataacggggaagatcttccggcctttctatagccggaaactggctgagatagtccggagtcgcgtaaagcccccaggtgatatcaatcaggggcatcacgagtggatggtctggtgtttcacggcctaccacaatagcgatatcacattggtctttttccatgttaatgattctgtcggtcagttccagatcgacactgacatgaatatttccggcaacaaaattgttcagggccggaacaatgcattgactgccaaaggatactggtgcaatcaggcgcaggcttcccatcggttcttcatggaaattacggataaaacgttcggcatttttggcttcattcagaatacgctgacaatattggtaataactcattccgacttctgtcacctgaatcttgcgtgtggttcggttgagtaactgagtaccgagcctgatttctaactgtgcgatttcacgactgacggaagacttagaaagccttaatgattttgccgcttcggtaaaactcaatgtctccacgacacgggcaaagatcaccattgagctgagattctcaatattattcataaagtaacctgatgatttactccgaaaaaacctaacatatcacaggttctgttcagaagggctttattctctgtggaaatttttcatttaacgaacgactgttccataatagaaacagtgagccgaacggtggcattttgctgcgataaagagtaattattttataacaataacaagctgttctttttcagcatgtctaaatattctggagggcaatgtgagatgaaccaaactatgacacaaaaaattctcgctcgggcgagtgggcgtaaacaggtcacaccgggcgaagtggtttgggcaaaagtggatattctgatgtctcatgatccctgtgcccccggcgttgccagcgtatttaaaaaagagtttggtcaggatgccaggatatgggatccgacccgtttcattatgatccctgaccactttgtttactctgctgatccgcaggctaaccagaatatacgggtaatgcgtgaatttgccgcagaacagaatgttaagtatttctatgatgtcggaacccccaattataaaggcgtctgtcatatcggattggcggagggaggacatactcgccccggagaagtgttgttggggacggattctcatactgttaccgccggcgcattcggaacattcgcgattgggttggggattaccgatgcggcttatgccatagggacgggagaaatcccgctgaaagtgccgagtaccattcgtgtgaattttaccggcacgaagccagcgcatgttttggctaaggatatgatcctgacggtattgtcagaactgacagtggatggcgcgacctatcaggcgattgaattcggtggcaatgtcatcgatgaattatctgtcgaagagcgtatgacgatttgtaatatggtcgtcgagtgtggtgccaaaaatggcattatggtaccgaatcaggcaacacttgattatctggctgaacggaatgagatgccgtttgagattgtttacccggatgaagatgcccaatatacccgtgtattaaatattgatgtatcggatatgcagccaaagatagccaaaccgcattctccggataatgtggtttccattgaaaaagttgccaatgttgccatttctcaggcctatatcggttcctgtaccgggggcaagattgaagatttcatcgccgctgcccgtattataaaaggccataaggttaaaattccgacttatgcggtaccagcaacaaaagaagtattccataaaaccatcacaacccagattgagggcgtttccgtttatcagattttaacggatgcgggagtgaaactttctgctgaagcgggttgtgctgcctgctgcggtggcccaccggatacttttggccgcgttaatgatccgatatcagtgatatccacgactaaccgtaatttcgtcggaagaatggggcataagcgcgctaatatttatcttgcttcaccgtactctgttgctgcggcagcgattactggccagatcactaatccgggagaatttttatgagtgatgtcgttatgaatgatgctgttttaaatgaacaaaaggaaaatatcattcgtggtcaggtttatattctggaggataatattgatactgaccagattctggccggggaatatatcaaagtaaacccctcttcacctgaaggttatgctcaattagcgtcactggcgatgtgtggattacctgaaggatcgctgccttttattgatgaagaaaaaggtaaggcgaaatatccgattatcgttgcggggcagaattttggctgcggttcttcccgtgaacatgccgtcgtggcgctgggcgcttcgggtgtaaaagccattctggcgcagtcttatgcccggatattcttccgcaattgtgtctctactggtgaattattgcctgtcgccgcacaagaacgcttgtgcgacagcttagttaccggtgacagcattgagatcgatattgaaaatcagacagtaacgatactgaaaagcggtgaaaaatacccgaccgatcctgtcggggaactggctaatattgttgctgccggtgggctgttctcttatgctcgggcaaccggacgaatcaagtaatatacctgtcgtcttttaagttgcctctttgttgctcctttgccgccgtgatgcaactggaaatccagaaaatatgccagcagattataagctggcatatttgtttcgggctttcttcatccaacgatataggtcaataactgttgctgcggcatcagaacaaaattcccgtgaaacagagaaccggcctgataatcgtcagtgagtgttttcagcaattttatggtcacagtgtgatgagtgcagtcaatttccacaatttctgctgcatggaaatcaaaaaattgcttcacatgagggtaaagcgccttataaagactttctttaatggaaaaagcgagtgtgaatgcctgaataaaagtaagcggagattttgccagtaattctttctcagtttcattgataatgctggctgaaacgctatcaatggtttcctgttttatctctttttcgatatcaatccccacccattgatatttatcacttgaagcagcgaaaacaacagcacaattggttgagtgagaaatggaaccacaaattctttcaggccagacaggggagcgatcctgtgctgattccacctgaaattcagggtatcccatgttatttaatatattacaggcacagtaacgggcagccagatattccgcccgccgtttagtgacggcattttgcaatcgttcaggataggtaacgccatactcagtaaatagatcatcccgatagctgccttgagtgaaataagccagcataatctggatatctggatgctctgataataagcccttttgtatcgcagtgaaaaaggggtcattgatggcagttgtctgtacaggggtaaaagtaatttctttcattattgttcatcggaaatgttaataaattgtctttatacacaatggatttcaatatgcatcgcggcggcaagagagagaatccccgggagcatagataactatgtgactggggtgagcgagcgcagccaacaaagaggcaacttgaaagacgaagtgtatagccaattttgccacatttagttttagttcactaaatcgttaactctttttatactgtgtttcgaccaataagaacagggatctgaaaacagggtgtatcttattggttgaataactgtttgattcagtccaatttaaaaaagaggtaaatgtggaaatattagtgacaggtggaatgggatatattggtagccatacctgcgtccagatgattgaagcagggatgacgccgattattgtcgataacctgtgtaatgccagtcaggaagttctggcccgcattgaagcgctaacgggtatcaggccactgttttatcagggagatatccgtgatgaagcattccttgattctgttttttcccgtcacgctatagagtccgttatccactttgctggtctgaaagcggttggcgaatcagtcgaaaaaccccttgaatattatgataataatgtcaacggtacattagtgttagtgcgcagcatgcacaaagcaggcgtaaaaagcattattttcagctcatcggcaacggtatacggcgatcctgaaattgttcccattactgaacagtctgcggtaggtaataccaccaacccttacggtacaagtaaatatatggttgagcgttgcctgtctgatttccatcatgctgaaagtgactggtcagtcgtattattgcgttatttcaatccggtaggagcacatccatcaggtacgatgggagaagatcctcagggcattccgaataatttaatgccatatattgctcaggtagcggtaggccgtcgagagaaactgtctgtttatggcgatgattatcctactccggatggaacaggcgtccgcgattatatccatgtgatggatctggctgatggtcatattgcggcactgaatgcagtcggtaaaaaatctggcctgcatatctataacctgggaacaggaacaggtactagcgtactggatatggtggctgcattcggtcaggcatgtggtaaaccggttccttatgaaatttgtccacgtcgcccgggcgatattgcagaatgctggtcaagtcctgaaaaagctgagcgcgaactgggctggaaagcaagccgcactatcgtggaaatgaccgaagatgcatggcgctggcagtcccaaaaccctaatggttataaagcaggataatacgcatctggcgctttaatcgcatcacacagatatagtagctacaacgggcataaaggtatttatgcccatcgattcatgtaccgttcatgagtacagggattggcacctgaatgagcatttaggttatgtcaaaaatgcaatttaatcaggctgattatccacacaggcgctataaccctttaacagggcagtggataattatctcaccacatcggctgaaacgaccgtgggctggggtagagaaactattacagcatcctgtatctccgggctacgataaacagtgtgctctatgcccgaataacacacgtgcctcaggggatatcaatcctgattatcaggatatctacgtatttcagaacgattattcagccttactgccggaaactcccgctattgccactgctgacgatccgctgtttataagcaaaccgacaagaggaacctgccgcgttatctgcttttcaccaaatcacagtaaaacctttcctgaattatctctgaccaatatccgccgtattattgatgtctggaacagccacatagaagaacttggacaacgctatatctgggttcaggtatttgagaataaaggggaaatgatggggtgttcccagcctcatccacacggacaaatctgggccagtgattttctgcctaatgagctgactcgcaaagatgagttactgaggcaatattatgatcagcatggatctaatttattgctggattatgccagagctgaacagaaaaacggtgtgcgtacaatcgtggataccaaacactggctggctgttgtgccctattgggcggtgtggccgtttgaaacaatgttattgccgaaaagccctgtccggcgtatgaatgaactgacgaaagagcagcgtgatgatctggctgttgcgatgaaaaaactgacctgccgatacgataacttgttccaatgctcctttccctattctatgggctggcatttcgctcctttctttaccaataagcagaccgatattgagcactggcagttacatgctttgttttatccgccattattgcgttctgcaactgtccgtaaatttttggtgggttatgagatgctggctgaatcccagcgcgatctgacaccggaacaggccgcccaacggctacgggatgtcagtgatgttcatttcaggagttgaaatccttgatacagcattttacgaggagcgcggtgatggaggcattaattcaaaaagtcactgaatcttttaatacagtttttcactcttcaccgactcatttttttcaggctcccggacgggtgaatttaattggcgaacataccgactataacgagggatttgtcttaccctgtgcgattgattaccagacggtagctgctgctgccaaacgcgatgatacgctgatccgggtgattgctgttgattacggtcatgatcgtgatgagttcgatctctctcagccgatcctttttcatcaggataaaatgtgggcgaattatatccgtggtgtggtggtaatgttgatccaacatggctacttatttggtggaatggatatcgcaataagcgggaatattccacagggagccggtctcagctcttcggcatcgctggaagtggttatcggcctgaccatcaacgtgctttatcagctcgacattagtcggaaattgattgccattaatggtcagcaggccgaaaatcaatttgtcggctgtaaatccggtgtcatggatcaacttatttcagcctgcggcgaagaaggtcacgctttgctgattgattgccgcacccttgaaatacaggctgttccgatgccggaaaatatcactgtgatgattattaattccaataggcagcgcggtcttgtagacagcgaatacaatatacggcgtcggcagtgcgaagaagctgcccgaatcctcggtgtccgggcattgcgcgatgtctcactttatgatttcagtgcgaagcagaaacaattggatactctgcttgccaaacgtgcccgccatgttgtcactgaaaatgcccggactcaggctgctgttgctgctttaaggtcaggagatttatcccgcctcagccagcttatggctgaatctcacctctctatgcgtgacgattttgaaattaccgtccatgaaatagatgtgctggtggagagtgtgaaaaatgttattggagagcggggaggagcccgcatgacgggaggtggttttggcggttgtatcattgtattgcttccctctgatttggtaagcgatgtgagacaggccatcaaaagtgaataccagataaaaactgggctgcaagcgtctatttacatttgtcaggcaagcaggggagcaagccagttgataaatcaggcataaatggctggcttttatttttggttaacttatattcaggttgaatctgggcatgagtaaacatttatcttatttttttataaagaggagtgttgtcttgaatagcaatctgcaatacgaagaattacaacaacaatggtcatcagttgatagttatctaaagaagagcctgttacatcctgcatctcatctcgaacaaacccttgaatataacgccagtcagggattacctgccattgatgtttccgccctgcaagggcagtttttgatgatgatggttcagatcagcggagcaaaacgcattctcgaaatcggcacgttaggtggctatagtgcccaatatatggccaaagcgttacccgatgatggtttactcatcacgctggaaaaaaatcccaaaatggtacagatcgcacggcgtaatatcgaattggctcaactcactaataagattgaagttatcgagggagatgccaatgagactttaccaacgttgagtgaaagagcacctttcgatctgatttttattgatgccgataaacggagtagccagatttatctcgattgggcaattaaactgggtcgtccgggcagtattatcatcatggataatgtcgttcgtggcggtgcagttatccatgatcagcgtgatgagttcgctgaaggtattcatcagacattggataagatacttaatcgtccggaaatcaccgtaactgctttgcagacggtgggggaaaaaggctgggatggatttgcattgttacggataaatgatgacgtgaattaatgctggcagggtaaaacccttgttatattccctttggtagatccctgctggtggcaccgtcaggcgtatttcagccagagatctaccgagaattatatctgtcgtctttcaggctgtattaaagaggcaacctgaaatccattggtcgctggcacttcttcaactccggattttatggattttttcctctgtatttggtccattaattactttggcttcccttgctgactggcatgtcttacgttcatttgactcacgatctttaatcactttctccgtttcatctacagtaggaagtgaaaaccccatatcatcataggccccgaaaccagcaagatggtaactactgaatggagcatccacaggaatacggaattcctttttttctcccggagccagtgaatcaaatgaatacacaatgagtgattgcgggtcgcaggttgtattaaggggtaaaatagccagatatccaccagccacaggttcatctccctgattttgcattgttcctccgacgaagaattgtccttttgctcccaatcccatgtggaataacagatgtgcttctccttgtgcccgcagtaccgggctgaaaaagctacttatcattaatatcaataatattctgcgtgaataattaccccatttcattgtctctcctccttttctaaatgattgtattctggctcagtgaattgcctatattactgattggatggtggtgtcagagatatacactttgctgttttttttacatcttcagagtctgcatcctgaggttcattgagcagttttttgaattgttcaggatccagcagggcgatatagctgattaaataatggttgcatctcagactgtcagtgatattgaggccatccgatgttttaaggatcgttgattttgacagggattcatactccagtatgaatggaatgtcaggaggcagatgaggcaccagatcattttcatatctgaatgtttcatagtttgcaaaatggttatcgatatagctaacaaattcatggttaccggctcttgggctggcaaacaggcttgctttgtgtttatcgccaagcaggggaatatctctcataagataggtcgcaatgactgcgccaaggctatgacccaatatagtatatgcagtattgataccgatgaattgagcaacagcattgggaaatctgaggtggctgtaattatctttagattcaggctcaacaatagtcagtttcagtgaattataaacactataaaaccccatactgactttttgttgaggagtatcagcccacggtgaggtgaaaacaggaacaatatcatgtaatgcttcaaacagattggaactgtcggtacccctgataacaatgacatactctgccggcgtttttttattcttagcaatatatccataacaaacatggttaggcagcataattaaaaattgctgattatttttggggtttacggaaaaagagagatcattaccactaatataggctaccagatcccagccatcttctgttaagcgcgggtctgcggggggagtcggattattgtaatactgactgttcatctctgttgcatacagtatcaatgatgcctgttgagcttctttggttaacatattgttatacattattattaactcctcttgataccgcttgtctttcaggtggccttttcgctgtgtcgtcccttttcttccgccgaggcgcaactggaaatccagcgggtatattattattgactgtgtgtatctgtcattcttgttgtactgcaatatcaaattttatcagcataaaaaataaagaaagtataatttaagcgtatatcatcctgtcagaatttctgagaatttctgagaatttctgagaatttctgagaatttgagtcattgatatagcagttcagttgacagtcggtattagaaagtacttgctattgttcaatatcgaattaagtaattacttttagttatatgtagttttgatttgttctttttaatctgttatctaacggcgttattcttcacggatctataagtcttactttcaaatattactgaatattaagaggctaatatgtctgcaccacgttcggttctggagttgatcgggaatacaccgttgctggaactgacccatctggatactggcccatgccaactcttcattaagctggagaaccagaatccgggcggttctattaaagacagagttgcactctcaatgattgaacaggcagaaaaacaggggctactgaaacccggtggcactatcattgaagcaacggctggtaataccggtattgggttagcactggttgctgccatgaaaggttataagctgatactggttgtaccggataagatgagcagggaaaaaatatatcacctgagagcattgggaacggatgtccgtctgacccgttctgatgtgggtaagggccatccggaatattatcaggattatgcgttgcgtctgtcgaaggaaatcagtggcgcgtattatattgatcagtttaataattcatctaattcactggctcacatgacaacgaccggccctgaaatatggcagcagatggaacacgatgtagatgctgttgttgttggtgtgggttcaggcggaacgcttggcggtttaagccagtatttccgggaagtttctcccgatacccgatttattcttgctgatcctaaaggctctattcttgctgattatgttgaatacggtcattacgatgaagcaggaagctggttcgttgaagggatcggcgaggattttatcccaccgctgggggatttttctaacattagtcatgcttaccggatcaccgatgccgaagccttttcctgtgcaagggagctacttttacaggaaggtgttcttgttggttcatcttcaggcacgttactggctgcggctttacgctattgccgggcacagaaaacaccaaagcgtgtggtgacactggcttgtgatagcggcaataaatatttatccaaaatgttcaatgactactggttactggaacaagggctgcgttcacaacaaaaagaaaatgatttaagtgattatgtgacatatcgctaccgggatggtgcgacagtttttgtttctccacaggataccctacagattgcacatgggcgaatgcggttgtatgacatttcgcaactccctgtactcgataatgaccagattgtcggcattattgatgagtgggacttgatgaatgccattcaggctgattctcataatttctctttgtcagtcagtcaggccatgaccagtcaggttaagactctccataaaaatgcaccactggagcaactggttgcaacttttgatgcgggtcatgtggcgctgattgttgatgataataaacactttattggccttgttacccgtactgatgtgctgaacgcatggcgtcaacaactcaattaacctatttcaggaataacttaatgactaaatttgatactaaaagcgttcacgccggctatgtccctgaccatacaggggctgtaatgcctgcaatctatgccacatccacttatgcgcaacctgcaccgggtcagcatacgggatacgaatattcccgtagtggcaaccccacgcgtgatgctctggagcgggcgattgctgaactggaaaatggcagccgaggttatgcatttggctcgggtttagcagccagttcgacgattctggaattactggataaagacagccacatcgttgctgtggatgatctgtatggcggtacttaccgattactggaaaaagtgcgtcgccggactgccggattgcgtgtcacctatgtcgaagcgggagatactgcggcactggaagcggctatccagcctgatacaaaaatgatttgggtggaaacgccaaccaatccattgcttaaactggcagatttggccaccattgctcagatagcacaacaccataagattatcagtgttgcggataatacgtttgcttctccttatatccagcgcccactggatttagggtttgatattgttgttcactctgcaactaaatacctgaatggccattccgatgttgttgccggccttgcggtagtgggaaacaatgctgaactggctgagcagcttgctttcctgcaaaactcaattggcgggatccttgaccctttcagtagttttcttgtcttacgcggtattcggacactatcactgcgtatggagcgacatatcagcaatgcagaaaaaattgcccactggctggaacagcagccacaaatagaaaaagtcttttatcccggtcttgattcccatcctcagcatgagctggcgaagcgtcagatgaaaggtgctggtggcatgatttctattgtgctgaaagggaatgatgatgctactcatcggatgataaaagcactgaaactattcacactggcagaaagtctgggtggcgtagaaagtctggtggggcagccatttactatgactcatgcatctattccattggaaaaacgtttagtggcaggcattacaccacaattaatccgtctttcagtgggtattgagaatgtcgatgatttgattgccgatttaacgcaggcgcttagcgcagcaaatctgtcaatctgaaatatacacttcgtctttcaagttacctctttgttggctacgctcgttcaccccagtcacatagttatctatgctcctgggggttctctctcttgccgccgcgacgcaccttgaaattcattatgtataaaatgccagcccggttttcgggttggcatttttgtgtgtatttttatttctatacagactcagttttgccagctatttctatagcatggcctactcgtagtactgttgcatcatccattgcccggccaatcacttgtacaccgataggcaggccttgtttatcttttgctacaggcagtgttaaggccggtagccccgtgatattggccggaatgcatagacgaagataggcatttgtgacgttttcctcagaattgtcagaccagataaacgattcctgcccgacgagcgcagctgtctcagggactgtgggcgtgagtaagatatcgatatcattaaataacgcattccactgctggcatatcatccgtctggctcgttgtgctttcagataatctccggcaggtaataactgtcctgtttcaaagaaagtcctcacatcatccccatacagtgatgcagacttacgtaaagtacgagaatgtattgaagccgcttcagccactgtgatgccccactgggttggcataagataatctgtcagagggatgttgactgtcgtgacttcggctccttgctgtttaaggcgttctgcggtctgttttactgccgctatcactgattcagcaacctgatcaaaataatagttttgcggaatgccaatccgtaatcctttaatttcctgtttagagaaatctgcataatttgtatctggtacctgacggcttgccgggtcacgtccatcaaaacccgttaatgcctgtaatactaatccggcaacttcaactgttcgggtcattggcccggcatgatccagtgaccatgctagtggcgtaacaccataacaggaaactaatccataagtcggtttaaagccgacaattccgcacagtgccgctggtattctgatagaaccaccggtatctgttcccattgctgccaataccccgccgtaggctaccgcagcagcagagccaccactggagccgccaacgatacgacgagtatcaagaggattacgtgtttgtggagtaatgacaccaaatgcgaattcgtgagtatgggttttccccagtaagatggctcccgcacgatgtaaagcatcagttaccgcactgttggactgggcaatatgttctgcccgcactttagaactggctgtggtcggtttaccggcgacatcgaacaggtcttttaatgccagagggatcccatgtaacggcccgcgatattttccctgactgatttcacgttctgcctgtttggcctgttcccgtgcttcttccgcccagacagagacaaaagcattaatttctggctctgctatttctatattggcaagggcggcatcaaccagttctaccggagataatgtctgtgcagcaatcgcttgactagcttgagaaatagtcaggtttttcaggtcgatcatatttttctttcctctccggcattgaaagtcggtgccggaatatcagcatcatccatcggcagttcatctaatcgggcgattgacgtacggatatgatgtagtgctcctgcaatatactgtgctcgctctgcatccagtatcaggccgacactagctgccagtatttgtgtttcttccgcagataaaggatcaggtactgttatattcatattatttccttaacggtattgagatatttttattcaatattgtcagtagaatagccagtaaaaccagagctataatgactgctccgtagacattgaccgcaaccagcaaacctgactgatgtgcaagataaccgatagcaactgtaggaacactgttggcaaggtaactttcaatataaaaagcgcccatcagaccgcctctttcatgaggctcagccagtggtaatacagttcttatcgcaccaagaaaggttgcaccaaagccgaacccagtgataactgagcctgtcagcaatagcatgacatattcccgatttgcagccagtaggatcagtaataaccctgttgctaaagcgagttcacctgataacagagtcataaatgaggttagtttacgtgcggcgatgattgcaaccgcaccactgagcgttaatgctgcgactgaaagtcctcccatccatggtgatgttgtgtgagttgttgcaacaatcagtgatggcatgagagataagtagaatccaccgatcatccacacagcaaaattggccggggtgattgcccgtaacgcattgcgggcctgtacgggcaccataatgcggggacgcaggctttcccatgctcccgaacgacgttgtacagtttcaggagccagtcgggtaaaaattaataccaccaaaaacacaatcagtaataagacatatatggtgtggagtgggccgggagcaaataccagcaatgtggtactgcctaatgcaccggcagccatacccagcatcggtgcaatactgttaatcagcgccccgcgttctctgttcatatccaacagagcagctcctacagaagccgtcgccaagccggttgcaagcccttgtataatgcgtgcacctaccagccatgcgggatccgaggccagtaaaaaagtactcattgatatgatttgtaacaataaggctaaactgatcaccggtcgtcgccctatatgatctgataagcgcccagctatcaataaagccagcaacagggctagtgcataggcggcaaaaattaccgtcagtaacgttgagctgaacccccattcatgctggtaaatacgataaagtggcgtaggtgcactggatgccgctaagaacgccattagtgtgatggcatgaagtaccgtcgcggcctgataagacatccgattgttatgagattgtgggcaagaatcaggtgtgttatttgacataacaactccataaaagcaaaatgttagctttaatgatgctacaagaattatctcactaacgcaatttttttgctttagtgggtttgtgtgaatagtgacagaagtaggagcagagaaagaaatgactcacagagcagcaccgcgtcccggtggtcgtagtgcccgcgtgcaggcggctgtccatcaggctgtgcgggaattacaacaagaactttcccgtactgaactgactgtgcccgcgattgctgcccgtgcaggtgtgacaccatcaactatttatcgccgctggggtgatttgtcacaattactggcagatgtggcggttgaagagctacggccggatcactctcctgctgaaacaggttcatttcgcacagatcttctgacatggcttgagcaatactttgaagagatgtcatctgaacccggtcgggcaatgttaagagatgtactgggtacgccgggccatgaatatgcaggtaagtgtgatggatgtatacgccagcaaatagaggcaatctgtcagcgggcactggaaaaaggcgaaaagccaatttctgttgatttgattatttcgggtgttgttgcaccgttaatgtatcgcatcctgtttgcaaatgaatcccctacaagtgaacagatacacacatttttcgaacagttggaagcaaggtaaagcgagttatattattcttaacgttccgtgaacaaaggagaatggttatggctgttttagatatactcacaattcctgatgaaagactgaaacagaaatgtgttgatgtcgcccatgttgaagatatccaaacgttggtcgatgatatgctggaaacaatgtatgacacggataatggcattgggctggccgcacctcaggtaggaagaagagaatctgtattagttattgatatttcaccagagcggaatcagcctctggttttaatcaatcctaaaatcgtcgaaaaagaacgtaaggtcgtgaatcaggaaggctgcttatcaattcccggttattatgctgatgtggaacgatttgaaaaagtgaaagtagaagcgctggatcgaaatggtcaggctatcactgtggaaagtgaagattttctttctatcgtgatgcagcatgaaattgaccatctgcacggtattattttcatcgattatttatcgccattaaaaagacaaatggcactaaaaaaagtgaaaaaatatttgagcagcagagtaagttagcgggtaagggtaagtatataggttaatatgctccagtcactatcactatggtgactggaataagcggggatcagaagatagtgaagtttaagtggcaacactaatcagaacctatgaaaaagtgacgggctaataatggcgcggtgaggcttttctttaaataaaaaccacggggaagcgtcataatcggctgtccatattcaccaatagcttctgttaatgcccggctgtttgctgcttttgggcgcaattgcaagatttcaccatgacgggctgtaatactctcaactttgcctaacacgatgagatccatcaattcttcccaatcacatctcaataactcttcttcaaccggatttgggctccagaggagcggagaaccaacacgacgttcagcaagcgggatctctctttctccttcaacaggcacccataaaacacgagacagtttgcgcctgacatggcagttttcccatgtgatgccgctattgccagttaaaggagcaacgcagacaaaagtggtttccagcggcgtgccttttctgtccaccgggattgtttttagttcaacaccaatatgctcaaaatcttgttctggcttacttcccgcacttgcgcccagataatattcaagcaacatgcccacccaacctttgtcccgtttcagattaggcggtatgggaatgcaggcttgggtagccagttctcctaacgttaagcctgccagagactgggctcgtttgaagagttgttgttcgttttctggtggtgctggtggtgtgaattgcatgattataagatatatttagccttgtctaaaaaatgaacacaatggttgtatgatttcattatgagtttatcagtatgcggattaaccagataatgacatgatatacaagatattttaattcttgttcttcgtattaaaaataaactcattatgattgttcacctattcaccgtgataataaacaggatcttacaccatgttatccacagaactatgggataagtgatgaaaattgcgatcactggtttgatttacagccttatctaaggtggttttctacaaaaaccgcgtgtttttgttctctaaagctttagagcac

SEQ ID NO: 3037 - DNA, 24961 bp, Xenorhabdus sp.; identical to SEQ ID NO: 3036
  CDS (22744)..(23298)

SEQ ID NO: 3038 - DNA, 24961 bp, Xenorhabdus sp.; identical to SEQ ID NO: 3036
  CDS (18467)..(19627)

SEQ ID NO: 3039 - DNA, 24961 bp, Xenorhabdus sp.; identical to SEQ ID NO: 3036
  CDS (17076)..(18446)

SEQ ID NO: 3040 - DNA, 24961 bp, Xenorhabdus sp.; identical to SEQ ID NO: 3036
  CDS (14475)..(14990)

SEQ ID NO: 3041 - DNA, 24961 bp, Xenorhabdus sp.; identical to SEQ ID NO: 3036
  CDS (13046)..(14203)

SEQ ID NO: 3042 - DNA, 24961 bp, Xenorhabdus sp.; identical to SEQ ID NO: 3036
  CDS (11961)..(13004)

SEQ ID NO: 3043 - DNA, 24961 bp, Xenorhabdus sp.; identical to SEQ ID NO: 3036
  CDS (10804)..(11823)

SEQ ID NO: 3044 - DNA, 24961 bp, Xenorhabdus sp.; identical to SEQ ID NO: 3036
  CDS (9070)..(9636)

SEQ ID NO: 3045 - DNA, 24961 bp, Xenorhabdus sp.; identical to SEQ ID NO: 3036
  CDS (7748)..(9058)

SEQ ID NO: 3046 - DNA, 24961 bp, Xenorhabdus sp.; identical to SEQ ID NO: 3036
  CDS (6332)..(6694)

SEQ ID NO: 3047 - DNA, 24961 bp, Xenorhabdus sp.; identical to SEQ ID NO: 3036
  CDS (4786)..(6105)

SEQ ID NO: 3048 - DNA, 24961 bp, Xenorhabdus sp.; identical to SEQ ID NO: 3036
  CDS (2850)..(3518)

SEQ ID NO: 3049 - DNA, 24961 bp, Xenorhabdus sp.; identical to SEQ ID NO: 3036
  CDS (2177)..(2662)

SEQ ID NO: 3050 - DNA, 24961 bp, Xenorhabdus sp.; identical to SEQ ID NO: 3036
  CDS (1022)..(1942)

SEQ ID NO: 3051 - DNA, 508 bp, Xenorhabdus sp.
  CDS (1)..(504)
ttgcccgctagctgtgttgctaaaaatagttttattaaaccctgtgttgataaccaggcaattgctggcgcttttgccagagcggcttcgcgctatgatgccacggcgaaactacagcaacaaacaggtgaatatctgatgaaaatggcacagccagaagataccggtaattgggtattggatgctggctgtgggacgggttttttcagcgaacactggaaacagaagggtaaacaggttatcgcactggatctgtctgccggtatgttaagccatgccaaagggttacaggttgctgattattatctgcaaggtgacattgagaacctggggctggctgataacagtgtcgatgtctgtttcagtaacttagcggtgcagtggtgtaatgaactgccacgagtattgcaggagttccatcgcgtaacccgtcccggcgggcttatcttattttccaccttagcacaggggtcactctgggagctggaagcagcatgcctttagggcc

SEQ ID NO: 3052 - DNA, 22680 bp, Xenorhabdus sp.
  CDS (3)..(305)
tcaaaacccaaagggataagacacaggcgcagttagagaaagctacagcgggcatgatagaaggtatctatggtgcgggacgatggtttgagcaccaaaagaaaactttagagcgaacagtggagttgattcgacttcttgagtctgatgatattgaagacggtgcggtaattcgtttacgcaacgatcaagagtttagcccgctaaaacgcgaaatggctgcaaaaattgcgcaaccgaaagtagagtctgacagatcggataaagatgaaatgagggcttggctgggaggtgattttggctaagcacttaacaggcctggatctagaaaagattcttgggattcttgacggttggcacggtaaactgacatgggacagtctttgtgacgtagtcatgaagcatataggcaagcgtccaacgaggcagtcactgaatgccaataaacaaattaaacaggcttttctggataaaaaggccaggctaaaaggtgacttcttggaaataaagacgccaccgtctttaacgatagctggccagcgtattgagcgccttgaggaagtgaatgctcgactaaaagccgaaaatgctagacttcttgagcaatatattgtttggcagtataacgcatatcggcatggtttatctgaagaaaagctgaatgtaccgttacccgtcatagatagagaaagctccaactagatattcacggtatcattttctggtgttgcatagttacctgatagtaggtttagttgctcatattgatgacaccggattgatttatgcaagtccaacattcatcaaaattagtgtttcaaaaacgagagtgaatatagactcgtaaactattttttatttattttaaagttaaatgcttcactaaaaacagtgaatatcaaattaatattttttcataataatcaatggataacggtaaaattttattgataataattatcgatatcattattataagaatctccacttaaagtgaagtggaagttctttaacctttaataaggaaacagttatgccagtttttccatctcattttacgccatctggccctatgtcacctataacaactaggccttggtcaccgatgccatctggacctatgtcgccaataacatctggacattcatatggaaccattggggcctacgatgtcatgtacagtcaaaatggtagaggaggtctagggacaaacttcaaccggcccgactcggacatacagccatttcgtgattctataacaataaagatagcaccatcaggaacggaatacacaaatgcagcaggggtagttagtaaatcaacttttggacatgcatgggttgagtttcagcgagaatctatcggatggggattaggtgatgacaaaaaagtcggaggagttgataacctaacatttagagactctatggcatacgatccatcaaaggtagtcagtgtctcatatccattatattcagacggtgttgttggtcatatagagagatacatttctgagctgaaaagtaatgattttgaaggccacgcgcgtggaacaggtttcaaaaaagattataatctctttactaataactgtatagattttgtaaattctattttagagctcactgagtatgatagtgatgtagattggcttgattatattccaccattacaggggataacgccagatggggtaatacgtattcaagatttagatccaaatatggtgaaggaagttattgaacaacacatttcggaatttgaaaacaaagaaacaccacttgttattgatctcaccggtgatggtattacgactatatcagaaaatggtaacatattttttgaccacgataataatggcattattgaaagctcaggatggatagagtcaaacagtgcatttctggtgtgggataaaaataaagatggaaaaataaataatggcaatgaactgtttgggaataattctatattaaaaaatggaattaaagcagataatggctttactgcattaacagatcttgatgataacggagatggtatttttgaccaacatgatagcctgtgggactcattagagttatgggttgactctaatcatgatgcgataactgacagcggggaattatataaactcagtgaatcagggatttcttctataaatcttgcatataaggaagatggattcaaagatattaacggtaatgttcatgagttggaaagcaccgtgaattggaacaatggaagtgtcactaagatagtggatgtgtattttgctgtgaacaaaaataatatgattgaatcaattacctctcatgttgatatagtaggggtgaatgagacgtttagtgaagctatcttatgattgatttcttttttaaaaataaaaagaacttcattttaaccttgttatttttatcttttacggcgcagagttcgaacatgaacaagcataatatcccatcggctatatttaattacccagaggattttttatcagcattatctatcccgatgcctaaaaatgaaaatgaatactttgagttagtaaataaagcaaacgctggagaccaagaagcaaattggatgctggccgtaatacaacacactgtgggtcattatcgggaggccagtgaaagatatcatttatctatttctaggaatgataaatacaagccagagtccatgattaatttaggatttatttttgaaaaggaaaataaattcgctgaagctcggtctctttttgaactggctggagaaagtggccattttgaaggttaccgcactattggaactaattatttaaatggaattggcgtaagccaagactttaataaggcgaaggaatattataagaaagcaagtcaacttggatgtaatgaatgctcgcgattcattaacaattgggatgatattgttaaattaaaaaaatcaggaaaataaatttccatatgaaataaatggcgtaatttgatttcatgaaaatcatctgaaaatacggtggctaaaattttcttcttgagaaaagaaggaaatgatggtcgccgtatgataaataattcgttgagttaacagtgtattattatttgttttttttgttaattagaattaatggatttttaaataggaaaagaagtatggtgagtcattttaagcagcaagagaatgctgcgttaaaaaaaagatggaaaagacatcagattgaattaactcatactcgtttgcataatattttttcaaccatcaaataagtgataattaaggaattattgtgaaattacactttccgaagggtgaaataacggatgttatccgtgcacgcagcaaggtattttggactatcggtttatttacagttttcatcaatcttctgatgctggctccctctatctatatgctgcaagtctatgatcgagtattgccctccagtaatgaaatgactttgctaatgttgacgctgattatccttggcatgtttgccatcatgggcgggctggaatatattcgaagcatggtagtgatacgcattggtaatcaatttgatatgtgcctgaaccaacggatttatactgcttcgtatgaatccaacttaaaaaatggttcaacagatgcagggcagatgctcaatgacttggcgactatccgccagttcctcacagggaatgccctgtttgctttttttgatgccccttggttccctgtttatctgtgtgtcatttttctattcaattcgtacttaggtttgctggcgttggtaggtgctaccattctgatttctctggcggtattgaaccagtggttatccaaagctcctttagctgaagcaagtcagctgtctttacgctcaactaatttggccagtactaatttgcgtaatgccgaagtgatcgaggcacttggcatgttacctgcgctgcgtcatcgttggtttgggttacatgagcgttttctgaattttcaacgtattgccagtgaacgggttgcatccattacagcgttgactaaaacagtgcgtatggctttgcaatcgttgattttgggtttggggggctggctggcgattgaagggcatatcacgccgggcatgatgattgcgggttctattttaatgggacgggcattatctccaattgaacagttgatacaggcgtggaagagctggaatgccgcccgcttgtcatggcagagattggatacgttattgcaagcccaacctgaacgtaaaagtggcatgtcgttgcctcctcctaagggcgcattgttgttagaaaatgtatctgcaatgccccccggaataatacgcttggaacaagatcaggcgtctaaaaatccccattatgttttgcaaaatctcaatttcgctctgaacaacggtgaggttctgggcataattggccccagtgcatctgggaaatctacattagcgcgtttgttggtcggaatttggcctactcaggaaggtatagtgcgtcttgatggggctgatatttaccagtggaataaagatgaattgggagcatccattggttacttgccgcaggatattgagttatttgcgggtaccattgctgagaatatcgcccgttttcatcatgctgatcctgaaaaaatcattgaagcggcaaaaaaagcgggtgttcacgaattggtgcttaatcttgaacagggttatgacacgataattggcgccagtggtgtggggttatcgggtgggcaaaaacaacgtattggactggctcgtgctttatatggcaatccgtcgcttgtggtattggatgaacccaactcaaatctggatgatcttggcgaaaaagcgttaaaccgtgcgattattcaattacgggatcagggaaaaacagtggtgattatcactcatcgtccttcacttctctcacaaacgagtaaaattttgtttctagtacagggaaaaatgaaaatgtttggtgcttcccagcaagttatggcggcattatctcaatctaagccttcagcacaacaatcttcattacaacaacagccaaaaacggtcaaacatgtttcataacaaggtccaaccctattgtcattcttgggctatttctatctgggagtaaagatgtcctatcagaccaacgtaaaagaggcccaacacgaggcgtcaggattattgccgctggatgctaatcgttacctgcaaataggctggctgattattggcattggcattctaggtttttttatctgggcagcatttgctcctcttgataaaggggtggcgtcctctggtattgtcgtggtggatggcaaccgtaaaacggtgcaatctccagtgaatggcattatcaggcagattcaggtcaaagaaggggaacacgtcagggcggggcagattttaattcagctcagtcaggtacaggccaatgcacaaattgattctctcagacaacagctctacaccacgcaggcaacggaagcccgattattggctgaacagcaaggtgaggaatcgattgtttttccggccactttactgacttcccaatcagaaccccgtattcacgatatcctgacgttgcagaaacagcttttcttgtcacgtcgagaaatgctgcaaagtgatcttgcgggaatgcagcaggctgaagaggggatagattttcagattaaagggctgagggaagcgttgatgagcaaacagcaacaacaggcttcaatcaaagaacaagtggcaaatttacgacctttgacagaagaaggatactttccccgtaaccgttatctggaattactgcgtaatcaaagtgaattaagtggcagcatggccgagatggcaggacgaatggggcagattgaaaaacagcgacaagaaacgcagcaacgggttatccaacgtcaggcggattaccaacgagaagtacgtacccaactagcagatgtacaagtgctggtgaatgaattgaaaaataagctggaaacggctcagttcgatttgtcgcacactttcattactgctccggtagatggatctgtggttgggttagccgtatttacgcaaggtggcgtagttgcttccggtgaaaagctgatggaaattctgccaacccaaagtgcgcttgaaatagaagcgcgtttaatggtgaatctgattgataaaatcgcagtcgggcaggatgttgatttgatgtttaccgctttcaatcaaagtctaacaccgaaagttacgggaaatgtgactgtggtttctgctgaccgtttggtggataacatcacaagagagccttattaccaaatgcgagtgagagtaaccccagaaggcatggagaaactggtgggattgaatatgaaacccggaatgcccgttgaagtcttcgttaaaacaggggcacgttctctattgagttacctgttcaagccgttgatggatagagcatccacgtcgctgactgaggagtaatagagatgttgaaatatctcagaattgccaatagacgtattttgttatttcctctttgttcagcaatgttattaatagggatatcaattttttctggttcttcctgtgcgctttctttgacagaggcttatgcgctggcattacagaatgatccagcatttcagatggccatcaaagagtgggaagcaggacaagaagagaataatcttgggctggcagaattgttgcctaagttatcattcagttaccagaatgcgcctaaaaactggcagaaaatggaatctcattctgaaaatcggttgggaaaacgcatcaaagaagagcgtgagcagcaatatagtagctacaatagcgcgattattttgactcaaccgttaattgatttcgaagcatgggcacgttatcaaacacgtcaatcatatgccctaataagtgatgcccgttttcgggcggacagccagcaattggcggtcagagtcatcaacagttatatcgcagtggcttacgcacaagacaggctggcgcaaatgactcagcaacgtatcgcttatgaggagcaactgaaacacaatcagaaattattttcttctggtgagggaacccgtactgatgtggcggaaactcaggcacgctacagtcaggtttttgcaaatgaattaaccgtgaaggatgagctggatgcggcaattcgtgacttacagctattagttggcataccactgccaacggatttaccggttaatcgcctatctgacacccccaaattcaaaatcatcaagctggatttaaaaaattatactgactgggaacaattggcgttacgccacaatcctcagttgatggctgcccgccaaaaagttgaagcggcgcaccacgatattgagcgtaatcgttcaggattgctgcctaaagtggaactatacgcctcccataacgaaaataaatccagcagtgataacagcattgatcaaaaataccgaacgaattctgttggcttacgtgtttccatgaacctctataatggtggaggcacctcagctgcattacgtcaatcggtagcaaattatggcagaaccaagtatgagatggatgctcagtctggcaatattctgaattctttacggaaaaattataatgcctgtagtaatagtgaaaaacggatacaagcctatgaaacaggggtaaaagcagcattattacaagtctcttctacacgaaaaagcgtgctgctggggcaacgagtgaatgtcgatattctcaatgccgaacagctgctctatactgcccgccaagatctatctcaggccaaatatgactatatcaaagcttggattggattattgagtgaatcaggtcaactgaatgacgaacacattaagttaatcacccattattttggttgaggccactttttggaaaaacgctaagccttttgttgaccacaacacatgtacacatactggtaagttgtcctacgaccttagcgccctcagaaattatgaggcgaataaaaggaagggcaataagcaagttgtttgaagagtttgttctcctgaaaaagcgttactaaggtcagcatttttggggaagaggctatttttgtgcgacggtaggccagtgaacggaagagatgataacaacctatttggtgcatgattgtgaatctaacccgaatgatcacttcaggttggatacctgacacatcgttcagccgatgcgtatctggactttcagtccgttaatcgctaacccaccgactttagtcggtggttgctgagttacaaatcaggtgcgctcaggggaacttacctttagcgcaaattactaaaacgatcaagttaactcagctccctgtggtggatcgttgaggtcatcgcataactcttcattaagcgaacgtatctcgtcatgatcaatgagtgaaagcaattgctcaacagtctttctgccacgaggtacacgcgtcaaaggcatgatatttacatcctctccggatttattacttttcataaaataccctaaaataattgagaattgactctttgtataggtgcggtcacaagatagtaatacttctaatattttgattattttacttaatttgagctgtttaccagtcagtgatagagactttttagtttaaatgaatatcgacatttcggcatcatcatcaaaagggttaaactggtcatgaaacacagagcattgctcaaaaatccatcactagactaaaaaagtaaagtttttgggtaaaatgaagtgtgttttttacaaaaacatcaaatttcccattaattttttgaaaaatatacttattttaatttttaataggtaatcagaaccgttttaagggatgccatagagcacttctataaagaagagtatttaacaccccgtttttacggggtttttttatcataatttataaaatatatttattttttgggttgactagggttggctttttgcaagttcattttgtattaatatcaccagccagtaatacgatgccatgtttcctgttccgatgaaccttgcttcagaacctgatattgtaagtgcatggaggcggttgcacaggcatggttaggcaggatacgtaacctcatacctacagggaaatcttctgttttcatgcttgattcggaaggtaatacgatgatgccgtgttcctgattcgtcatcgagacacataaatcagggtaagggtgtccatccagattgcaaacctgcccataaccataatctatcgggccttcagcagtacctcgatctctggacattgccatccatccggcatcaatcagaatccagcctttttctttattatgaccgataaccgttgtcacaacagacatagcaatatcatctaacgtacagactcccacgtttttcatgaccaaatcaaaagtagaaaaaacgccagcccttacttcagtaataccagtcaaatcttcgacatagtgtgcagttggtgtagaacccacactcaaaatcggacaggcaatacccgcttctctgatacgtctggcggcttgcctaacggcatcgcattctgccttcgctgctgccttgagttgttcccccgttcggcatgagtaggaacctcctgcatgagtcagcaggcctgtcagagtggcaccattgccgtcaaccatctttgccagtttaatgagttcattactatctggctggagcccgccccgatggtcgtcacagtcaatttcaataaatacggaaaagatcacactattggcttttgcatattcagctactgctaaggcttgttctggcgtatcaagcaggatgtgaatattgatccctttattaagaagaattgccacacgagccagcttatggggtgcaatacctacagcgtacaaaatattggtgcaacccgctttaacaaagccttctgcttctgccagcgtggaaacggtagcaggggatgaagagtctttcagaagatattttgcggcttcgggagagcgcagggttttcaggtgagggcgtatcttacagccaagaagcccaatatgtttatagagccgatcaatattgcggataaaacgtgattcatcaattaaaaggaaaggagtttcaagtttacttaaccaagctggatttgacatagcatatccccttttataattttcaactaatcaggtatacacttcgtctttcaagttgcctctttgttggctgcgctcgctcaccccagtcacatagttatctatgctcccggggatgaactctcttgccgccgcgatgcatcttgaaatccattgtgtatagaacatatttttataatattataagaaataaaatcttgcacaaattatattcacaaactatcagataatgatatcgactcttctggttattactcgttattctcttttatgtcagtatgtgacttcaatgtcagtgatgattttaaggaaagaaaaaaccaaataaaatatttcataagtatttctagatatattaaatactgaaccattcagagtctatacattttacgggatgttcctatgttatttaggaggcaagtttggagagtatatctgttagtacaaacggttcaatcatcgaaaattcaattatgttcggtcaatttggctggcctgaatatgagcctgatatgacgcttaagggtaatttcatttcgccagaattacgagagttattacttaataagtgttccgtttcaaaatcattaccgaccgaacagtggtggaaagagaaacgaaagaaagatttacctttacatatattagtcagagattatctcaatcatccttctattcagtttaattcaaaaactattttttcatccagtactgaaacgttggaaaagattaaaatcagtattaacgaaaatggaaaagttgatattcttcttcctgttttctgcgttataagtaactggcagaaaagacatgatataacgtccatgacgatggcagaagaggtctctttactacatctggcgaagatttcctcatgtcttgaagaaaatactggagtcagcatacgtttcaacgttctttcagatgctacattttatgccgggatttttggtgatcctatggatgcggcggaaaaatatattcaggatctgaaggagtttacccgagtaagaaagattgacgaaatagtcaatgttattgatatatccgatatagttgggttacttcaggatgattatgatcgggctttatctgaacaaataaaaattttcacattgaatccgtctcttggtattagccatgaagaagccattcgttttaatgcgagtgttggaagtactgtgaatatttcagatctctctttaacatataatcaaaaaaaatcgatattttgtgattccatttttcctgatcaggctataaagcgtgagatcatgaatagagttcactcagcttttattcattacagagctatgaaagaatcaatggcgagtattcaatgggaaaaaacattatttcctaatgcaatacgagctactattcaccataaaacaatacctgtaattggggtaagaatatatcccggttataagagttactcaccttatcttccttatcatggtattgcagttattgaaaacagaaataatatttttagaatgaaagttgaacaagaaattcaccagcatgataaacgagtaagaattgttaatagcaaaggtgtgagtgatttttatatagatgctgatatattagagaatatatcagacttactctatgaatagagccttagcgaaagtacagtaatattgtgatattgctatttgatatataaatattgatacctttaagatttgagtaataattcaatatcgatttatgtccttcatcttaagttatacgctgctatagccggaaagatgaagggcatatctgcttgtatctcctatagaggctcatccatgcgtaatttcagcttaattattttggggaatatcgcattagaaagttcaatgccattgctttttgccgttggcgggctggccggtctgtatcttgctccgttttcctggttggcaacattgccgattgtggtacaaatggctgctggtactgtctgttccattccattttcaaacttaatggcgcgctacagccgtagagccggatttattctggctggtatcacaatgatattgggtggatttatttcagcgatttctatttatttaggtagttttattcttttgctcggagggcattttttgattggtatttctatggtcggtgtcaatttcctgcgatatgctgctgctgaaagtgtccctaaaaaccgagctgcaaccgcaagttctatattactggcttcaggaataattggtgtcatcattggtagcgaactctacggaaaagaaaataatctgaggtttgagcttccatttgtcggaatatatttgattatttctgctattggcgggtgtgccgctttggctttcagcctacttcatggaggatttaggcactcaatttatcaaatagattctgatgttagtaaaacatcaggatttgcgttcattatttccaatcacgctttattttttggaattgtggcaatggtgctgggccatgcaattatgattatagtgatgtcagctgcctcaattgcttctgccggctatgggctgggaaattcagaaaccggtatgttaattggtgctcatcttgtcgccatgtttgctcccggtattatcaccggtatgctgatatcaagaatgggagcaaatcgcattattttgttaggagcgatccttaatctggctgggttcctgacaggactcattagtgaaacaaatatgataattcttggagtccctctcatctttgctggtttagggtggaattttatgtttcttgggggaacacatatcatcaacggaatgtctgatggtatggataaagtgcgtgttcaaggagcgagggaaactttattagccttcgtatcaatggtatttgcgtttgcatctggagggatctacgtgctacttggttggatggggctgatttttgttgtgacaataatgacgctactgactatagcattactttttattcatgcatatttgatgccgaatatcgttgataaatctgtctgattttttatgcggatatagttttctcacatttatattcagctgatgttaattttgctgaacatatgcgaaccagaacgcattttttaaactttctctcttatctatttgcttttactggaagagtctttatattctttgttcaccgaataaccagaaggtatcattactttccctgataaaaaaggaggtttctgatgtttgtgcagcgtttctttaacgctcgcttatttggcgacagaagcttgctcaagagtttgtggcatacgctgcgataatctcagtttgagcgaaaaattttgattactgctctaaagcagtaaattgatagttagtgttatcttcactcaagctcgaagaattattgtcagcacctgacaacggtgttttgcacccaaaattcttgagtttatctatgagtacttatttatttgcacaatcgctttctattgctttttcttcatcttctttgtttgagggcgtgacgtttacactgaataaaggtgacaagatagggctgattggccataacggctgtggcaaaagcaccctgatgaaattacttagcggtaatctggaagattacggcggtcagatgacggttgcgaatcagtgtgtactggcctatgtcgaacagcatctccctttatctctgcatgatgcgacgctgatcgaagccattgccgaaaaaattaaggttgatgaaatttggcgggcagaacttctgttatctgaactgggtttttcccaacaggattggcagacacctatcgggaatctcagtggcggtcagcatatgcgtttgttgcttggccgtgcggtgatccaacaaccggacttgctgttactggatgagccgagtaaccatctagatttaacctcccttttatggctggaatcttttctaactcagtggaaaggatcgtttgttgtggtgtcgcatgatcaaacgttgttggataaggtgacgaatacaacttggataatgcgggataaaaccctgcatcattttggcatggcttgttcgcaggcaaggcaggctctgctagagcgtgatcaggctgatctgcaacgtcatgccagcgagcaaaaagagatagacaggctggaacaaagtgccgaacggctggcggtatggggaaaagtttatgacaaccccgatctttcccgtaaagcgaagacaatgcaagcacgtaagcagcgtcttgctgagcagcaaaccaaactgacacagggtacaccgtggaggctgactctacagggagattcattaccggctaaccggttactgaatatcgaacaaatggctgttatgcctttaggaactgatgttgttctgtttaatgtgctgtcaaagcagatcaaaagtggcgacagagtagctattctgggtaataacggaagtggaaaatccactttattaaaagctttgcatcaggagtatctggaaaagacattgcagaatgtggattaccacccacagtgtcggcttggttactacgatcaatcgctggagcagattcaggatgatgacacactgagcgatgcgctacttcgttttgcaccaaccattgatgatcagcgtaagcgggcacttatcagtgcaggttttgaatataagcgacatcaacagaaggtggcatcactgagtggtggtgagcgagcccgcttattattcgtgggtttgacgctggcacgttaccatctgttgctgcttgatgagccaactaaccatcttgatttggaaggcaaagaagaactctttgacactctgaaagagtacaaaggtggggccttgattgtcagccatgacagaagtcttatcgaacaaagttgcaatcgtttttggctgattagcgatggtgaattagccgaatatcacaatgtcgaagagatctatgctttgcttgaacgcgggaatagttcatttaaacctcaacagcagtgtattgatcgtaaacaacaaaaaacaacagcatcgggatggaatgaagaagttttgttgcaacgtctgattgagctggagcgacttttgcaggaagatttaaacagaaaatcgaaacatcagaagccagctttacaggaaaagtggcggcaggagattgaagtgataaacagacagctttaattagctgtatctgaccgtcattaattttgctttgatggcggtcagattatttcaaacaaattctaagtcttcagaatgcctgatatcaaaactcttacagaaattcgctgaattcatcggcattcggtagctttatagtctgtttgaaacccgccagttttacttcctgacgtgagagttcaatatctgaaggctgtagcactgagtttccgaaattataaattacagattcctcaccgcggcaaatggcctgatcctgttgttcgctgatctctttaactggctgattaatatggtgataactgctgatagctgcattgccatgttttttcgtcagcatctgcattgtctgttgtggggataaaacaactgcactggcattattaccgccaaaaccttttgagttaataattgtggcacgcatatcattgccctgttcaccagcaaacttgtcctgcattaagatattcaggttggaagcgtgtacatcttcagcaatatggtcgattgtcttaataccgggtatccagccatatcgccaaacccctaatgtgttagctaactgatcgccggcagaggcagaaaaagagtgcccgacgtatgatttaatagcggttacatcccaatggctgagcccaaaaactttcgcgacttcattgagaatatggctttcagtcactctgttttggggagttcctgtaccatgtgcctgaacgtaagaatgctgtaattttccgtccagaatgctgttagtcagggaagccgctttcatcatcgtaatatagttacccactcccggagaagagatggatttcttattcgcatcggcatttacgaaaacatcaggtacagaaccgagaatattagcgccacattgcagagcaagctcatcactcatcagcagtacgaactgtgatgcttcagaaagtgtcagcccgacattagttgagaatgggcggcaggcacgacggttgttgaccgtatcagttccatccagtttacataactgatggtcttctgccatagctcccatagcactgaacccttccagaacttcaggaacgacaggggcttcggcacatccaactaaacaaattttggctttaccctgcctgatatcattaacgccttgcttaaggttatacagaaaactggcgcaggcaccgatattggcagatgtgcttcctatactattgataatatagctgttaataaaagcggctggcatatcgggtaaggaaagcggcaacattttggagctggcacgtaacccgttcagccgattaccgattaatcctgatagtgaaaactgatccacctggcctacagcacagctggcgtaaacagagatttgatcggggtctaccaatgcggatatctcagaccatgatatcccgattgagtttagtaaatctgaagctccatatacggtaagacgcaagccgcgtgggtgatgatgagcatgatataaatctcccatttcaaacccttccggtatttgtccggcactggatacagagagtgaggtataagctggctgtaatagctgaactgagtctttatcagaagtcgtaattattttattaaccggtacattatgtggatcaaaaagtgttatttttctaatgagagtgccatttttcgcctgttcaatctgggaggctgtgacagatccagtatcgctaataatccccatccgatggcataaatcactccatgtgtctttcattactgtgtcattaaggctgtttgatacaatacgtttatatccgtggaatccagaacttcgtcctgccgcattgataccacctaaaccaacaattacaggtaatttactcatcgtgaactccgaaaggttttctttgcagtttagcaattggtgtaaattaatactctgatatattggtcattaaaactgagaatattgccatttggttttattgaaactaaatattaaatattagatccccgttattttttaagttttagctttgttggcagtatcccgaaactccgtaaggaataggtaagaagggtacatgatgtccggagactgggtatgaaaatagcgtttgtcttatatgatagagcattacagagcggaattacgtttgcatcagatatgctgaatagtgccagtagcctgagaagtcatactgcgcagaaaaagcagccacttcgtatgtctgttgtgggaagtgagcagaaaaaccatcaacagacaccgcaaattatgttacatacccaccatactttttcagatcccgttgattttgacttggtttttttgcctcctatgtggggaaatccatttcctgcaatgggaaatagagaggatattttcgcatggctgcgccggcaaaaagataataatgcagttattgttgcaaccggcacaggcgtattctggctggcacaggcgggtttactgaacggaaaaacagcaacaacgcattggtcattttatgacaagcttatttgtggtttcccggatgttaaggttaatcgtaaagctggcattacttataatgataatatttattgtgtcagaagtattaattctcaaacggaattgctggtttaccttatttctcagttttttggtctgaaaattgccagagtgattgagaaacatttcatgcacgaagtttctgactttcagtctgaacccttttttcagatgggggggaatacacaatttaatgaggtggtatcaatagctcagagttatattcagaaaaatatcacttcacccatcaccattaaggaaattgccaattatgctggggtttcggagagaacgctgacacgtaatttcatggcgcagattggcgtttctccgcataaatacatgcttaattaccgtttatcgacggcaaaacagctgttgaaagacaataacctgaatttattgaatgttgcacaattagtcggattcagggatccccattatttcagtaaagtgtttgagaaacattttgaattgacacctgtagcttaccgtaacttggtaaaagcaaaggcgttccgtgccgattagctgaaagactgctttaggcattacattatctcagaatgccttatttttcagcccaagcccctgtaaaccgattgtattgagttctgcggaagtaaatcggttcttccagtttttttcataatgctccggagcaaaatctgccggagatataccctcgtcaagtgctgttgcgacatgatgagcataggccagatttttatcacataacggggctgcgggaatatacatcacatttccccagccttgttgattttcgacaggggcaactgagtgaatcaggtcacaatgccaccagactgagtcaccggcctgtagtgccggaatactgcataatccccgaatgagatgaggatgccattgctctgagatgggaagtgctttaccggggaccacatcacacaattcatcttcgggaacatcattcagcagtggacgcaacaggatgtaggctattgcttcgggaacagggacaacatgcaaaagcccctgaccggtcaatatgtcagacaatgctgtccaaccctgaaatgttctgaaaacagagcatcttgttttatgatcgaattcattcacatcgggacgataggcggcatcccagggatcatattctgcaaatcggttagtaaatatgtttttgaatacgttttgataagcaggcagtaaccagcgttctaaagagccagaatcgatatgagctcccagccctttggaattcgtgcccggaggcttgtgacgaatacggtcaggataaatcatactgacattaggattaaaccaacttactccggttgattcgaatttccacagatgattcaggaaagattgtgccagcgccattctttcactttgtctggcctgcatctgtgcctgcgaccagtaaataggataaatttccgggcgggatgttttaagagtgccgaagtaattatcttttggcccttgataaagacgatcaaattcattgatatcaaggtaatcaagcattgatttatcccattctattgcctgagagtgaggaaaattttgcctgatgactaaacagccccgccgcttgattttctggatggtttcttctgatactttatcttcagccaggtcatgccaatgtagttcaggccaggcactaccgagatttttttcatcttttttagcttcggttaactctttttctatcttgtcacatacctgcaaaaagagcgtttccacatccccgatttgctcgcgcagaattggtttcatctgacgaattttttcacggtaattatcaggaacgctggtgggattcgaaaaggtattcatagcagcctccttagtataaaaatcaatctaacctcgatccataatatagcaatcaggttttagttaatttgtgataaaaattttgagggagtatttaatattttgttttaattgagttatgaaaaatagtttagtgcttatttgataatgaaaaatatagaaattattgccctgtaaatgctcctgtctcttgatcatatttcataggtcaagagacttggacagtaaataaccgtcaaggatggtttgtaacatgaaccatccttcccacagcctttcccatcctactcggccatttcgtttggagtcataccagcccgccagtttgcccaaattaatataggcccaataaacactgggggctgtcttagggagctttttcttctcttgctttgcccacaataacttccacgctaacgggcttaatagcgtttcacaactctgtttctccgcctctgatttattgagtcccacatagcgcaactgatgaacgcgaaccgcaataaacgccaggatcaccaccattttttccagattttctttacattgcatccgcagcgcttcgacctgtgtcccgccacttttccacgctttgtgaaactcttcaatgagccaacgcttttcatagtaatccagaatacgatgagcctcttctttacaggttaccggttctgatgtcattttcagaagacgactgcactaaatgtcaaaagttggcttcactagataacagaagctgtattaacgtgagattcgtaatttatcgagtttcactatgtctcctcgttctatattcaatagattaatttggatgtgctaatgcttgcttatgcaatcaagtttgccggattatacatcattacatttaactaaaatttgagaatgtatacatttcattatcttcttatgcgatatggggttatgttgtgagacagtttttttattgacattagttcatatgggcgtataatgtgcggcaacagagccaatgtcccctcctgatctagcatcagtgacgtcttggccttttttttacctgaaatttataaaatgacccaacctgttgaagtaaaaccatttttcgaatataacgagctcattcagcgtttaactgatagaggtatgttaattaaagactcgcttcgtgcccaacgaaaactaactcaggttgggtattataggttgtcgggttattggcatacgtcaagaagatttgaacgcaatggccgtgacattcggtacttcaacaaatttcaagtaaacacatgctttgaagatatctttgagttctacctgttcgataagcggttgcgaatagagtttaccgatgcattggaaaggatagagatctatctgagaacaatcattgcacatgaaattggtagaatatcacctctagcttacttagaccggaaacagttctcacgtgacgcttttaaggctgatgcaaaaatccattatgatgactggttaaaacatcacaataaattgattgaaggcagcaaagaagaaagtattgatagccatcgggataaaggaaaacctattccaatttgggttgcagctgaggtttggaattttggtaccttatcaaaattctacagcatactatcaggcaaaaaccaagatcttatctgcaataggctagatttagacaaccgtaaagagttagataactggttgataaaccttaatggtatcagaaataggtgtgcgcaccacgctaggctttgtaataaaccaaacccacggactctatccataccaagaaaaggttattttaaccttttggacttgggccagacccagagaagcaaattatatggaatcattgctgttatctggtttttgttaaaaaaaattggtcctagttcaaattggatctgcagagtcgcaggcatcattgaccaaaaacccgatataccaggcttcaatttcaggtctatgggctttcctgaagatggcttcccacgcagattgtttccagaaacaatccaagagttacctattgttaacgaaccatcaccacaagaggagtttgaagcaagggtaaatgcacttctcgcttttagacaagagtttaaccttgaggagacattgtcgaaagaagcagaaagtgttcaaagcttgattgaacaacttacggaattctcttacgaagtggatgaagccataagaaaagcttaacaccttctatacggcgacagcacgtattttatgatgaaataatgctatttccctttttcagcttcaacgtaaaatcaataggttaatgaaaagagaattcgttaaattgctcgtgtagcattattttgagttttgctgggttcggataacttttagtatgggaaacacacattaacagcgtgagaatgagtatttactctacctaacaattttggggcagaagagagccagagcaacctctcggatcggttgcatcgtgatttgaatttggcgagttgaggagtgcgtctaactagtgcataccactctcttgatgtataaggttgtgtagcaaaatctgcaatctcaccattaaagctcttgagcgtggcttgcatgtctgacacatcaaaaccaagcattggaagcagcgagtcgagattcatcttttttgaagagctgaagattccagcaaaccaaactcttcgccattatgatactgaaactgatattttttaggctcattagcaatatcaactaagcgccgtaactctcctgagttaccagcgtaagaaaggtatccagcttgactaaaagggtcgaacttcttaatgtcgcaaaatgctatataagcctttaagacgcttaatttaaccactagagaccatgcattggtttcatttttcttctcttgatcaacccatctttttagcttttgcattttttctaatcgagagggtttagctggggttgtaagccggaatcccagaaaattctgtcatagactaaccgcgtttgtcctttatcccgtccatctgttttattatccgacaacccattaataacgcgcattttcggacattatcttatatgaccacctaacgttcgttttccggacaacacaataatcttctgtagggatattttgaaagaaatagtgacgataaattcactagtctggaggggcgaaatcagagtgacggaatttt

SEQ ID NO: 3053 - DNA, 22680 bp, Xenorhabdus sp.; identical to SEQ ID NO: 3052
  CDS (1727)..(2365)

SEQ ID NO: 3054 - DNA, 22680 bp, Xenorhabdus sp.; identical to SEQ ID NO: 3052
  CDS (3290)..(5047)

SEQ ID NO: 3055 - DNA, 22680 bp, Xenorhabdus sp.; identical to SEQ ID NO: 3052
  CDS (5111)..(6436)

SEQ ID NO: 3056 - DNA, 22680 bp, Xenorhabdus sp.; identical to SEQ ID NO: 3052
  CDS (6544)..(7839)

SEQ ID NO: 3057 - DNA, 22680 bp, Xenorhabdus sp.; identical to SEQ ID NO: 3052
  CDS (12051)..(13061)

SEQ ID NO: 3058 - DNA, 22680 bp, Xenorhabdus sp.; identical to SEQ ID NO: 3052
  CDS (13534)..(15186)

SEQ ID NO: 3059 - DNA, 22680 bp, Xenorhabdus sp.; identical to SEQ ID NO: 3052
  CDS (17378)..(18226)

SEQ ID NO: 3060 - DNA, 22680 bp, Xenorhabdus sp.
  CDS (13087)..(13755)
aaaattccgtcactctgatttcgcccctccagactagtgaatttatcgtcactatttctttcaaaatatccctacagaagattattgtgttgtccggaaaacgaacgttaggtggtcatataagataatgtccgaaaatgcgcgttattaatgggttgtcggataataaaacagatggacgggataaaggacaaacgcggttagtctatgacagaattttctgggattccggcttacaaccccagctaaaccctctcgattagaaaaaatgcaaaagctaaaaagatgggttgatcaagagaagaaaaatgaaaccaatgcatggtctctagtggttaaattaagcgtcttaaaggcttatatagcattttgcgacattaagaagttcgacccttttagtcaagctggatacctttcttacgctggtaactcaggagagttacggcgcttagttgatattgctaatgagcctaaaaaatatcagtttcagtatcataatggcgaagagtttggtttgctggaatcttcagctcttcaaaaaagatgaatctcgactcgctgcttccaatgcttggttttgatgtgtcagacatgcaagccacgctcaagagctttaatggtgagattgcagattttgctacacaaccttatacatcaagagagtggtatgcactagttagacgcactcctcaactcgccaaattcaaatcacgatgcaaccgatccgagaggttgctctggctctcttctgccccaaaattgttaggtagagtaaatactcattctcacgctgttaatgtgtgtttcccatactaaaagttatccgaacccagcaaaactcaaaataatgctacacgagcaatttaacgaattctcttttcattaacctattgattttacgttgaagctgaaaaagggaaatagcattatttcatcataaaatacgtgctgtcgccgtatagaaggtgttaagcttttcttatggcttcatccacttcgtaagagaattccgtaagttgttcaatcaagctttgaacactttctgcttctttcgacaatgtctcctcaaggttaaactcttgtctaaaagcgagaagtgcatttacccttgcttcaaactcctcttgtggtgatggttcgttaacaataggtaactcttggattgtttctggaaacaatctgcgtgggaagccatcttcaggaaagcccatagacctgaaattgaagcctggtatatcgggtttttggtcaatgatgcctgcgactctgcagatccaatttgaactaggaccaattttttttaacaaaaaccagataacagcaatgattccatataatttgcttctctgggtctggcccaagtccaaaaggttaaaataaccttttcttggtatggatagagtccgtgggtttggtttattacaaagcctagcgtggtgcgcacacctatttctgataccattaaggtttatcaaccagttatctaactctttacggttgtctaaatctagcctattgcagataagatcttggtttttgcctgatagtatgctgtagaattttgataaggtaccaaaattccaaacctcagctgcaacccaaattggaataggttttcctttatcccgatggctatcaatactttcttctttgctgccttcaatcaatttattgtgatgttttaaccagtcatcataatggatttttgcatcagccttaaaagcgtcacgtgagaactgtttccggtctaagtaagctagaggtgatattctaccaatttcatgtgcaatgattgttctcagatagatctctatcctttccaatgcatcggtaaactctattcgcaaccgcttatcgaacaggtagaactcaaagatatcttcaaagcatgtgtttacttgaaatttgttgaagtaccgaatgtcacggccattgcgttcaaatcttcttgacgtatgccaataacccgacaacctataatacccaacctgagttagttttcgttgggcacgaagcgagtctttaattaacatacctctatcagttaaacgctgaatgagctcgttatattcgaaaaatggttttacttcaacaggttgggtcattttataaatttcaggtaaaaaaaaggccaagacgtcactgatgctagatcaggaggggacattggctctgttgccgcacattatacgcccatatgaactaatgtcaataaaaaaactgtctcacaacataaccccatatcgcataagaagataatgaaatgtatacattctcaaattttagttaaatgtaatgatgtataatccggcaaacttgattgcataagcaagcattagcacatccaaattaatctattgaatatagaacgaggagacatagtgaaactcgataaattacgaatctcacgttaatacagcttctgttatctagtgaagccaacttttgacatttagtgcagtcgtcttctgaaaatgacatcagaaccggtaacctgtaaagaagaggctcatcgtattctggattactatgaaaagcgttggctcattgaagagtttcacaaagcgtggaaaagtggcgggacacaggtcgaagcgctgcggatgcaatgtaaagaaaatctggaaaaaatggtggtgatcctggcgtttattgcggttcgcgttcatcagttgcgctatgtgggactcaataaatcagaggcggagaaacagagttgtgaaacgctattaagcccgttagcgtggaagttattgtgggcaaagcaagagaagaaaaagctccctaagacagcccccagtgtttattgggcctatattaatttgggcaaactggcgggctggtatgactccaaacgaaatggccgagtaggatgggaaaggctgtgggaaggatggttcatgttacaaaccatccttgacggttatttactgtccaagtctcttgacctatgaaatatgatcaagagacaggagcatttacagggcaataatttctatatttttcattatcaaataagcactaaactatttttcataactcaattaaaacaaaatattaaatactccctcaaaatttttatcacaaattaactaaaacctgattgctatattatggatcgaggttagattgatttttatactaaggaggctgctatgaataccttttcgaatcccaccagcgttcctgataattaccgtgaaaaaattcgtcagatgaaaccaattctgcgcgagcaaatcggggatgtggaaacgctctttttgcaggtatgtgacaagatagaaaaagagttaaccgaagctaaaaaagatgaaaaaaatctcggtagtgcctggcctgaactacattggcatgacctggctgaagataaagtatcagaagaaaccatccagaaaatcaagcggcggggctgtttagtcatcaggcaaaattttcctcactctcaggcaatagaatgggataaatcaatgcttgattaccttgatatcaatgaatttgatcgtctttatcaagggccaaaagataattacttcggcactcttaaaacatcccgcccggaaatttatcctatttactggtcgcaggcacagatgcaggccagacaaagtgaaagaatggcgctggcacaatctttcctgaatcatctgtggaaattcgaatcaaccggagtaagttggtttaatcctaatgtcagtatgatttatcctgaccgtattcgtcacaagcctccgggcacgaattccaaagggctgggagctcatatcgattctggctctttagaacgctggttactgcctgcttatcaaaacgtattcaaaaacatatttactaaccgatttgcagaatatgatccctgggatgccgcctatcgtcccgatgtgaatgaattcgatcataaaacaagatgctctgttttcagaacatttcagggttggacagcattgtctgacatattgaccggtcaggggcttttgcatgttgtccctgttcccgaagcaatagcctacatcctgttgcgtccactgctgaatgatgttcccgaagatgaattgtgtgatgtggtccccggtaaagcacttcccatctcagagcaatggcatcctcatctcattcggggattatgcagtattccggcactacaggccggtgactcagtctggtggcattgtgacctgattcactcagttgcccctgtcgaaaatcaacaaggctggggaaatgtgatgtatattcccgcagccccgttatgtgataaaaatctggcctatgctcatcatgtcgcaacagcacttgacgagggtatatctccggcagattttgctccggagcattatgaaaaaaactggaagaaccgatttacttccgcagaactcaatacaatcggtttacaggggcttgggctgaaaaataaggcattctgagataatgtaatgcctaaagcagtctttcagctaatcggcacggaacgcctttgcttttaccaagttacggtaagctacaggtgtcaattcaaaatgtttctcaaacactttactgaaataatggggatccctgaatccgactaattgtgcaacattcaataaattcaggttattgtctttcaacagctgttttgccgtcgataaacggtaattaagcatgtatttatgcggagaaacgccaatctgcgccatgaaattacgtgtcagcgttctctccgaaaccccagcataattggcaatttccttaatggtgatgggtgaagtgatatttttctgaatataactctgagctattgataccacctcattaaattgtgtattcccccccatctgaaaaaagggttcagactgaaagtcagaaacttcgtgcatgaaatgtttctcaatcactctggcaattttcagaccaaaaaactgagaaataaggtaaaccagcaattccgtttgagaattaatacttctgacacaataaatattatcattataagtaatgccagctttacgattaaccttaacatccgggaaaccacaaataagcttgtcataaaatgaccaatgcgttgttgctgtttttccgttcagtaaacccgcctgtgccagccagaatacgcctgtgccggttgcaacaataactgcattattatctttttgccggcgcagccatgcgaaaatatcctctctatttcccattgcaggaaatggatttccccacataggaggcaaaaaaaccaagtcaaaatcaacgggatctgaaaaagtatggtgggtatgtaacataatttgcggtgtctgttgatggtttttctgctcacttcccacaacagacatacgaagtggctgctttttctgcgcagtatgacttctcaggctactggcactattcagcatatctgatgcaaacgtaattccgctctgtaatgctctatcatataagacaaacgctattttcatacccagtctccggacatcatgtacccttcttacctattccttacggagtttcgggatactgccaacaaagctaaaacttaaaaaataacggggatctaatatttaatatttagtttcaataaaaccaaatggcaatattctcagttttaatgaccaatatatcagagtattaatttacaccaattgctaaactgcaaagaaaacctttcggagttcacgatgagtaaattacctgtaattgttggtttaggtggtatcaatgcggcaggacgaagttctggattccacggatataaacgtattgtatcaaacagccttaatgacacagtaatgaaagacacatggagtgatttatgccatcggatggggattattagcgatactggatctgtcacagcctcccagattgaacaggcgaaaaatggcactctcattagaaaaataacactttttgatccacataatgtaccggttaataaaataattacgacttctgataaagactcagttcagctattacagccagcttatacctcactctctgtatccagtgccggacaaataccggaagggtttgaaatgggagatttatatcatgctcatcatcacccacgcggcttgcgtcttaccgtatatggagcttcagatttactaaactcaatcgggatatcatggtctgagatatccgcattggtagaccccgatcaaatctctgtttacgccagctgtgctgtaggccaggtggatcagttttcactatcaggattaatcggtaatcggctgaacgggttacgtgccagctccaaaatgttgccgctttccttacccgatatgccagccgcttttattaacagctatattatcaatagtataggaagcacatctgccaatatcggtgcctgcgccagttttctgtataaccttaagcaaggcgttaatgatatcaggcagggtaaagccaaaatttgtttagttggatgtgccgaagcccctgtcgttcctgaagttctggaagggttcagtgctatgggagctatggcagaagaccatcagttatgtaaactggatggaactgatacggtcaacaaccgtcgtgcctgccgcccattctcaactaatgtcgggctgacactttctgaagcatcacagttcgtactgctgatgagtgatgagcttgctctgcaatgtggcgctaatattctcggttctgtacctgatgttttcgtaaatgccgatgcgaataagaaatccatctcttctccgggagtgggtaactatattacgatgatgaaagcggcttccctgactaacagcattctggacggaaaattacagcattcttacgttcaggcacatggtacaggaactccccaaaacagagtgactgaaagccatattctcaatgaagtcgcgaaagtttttgggctcagccattgggatgtaaccgctattaaatcatacgtcgggcactctttttctgcctctgccggcgatcagttagctaacacattaggggtttggcgatatggctggatacccggtattaagacaatcgaccatattgctgaagatgtacacgcttccaacctgaatatcttaatgcaggacaagtttgctggtgaacagggcaatgatatgcgtgccacaattattaactcaaaaggttttggcggtaataatgccagtgcagttgttttatccccacaacagacaatgcagatgctgacgaaaaaacatggcaatgcagctatcagcagttatcaccatattaatcagccagttaaagagatcagcgaacaacaggatcaggccatttgccgcggtgaggaatctgtaatttataatttcggaaactcagtgctacagccttcagatattgaactctcacgtcaggaagtaaaactggcgggtttcaaacagactataaagctaccgaatgccgatgaattcagcgaatttctgtaagagttttgatatcaggcattctgaagacttagaatttgtttgaaataatctgaccgccatcaaagcaaaattaatgacggtcagatacagctaattaaagctgtctgtttatcacttcaatctcctgccgccacttttcctgtaaagctggcttctgatgtttcgattttctgtttaaatcttcctgcaaaagtcgctccagctcaatcagacgttgcaacaaaacttcttcattccatcccgatgctgttgttttttgttgtttacgatcaatacactgctgttgaggtttaaatgaactattcccgcgttcaagcaaagcatagatctcttcgacattgtgatattcggctaattcaccatcgctaatcagccaaaaacgattgcaactttgttcgataagacttctgtcatggctgacaatcaaggccccacctttgtactctttcagagtgtcaaagagttcttctttgccttccaaatcaagatggttagttggctcatcaagcagcaacagatggtaacgtgccagcgtcaaacccacgaataataagcgggctcgctcaccaccactcagtgatgccaccttctgttgatgtcgcttatattcaaaacctgcactgataagtgcccgcttacgctgatcatcaatggttggtgcaaaacgaagtagcgcatcgctcagtgtgtcatcatcctgaatctgctccagcgattgatcgtagtaaccaagccgacactgtgggtggtaatccacattctgcaatgtcttttccagatactcctgatgcaaagcttttaataaagtggattttccacttccgttattacccagaatagctactctgtcgccacttttgatctgctttgacagcacattaaacagaacaacatcagttcctaaaggcataacagccatttgttcgatattcagtaaccggttagccggtaatgaatctccctgtagagtcagcctccacggtgtaccctgtgtcagtttggtttgctgctcagcaagacgctgcttacgtgcttgcattgtcttcgctttacgggaaagatcggggttgtcataaacttttccccataccgccagccgttcggcactttgttccagcctgtctatctctttttgctcgctggcatgacgttgcagatcagcctgatcacgctctagcagagcctgccttgcctgcgaacaagccatgccaaaatgatgcagggttttatcccgcattatccaagttgtattcgtcaccttatccaacaacgtttgatcatgcgacaccacaacaaacgatcctttccactgagttagaaaagattccagccataaaagggaggttaaatctagatggttactcggctcatccagtaacagcaagtccggttgttggatcaccgcacggccaagcaacaaacgcatatgctgaccgccactgagattcccgataggtgtctgccaatcctgttgggaaaaacccagttcagataacagaagttctgcccgccaaatttcatcaaccttaattttttcggcaatggcttcgatcagcgtcgcatcatgcagagataaagggagatgctgttcgacataggccagtacacactgattcgcaaccgtcatctgaccgccgtaatcttccagattaccgctaagtaatttcatcagggtgcttttgccacagccgttatggccaatcagccctatcttgtcacctttattcagtgtaaacgtcacgccctcaaacaaagaagatgaagaaaaagcaatagaaagcgattgtgcaaataaataagtactcatagataaactcaagaattttgggtgcaaaacaccgttgtcaggtgctgacaataattcttcgagcttgagtgaagataacactaactatcaatttactgctttagagcagtaatcaaaatttttcgctcaaactgagattatcgcagcgtatgccacaaactcttgagcaagcttctgtcgccaaataagcgagcgttaaagaaacgctgcacaaacatcagaaacctccttttttatcagggaaagtaatgataccttctggttattcggtgaacaaagaatataaagactcttccagtaaaagcaaatagataagagagaaagtttaaaaaatgcgttctggttcgcatatgttcagcaaaattaacatcagctgaatataaatgtgagaaaactatatccgcataaaaaatcagacagatttatcaacgatattcggcatcaaatatgcatgaataaaaagtaatgctatagtcagtagcgtcattattgtcacaacaaaaatcagccccatccaaccaagtagcacgtagatccctccagatgcaaacgcaaataccattgatacgaaggctaataaagtttccctcgctccttgaacacgcactttatccataccatcagacattccgttgatgatatgtgttcccccaagaaacataaaattccaccctaaaccagcaaagatgagagggactccaagaattatcatatttgtttcactaatgagtcctgtcaggaacccagccagattaaggatcgctcctaacaaaataatgcgatttgctcccattcttgatatcagcataccggtgataataccgggagcaaacatggcgacaagatgagcaccaattaacataccggtttctgaatttcccagcccatagccggcagaagcaattgaggcagctgacatcactataatcataattgcatggcccagcaccattgccacaattccaaaaaataaagcgtgattggaaataatgaacgcaaatcctgatgttttactaacatcagaatctatttgataaattgagtgcctaaatcctccatgaagtaggctgaaagccaaagcggcacacccgccaatagcagaaataatcaaatatattccgacaaatggaagctcaaacctcagattattttcttttccgtagagttcgctaccaatgatgacaccaattattcctgaagccagtaatatagaacttgcggttgcagctcggtttttagggacactttcagcagcagcatatcgcaggaaattgacaccgaccatagaaataccaatcaaaaaatgccctccgagcaaaagaataaaactacctaaataaatagaaatcgctgaaataaatccacccaatatcattgtgataccagccagaataaatccggctctacggctgtagcgcgccattaagtttgaaaatggaatggaacagacagtaccagcagccatttgtaccacaatcggcaatgttgccaaccaggaaaacggagcaagatacagaccggccagcccgccaacggcaaaaagcaatggcattgaactttctaatgcgatattccccaaaataattaagctgaaattacgcatggatgagcctctataggagatacaagcagatatgcccttcatctttccggctatagcagcgtataacttaagatgaaggacataaatcgatattgaattattactcaaatcttaaaggtatcaatatttatatatcaaatagcaatatcacaatattactgtactttcgctaaggctctattcatagagtaagtctgatatattctctaatatatcagcatctatataaaaatcactcacacctttgctattaacaattcttactcgtttatcatgctggtgaatttcttgttcaactttcattctaaaaatattatttctgttttcaataactgcaataccatgataaggaagataaggtgagtaactcttataaccgggatatattcttaccccaattacaggtattgttttatggtgaatagtagctcgtattgcattaggaaataatgttttttcccattgaatactcgccattgattctttcatagctctgtaatgaataaaagctgagtgaactctattcatgatctcacgctttatagcctgatcaggaaaaatggaatcacaaaatatcgattttttttgattatatgttaaagagagatctgaaatattcacagtacttccaacactcgcattaaaacgaatggcttcttcatggctaataccaagagacggattcaatgtgaaaatttttatttgttcagataaagcccgatcataatcatcctgaagtaacccaactatatcggatatatcaataacattgactatttcgtcaatctttcttactcgggtaaactccttcagatcctgaatatatttttccgccgcatccataggatcaccaaaaatcccggcataaaatgtagcatctgaaagaacgttgaaacgtatgctgactccagtattttcttcaagacatgaggaaatcttcgccagatgtagtaaagagacctcttctgccatcgtcatggacgttatatcatgtcttttctgccagttacttataacgcagaaaacaggaagaagaatatcaacttttccattttcgttaatactgattttaatcttttccaacgtttcagtactggatgaaaaaatagtttttgaattaaactgaatagaaggatgattgagataatctctgactaatatatgtaaaggtaaatctttctttcgtttctctttccaccactgttcggtcggtaatgattttgaaacggaacacttattaagtaataactctcgtaattctggcgaaatgaaattacccttaagcgtcatatcaggctcatattcaggccagccaaattgaccgaacataattgaattttcgatgattgaaccgtttgtactaacagatatactctccaaacttgcctcctaaataacataggaacatcccgtaaaatgtatagactctgaatggttcagtatttaatatatctagaaatacttatgaaatattttatttggttttttctttccttaaaatcatcactgacattgaagtcacatactgacataaaagagaataacgagtaataaccagaagagtcgatatcattatctgatagtttgtgaatataatttgtgcaagattttatttcttataatattataaaaatatgttctatacacaatggatttcaagatgcatcgcggcggcaagagagttcatccccgggagcatagataactatgtgactggggtgagcgagcgcagccaacaaagaggcaacttgaaagacgaagtgtatacctgattagttgaaaattataaaaggggatatgctatgtcaaatccagcttggttaagtaaacttgaaactcctttccttttaattgatgaatcacgttttatccgcaatattgatcggctctataaacatattgggcttcttggctgtaagatacgccctcacctgaaaaccctgcgctctcccgaagccgcaaaatatcttctgaaagactcttcatcccctgctaccgtttccacgctggcagaagcagaaggctttgttaaagcgggttgcaccaatattttgtacgctgtaggtattgcaccccataagctggctcgtgtggcaattcttcttaataaagggatcaatattcacatcctgcttgatacgccagaacaagccttagcagtagctgaatatgcaaaagccaatagtgtgatcttttccgtatttattgaaattgactgtgacgaccatcggggcgggctccagccagatagtaatgaactcattaaactggcaaagatggttgacggcaatggtgccactctgacaggcctgctgactcatgcaggaggttcctactcatgccgaacgggggaacaactcaaggcagcagcgaaggcagaatgcgatgccgttaggcaagccgccagacgtatcagagaagcgggtattgcctgtccgattttgagtgtgggttctacaccaactgcacactatgtcgaagatttgactggtattactgaagtaagggctggcgttttttctacttttgatttggtcatgaaaaacgtgggagtctgtacgttagatgatattgctatgtctgttgtgacaacggttatcggtcataataaagaaaaaggctggattctgattgatgccggatggatggcaatgtccagagatcgaggtactgctgaaggcccgatagattatggttatgggcaggtttgcaatctggatggacacccttaccctgatttatgtgtctcgatgacgaatcaggaacacggcatcatcgtattaccttccgaatcaagcatgaaaacagaagatttccctgtaggtatgaggttacgtatcctgcctaaccatgcctgtgcaaccgcctccatgcacttacaatatcaggttctgaagcaaggttcatcggaacaggaaacatggcatcgtattactggctggtgatattaatacaaaatgaacttgcaaaaagccaaccctagtcaacccaaaaaataaatatattttataaattatgataaaaaaaccccgtaaaaacggggtgttaaatactcttctttatagaagtgctctatggcatcccttaaaacggttctgattacctattaaaaattaaaataagtatatttttcaaaaaattaatgggaaatttgatgtttttgtaaaaaacacacttcattttacccaaaaactttacttttttagtctagtgatggatttttgagcaatgctctgtgtttcatgaccagtttaacccttttgatgatgatgccgaaatgtcgatattcatttaaactaaaaagtctctatcactgactggtaaacagctcaaattaagtaaaataatcaaaatattagaagtattactatcttgtgaccgcacctatacaaagagtcaattctcaattattttagggtattttatgaaaagtaataaatccggagaggatgtaaatatcatgcctttgacgcgtgtacctcgtggcagaaagactgttgagcaattgctttcactcattgatcatgacgagatacgttcgcttaatgaagagttatgcgatgacctcaacgatccaccacagggagctgagttaacttgatcgttttagtaatttgcgctaaaggtaagttcccctgagcgcacctgatttgtaactcagcaaccaccgactaaagtcggtgggttagcgattaacggactgaaagtccagatacgcatcggctgaacgatgtgtcaggtatccaacctgaagtgatcattcgggttagattcacaatcatgcaccaaataggttgttatcatctcttccgttcactggcctaccgtcgcacaaaaatagcctcttccccaaaaatgctgaccttagtaacgctttttcaggagaacaaactcttcaaacaacttgcttattgcccttccttttattcgcctcataatttctgagggcgctaaggtcgtaggacaacttaccagtatgtgtacatgtgttgtggtcaacaaaaggcttagcgtttttccaaaaagtggcctcaaccaaaataatgggtgattaacttaatgtgttcgtcattcagttgacctgattcactcaataatccaatccaagctttgatatagtcatatttggcctgagatagatcttggcgggcagtatagagcagctgttcggcattgagaatatcgacattcactcgttgccccagcagcacgctttttcgtgtagaagagacttgtaataatgctgcttttacccctgtttcataggcttgtatccgtttttcactattactacaggcattataatttttccgtaaagaattcagaatattgccagactgagcatccatctcatacttggttctgccataatttgctaccgattgacgtaatgcagctgaggtgcctccaccattatagaggttcatggaaacacgtaagccaacagaattcgttcggtatttttgatcaatgctgttatcactgctggatttattttcgttatgggaggcgtatagttccactttaggcagcaatcctgaacgattacgctcaatatcgtggtgcgccgcttcaactttttggcgggcagccatcaactgaggattgtggcgtaacgccaattgttcccagtcagtataattttttaaatccagcttgatgattttgaatttgggggtgtcagataggcgattaaccggtaaatccgttggcagtggtatgccaactaatagctgtaagtcacgaattgccgcatccagctcatccttcacggttaattcatttgcaaaaacctgactgtagcgtgcctgagtttccgccacatcagtacgggttccctcaccagaagaaaataatttctgattgtgtttcagttgctcctcataagcgatacgttgctgagtcatttgcgccagcctgtcttgtgcgtaagccactgcgatataactgttgatgactctgaccgccaattgctggctgtccgcccgaaaacgggcatcacttattagggcatatgattgacgtgtttgataacgtgcccatgcttcgaaatcaattaacggttgagtcaaaataatcgcgctattgtagctactatattgctgctcacgctcttctttgatgcgttttcccaaccgattttcagaatgagattccattttctgccagtttttaggcgcattctggtaactgaatgataacttaggcaacaattctgccagcccaagattattctcttcttgtcctgcttcccactctttgatggccatctgaaatgctggatcattctgtaatgccagcgcataagcctctgtcaaagaaagcgcacaggaagaaccagaaaaaattgatatccctattaataacattgctgaacaaagaggaaataacaaaatacgtctattggcaattctgagatatttcaacatctctattactcctcagtcagcgacgtggatgctctatccatcaacggcttgaacaggtaactcaatagagaacgtgcccctgttttaacgaagacttcaacgggcattccgggtttcatattcaatcccaccagtttctccatgccttctggggttactctcactcgcatttggtaataaggctctcttgtgatgttatccaccaaacggtcagcagaaaccacagtcacatttcccgtaactttcggtgttagactttgattgaaagcggtaaacatcaaatcaacatcctgcccgactgcgattttatcaatcagattcaccattaaacgcgcttctatttcaagcgcactttgggttggcagaatttccatcagcttttcaccggaagcaactacgccaccttgcgtaaatacggctaacccaaccacagatccatctaccggagcagtaatgaaagtgtgcgacaaatcgaactgagccgtttccagcttatttttcaattcattcaccagcacttgtacatctgctagttgggtacgtacttctcgttggtaatccgcctgacgttggataacccgttgctgcgtttcttgtcgctgtttttcaatctgccccattcgtcctgccatctcggccatgctgccacttaattcactttgattacgcagtaattccagataacggttacggggaaagtatccttcttctgtcaaaggtcgtaaatttgccacttgttctttgattgaagcctgttgttgctgtttgctcatcaacgcttccctcagccctttaatctgaaaatctatcccctcttcagcctgctgcattcccgcaagatcactttgcagcatttctcgacgtgacaagaaaagctgtttctgcaacgtcaggatatcgtgaatacggggttctgattgggaagtcagtaaagtggccggaaaaacaatcgattcctcaccttgctgttcagccaataatcgggcttccgttgcctgcgtggtgtagagctgttgtctgagagaatcaatttgtgcattggcctgtacctgactgagctgaattaaaatctgccccgccctgacgtgttccccttctttgacctgaatctgcctgataatgccattcactggagattgcaccgttttacggttgccatccaccacgacaataccagaggacgccacccctttatcaagaggagcaaatgctgcccagataaaaaaacctagaatgccaatgccaataatcagccagcctatttgcaggtaacgattagcatccagcggcaataatcctgacgcctcgtgttgggcctcttttacgttggtctgataggacatctttactcccagatagaaatagcccaagaatgacaatagggttggaccttgttatgaaacatgtttgaccgtttttggctgttgttgtaatgaagattgttgtgctgaaggcttagattgagataatgccgccataacttgctgggaagcaccaaacattttcatttttccctgtactagaaacaaaattttactcgtttgtgagagaagtgaaggacgatgagtgataatcaccactgtttttccctgatcccgtaattgaataatcgcacggtttaacgctttttcgccaagatcatccagatttgagttgggttcatccaataccacaagcgacggattgccatataaagcacgagccagtccaatacgttgtttttgcccacccgataaccccacaccactggcgccaattatcgtgtcataaccctgttcaagattaagcaccaattcgtgaacacccgctttttttgccgcttcaatgattttttcaggatcagcatgatgaaaacgggcgatattctcagcaatggtacccgcaaataactcaatatcctgcggcaagtaaccaatggatgctcccaattcatctttattccactggtaaatatcagccccatcaagacgcactataccttcctgagtaggccaaattccgaccaacaaacgcgctaatgtagatttcccagatgcactggggccaattatgcccagaacctcaccgttgttcagagcgaaattgagattttgcaaaacataatggggatttttagacgcctgatcttgttccaagcgtattattccggggggcattgcagatacattttctaacaacaatgcgcccttaggaggaggcaacgacatgccacttttacgttcaggttgggcttgcaataacgtatccaatctctgccatgacaagcgggcggcattccagctcttccacgcctgtatcaactgttcaattggagataatgcccgtcccattaaaatagaacccgcaatcatcatgcccggcgtgatatgcccttcaatcgccagccagccccccaaacccaaaatcaacgattgcaaagccatacgcactgttttagtcaacgctgtaatggatgcaacccgttcactggcaatacgttgaaaattcagaaaacgctcatgtaacccaaaccaacgatgacgcagcgcaggtaacatgccaagtgcctcgatcacttcggcattacgcaaattagtactggccaaattagttgagcgtaaagacagctgacttgcttcagctaaaggagctttggataaccactggttcaataccgccagagaaatcagaatggtagcacctaccaacgccagcaaacctaagtacgaattgaatagaaaaatgacacacagataaacagggaaccaaggggcatcaaaaaaagcaaacagggcattccctgtgaggaactggcggatagtcgccaagtcattgagcatctgccctgcatctgttgaaccattttttaagttggattcatacgaagcagtataaatccgttggttcaggcacatatcaaattgattaccaatgcgtatcactaccatgcttcgaatatattccagcccgcccatgatggcaaacatgccaaggataatcagcgtcaacattagcaaagtcatttcattactggagggcaatactcgatcatagacttgcagcatatagatagagggagccagcatcagaagattgatgaaaactgtaaataaaccgatagtccaaaataccttgctgcgtgcacggataacatccgttatttcacccttcggaaagtgtaatttcacaataattccttaattatcacttatttgatggttgaaaaaatattatgcaaacgagtatgagttaattcaatctgatgtcttttccatcttttttttaacgcagcattctcttgctgcttaaaatgactcaccatacttcttttcctatttaaaaatccattaattctaattaacaaaaaaaacaaataataatacactgttaactcaacgaattatttatcatacggcgaccatcatttccttcttttctcaagaagaaaattttagccaccgtattttcagatgattttcatgaaatcaaattacgccatttatttcatatggaaatttattttcctgatttttttaatttaacaatatcatcccaattgttaatgaatcgcgagcattcattacatccaagttgacttgctttcttataatattccttcgccttattaaagtcttggcttacgccaattccatttaaataattagttccaatagtgcggtaaccttcaaaatggccactttctccagccagttcaaaaagagaccgagcttcagcgaatttattttccttttcaaaaataaatcctaaattaatcatggactctggcttgtatttatcattcctagaaatagataaatgatatctttcactggcctcccgataatgacccacagtgtgttgtattacggccagcatccaatttgcttcttggtctccagcgtttgctttatttactaactcaaagtattcattttcatttttaggcatcgggatagataatgctgataaaaaatcctctgggtaattaaatatagccgatgggatattatgcttgttcatgttcgaactctgcgccgtaaaagataaaaataacaaggttaaaatgaagttctttttatttttaaaaaagaaatcaatcataagatagcttcactaaacgtctcattcacccctactatatcaacatgagaggtaattgattcaatcatattatttttgttcacagcaaaatacacatccactatcttagtgacacttccattgttccaattcacggtgctttccaactcatgaacattaccgttaatatctttgaatccatcttccttatatgcaagatttatagaagaaatccctgattcactgagtttatataattccccgctgtcagttatcgcatcatgattagagtcaacccataactctaatgagtcccacaggctatcatgttggtcaaaaataccatctccgttatcatcaagatctgttaatgcagtaaagccattatctgctttaattccattttttaatatagaattattcccaaacagttcattgccattatttatttttccatctttatttttatcccacaccagaaatgcactgtttgactctatccatcctgagctttcaataatgccattattatcgtggtcaaaaaatatgttaccattttctgatatagtcgtaataccatcaccggtgagatcaataacaagtggtgtttctttgttttcaaattccgaaatgtgttgttcaataacttccttcaccatatttggatctaaatcttgaatacgtattaccccatctggcgttatcccctgtaatggtggaatataatcaagccaatctacatcactatcatactcagtgagctctaaaatagaatttacaaaatctatacagttattagtaaagagattataatcttttttgaaacctgttccacgcgcgtggccttcaaaatcattacttttcagctcagaaatgtatctctctatatgaccaacaacaccgtctgaatataatggatatgagacactgactacctttgatggatcgtatgccatagagtctctaaatgttaggttatcaactcctccgacttttttgtcatcacctaatccccatccgatagattctcgctgaaactcaacccatgcatgtccaaaagttgatttactaactacccctgctgcatttgtgtattccgttcctgatggtgctatctttattgttatagaatcacgaaatggctgtatgtccgagtcgggccggttgaagtttgtccctagacctcctctaccattttgactgtacatgacatcgtaggccccaatggttccatatgaatgtccagatgttattggcgacataggtccagatggcatcggtgaccaaggcctagttgttataggtgacatagggccagatggcgtaaaatgagatggaaaaactggcataactgtttccttattaaaggttaaagaacttccacttcactttaagtggagattcttataataatgatatcgataattattatcaataaaattttaccgttatccattgattattatgaaaaaatattaatttgatattcactgtttttagtgaagcatttaactttaaaataaataaaaaatagtttacgagtctatattcactctcgtttttgaaacactaattttgatgaatgttggacttgcataaatcaatccggtgtcatcaatatgagcaactaaacctactatcaggtaactatgcaacaccagaaaatgataccgtgaatatctagttggagctttctctatctatgacgggtaacggtacattcagcttttcttcagataaaccatgccgatatgcgttatactgccaaacaatatattgctcaagaagtctagcattttcggcttttagtcgagcattcacttcctcaaggcgctcaatacgctggccagctatcgttaaagacggtggcgtctttatttccaagaagtcaccttttagcctggcctttttatccagaaaagcctgtttaatttgtttattggcattcagtgactgcctcgttggacgcttgcctatatgcttcatgactacgtcacaaagactgtcccatgtcagtttaccgtgccaaccgtcaagaatcccaagaatcttttctagatccaggcctgttaagtgcttagccaaaatcacctcccagccaagccctcatttcatctttatccgatctgtcagactctactttcggttgcgcaatttttgcagccatttcgcgttttagcgggctaaactcttgatcgttgcgtaaacgaattaccgcaccgtcttcaatatcatcagactcaagaagtcgaatcaactccactgttcgctctaaagttttcttttggtgctcaaaccatcgtcccgcaccatagataccttctatcatgcccgctgtagctttctctaactgcgcctgtgtcttatccctttgggttttga

SEQ ID NO: 3061 - DNA, 22680 bp, Xenorhabdus sp.; identical to SEQ ID NO: 3060
  CDS (5655)..(7400)

SEQ ID NO: 3062 - DNA, 22680 bp, Xenorhabdus sp.; identical to SEQ ID NO: 3060
  CDS (3159)..(4424)

SEQ ID NO: 3063 - DNA, 22680 bp, Xenorhabdus sp.; identical to SEQ ID NO: 3060
  CDS (2475)..(2954)

SEQ ID NO: 3064 - DNA, 22680 bp, Xenorhabdus sp.; identical to SEQ ID NO: 3060
  CDS (269)..(547)

SEQ ID NO: 3065 - DNA, 31141 bp, Xenorhabdus sp.; identical to SEQ ID NO: 108
  CDS (5780)..(6331)

SEQ ID NO: 3066 - DNA, 31141 bp, Xenorhabdus sp.; identical to SEQ ID NO: 108
  CDS (6694)..(7182)

SEQ ID NO: 3067 - DNA, 31141 bp, Xenorhabdus sp.; identical to SEQ ID NO: 108
  CDS (8262)..(9026)

SEQ ID NO: 3068 - DNA, 31141 bp, Xenorhabdus sp.; identical to SEQ ID NO: 108
  CDS (9267)..(11930)

SEQ ID NO: 3069 - DNA, 31141 bp, Xenorhabdus sp.; identical to SEQ ID NO: 108
  CDS (11944)..(13809)

SEQ ID NO: 3070 - DNA, 31141 bp, Xenorhabdus sp.; identical to SEQ ID NO: 108
  CDS (14009)..(15439)

SEQ ID NO: 3071 - DNA, 31141 bp, Xenorhabdus sp.; identical to SEQ ID NO: 108
  CDS (15812)..(18457)

SEQ ID NO: 3072 - DNA, 31141 bp, Xenorhabdus sp.; identical to SEQ ID NO: 108
  CDS (29127)..(29933)

SEQ ID NO: 3073 - DNA, 31141 bp, Xenorhabdus sp.; identical to SEQ ID NO: 108
  CDS (29962)..(31140)

SEQ ID NO: 3074 - DNA, 31141 bp, Xenorhabdus sp.
  CDS (30396)..(31139)
cagcttcatttcctttgttattattgtcattaacgatattgccgttaactatggttttacagattttgaaatcatgagtgaatgctgtcaggtttgctactttacccggctcaatcgttccaagatgtttatcgacaccgatagctttagctggataaagggttgccatgcgcagtgtttcatctaaagcgataccaactttttcgacactattcctgacacactcaatcattgtggctgaagagccacttaatgtgccattttcatcgacacataacccgttacgataatatattgttttattagcgaaggtgaattgctctatattactgttttcatccagcccggcaggaacaatggcatctgtcacgaggactaatttttcatttttcagacgcttggcgctacgaatgttgggccaagcaacatgcatcccatcacaaataataccggcataaacttcagtagtatcataaattgcgctgattaaccccggttgtcggcccgaaatggctggcatggcattatataaatgagtagagaaggtaataccattttggaatccccgtcgcgcctcttcataggttgcgttggaatgaccagcggaaacaataatacccgcttcagttaactgatgaatgtaatgattttctaccatctcaggagcaagagtaattttcttgatcacatcggcattaatacacaaataattgaccatttccggtgttggcttgcgtatataggcagcattatgtgtgcctttttttaccggattgatgtaaggcccttccagatgtaaaccaatcgcctgattggggttgttagccagatagatacgcattacttcaatggctttgatcatcagctcatcagggctagtgataagcgttggcagaaaactggtacagccgtatcgctgattggttttctgcatgatatgcagggtttcttccgtaatatcttccatgcggtcattatactggactccgccacagccgttgacttgcaggtcaataaatcccggagagaggtttgcaccctgtaaatcatgctgttcaatgcctgccggtaactcattttccggacaaatatgcttgattatcccaccttcaataataacagcatattcactgagcctgtcgtgtccggtgtagataatacagttggttaaagcgtacattctggactcctaaatgcctgaatcagtattaactggcgaattcactcagaatatcagcctctatctggcgaaaatattttacggtttttactcttaactccattgttgcagcttcatcacacgcaataattgtttttgggtgtatctgtagacagcttactgtccacatatggttaacattaccttcaatagcagcttgtagagcctgtgctttttgagttccggttacgagaataatgatctcttcggcatccattaacgtacccacaccaatagttaacgcatattgggggactgattccacgtcattattgaaaaaacgggaattagcagttcgtgtttccagagtcagcgtcttaatccgtgtacgggaagagagagaagacgcgggctcgttaaatgcaatatggccgtcgttacctacaccgcccataaacagatgaattttgccatacgctttaattttattttcatagcgtaagcattcagcatcgacatctgccgcatttccattgagtaagttgatattttcttttttaatatcaatatgattgaagagattctgatacatgaaagtgtggtaactctgggggtgatcctcaagaatgccaacatattcatccatattaaaggttacaacatttctgaaactaacttttcctgcctgatatagcgctatgagttctttgtaagttgctaatggtgtactgcctgtaggcagaccgagaacaaaagggcgttctgctgttggtttgaattcattgatttttctaacaatatagtgagcagaccatcgacctacatcacttgcatttgttagggggatcagcctcatgatgacctcttcaaaaagttattcatttattaaattaaaattatacgaacggtggtagggcaaaagctgcctatcatacctgttctttacagcggttctaccggacacgtacgcgataatgttattttttataataaaataagtttttgattaaggccatattttgctcaaaaatatatcaatttaagtgatttttatcacacatgcgaaggatttaatttgcgatgaaaaataaatttcttagacttaaaattatttaacaacaaatagatgaagatgttattacatcattcattaaacaaaatactccattcatggggctttaagggggcgtgagtgaacattttaacttacttacaacagattggtcgggcattaatggtgcctgttgcaacattgcctgctgcggcgatattactcgggattggatattggattgatccgaccggttggggagctgacaataaaatggcagctttgtttatctcatccggtaaggctattcttgacaatatggcaatattatttgcaattggtattgcttatggtatgtcaaaagataaagacggagctgctgcactaaccggattagtcgggtttatggttgttatgaaactgtgttcgcctgaagtcatcgcgatgattgaaggtattccggttgctgatgtgccagtggcattcaataaaattaataaccagtttattggtatcttaataggggttatttcagcggagctttataaccgctacagtaatgttgaattacctctggcactgtcttttttcagtggacgccgtttggtaccgatcctgaattcttttttaatgattctactttcttttatcctgatatttgtctggcctgtcatttatgattggctggtggtatttggtgaaagtattaccagcctcgggtctgtaggggccgggctttatgcattctttaatcgtctgctgatacccttaggtttgcacccatgcgttgaactcagttttctggtttgatgtggcgggtattaatgacattcctaatttcctgggaggaggaaaatctattgctgaaggaacggctattccgggtattaccgggcgttatcaggctggtttcttccccatcatgatgtttgggttaccgggagcggcattggcgatataccattgtgcccgccctgaaaacaaagcaatggttggcggtatcatgctggcgggggcatttgctgcattctttactggtataactgagccacttgaattctctttcatgtttgtggcacctgtgctttatttcctgcatgccattatgacgggtatttcagtttatattgccgcggcgatgcactggattgccggttttggttttagcgccggctttattgatcttttcctctcctcacgcaacccgttagctgttcactggtacatgctgatcccacaagggttagtattcttctgtatctattatgttgtattccgtttcactatcaaaaaattcaacttgatgacattaggccgtgagttaccttctaccgcgggaactgattctgatatgaaattgaatgctggtggcaaaaacgatattcaggaagaagcatataactatgttgccgcgataggtggatcgaccaatttaatcaatattgactcttgtatcacccgtttgcgtttatccgtgaaagattccagtttagttaatgaacgagtcactaaacgtcttggggcttctggtgttattcgcctgaataaaggaagtgttcagattattgttggtatgcgtgctgaactgattgccagcgccatgaaagatgttattgctaaaggcccgattgccgctgcgacagaaaatgatattccagagtctgatattccggtagaaaaaaagagtacacaggaaagtaaagaaattctgactttgctggcacctgttgcgggtgagctagttaagttggaggatgtaccggatgaagctttctccagtaaactcgttggtgatggtattgcaatcaagccgacctcggaaacagtcttctcacccgttacaggtacggtggtaaaggtatttgatactaaccatgcgttatgtattgaggcggataatggtgctgaagttattgtccatatgggcattgatactgtttctctgggcggccgtgggtttgaatgtctggtgaaagaaggcatgaaagtcaaaacaggaacggcgttactgaaattagaccttgattatttgaattctcatgccaaatcaatgataagcccagttattatcagcaatatcgataactattcaggaatccgagtgattgcaaaagagggagttattgccacaggagaagatttatttcagatatataaataattaataacctaccttataattttcatctcataaatattttttagtattacctgtatgcagaaatgcatgcaggtaatgtcagaatgcttttaccccctagaaataggtaaattatttctagggaagcgagttaaaatcatataattctaaatatagaattatagttcctatcttcaagtttctaaaaaacgaaaaatatatcattaattatttttggtaagatatttattattacgatgtgtctggaatgtggaaatataaaattaaatatatgatggttgttttttatattcgcgagaggtatttgttattgtcattttttcgataaggaataattgaatgtgggtattttacaataatttttgttttttattttatttgtgatttacctcaatttttttataaaaaatatcctttagttttatttggcttaggttgagtttattttaatgatttatatttcccgtccattttataaacattttagagcaaagtctaatgcacttaaattatctctgatagagagattaaactgtgttcgttgataagataaccaagtgaaataaatataagtaggtggaaattatgagtttatctatttcagaaggaaaaatggaaaagtatttaaagagttgggatgataatggttatatcatcatagagtcggcagtaagcaaagaacaagttcaaaaaactgtcgatgctatattttattttttggaaatggataagagtaaccagagtgatttttataacatggagattcgctctcgttcaggaattgatgaaatgggtcggattcctttttatcatcatcaggctttgtgggataatcgtcagaatcaaatcatttactctgtatatgaaaagatttttggtacctcagattacgtggttagtgtgcacagggtagatatgaatctcgctgttaacgaaaactggaaatatgaaggttttattcattgggatattgatgtttcgatacgcccactggaaagaaaaatacagggtcttttgagcttaactgatgataatggtaattctggtgggttccagtgtgttcccggttttcataaagttatctatgaatggctatcaaaacagccagcgggatataatagtagatttcctgatacagcagggatgaatattaaatcaattccattgaaagcaggggattatgtcatttttgacagtgcattgcctcacggtaatataccaaatacttcaaatgagccaagattagctcaatatttttgcttatttccacggacagatattacagaacaacaagttgccgagagaattgtagcttataaaaaaggtttgccgacgacgtctataacagggaaagcttttccggttaaaaaagcgcaccaacaagatacatctcagatacacttaacagatttgggtaaattattattggggttttagtactttataccttaaggtatcattatggagacaaaaaatcatcgcatagaggatgatgccattgatgtttcaattattcttcctcgctataatgaaaattattctgttattgaaaaaactatccagcgtatccgaaacattcaggagaagttgaaggtacaaataattatagtcaacgattcagataaaaataattttcatgaccaagatgttgtgaaaataaagaaaaattatcctgatgttctggtgatctctaactgtggcaactatggaaaaggctatagtattagaagaggcgtcgatttagcaaaagggaaatatgttttttatacagatattgattttcctataaaagaaagtgatttttttattgcatacaggaggattgaagtttcaaatgttgacttggttattggagagcgcttttcaaagaataaatcaaaagcaaattcatatcggaagataaccagtaaaatatttttaaaaatagtcaacttactattgaattgcaaagtttctgattctcaatgtccatttaaaatgttgaaatctgatgtggcaaaagaagtattttctaagcagaagattaatgggtacgcatttgatgctgaaattatttatctgacaaataggttatctaagaaattagatcagttcccagtggcctgggaggatacaagagagaactggagtctggcgaggacgttaattaactatagcataatgatacttggcgttttttccattaagatttattgggttataaacgatccagagataatttgaagtgattaattagcagatgctgtgatattgatttatcctaatgaaataggcctgatgatttattgtgattcctatgttttattataaatgattgggatggtttacagtgtttgttttttattatcggaggggtaatggggatttataatataaaggctattttatttgatatggatgggactttagttcaatctttatcggaagttgaaatgatttggtctaaatggtgcgaaatgcagaatgtgcctatccaacatgtattggagatatgtcatggtgttcgttccagagatgttattttgactattgccccacatttgaatgtggaagaacaggttcagttattggatgatttagaagttcaacattcaggttcagcgcaagctttatttggtgcaaaagaatttttactttctttaaatgattgcccttgggctgtagtcacttcagccagccagagagttgcatatcatagaatgaatgtttgtggtcttaagataccggagctcatcgtaggttctgatgatgtacaggacgggaaaccacatccagctccttacctcatggccgctgaacgtttgggaatgaaagccaaagactgtttagtttttgaagattcgtatgcaggaatacaaagtgcattagcagcaggttgtgaggtcatacaaattggggggcaagagaaaatacaccctttagttctcgaagtaattcatcactgggatgaaattaaaattgataaaataggaatgaatgcttttgaaattaaaattaattcataaggatgaattaatgttttgatgactctataccctatggatttcgagttgcatcgcggcggcaaaggagaaagtcccctgagcatagataactatgcgactggggtgagcgagtgcagccaacaaagaggcagcttgaaagatgacgggtatatacacaacggatttcaagatgaagtgtataaccctgtgtgattaagtatagcgtggatttttatataaacattatggtagagatggattatgaataatgtgattgcaactagagctgttttcttagctgctggcatgggaattgctgcatgggctcctttgatacccttagtaaaaaattttttaaatattgattcaggagaactaggggttttattgttttttctcggtcttggatcaattgtatccatgcctgttacaggatttctgactactttatttggttgccgtaaggttattataatttcaggaatttttgctattgtctctttaccgctcttaatattatcttcgagtgttacccagcttggaattatgctttttatctttggggcatctattggtacagttgatgttgcaatgaatatccaggctgtagaagtggaaaaaattacaaagagaaacttgatgtcaggcttccatgggtttttcagtttggggggtattttgggtgcggctggagtatcgatgttactttatatgaacttttctgctcttgtcgcatgtctggttatatcttttatattatcgttgttattcattttttctttctccgggcttatcaataatcacggtaataataaagaaagaaaagataaaggtttcttttttccgaaaggtattgttattttggcgagctttctttgttttctaatggggatcattgaaggttcagttattgactggagcggtgtgtttttagttaatgaacgtaatgttgatattgcatttaatggatttggctatgctgcatttgcagcagccatgacgacaggacgatttttaggggatcgagttatatctaatataggacgtgggaaagtcttttttgcagggacatttagtatttttatcggtttctttattgttgttagtgtaaattcgttctatctctatatgataggttttttctttataggattaggtgcatcaaatattgttccgatattatgctctatatcgggaactcaaacagttatgctccccggtcatgcaatagcgtcaattgttacatttggctactttggaataatgattgggcctgcgttaatcgggtttattgctcagaattttagtcttgaaacagcattttatttattagctgttggtgcattaattatgttagttaattcaaggtttataaaaaataattaatttgttatttatataaataaacttatcttttgtaataatattaaggtgtgattttatgaaatttccacaatggcctgattttgccgaaaaaacattaaaagatattcagcagccactgttatccggtgaagttaattactggaccggaaaaaaaggcatggaatttgaaaataaatttgccgactggattggcgcagaaatggcaatctcctgtaattcaggcacctctgctgtgaatattgctgtgggggcattaaatatcggccccggtgatgaagttattgttccttcatacacctttattgctacttcctttgctgtattacagtgcggtgctattcctgtattttgcgatacaacggaagaacacactatcgaccctgataaaatagaagccctgattaccgagcgcacaaaagccattatcgttgtacatctttatggtgttgtctgcgatatggatgcaattcttgctgttgcccgcagacataatctcaaagtaatagaagacagcgcgcaatgtctcggagggaagtataaggggaaatctgttggaacgattggtgatgttggcacattcagtttctgtcagtccaaacattttaccaccggtggtgaaggtggcatggttgtgacgaataatcctgaaatcggctgggaatgccgcgcttatcgtgatcacgggtttgatgtgaaaaggaagtttgacttacttgcgttggaagaggtgtcatggcatgtacataatcgcattggctataattaccgtatgactgaaattcagtcgatcatcgggattaatgagctggagcggtttgatgactggaatatgcataaccgtaaacagtacgcgaaaatctatgatgcaaaatttgcagaaatcgatttaattcatagcctgccgctgaataatgaagacaggcaaaacgcatattggctatatcctattgtgtttgagcttgccaaactggattgtacagctgaaatcattttgcgtgatttgaaaaaaatcggtgttcccgcgttcaagatccagtggccggaagcttatggtgaacgggttttcagagagctgcgtggttttggctctgccaatttccctttccattccagtgagtacacatcgcctgaatcggtcaattattgcgatgttgtgtgtgaaacagcccgttctttattgccccgaacaatcagcctgtatttgcatcctagctggaatgaagagcatatcgtttattgtgcagatcagttaatcgcagtgctggaaaatcaccgtatccgctgattttacttacttctcgtgtagaaatggcaggcctttactcaaaatggcctgtctatatccttttttcactgagactttctttttttcctctatttcccactaactaagtgttgtttctcggttcagcttaatagattatagagggttatattgaagcgctttttgcattgaggaataaaacgatgagtgaggcagatactcgcccgacaaactttattcgtcagattattgacgaagatttggcaactggtaaacatacttccgtacatacccgtttcccgcctgaacctaacggctatctgcatattggtcatgcaaagtcgatctgcctgaatttcggcattgcacaagactatcaggggcaatgcaacctgcgttttgacgatacgaacccggttaaagaagatattgaatacgttgagtctatcaagcaagacgtacaatggctgggtttccagtggagtggtgatatccgtcattcttctgattacttcgaccagctgcatcaatacgccattgagttaatcaataaaggtctggcgtatgtggatgagctaagccctgatgagatccgcgaatatcgtggtacgttgaaagagccgggtaaaaacagcccataccgtgatcgtagtgtggaagaaaaccttgctctgttcgagaaaatgcgggcgggtgagtttgcagaaggtaaagcgtgtctgcgagccaaaattgatatggcttccccttttatggtcatgcgcgatccggttctgtatcgtatcaagtttgcagaacaccatcagtctggtaataaatggtgcatctatccgatgtacgattttacccactgtatttccgatgcgttggaaggaattacgcactctatttgtacactagagtttcaggataaccgccgcctgtatgactgggtattggataacatcacaattgactgccatcctcgtcagtatgagttttcccgcctgaatctggaatacgcagtaatgtccaagcgtaaactgaatcagcttgtgactgaaaatattgttgatggctgggatgatcctcgtatgccaaccatttcaggcctgcgtcgtcgtggttattctgctgcgtcaatccgtgaattctgccgccgtatcggtgtaactaagcaggataacaacgttgaaatggctgcactggaatcctgtatccgcgatgatctgaatgaacatgcaccacgagctatggcagttcttgatccggtgaaactggttattgaaaatatgccggaaggcgaagttattctgaccatgcctaaccatccgaataagccggaaatgggtagccgtgaagtaccattcagccgtgaactctatattgatcgggcagacttccgtgaagaagctaaccgccagtataagcgtctggtcatgggcaaagaagtacgtttgcgtaacgcttatgttgttaaagctgagcgtgttgagaaagacgcagaaggcaacatcaccacgatttactgtcattacgatgagcagacactgaataaagatccggctgatggccgcaaagtgaagggtgttattcactgggtaagtgcagtacatgccgcgccagctgaattctacttgtatgatcgtctgttcagcgtgccaaatccgggagcggaagaggatttcctgtctacgcttaataccgagtcattagtggtacgtaaaggttttgttgagccgggtctggtcaatgccatgctggaaaaaacttaccagtttgaacgtgaaggatacttctgtgctgatagcaaactttcaactgctgaacacttagtgtttaaccgcacagtaggtctgcgtgatacctgggcgaaaatctctaaagagtaatatcagctaagaacagacatatctccagtaaaaaagcgtgattttttatcacgctttttttatttatggctttagccagtttaagtcgcgttagcgtcttaaacataaaaccacccgctttgcgggtggagttcaaaggttataccaagaaaaacacctttccgttacgatatagatgttcaagctaatattcgtaactcaaataaggaaaggtgtttatgggcattaaagcacaaagctcagcgcatacaaagtggctgtgtaaataccatatcgtcttttcgtcgaaatatagacggaaagtgatttttaataatattcgttcaagtgtgggagagatcctcagagacctttgtaagtataaaggtgtggaaataatcgaaggtcatctcatgccagctcatgttcatatgttggtgagtattccaccaaagctaagcgtttcaagctttatgggatatttgaagggtaaaagttcgttgatgatctttgatagacacgccaatttaaaatataaatttggcaacagaaagttttgggcggaagggttctatgtcagtacggtagggctaaatgaagcgacaattcaaaagtatatcagagagcaagaaaagtcggatttaatctcggataaattgagtagtaaagagcatgtagaccccttcaaggggtaggccaaagcagcaaagacacttagcttgaacgaagagaaagcagcgtcatttaagcgcagtcggtaacaagcccttatagggcaagagcaaaccacccgttatacgggtggttatgatttcagcaatatacttttttatacggcagtttggaagataacatcatccgctttttcagtatactcgttcaactgatcaaaattgaggtagcggtaagtatctgctgcggtttcatcaactttctccatgaattgcagatactcatccggcgttggcagacgacccagtaatgaagccacagccgccagttccgcagatgcaagataaacattagctcctgcacctaaacggttcgggaagttacgtgtggaagtagaaaccaccgtagcaccatcagcaacccgggcctggttacccatacacaatgaacagcccggaatttcgatacgtgccccactcttaccaaagacactgtaatagccttcttcggtcagctgagccgcatccattttagttggcggagcaacccacagacgagttggtaactggcctttatgctgatcgagtaacttaccggcagcacggaagtgaccaatgtttgtcatacaggagccgataaacacttcatcgattttgctgttagcaacatctgataacaagcgggcatcatccggatcattgggtgcacacaaaataggttctttgatctcagccagatcaatttcaatcactgcggcatattctgcatctgcatccgcctcgagtaactgaggatctttcagccagttttccataccaataatacggcgttccagcgtccggcgatcgccgtaaccttctgcaatcatccatttcaacagaacaatgttggattgcaggtattcaataatcggtgatttatccagttttatcgtacagcccgccgcagaacgttcggcagatgcatctgccagttcaaatgcctgctcaactttgagttctggcaaaccttcaatttccagaatacggccagagaaaatatttttcttaccttttttctctacggttaataaaccttgctggatcgcatagtaaggaatggcatgaaccagatcacgcaaagtgatacccggttgcattttccctttaaaacgcactaatacagattccggcatgtccaacggcataactcccgttgccgctgcaaatgcaaccaaaccagaacccgcagggaaagaaataccaatagggaaacgggtgtgggagtcaccgcctgtacctacggtatccggcagtaacatacggttcaaccatgagtggataatgccatcacccgggcgcagagatacgccgccacggttcatgatgaagtcaggtaatgtatgatgggtcgtcacatcaacaggttttggataagcagcagtatggcagaatgactgcatgaccagatccgctgagaagcccagacaggccaaatctttcaactcatcacgagtcattggcccggttgtatcctgcgaaccaacagaggtcatcttcggttcacaatattctcccggacggatcccggtagtaccacaggcacggccaaccattttctgcgccagtgtgaaaccccggttacttttctcaacagtttttgcctgacggaaaacatcactgtatggcaaccctaaagattcgcgggctttggttgtcaggccacgaccaataattaatggaattcggcctccggcacgtacttcatcaatcagtacatctgttttcagttcaaaagttgacaatacttcattggtatcatgaaggcggatctcacctttatatgggtagatatcaattacatctcccatattcagtcgggatacatcaacttcaaccggcaatgcgccagcatcttccatcgtgttgaagaagattggagcaatttttccacccaatacaacgccgccgccacgtttattcggcacaaacgggatatcttctcccataaaccacaaaacagagtttgtagcagatttacgggaagaaccggttcccacaacatcccctacataggccagaggatgacctttttcattgagttcttcaatttgcttgattgggccaacaacgccagcctgatcaggcacgataccttcacgggcatttttcagcattgctaacgcatgtaatggaatatcggggcgtgaccacgcatctggtgcgggggaaagatcatccgtattagtttcacctgtgaccttgaagaccgtaaccgtaattttttcagccagtgccggacgttgcaggaaccattctgcatctgcccatgactggataatttgtttggcatgtggattacctgctttcgctttttcttccacatcatagaaactgtcgaacatcaataacgtgtgagacagtgccttagcggcaatgggggccagtttttcatcatcgagagcgtcaatcagagcatggatattgtacccaccctgcatggttcccaataattcaatcgctttttccggtgtaataagtggtgaagtcgtttcacttttcgagattgcagcaagaaagcccgcttttacataagcagcttcatcaacaccggggggaactcggttcgtcaacagatctagcaggaaatcttcttcaccttgaggtgggttcttcagtaattcgaccagcgcggctgcttgagctgcgtctaatggcttagggacgatgccttgctcggcacgttcggctacgtgcctacggtattcttctagcacgactaactcctcgctctcattgtcttttatatgcccggctgtctgcacccggtaacgatcaccatgaaatgaccattagggatgccaggtcagaggatttgctcacataacatcaaaattatgccgagcttcgggcaaatagcataccaaaatttgaatggcatgttaattcattcacataaaatcaacattggagtgcagtaaagttctggatagaggtgcataaagtgtgtatttaagatttaaatactatttgttgatgttttgtcctgaaaacctcttatctctatttatgaaaataattaaatgaggaaaacgccagactctctatgcaagagttaattaacaacaaaataagaaacggctcctataatagaagccgcctatattcactgcaaaaataacgcaaaatctaatgcattatttctttttctttgccttagggtttggcaagtcagtgatgctgccttcgtacatttcagcagccataccgattgattcgtacagagtcgggtgagcgtgaacagtcagagcgatatcttctgcatcacaacccatttcgatagccagaccgatttcacccagcagttcgccaccgttagtaccaacaatagcaccaccgataatacgattgctttctttatcgaaaatcagtttagtcataccatctgaacaatcagatgcgattgcacgaccggaagcagcccatgggaaagttgcagtttcgtaactgatgcctttctctttcgcttctttctcagtcagaccaacccatgcaacttctggctcggtgtaagcaatggatgggatcacttttggatcgaagtaatgtttcttaccggagataacttcggcagcaacatggccttcatgaacacctttgtgtgccagcattggctgaccaacgatgtcaccgatagcgaagatatgaggtacgttagtacgcatttgcttatcaacattgataaagccacgctcatcaacagcaacacctgcctgaccagcatcgatcagtttaccgtttggtacacggccgatagcaaccagaaccgcgtcataacgctgaggttctgccggtgcttttttaccttccattgtcacgtagataccatcttctttggcttctacagcagtcactttggtttccagcatcagattgaatttcttgctgatacgcttagtgaatactttaacaacgtctttgtccgcagcagggataacctgatcgaacatttcaaccacgtcaatctgagaacccagagcgtgataaacagtgcccatttccagaccgatgataccgccgcccataaccagcatgcgttccggaactgttttcagctccagtgcatcagtagaatcccatacgcgagggtcatcatgcggaatgaatggcagctgaattgggcgtgaacccgctgcaataatggcattatcaaaattaatcgttgttgcgccattctcgccttcaactaccagagtgttagcaccagtaaatttaccaacaccgttaacaacgttaactttacggcccttagccatgccacccagaccacctgtcaactgggaaataactttttctttccagagacggattttatcgatatcagtttgtggctcaccaaacacgataccgtgttgtgccagtgcttttgcttcttcaatgactttagcaacgtgaagcaatgctttagatgggatacaaccaacgttaaggcaaacaccacccagagtagagtagcgctcaaccagaacggtatccaaacctaagtctgcacaacgaaaagcagcagaataccctgcagggcctgctccaagcaccactacctgggctttaatttcagtactcatcatgacctcttaattgtttgtccggcgggtcagacgaaaaaaaaccatattccaccgggacgtacacaccgcgagcagtttacagaattgtaaataacctgaaaagcgcgttaacgtgacggaaatctcaacctgtcagatacaagtataaaatttccatcactgtcgtaattattaggccggctattcaccggcctttgcattacatcaccagacggcgaatgtcgctcatcaactgattaatataagtgatgaaacgagcaccatcagctccatcgatcacacggtggtcgaaagacagagacattggcaggatcagacgaggaacgaattccttgccattccagaccggcttcatagaagaacgggacagacccataatagccacttctggcgcgttcacgattggtgcaaagccggttgtaccgataccacccaggctggagatggtgaagcagccgccctgcatgtcggaagcagtcagcttaccagcacgagctttcttggatacttcagccagttctcttgacagttccatgatgccttttttgttaacatctttgaatacaggaacaaccagaccgttaggcgtatcaaccgcaataccgatgttgacgtattttttcaggatcagcttttggccatcttcagagatagagctgttaaagcgaggcattgcttccagtgcttttgcagccgctttcatgacgaataccagaggagtgattttcacgcccagctgtttcttctctgcttctttgttttgctgtttacggaattcttcaacttcagtgatatccgcttcatcgaacaggttaacatgagggatcattacccagttacggctcaggtttgcaccggagattttctggatacggctcatttcaacttcttcgatttcaccaaacttgctgaaatcaactttcggccaaggcagcataccaggcaagccaccacccgcagccgcaggtgcagcttcagcacgcttgatcgcatctttcacgtaagcctgaacgtcttcgcgcagaatacgacctttacgaccagtacctttaactttagccaggtttacaccgaattcacgagccagacggcgaataaccggagttgcatgaacgtaggcgtcattttctgcaaactcatttttgccttctgctggcttagccgcagccggagctggtgctgctttcgccggtgcagccgcaagagccggagccgctgcaggtgctgccacaggtgctgcgcctgcaacttcaaataccatgattagagagccagtttttactttatcgccaaccgcgattttgatctctttcacagtacctgcgaatggcgcaggcacttccatggaagccttgtcaccttcaacagtgatcagtgactgctcttcagcaatggtgtcacccacttttaccatgatttcggtaacttcaacttcatcaccaccgatatccggtacattaacttcttttgccgcagatgccgcaggcgctgctgctggagcaggagctgctgccggagctggcgctgcaccagaacctgcaacttcaaataccatgatcagagaaccagtttttactttatcgccaaccgcgattttgatctctttcactgtacctgagaatggcgcaggcacttccatggaagccttgtcaccctcaacagtcagcagagattgctcttcagtaatggtatcacccacttttaccatgatttcggtaacttcaacttcatcaccaccgatatccggtacagcaacttctttgctttcagctgcaacaggcgctgctgccggagccgcttcttgctgtacaggtactgcttctgctgcaccagttgcggattcaaagatcataatcagtttgccggtttcaactttgtcaccaactgtaactttgatctctttaaccacacccgcctgtggagaaggaacttccatagaagccttgtcaccttcaacagtgatcagtgactgttctatttctactgtgtcaccaactttcaccagaatctcggtaacttcaacttcatctgcaccaatatcaggcacgttaatttcgatagacattaatctttacctcttatgccagacgtgggttaactttttctgggttgatgctgtattttttgatggcttcttcaaccactttcacatcaacttcgccacgtttagccaattcacccaaagcagcaacaacaacgtaagaagcatcaacttcaaagtggtgacgcaggttttcacggctgtcagaacgaccgaagccgtcagtacccagtacgcggaattcgcttgctggtacaaagttacgaacctgctcagcaaacagcttcatgtaatcggtagaagcaactgctggtgcttcgttcatgatctgagcgatataaggaacgcgtggttcttctgatgggtgcagcatgttccaacgctcacaatcctgaccatcacgagccagctcagtgaaggaagttacgctataaacgtcagaagcaacaccgtactcgtcagacaggatcttagctgcttcacgaacgtgacgcaggatagaaccagagcccagcaactgaactttacctttcgcgccttccatgctttccagtttatagatacctttacggataccttcttcagcaccttccggcattgctggcatgtggtagttttcgttcagagtggtgaggtagtagtaaatgttctcttgtttctcaccatacatacgatccaaaccgtcatgcatgataacagccacttcataagcgaacgctggatcataagagatacagttaggaatagtcagagactgaatatggctgtgaccatcttcgtgttgcaggccttcaccgttcagagtcgtacgaccggaagtaccaccaaccaggaagccgcgagcctgctgatcgccagcagcccagcacagatcaccgatacgctggaatccgaacatggagtaatagatgtagaacgggatcatcggcaggttattggtgctgtaagaagttgcagccgccagccaagatgatgcagcacccagttcgttgataccttcctgcaggatctgacctttagcgtcttctttatagtatgcaacctgctcacggtcctgcggagtatactgctgaccattcgggctgtagataccgatctgacggaacagaccttccataccgaatgtacgtgcttcgtcagcaatgattggaaccagacgatctttgatagacttgttcttcagcattacgttcagggcacgaacgaaagcgatagtggtagaaatttctttggattgctcttccagcagagagttgaactcttccagtgctgggatttccagtttgtcgtcgaagttaacacgacggcttggcaggtaaccacccagtgcattacgacgctcatgcagatatttagcttcttctgagtctttgtcgaaagtcacgtattgcaggttttcaacttgctcatcagatgcaggcacattgaaacgatcacggaactggcgaacgccttccatgttcattttcttaacctggtgagcaatgtttttgccttcagcggtatcacccatgccgtaacctttaacggtctgagccaggattacagttggttggcctttagtttcctgcgctttattcagtgcagcgtaaactttcttaggatcatgaccaccacggttcagagcccaaatctcgtcatcagtcatatctttgaccaattccgcagtttctgggtaacgaccgaagaagtgtttacggacataagcaccatctttagacttgaatgtctgatagtcaccgtccagagtttcgttcatcagctgaaccagtttaccgctggtatctttacgcagcagtgcatcccaacgctcgccccacaggactttcagtacctgccagccagcgcctgcgaagatgccttccagttcattaacaattttaccgttaccagttactgggccatccagacgctgtaagttacagttgatgatgaataccaggttgtccagtttttcacgggttgcgatagtgatcgcacctttggattctggctcatccatctcaccgtcgcccaggaatgcataaacggtttgtttagacgtatctttcagaccacggttttccagatacttcaggaatttagcctgataaattgcagagattgggcccagacccattgaaacagtcgggaattgccagaagtcaggcatcagtttaggatgcggataagaagacagaccgttgccgccgatttcctgacggaagttgttcatctgctcttcagtcagacgaccttcaaggaatgcacgagcataaacgcccggagaaatatggccctggaagtaaaccaagtcgccgccatcattatcattacgagcgcggaagaaatggttaaagcaaacttcataaacagtagcggaagactggaatgaagccatgtgaccacccagctccaaatctttcttggatgcacgcagaacagtcatgatggcattccagcgaattgcggaacgaatgcggcgttccaaatccagattaccagggtaagccggctcatcctcaaccggaatagtgttgatgtaatcacggcttgcagtaccagctgctacactaacaccacctttacgtgcttcgttcaaaacctgatcaatcaggaattgagcgcgttcaacaccttcttcacggatgaccgattcgatcgcctgtaaccagtcgcgagtttcgatcggatccacgtcatttttcaaaatatctgacatggtgtgttccttatctgttatctatttctaatggttgttttggagcctatcttctggtcataccctttgacattcagtcagtcatgaccggaagataggccctgctatatgttgccgctaaaactcttcaaaaagagcataacgactgtacagacgcagcagccaggatctgcacagtcaatttaggacctaccccatttgggagttgttttaatccatgacgccccggaggataggctcttattcctgatgttgttggagccgtctcagtgagcgttcacgacgggtatgctcacgagtcagatccaataaaacttcttcaatgaaagacaaatgacgatgcgaagcttcacgggctttttccggttctttcgccattattgcgtgaaaaatcgctgccctatggtcactcactgccgccagcatttctttacgggtataaatgaactcgaaattgcgccggatattttgttccagcatcgggatcatacaacgcagtaaatgcagcaaaaccacattatgtgccgcttctgtgacaataagttgatattgcagaactgcatcagattccgcaccaatattcccgctttgctgtgcttcctgaatcgcgagatggctttccttaatgcgtttaaaatcttcatctgttcctctgagcgccgcataataagctgcgataccttccagcgcatgacgtgcttcgaggagatcaaattgtgattcctgattctctgcaataagttgggcgagcgggtcactgaaactttgccagagattattctgtacaaaagttcctccaccctgacgacggaaaagaaaccctttggcttctagtttttgaatggcttcgcgcaatgaaggacgtgatacctcaaactgcttcgccagctcacgctcaggcggcagcttttccccggggcgcaacgagccctcgagaatgaggttttccagacgctgctcaatcacatctgataactttggttggcgaattttgctataagccatatctgctgtaagccattcagtaagtaagtgttactttgaacaatttatggttgaactatacccctataccctgtttaacagagtattcagactaaccttcagttgatcgacctcattcaattaacctcgcttagccgggatttagtcaattggtaataccaatttagaatacaggccataaagtaacaaagtattcactagctgtctataaagaccttgggttaaatcataaaaacctgcaaattttaacaaattattttaatttttatcagaaaattataaccaaatgggatttttaggcagtaaaataggtaggagtggtaaagatacagattaaattcattagtcattgttataatttatttaatatattgattcttttgtttatttgttatttaaatttatacattactatttaacttacacaatacagtgaaaaattaagggttatagtgcttgttacttatcatgacggcactattattaagttattaacaaaacttaatttaaaatagttaatcacaaaaatatattaattattttactgcgtatccaatctaccgtgcagatttcatactgaatcgttttattacaattgcagacaagatagcagtggcaaaccaatgcagtggcagtaacaagtagtcaaaaacacatataaaacacgttaaatacaatacccctcccccaggaataacaaaaatgttatggacatttcttaagtggttaatttaagtgccaactcagggaatatcctaacgtttcaggatgaatatatacccaatagatttcgagttgagtcacgtcggcaaatgcaaatagagtcggttatcagtaacatagcgaactatgtatatctaactgaaaaaccagccaacgcagaagttactctaaagattaagggtatactcaggctaatttgatatataccaacatatttcaagttgtctaactggggtcaatgatgcccattagcagtatcactagccggaagctacaacctgaaaaaatgaacggtataaaaatccttttaaagtaattcccgccagatgtcacatatagacacaggcgggatttttttatgctagcgccccataaatcgtcaacagagcgacaataatcacaatagtaaatgttgcttttttcgcaatttttaccgcagcaagggggctattcaaaagatctaaatgaggttccttgctcaatgcaaattgagccaattgactgaccactttatattgtgatgtccgcaaatcactcagtgatgcaatccaggccggtaacgctttttccccatgccctagcaaagcataagcaatacccgccaaacgtgctggtacccaatccaaacaatttaatagcgcatcaaccccggattgcgcacgctgcacagaagttctgcattgcgccaaccatctttgataagctctcaggaaacagtatcccattaaaatggccggaccaaactcccccataacaactaaccaaaaaatcggggcaagataatagcggaaatttatccagatcaatgcgttctgtatttcacgcaatcgatcatcttttgtcatctcagccgggttctgttgccttatgagtaaatttgtaagatgaatattctgttgctctaaatcaccagtgcgtacagaacggagatattcccgataactatggcgcaaagaaccggcaccaatacataacaagctaatcatgatgcataacaggatcgcagggataccaaaagcaataacactcagtacatcaataattttccaggtcaaaaaagcaaccacaaatgccatcactaaactgacccacagtgaatatacttttactctggcaaaaaaaggagacagataatgttctaactgccagtgatctcccatcttaaaaatgcgttcccatgccagtattaacaatagaataaagagagtcatccaacccgctcctttaatagctgccgatactgttcccagtaaaaataaggccctgggtcagttttcctgcccggagcgatatcactgtgacctgtaatattattacggatatcaggataatgactgataagtaactcagtcacctccgccagcttagtgtactgaatttcagtaaatggctcgtaatctgtaccttctaactcaatgcctattgaaaaatcattgcacgtttcccgctcacaataacaggaaacccctgcatgccaggctcttttgtcgaaaggaacatattgcacaacttcaccatcacgacgaatcaaacagtgcgcagaaacccttaatccttttatttcctgaaagaaagggtcttcattcggatctaacgtccccataaatagctgatcaatatacggcccgccaaacttaccgggcggtaaactaatgttatgtataaccaataatgatgggatttcccctgctggacgcagatcataatgcggtgaaatcacctttctggcatcaacaatccacccttcatgcaacctcataccctagattcctccatctttcaaaacctattgagtatataccctatgaatttcaagatgcagccaaagtgtaacaggttgggtttttcaatcgaggagtatttttgttcatattttcatttgcgagcaagctcgaaaacttcctggtataaaatgtaattaataattattttctttgaatcgcttccataaatttcatttatcttattttattttttaagaaaaccttcattctaactggcatcagcaaataataaatatcatgcttctattttaaaaaataatagagccatgtagagatcgaataaaaaacacaaaatgaggaagcaataatatgaatcaacaaggatttacattaatggaagttatggtggtaatggcaatagtgtctatcctcggtgcgattggtatccctagttatcagggatatatccaaaaggcagcactgactgatatgctacaatctattgttccttataaatctggcatcgacatttgtcattttgaaaccggaaattacaaagaatgcagttctgggcataaatcaattccatcaggatttaatagccgttacatcaatacaattacagtaaaagaaggagaagcaaatattattggacagaaaaacctcagtggcctgagtatcaccttaaaaccagatcaagataccaaaactggtatgactcactggcaagttatgtgccattctgaaagtgaatcgttaaaaacaaaatgtcaggaaacatttaagttttaaaaaaatcaaaaacaaacatattagaatttaaattataacgtaaatataactctccactgaaagtgtaaacattttcatatttacaaaaacagccattcgtttttaaaaccaaaggaatacattgaatgagaaacatggaaagcagtttaatggaaaaagaaattgacgaactatgccagaaacatcaggcaatcattataaaaagaaatagttattccatcactattgcctgtagccaatcacctaatgaagagtttattactgcattacgttttatttctggtgcaataattgattttaatatttggccaaaagccaaaatagaatccatgttgacaaaaaaaaacatactaccttcctacacagaaaactattgctcagaaaatggtgaaacagaaacctatcggatagaaaatttaaccactccaaataacaattacaatgaaaaacaaatgattgaaaataattcagaaaatattgacactcctgttattcagttaattaatcaaacattatctatctctatacaaaaaagagcgtcagatattcactttgagccattacaaaataactatcaaatacgtattcgagttgatggttcattacattttatgccaccacctcctcctcaaatgaatacaggcatccctgcccgtttaaaaattatggcgaaactcaatattgcggaaaaacgtcagccacaagatgggcaatttgactggaatgataataagaaccgttatgcaatacgtatctcaacattacccaccctgtatggagaaaaaattgttctacgtattctcagcaccatacaacagctatcattagaacaacttggcctgtctgaatctcagctacggcttttagttcaaaaacttcacctaccacagggaatgattgtagtaaccggccctacaggaagcgggaaaaccctcacattatacagttgcctgaaatatttaaatcaaacgcagaaaaacatctgtagcgttgaagatcctatagaaatccccttacagggaattaatcaaacacaagtaaataaaaaaatcgggctagattttgccaaagttttgcgggcattactcagacaggatcccgatatcatcatggttggtgagattcgtgataatgaaactgctgaaatatcgatgaagtctgctcaaacgggccacttagttttatccaccctacataccaattcgacgatagataccttatcacgcctgcaacatctgggaatttcaggttataccaccgcttcatgtgttaaattaattattgctcaaagattagtccgtaagctttgtccccattgtcgtcaacccgcagaaaagcccgaattcatacatactggaaataacgatacaaaacaaaatataacagtaaaaacatgggtagctgtcggctgtgagcactgcttttctggctattatggcaggacagccatctatgaatttctcgaactcaacaaccaccgactaaagtcggtgggttagtgattaacggactgaaagtccggatacgcatcggctaaacgatgcgtcaattatccagcctgaagtgatcattcgggttcggttcaaaatgatgcgccagataggcctttatcatctcttccgttaactgacctaccgtcgcacaaaaatagcctctgccccaaaaatgctgaccccagtaacgctttttcaagtgagcaaactcttcaaacaacttacttgctgtccttccctttattcgcctcatgatttctgagggcgctaagctcggaggacaactcaccagtatatgtacatggtctttgctcacgaccccttctactatcctgatttcgaacgcttcacaggtctgacgaactaactctctcacccgtaaaccaacttcacctgttagcactttgcgcctgtattttgttacccacacaaaatgatactcaatctgaaataccgtgtggctgccatatctgtaatccatattgcacctctcgtgcaacacagtatcgcagctaaagctgaccgactaaagtcggtggttttaaccttttatatggaaaaataaaacctgaacttcaacagattttatcagaacaaccttctggcaagattccctgcttaccaaccctgcaacaaaaagacacgcttttatctgccggcttaacattggtcgggcaaggcataacaactctggaagagatttatcagactctaggccaggaagcataatcaattaatatccatatagaaggcaaagaatgaaaatagaatttatttatcactggaaagctgtgaataaaaaaggaaatattgtaacaggagaaaatataggtcagaacagacaagtgattttcaactatctgagccagcttgagctacaaccctacaccattaaacgccgacagattatttattacagtgaaaaagaaatggcttatcggctacattttacccaacaactaaatacattgctgacatcaggtattcctttgttacaggctcttaatattctcttaccagaatgtaaaaatgttatctggagatgcatattagctgatattatccataagattagtcagggagaatcattctctaccgctttacagaattatccacaactgttttctcctttattctgccagtttattgcagtaggagaacaaacaggtcaacttgaatcttgctgtcagttgcttattaatcgactagagcaacagaacatattacataaaaagttccaaaaagcgtatcgctatccattgataatttctcttgttgctataattgttatcttattaatgattattttcgttctaccggaattcaaacaagtttattctgcatttggtgcctcactacctttattaacacagctgatcttatctgcctctgactttctgactaatcatggtttttttatttccataacaacattaataatgacaattagttatttagcgttacgctctcgatttcctacattacacaaaaaagaaaaaatacttttcacccggctaccacttttcaaaaaactcataacatatcggcataccagccagatatttcatattctgtttatgactcaaaaagctggattaactttaaccattggtttggaatgtgcaataaacgcaacccatcatcctttatttatagctggaatcaaaaaccttcatcgaaaaatacagcaaggtgtaccaatgagtcatgccttgaaaaaagagtattgttttcccccattatgtaaacagttcgtcataattggtgaagaatcgggtgaacttgagctatttttaggtaatctagcgatatggtatcaagagcaatttataaactgtgctgataatttagctaacttacttgaacctgtattaatgctgatcatggcaataattgtaggcctgttactactcgctatgtatttgccaatttttcaattgggtactattttgacgtaacgtattatatacactgaatttctagttatgttgtggcggcactgatatgaatctaccaaggggagcgataactatgtaagtggagcatgattgtaataacaagaattatatatgtttgtttatagcccatatgcctcccttgagttacaatttgtttatataggctatcagaatatttgaaggatagaatgacttatattgttgcactcacaggtggaattggtagtggtaaaacaactatctctaatgtattttcatcccttggtgtcccgcttgttgatgcagatgttattgccagagaagttgttgctcctggttctcccgcattaaagacaatcgctgaacactttggttcggatatcctattatcggatggtagtttaaaccgtgccgtgctacgccaaaaaatttttgctgccccagaagaaaaacagtggctcaactcacttcttcatccactcatacacgcagaaacacaacggcaactgaaccaaatcaacgctccttatgctatttgggttatacctctgttaatagaaaataatttaatgcatttagctgaccgaatcttagtagttgatgtctcccctgaagtacaaatcagccggacaatcacgcgtgatggcgtcagtcgggaacaggttgaaaatattctggctgcacaggctgaccgcaatgaacgtctggaaaaagcagatgatgtcatattaaacgatcaaaaagagcaagatctcactgtacgtatagccgaattacatcaacaatatttgaaacaagcagaatcagtcagacaggaagaacgcaatgagtgatgcaacctctactattatttttgaacacccgctaaatgaaaaaatgcgttcatggttgaggattgaatcttcactgcaacaactcgaaaaacagtctcatctggattcacaagcaaacagcttggcattttttcgcacaatcgccgagttaattgagatactggaacgtggtgaagtacgttctgagttattaaaggaactggaacgccagcaaataaaattaagacaatggctcaatgctcccaatgtagatacgacgatggttcacagtctggtagagcaactgaaagagcggagccttgcattacaccatgctccccgccttagccaacagattaaagaagaccgaatcatcagcatggttcgtcaacggctcagtattccgggcggatgttgcagttttgatctgccgacattgtatctgtggcttcatctgccacagtctacccgggatgaaaccgtcagctcttggctaaacagtctcctaccactaaaacaggcattagaaagcattctggaactgatacgacagtcaacaatgttctcttctcaggtaagccataacggtttttttcaggggaatgctggtgatgccgatctgctaaggttaaaactagatatttcggaaaaccaattaatttatccgcaagtttctggccacaaaacccgctttgctatccggtttctgccaatggatagtgaaaatggtacagtacctgcacatttgtcatttgaattagcctgctgtaactttagagc

SEQ ID NO: 3075 - DNA, 31141 bp, Xenorhabdus sp.; identical to SEQ ID NO: 3074
  CDS (29759)..(30382)

SEQ ID NO: 3076 - DNA, 31141 bp, Xenorhabdus sp.; identical to SEQ ID NO: 3074
  CDS (26278)..(27618)

SEQ ID NO: 3077 - DNA, 31141 bp, Xenorhabdus sp.; identical to SEQ ID NO: 3074
  CDS (25697)..(26119)

SEQ ID NO: 3078 - DNA, 31141 bp, Xenorhabdus sp.; identical to SEQ ID NO: 3074
  CDS (10209)..(11876)

SEQ ID NO: 3079 - DNA, 31141 bp, Xenorhabdus sp.; identical to SEQ ID NO: 3074
  CDS (8812)..(10026)

SEQ ID NO: 3080 - DNA, 31141 bp, Xenorhabdus sp.; identical to SEQ ID NO: 3074
  CDS (5095)..(5808)

SEQ ID NO: 3081 - DNA, 34319 bp, Xenorhabdus sp.
  CDS (722)..(1720)
ccctgaacataactatcttttgaagctatcgcataatcacgcctgaaactggctaacattttataatcatcctgttgccaatttggtaataattcacggtcatgattattggtaaataacaaccataataaattacgttgctcatcttttatctggctgaaatgaaaatattcatcggcctgctggttaaattccagcacatcccaatatagatttaatacatacgttaaatgaggggataaatcccccatcaatcgtttgatcaggggagaaataaaacttcgcgtctggctggtggtaataggttcacgcatatgggccagtaaatagagatgccgccgttctgctgaattgagtttaaaaacactggcaatattatctaaaaaagttgccgatacgccaatttcccgaccttgttctaaccatgtgtaccatgtcaggccaacaccggccaaagccgcgacttcttcacgccttaaccccgatgttctccgtcggccaatgtgcggtagcccgacagattcagggctgatactttctcttttagtacgcaaaaaattggctaattcagtacgagttctttttaactttgtcattgagctcaaacccattacttttagtaatagtataattggttaaattgtaacaggataatatgagaactaaaatccgcttaatttaaaatagcgagggggttctgattatgactaaaagggattatttagccctgtccgtattattactggctggatttgtgactatttttgatttgtttgttgtcaatattgccattaccaatatccagacccacttacaggcaagtatatttcaggttacgctggtcattgtgacctatgaaattgggttcggtttattgctgattaccggtggtcgtttaggtgatttgtttggcagacggcggttatttcagtttggtattcttacctttacattcacatcattactttgtggtttagcgccaaccgcaaatactttaattatcgctcgtttcttgcagggccttgctgctgcactcttatttccacaggtatattcctgtattcgtgttaatttcgagggagacaacgcacgcaaggcatttggattattgggtatgactttagggtttgctgctatcgcagggcaaatcttaggtggatggatgatatcggccaatatctgggatttacaatggcgctctatttttctcgtcaatattcctgtcgggatgttggcactgattttttctggttatattcctgagagcaaggcgaaggaaaaaacagggttggactggggaggagtcgcactttccggtattggtatttttgctttattgtcgccacttttagtcggcccagtcctgggatggccagcatggtgttggttactgctcttgttctcactggtgatgttgtcacaatttgtacggcatgaaaggcgttatgtctatcagggaaaaacgccattactcaatttcgagttactgaaaaacagacagttcagcttaggttgcttattggttttgtgtatctattccacatccagttcattctttcttatttttgcattatttttacaaagtggtctgggtcttgctgccatagatgccggactaatttttgcacccgccagtattgggtttgttttatcttcacttacagctccttactgggttaaacgattcgggaatcgggctattgtggcgggagcactgctatattttgtctcatttatttttccatataaaaggttaaaaccaccgactttagtcggtggttgttgagtgtcttggctgtcgttatcgctcaattacaggttgactctaaattactgttaatcattccggttgttaccattttggggtatgggcagggttttgtgatgacaccattacttaatattgtgctggcttttgttcataccaaatttgccggaatggcttcaggtattgtctctacgctacagcaagttggtgctgcttttggggttgctattgtcagtattctggttcaatggaaattagacattacaggtgtttctgcttttatgggatatcaaaatgccttggtcagcggaatgttctataacatcgctgccgcttttgttgcattttgtctgttgagagcgttgaatcgaacgattccatgatgactaaggtcattgaacgatagagtgcaaaactttgcactctatcgttgttaacaggctgatacgccaagatccgtctttcgatagacattgaacttaatagccacctattaaattttaataactatctatcttagaatgatcttttttattcactttactcgaggaaatatttgatttgtgttttccctcttttgtgaaaacaacaaagtattcctcaagtaattttttcaatactttaccgatagtggcatattcatactcattgaggttggcaagcgatattctgcctgcgggtttcagggtgccgaaacccgaacctggcaacatcacaatgccggtgtcttcagcgattttaaacaggaactgagttgaatcaaccgtacccttcacccatgttgcgaaagcattaccataaatgcggcgggatatttcctccagatcaagcagcgtatagtaatcaacggattcttcatcatcaggctgaacaatgcccagttcacgatatagcaccgcctgacgccgacgaatgatcttggttacagaggatttataaccattatcactatccatcagggaaaacagagcaaacagtaccatctgaatctgctgtggggtggataatccggcggtatgattcagcgccacactgcggctgtctgcaacaacccggtcaaggaagcgcagggcactgacatcaggagtgagggactcataacgtttattcaagcgttttttctcactggcaggtaaagcagccagtttctgctcgagaatattgttacggtgtaacgcaattacaccgagacgccatccggttgcaccaaaatatttggagaatgaataaaccagaattgtgttccgtgggcaggtcgcgaaaagggatttaaaatcattagcgaaagtgccataaacatcatcggtaagaataatcaaatcagggcgttgacggataatgtctgccagtttttccaaaccatgcttatcgattttaacggaagccgggttactgggattaacgcagaaaaatatttttaccgaaggatccaacaacttttccagctcgctgtcgggatactgccagcggtttttgggtgacgcctgtaccatcaccgtcttaagctgaaaatcttcaagctgagggatctcaatataaggtgtaaagatgggggagcctattgctactttatcaccgaccttcaccagaccattattgcgtaggctattgaacagataagtcattgctgctgtgccgccctcaacagcaaaaagttccacatcatgtgctgaaaccagaccgcctaccatttcttttacaatgtactctcgggtaatctgctcactaatccgctgcatacgaggaggttctgggtagttggctccgagaattccctcaaccatttcatgcagaaactgagaagctgacagaccaagttgatcacgaacgtagctgacggctctggcgagaaaagagataccgggttggtcatggtttgctgacagaaactcatcaaagcgcgcctcaataccctcaatccggggtaatccaccgatatcatgcggcaaataagaataggagagctcagcttctgaagtggcaaatagacctaaacgccaaaacgcccgacgcggtaaggttgccagaaaattcgggttcccacgacctgcattgagcatcgtgcgcccggatttacttgacgccagttggatcaacgcatctttaagttcaaaaggactgagagcagcatacttatcctgttgtttagacatgaagtttactccacttgtaaaggttacattggcttacgcaatagcaacgatgagtgggcctaataaagtcaggaacacattggctaaaccatacgtcacagcaaaaggggctgttggtatggcattgccggctttattgagaacttcaccaaaagcgggattagcactgcgggttcccgacaaggctccggcaaaaatggcggcattgtcatagcgtaggagataacgcccgataaacaacgtaatcatcaacggcacaacagtgaccaccacaccaataagaaaaatcgaaataccgcttgagcgaatagtttcaaccgcctgcaggcctgattgcagtccaactactgccacaaaaccggccagccccaaatcacgaaggattgaagaggcaccgctgggtatattaccgctcagcggcttacgcgactgataccagccaaaaagcagaccggataaaagtgcgccaccgccactttccagagtaagaggtactgagccgatacgtactattagcaggccgattaataggccaacggcaataccgaggcagtgaaaaagcaaatctgttttgatacttttcaccagagaagcgccgaccagtgatatcgctcgctgaatatcctgttcgctgccatacagcgttatcacgtcgctatgcttgatgaccgtatcatcagaaagggtcagcatattttctccacgttttatgctgatgacatagataccatgacgtacatcggaggccacctgagtgcggagttctgcaagccgcttattaataaaggccgggtttaccaccaacgcttcattggttgtcatgaccatcgatggcccgtgctcggttagtacttccttccccagatgcttagccagaccgataataccttgtcggcgtccgaccagaagtaaaacatcattctccataaggagaagatccggcgtaacatgaatttcttctcctccgcgctttagcctttccagcgtaacggggaactgtggagaagctaacgcttccagttctgagacgtgtatattttttgccggtccggcctcatagagacggcccacaatacccggtagagcaggcgtctggtctgcggctaataaaggtgctcctttgagtaaatccagctcggctttcatcgcatcttcccgaatggatcgcctcattattttgggcaggatattaacgcagataatgatggtaccaagggaaccgaagatgtaagtcactgcgtaaccgacggcaacgttgccttgcaactgctgtatctgtgccggagccagatcaagtttagcaatggctgcaccagcggtgccgatgatcgcggattgtgttagtgcaccagcggcgatgcccgcagcggtaccttgatcaagagagaaaagttttgccatgacgacgagtgtcaacagcccactcactgccagtaccaaagaaagtgcgacttcacgtagcgtttgacggcccagtgaggaaaagaatttaggcccgctatcaaagccaacagcataaataaacagggcaaataggacatttttaattccgtcgccgatactgacaccaacctggctaatcaacacggctacaaccagtgcgccggctacaccacccagttggaatgctcctagtttgaacctccccaaccatgtgccaccagccaaagcgagaaaaagtgcaatttcaggagaaaggctaaaaagttcatgtaaccaggccattaaattagctcctttgttttcttagatagaaattagcaatggattacagaatgactggcttttaatgtgataagcgaaataatctaagccgctccactaaatttaacacatttgatgcagtatgaattttgttggcccgatacgacaaatccagggataaaataagagacaggaaccgggtattttatgcttaagaatgcagagatataaaccgggtacttgggatgaataattccacctttactggctgcaacttgaaagagggaaaatatatttttaaaacttataatacaacttccttacatacggtacggatactgttgcatttcatcaccaatagcgtctcgtacatgcttcaaagcttcggcataagatttaagtagcttcaatgtatagtgaacccgattttcaaaagctgtatcactgcaaaccaattcaggagaaattaaattaccagcctgacggaaaattaaatgatcaggcaggaaacagacatggttatttttaaaaccagtcatacgcagttcggagataggataaaccccatttggtccactagaaacactggttaataatgcgggcttatgtcctaattcggtcacagagcaatataacaataagtttttcagtgctggtggtaccattccatgccattcaggagagacaaaaataaaagcgtcactgtctcttaaatgatgagcaattgcctgccacgggtgggattccgctgagatatcggttgtatagccatcatgaagagggagttcgacattacataattcaagaaatgtggtatcggtaaatccatattcactacttaacttctgtaaataacgggctatacgctggctgttggaatcctgacgctggctaccagagattaaggttaacttcatacggtaatattccttttatttttaatttgcatttttaaagttgtagggttgtggagctgtttggatcctatttatgggtctgggtatagaaagccaaaccgcgatgataatgatgcaggctcctataaattggaagaaagaaaatgtttgttttaaaaaaacaaagccaagtatgcacgccgataatgcactcataaaacctaaaaaagatattgtgacaaccggtagtttttcaattcccctaaaccaaataatgtaagaaaaaaccgcaccgataaggcataaatagctatagccgaagatattagttaatgtaatctgatgcggtattccctcagttaaaatagccaccggcagtaacatcattccacctaacattaattgccagccagtgaaactcagtaacgataaattagtagggcggttccaatatttggttaaaacaacacccaatgccatacagccacaaccggcaaaaccagcaataattccctgccagtttaaacgtgtgtttgcattggttacgaggagtgcaatacctataattccgagaatttctgaagcgatatgcattttcgtcagcggggttttaagtagaaaagtacttagcagaataacaaaaataggctgagatgacataatcaaagcggctgttcctccgggaaggtaccaagcagccataaaaaggaaatagaaaaaggctccgatatttaataacccgagaatagccagacgaaaccaccatattccctttggaaatgtacggcaaattaacagtaataaaattccggcaggtagtgctctgagagttgcagcaagtaagggggtattaggtggcaacatttcagtagtaataacataagtgcttgcccataacaatcggtgcttacgcaatactcatatacctgcgggcattgtagttacttcgtctatttatactttgattacagatttatctatcggatttcaagatgaacttttattatcttcgtattgaaattcatatggactaccatccaacaattaaccctatacttccttttaaaaagtatctttatgtaaagataaattaaaataatagcctatacaaattttatcaagtatcttttcacaaaaataaatgaatagggaaaaaacatgaagtacgatcacgttgaccgtttactcatacagtgggaacaacaacgtccagatcttgacccatcaccgatgggcgttatcgggcgtttatgccgggcgaataaaattattgaacagcggttgcaggctacattcaaaacctttgacctgagcgctattgagtttgatattcttgcgacactacgccgtcataattctccaatcacaccaaccgaaatgtatcagtcagttatgttaacttcaggcgcaatgagcacccgtattgaacatatggtgcagcgtgggttagttgaacgtgcggctaatgacaaagatcgacgcagttgcaaagtctctttaacttcagagggaagggcgctgatcgataaagcggttgaaagtcatttagaaaactcaagagagattcttagtgcattatcgaatgaacaacaagagcaattggctatgcttttgcgtcattggttactagcaaatgagtcagatatttaggattagtctgataattttgattttttaaaagaatctttttaaaaaaatatttcttaatgtgatgtaaaaataactttagtaaaaaagttcattaagaaatgaaaagaaaagaaactttgccccgatttaactcagggcaaagtccgggaggtcaatcagagattagaatttcacgttaaatctggcccaataagtacggcccggctcgttaacaggcgtattggcagaataaccaaaaccatcatttcctgcacgattgaggtgttcgctgtaggttttattaaaaatattgtcaacaccggcactgacctgcatatttttagtcaccttataggcggcattagcagaaagaacggcaaaaccggcactgcgatcaaaatcccttccggctacactgccttcattcatcgcaatctggttttgtttgctgaccagacgcaataaaccgttgctactccagttgccatactcccagctcaggccaaagcgggcttccaatggcggagtttgtggcagtggacgatggttggaattatttctcgcccaggaataagccagacttgcattggttttccaattttcattcagatgatagccaatccccatttcaccacccagtatggtggcatcaatgttgctaacgttatcggctttttgaccggcataatggaacagaataaagtcatcgattttacctgcataagcggaaatccagccttgcaaatgatgatcgttataatgagcaccgatatctaactgtgttgttttctctgttttcagttgattaaaaacacggccttttgaccagaacaactcccaaaaatcagggaagcgctcagtataaccaagtccggcatagaacatcaccggagcttctttcaggttatgttcatatcggacaaaaccggctggtaaagtatcggttcgttcttcctgtttttcctcgattttttgaggatatctatccactagaacgcgatctaaacgagcaccactgattaccttactttgttcgtcagcatcccaggtcagctcgccaaaaacaccataatcacggaaacgggcatctttttgtgattgattacggtgcgtattggtctgcatatccacaccgctttgtaatgtgaaatcttcccaaagccatgtacccatcatgcgtccgcccagagttttgcgatctacctgatgagacattttcatgccattaccatgcccaccgtgactgccgtgtcctccatgactaccatgattcatgtggctacttttcatatgcccatttccgtgtcccatatggctgtcgccagatcccattttcattgctgcaagggaagggcgggataagttatccattacatgagtagtggcgttgtaataaaaattagtttcaaacttgtcaaatacatcgccaatattggatttttcaaagcgcattcccaaactttcgcgtttgaatttcgagccatccattgctctaccagcatagcgagcctttccatctccctgtccggcatttaactccagcagggtattatcatccggtgtccaacccaatgccacatccgtattccacttgttccaatgggaaggaatgcgatagccatcaccgtctttgtagtcattagagcgggatttattaccgataaggcgcatatagccatactgattgccgaaactcaggtctgcattaccatcccagcgtccattagaaccagcgactgtgctgatattacctttagcatccggttctgaaaattgtggacgggagcgttcaaaacgaatagttcctgcggagttccccggtccccaaagaacagtctgcggccctttaaccaaactcaaaacatcataactttctggtgaaatatatgaacttggggcatccatccgtgacgggcaagagcccataacttcgccgtcatcaatcagcatccgtaagcgagaaccaaacatcccacggaataccggatcgccattagtaccgccactacgaacctgagagaatcccggaatggttttcagataatctgaaccatcactggcgggaacgggttgacggggagttttgagtgaggaaaaaatattcaggggcgaaacagccggagcagttacggtaatgactgattcactttcataggctacatttccacgaactgagtttaaattttttgtctcttcagcacgttcttttgtggcagccataccatttggaataaagagtgcgatagctaaagccgtagccaaaggcgatgcgctaaacaattgtgtagtagacatgaaaaatattccttaattaatcacaaatcctgtttttgaatttgtttaaaacaataccgacttgccaaaaatgatttcaggcaagaaaaatagatgatttatttattcagataagcgaattaattaaggggtggtgcgcgtggttgtgactcaccatagaacagccggatagccgggccagaaaagcggggggctggtggcgcacgggaaatcgtcagcgtcaacaagatgaaaggaataaatgaacctgacaataacggcaggttaatcaatagctggcaataaccacaggcaatatcatccatcagccccatatgaacatgatcaacgccatgatgattcatgctgtctgattgatggtgactattttgcatatctggcattggcataccatgacatgcttcatttttcataccaccgcgatgatgttccagtgtttttgataccactggagcaatgaacagcatcagaattgccagcaaggcaatccaggcaggtgttcggcgctgtgatagatgaaaaagtgataacaaactattgatccggatcaatactaacgattgggcgccaatcttactgtatttttactgattttgttaaagaatttttctctgattatttggcgttagcactttccaatagtttaatgatgtctttatatccacgttggcgagcatgagtaagcgcagtaaccccgtttttatccggtatgttaacattagcaccgcccttaattagccgatcaataatgtcgacataaaccgaagaaccattacctaatacgacagcttccattaacgccgtccatcctaatttgttaatgtgattaggattaacaccagcatccagcaggatctgtacagtttcaggatgccctttttcggcggcggggatcagcgcagttcctccatagcggttggtatctttcaggttcgcgccatgatgtaaagttgcaatgagtattttattgtagccctgtgctccggccagcaaataaggcgtatcgagctgtctatctttagcattgacatctgcaccgctctggataaggaaaatagcaatcgccgcataattatgctgcgtagccagcatgagcggagtgcgctgttgcccgtcacgctcatcaagtaaagtttgatcatcattcaatagggatttgacggtttctatatcgttctgattgacagcatcatgcaaagggtttgcatacacgttgacatttaacaaacaaaaaagaaaagtgaaataaattggaatatatttaaatttcatcttgatatacctaattaatgtgaatatgtaggattcagaatccgaaattatcatttgattgagaaatgaatattttcgttttttaattgcgctatatcagttctatatttaatttattcagaggcataaaagtaagatatgttacatcgagataaccctatcatatttgcataatatttttgatatgcatttttagactggcaatatcaattttattaagtgcctaatatcctaactcctccaaaaacaacccaagaattgcattagttcgtttacctttgcgtgtcacgattgagattttagaatcataataaattttctcaggtaacagtgccttcataaaacctttctctacccagatgcgagcgtagtgatcaggaagaaatcccacgaacttaccggtaagaattaaaaatgcgatgccttcgcgatcagatgctgttgctgcgctgttcagcaacttatggtgattcattgcttcagtacttatacgatagccgggaataacggcatccagttgatttaaatgctcagtatcaaagttatccgcaagcagaaatgcttcatgtgtattactacaataaagatatgatcgttcattgtagagtggtaagtaatttaatcccgacaatggtgtgataaaaggtagggcgcccacctgtaatcttccatccaatatacctcgttcaatttctgtcggagtactcatacttatattaattagaatgccgtcacttgctgaacgcaggcgctccagcgcgttagtaatccgcatcattggttgtgttacaaggttattaataatgccgatattaaattctccccgtaactgcttatgtatttgattgacatgctggcggaattcttcaattgacgccatcatggtttcactggctcgcagaatttcccgcccttcatccgtcagagaaaaaccagcgcgaccacgttggcacaagcgcatgcccaaacgcttttccaaatcccccatatgaaggctaattgctgaacgagtgataccgagcaggctttcagccgcggaaaaactgccacattctgcaacgatcttaaatatacgtaataatttcaaatcaaaatcagttacttgcctaaagtttgcaggtttcatttgcgtgagtaaactcataactaatgattcaataaataagatttaacttgaatatcgttttattgcaaactcactgtgatgactttttgttacattttcgtgcgaggagttaaaaaaatgtcagatagcaataccgttcaaacccgttccttccatgttaatccatcccatgatctgaatttaaaagcacactggatgccgtttagtgccaatcgtcattttcagcaagacccacgcatgatcgtctctgcggatggtcactggctgacggatgataaaggtcgtcgcatttatgacagtttatctggtttatggacttgcggagcagggcactcacgctcagaaattcgtcaggccgtttctgaacaattaggtacattagattactcacccggtttccagcatgctcatccactgtcatttcggttagcagataaaatcgctagtctgatgcccggcgatttaaaccatgtattttttaccaattcaggttctgaatctgttgatacagcagtaaaaatagcacgcgcatactggcggataaaagggcagccgactaaaaccagaatgattggcagaatgcgcgcttatcacggtgttaatatcgggggaacaagtcttggcggtattggcggaaatcgcaagatgttcggtcagttgatggaagttgaccatctgtcacacaccttacaaagcaatatggcatttactaaaggcgttccggcaactggcggcattgaattggctgatgaactactgaaactgatagaacttcatgatgccagtaatatcgccgctgttattgtcgaacctgttgctggatctgccggtgcgattgtgccaccacaaggttatctgcaacgtttaagggaaatatgtacccaacacaatatactgctgatttttgacgaagttattaccggattaggccgtttagggcgctggacaggggctgaatattttggtgtcactccggatattcttacttttgctaagcaggtcacaaatggtgcaattcctcttggtggtgctgttgtctccagtgagatctacgacacattcatgtcacaacctcttcctgagcatatgattgaattcagtcatggctatacttattctgctcatcctgttgcctgtgccgctggtctggcaacgttaacattactggaaaaggaaaatctgatccaacaatctgctgaattagcacctcattttgaaaaaatcctgcatgaactcaggcattgccctaacgttgttgatattcgtaactgtggtttgattggcaccatccaaattgcaccacggaatggcgatggcgtgatacgtccttttgaagcgggacttgcattatggaaagccggtttttatgtccgctttggtggcgatgggctccaattcggcccaatgtttaatgctaaacctgaagaccttgaccggatgttcaatgcagtaggtgatgttttgcatcaggttaaataaagggaaagagtcctatccgactttatctatagagtttgtagatttatttttccatataaaaggttaaaaccaccgactttagtcggtcagctttagctgcgatactgtgttgcacgagaggtgcaatatggattacagatatggcagccacacggtatttcagattgagtatcattttgtgtgggtaacaaaatacaggcgcaaagtgctaacaggtgaagttggtttacgggtgagagagttagttcgtcagacctgtgaagcgttcgaaatcaggatagtagaaggggtcgtgagcaaagaccatgtacatatactggtgagttgtcctccgagcttagcgccctcagaaatcatgaggcgaataaagggaaggacagcaagtaagttgtttgaacagtttgctcacttgaaaaagcgttactggggtcagcatttttggggcagaggctatttttgtgcgacggtaggtcagttaacggaagagatgataaaggcctatctggcgcatcattttgaaccgaacccgaatgatcacttcaggctggataattgacgcatcgtttagccgatgcgtatccggactttcagtccgttaatcactaacccaccgactttagtcggtggttgttgagttcggctggtattgttgaatattgcttttgctggggcatcagagttggtcagggaagtgggtatggactggctgtcacaggatattgccgctcggctttcagcccgtgccgcacaaggcattggtgcagggttgcttactgcccggctgggaattaagtcgatggagttgtgccgccctttaccctggattgatggcgataaacctaaattaggtgatttccggtatcagttaattagccagctaaaaagtacactggcgactaagccgaaaacgagaaatgaagccaaaaagtcgggctcataactcaggatgatactgtcatttaaagttgacactttgtcttactgtcaactttaaatgacagggggcttcatctatcgcacagtaacgagtaatatttcaggtggttatgaacattgtgtaaataaggtcggaataaatgcgattggaagttacctgtcaggatcgaatcggactgactcgcgagttacttgatttattggttttaagaaatattgacctgaaaggaattgagatttctcctgctcgtcgtatttaccttaattttactcaaattgatttcaataccttccgcttgttaatggcggaaatccgccgtattaatggtgtgatggatgtcaggacggtggcgtttatgccatcagaaaaagaacaccgggcgatgcgtacattactggagtctgtaccggatccgattctgtccgttgatatgaaaggaaatattgatttagccaatctggcatcacagtcattatttggcatcagtaaagaaaaaatcagccagaaaaatatcagccaacttatcagtaattataattttcttcgttggctggaaagtgatcaccccgagcctcattcagtcacgttaaccatcaaagagaaaacctatttgatggatgtgatcccgatgccgctgactgatgaaaatcaggaaattaaatgtgtcggggcagtcattatgctgcgtgtcttcacgcaggcagagcctgcccagaaaaaacgtatcgtcaatgatgatcaggcttttgaaaatattgttgctgttagcccgaagatggttcatgtcgttgagcaggctcgtaaaatggctatgctggatgtgccgttgttgctgattggtgatacggggacagggaaagatgaatttgccaaagcctgtcatttacgcagttcaagaggaaaacagccttttcttggcttaaattgtgcctctatgccggatgacgtagtcgaaagtgaattgtttggctatgcggcaggcgcttatcctaacgcaacggaaagtaaaaaaggcttttttgagcaagcaaatggcggtacggttctgctggatgaaattggtgaaatgtcaccccagatgcagattaaattattgcgtttccttaacgatggaacatttcgtcgggtgggggaagataatgaagtgaaagtggacgtcaggatcatctgcgccacgcagaagaatctggttgagttggtacgaaaaggggaattcagggaagatctctactatcggcttaatgtattgaccatcacattaccgcctttacgggaacgtcaggcggatattatgccactgacggattatttcgtgacccgttttgccgaagaacagggtgtagaaaaaccaaagtttgcccctgatctggaacaattcctatgcagttattactggcccggaaacgtgaggcagctgcgcaatgccatctatcgggcattgacgcagcttgaagataaccagttaagctcacaggatattcagttaccgcatttagaagcagaaacttcatttatcagcgaggatattctggttggttctttggatgaaattagcaaacgttttgaacgctctgtcctgacgcgcctttatcgtcactatcccagtactcgcaagctggcgaaacggcttggggtttctcatactgcaattgcgaataaattgcgtgaatatgggttgagtggaaagaaacatgctgaatcgggtgatgaataattttttggtaataaaatatacagatttcttgtggcataaatttccccttttattcttgctctgaatcttctgaaggtgggcaggtggtaaggatattttgtagagatgaggagaagttaggagggaaacaggtttggatgataggggattttatcatcgggattaatttagaaatagaggatggccgttctgctatttttattgccaacatacaatctatggcatgtagaaatgataatgaataaccggtaagacaccgttccgttaaaggctgataacgatcttcaatattgcgtactatgcttaccggtggtggcctcccgacaatcaaagtatgcaatactgcccctagcgcataaatatcactccaggggccctgctgcccctcttcattggccgtgtattgttcacagggtgtgaaccccggcctgaccgttatttcttcttcgtcagataaacgttctgctattttccgggcagaccctaaatccagcaaaacaggtaatcgatcattctgaagtaaaatattatccagcgaaatatcacagtgtagatagccagcctggtggagggtgttgatggcatcaagcagaggggacaaaatatggcacagccaactctgtgtaactatctttgcatactttacctgtaatactttcaaggtgatgccatggtaaaagggagtggcgatataagcggtgctgttctgttgccagaaacgtatgaagcggggtaggcacggatggttaaagcaagtcatgatatgggcttcacgcataaaactgtgaagcccgattctgaatctttcctgtaaatttgggtggcgtaattttagtttcaaatcattacggcgaaccacaatcatggatggcagatattcttttatggcaactgcacactgtttgctgtgatcccaggctcggtatacgataccaaatcctcctttacccactactttttcaatttccaactcattgaaacagtatccaatgggtaatgcctgtaataatggatgcttggtcttaagagagttattgtaagaattctgcataatagatggcctcttgaacctcatgttctattttttgtcgaattttcaagttgcctctttattggctgtgtttatttactccgaacatttagtcctcctgttaaattatgtgggagtgtgacatggttggtatgaaattatttatactcttgaggaaatgtttataaacgacgcatgacaaattacacacggatatcatgcaggatctatatatcattcgaaaactggaaattaagttctccctgttcgagcgacacctgtaattggttaaattgttcaccatgggcacaggcagatagcagccgctggcttatctgaggcaatagagtattggttaaaatagcatctaccgtacgaccccccgactcaacttcggtacaacgactgacaatattttcaatcatggcttcatcgaacgtggcagtaataccgtggttttccagcaatcgtttctgtatgcgtccaagctgcaaataaacgatactggtcatgacttcatcatctaatggatagtatggaatgactaataaacgccccagtaaagcggcggggaatgtgtttaatagcggtttgcgtagtgctgaactaagctgctccggctcaggtagtgtattactctgttggtaatgctggtagcacattgagttgactaaatccgcgccgacattcgatgtcagaataataatcgtattacgaaagtcaatatgacgaccttcaccatcttccatccaccccttatcgaatacctgaaagaaaatttcatggacatcaggatgcgctttttcaatttcatccagtaatacgacactgtatggacgacgacgaacggcttcggtcaggacacccccttcgccatatccgacgtagccgggaggagcaccttttaatgttgatacagtatgtgcttcctgaaattcactcatattgatagtgatcaggttttgttcaccaccatacagtgtttccgccagagcgagtgcggtttcagttttaccgacgccggaaggcccacacagcataaagacccctaccggtttattagggtcgtccagttttgcccgtgaagtgcgtacccggtttgcgatggtttctaacgcatgatactgaccaatgacacgctggttaagggtatcggctaattgcaatacagcctcaatttcatctttcatcattcggcttaaaggaatgccagtccagtctgagacaacagcggaaacaacattactgtctactgcggcaaagataagaggttcttcaccctgtaacatttccagttgttgttgcagctcagccagctccgtatgaagagtgattttatcattattgttttgttcttcatcggcttgttcttcatgtaactgaagacgtagctggataattttgtctgtcagcaacaattcctgttgccagcgcgcttctagctgctcttgttgctctgtcagcgttgccaactggctgagaatattttctgcccgcaggggatcgcccataccaactttggattcccgttccactattcccagttcaacattcaacgaatctatcttatgacggcagttttccagctgcgggggttctgcatgctggctgactgcaactctggcacaggcggtgtccagtaatgcgatggctttgtccggtaactgacgggcaggaatatagcgatgggagaggtgtactgctgcatcaaccgcttcatccagtaaaagaatacgatggtgtttttccagcgtattgaccagactacgcagcattatcagagccttggtttcatcaggttcatgcacctgaacaacctgaaaacggcgggtcagggccggatctttttcgatatattttttatattctgaccaggttgtagcgcccagtgtccgcaactgcccccttgctagtgctggttttaataagttagcggcatcgcctgtaccttgttgtccaccggctccaatcagagtgtgaatttcatcgataaacaaaatgatgggtgtcgggctggactggacttcttcaatgactttccgcagacgggattcaaactctcctttaatacccgcaccggcctgtaacataccgatatccagcagccaaagctgaacgttcttcagcgggggaggaacttcgccagccacaattctcaaagccagaccttcaatgaccgcagtcttaccaacgccagcctcaccagtcagtaatgggttgttttgtctgcgacgcatcacaatatcgataatctggcggatttcttcatcgcgtcctgaaacagggtcaatttcaccattacgggcccgggctgttaactcctgtccgtattgttgcaaagctgagcctgttacagactgtggcgatgctccctgagtttcggttgatgatattatgctttcctgagcctcatcactgccatcaaatatattgttaaaattatcgatcagggtatcggcattgatatgatcaaacaggggagaaattgctttcagtgcattgcgaagattgaaagtttttaatatacctatcagtaaatgcgaactacggatctgagcaacaccaaattttagcgagccgtaaacccaggctcgctctacggcattgtcaatatgttctgagagatcagaaatggcactggcaccacggggcaggctatccagcgcagcaacaatatctttggtcaatgcagattcatccagccctaaatggtggataagtttctgtaaatcactgttttgttgttgcatgatttggtgtagccaatgaaccagttcaacataagggttaccacgtaacttacagaaagcagtggcaccttctaatgatgtgaacaggatcggattgagcttaccaaaaagtacggaacggctgatttctgacatagcatgtaatccgtgatgttgtcgttgataatgtttaggtacgtaagtaataacgagcatttagataacaacccgttattagagagcaaaaggcaagaaaaggtataccggtcgggagtgtgcgggtaaaactagggattgtagattaaatcatcacgatggattttctgttccatcttcccaagccaactgcttagccctagttttaccggatctgacagatggataccctgtatatctgtacgatgaagtgccagctggatatcccatgcatattcaatcccaagatattgacgtacccagtcgcgtaattgttgtgactttggctggtttggcaggaagtcttcatactctgatattgtcagtgggccaagtttgatgcggaatttatactgaacatcatataatgcagtccccaaaaaggctgactgtcctaaacgtggcatgttacgtccggcttttaaccgggcctgatcctgaatctcaacatccagccattgcggaatattttgtttaatctttaacggaatattgaagtaggtgaacagtattttttccagcccttcagcactatgcccctgacgggacaaatggcctgataataaatagcgggcatgttcattaatagaatctgcgtttttctgggcaggtaaacccataccaaccagacaggccagataatggcagaaacgctgattatcctgacgatccagcgatactgtagactgcgcattcgcccaggcccgataaaataattgtattaacctattgtgaaataaattagcgaacgcggtcagcgttggatcctgatagttatactgtcgggcataggtatattcggtaatgtgagtgggtagtggtccgtttggcccgaatagaccaaaactgtaaatcagtacgtcatactgttttgagtttttccgttgtttggcttcagagatagtacaaggggcgaatatcattgatgccttttgccctaaccgcagtaggtcgtatcgtggtaatggggatgaacccagcatataatattccccggactgtgcatctatccgccgcagggtctggaacagatcgaactgccacggcgtctgggtgagttcttgccagaaattatcaggtagacggcttatgctgtgaatagcaacggcacctgtttcactcatcgtcatttcccccattataacagctgttttttacccattcgggccggccagtaaccgattttgccgcgttgctggctatagagcgtcatttcagtgaaggagttcatggtaaccaaatgagagaagagtcgttccagaacactacccagtaaccaagggctggttccggcaaactcctgctcatcgacttccagctcaattccgacaccacgggcaaaaacgattgggccgggttctggtactctgcgatgaattgttttcagtgaacaatggcgaataccattaatctgacgggcagtggccggttctgaaagattggcataaagactcagcaattgtcgtaatgcctgagtgccttgttcatcatccttatccatgaaattcaggtaattgagctgtaactgactgattaatttccaggaagctgaaccctgtgccagagccggatgtggtatggtcggccttttaagaaatacaatctggttgattggaatggaatcaagcatgacaaaactgtcgatatcctgttgccgcaacatcgcagataaatcacggttggtacacatcacatccgcagtaaggaatttgagttcattcggccagggggagtgttgttcatcaacaatggaaacaaaggcttctgtgccaaggtagctggtgcgggttccataatgtagggagtgctcagacaaaatccggggatcacgacgaagggaaaaataggcgccataatttcctttatcatcactgaatgttgaccagaaaggtcggaagatctgagtttcccgtcgcttgatatctgcaccgtgcaggcgttgtactgaaaaaatttcgtaatccagtggtcgggtattatcaaccactaaatggtattcattagtactctcttttagcgtgacccgttcagtcagtttagggaacaggttaatgacaggagtactgttcagggctaagtaagagacatcaaccagatgctctaaatcctcatcaattttgtccaaaagtaggatcagttcaaactcactctcttttttagtctcttccagcaaagattgcatgccgctaatactgaagaactgaaaacgagccggaaaagcaaaatactcatgcagctgtcgataaccgctgaacgtgcgtggatcattgggtaataatgactgttcatcatcaaacccttcgtgatgcggggagatatcaggtaatacctgatactggggggtatcaccgagagtctgacagatcattccgacgcaatgttccatcagcagttcctgcaattgctgagcctgaatatctggtccggaaagaaagaaaactagtttattgagttccagctcactgaggaagaattttccttggcaggtgagatgaatacgtaacgcactcactgcaccgcactgatgaagatttaaagatgccagaggaatattggccggaatttttcccagttcaactttttgcaaatgcaggggttgcagaataacatcctgtgccgtgctgtactgaagcgtaataccgtcttttttcagtgactgacaatgcatgatagtcccgcgtggtactaaaaatccgtggctgatatcccctttactggtatcgggctggagctcggcaatagacattgacggtgtaggagccagataattggggcacagcatctccagtaattgttgggaaaagttcggaaactctgcatccattttcagctgaatgcgggaggtcagaaaagcgaaaccctccatcagccgttcaacgtaaggatcagtcacatcaatgccatgcatccccaaccggttggcgactttcggataacgctcagcaaattctttgcccatctcacgtaaatagatcagttcacgattgtagtattcaagcagtttgctatccaaaatgtattctcctgttttttgccggcttacccagcttctttaatagtgaaatagccattttctaaatcaatatcactgtgaaacaggaactcaagtggccagggaacacaccataaaaaccctctgatctcgatagataatctgttgtataaagtcagtgagtgggtatctgaaacacaattaacttcaagaccgtcgggaataatgcggggttcaaagatatgtatcgctttagtgattttatgctggatatcctcccattcgatttcagacatgagcttaccggccagaggctccaggccaaagttatagacggagcgacggatttccgggaaaggggaaaggttctgttctgattcgccgttgatactattgagtaaccactgtaaatcccgcagaagattctggcgtaatatattgtgtgatatcagatgattactggctgcctcttttttcttatcgggttcattatcggtgagcctgtccagcagggaaggccgcattttgtctctggcagtgatatgtctggtattacccggacgatgatagccactatgtatcaaagtcgtattgtcattcatggggagcctattaattattagcagtgatgatagttagtcgtgataatagataactatgggcaatagggttgatatgctgaaaggtttgttcccgttgtctttcagcttacaagctgaaattcatggggtatctgaagaattgatggttttatccggtctgtttttttatttttttctgggaatttttatagttatttacttcgttttcataggccaacaggaagttcttaccaaacaggccggagttgtgctcaaattcactggctgttttttgataatgtttagtaagaaactcccataaagatgctttgtaggttgatgataatgacaaacgtggcataccgccttcgtcccgtgctttttgctcaagaatagtgggatggaagagttgcaggatatctaccgtaatggctcgcatcccggcaatcattcccagttgatgcgcttgtaattcaactaaaatatcgcgggttgcctgctcaatagacataaatcccggcatatgatcaccgaacatctgaaccagtaccgattgaccagaaggtaataatttaaagggattattggtatctgataacatttgggttattccggcttctgcttcccgtttcagtagggtacgtgaagtattgagtgcaacaagcccctgagataactggctgataagctggcctaactgatacatacggtgttcatcaaactgtggctggcgaagatttttgagtcccataccttccaataaggctgccagtaattttccttccagtttgacaccctctgtcatatgttcatcggatttatagctgattggatcgatattcagccgttcataaatagggtcatcatcgctgatatgtgatggtgtgttaagttgcttaatctgctgattaatataaggctgatgactctggtcagtctgcttattaggtgtgttaaagaagatatcttctcccattgtttcttctgtttctgtgccgaactggtttgtgactaaatcttggtttatttctctggatagctcttctgttgtgaagagcggaggtaaagaagagagttgagcttctgattgtgtattatgatcagatgcagattgtgtgacagaaaccgatttaggttcggcaattttgggatgatcaggagatgttagtggtgcggcagtgcctaacatcaaatccaatgggtcttcatttttagtattttgtttctgtttaacattatggtcagaaaataacgccagtggatcgacttcaccttccttatcattgtgctcaagatcatattctttatcattctggaataaggttgtcggcgtattatcattaagaatatcttcctgccggaagaggggatccgtgttgaacatagtcacaggatctttcgcccgtagctgcagggtatccagatcagcagttgttttgatttttgctaatggatcaatgggattacgttcatcgttttcttgttggctggagggaaacagcgggttatggtcatttccatctgatgatgcctgatgcttgtcagaggaagtcggggtatcagggatcgtgaaaattttttcaaggccgtcccagacttcactgggaataccctgcgtatccgactcagaggatccactggtagcggaaatatcagtttgtagtcgtgcattttggtagggatcaatgacctgaatctgataactgccaatattcagtacgtcaccatcgcgtatttcaacctgacgattcggagccacagggattgtatttagcaaaagctcagttgcagaacctagattggtgatccggcattttccatctgtattgatggatacaatagcctgaacacgggcaatgccctgctcagcatcaggtaaaacccaactattatctttacagtggccgatagttcctcccggaggagagaattcataactcagttgtgttggctggcttgtactgttgtttttaacaatggtgaatcgcataagcgtggatccttattgttgataaggataatgtggatgaggataacctccttgtttcaaggaggttatcagtaaaatccacggtgtattattccagtttattagtgtaggaatcccaggtataggtaacttcagcaccttttttaccctggaagtcttgtgggaagtagctttctttatgtttttggaaggcaagctgaacgtcacaatagaagttgctatctccgtatacaagtctggcgtctgcaaccatagcttgtgtcagggtcagctcataccaggactcttgtgagccaccttgccgacgaacatggagtttaacttccttaatatgtttccctgaaacaacatatttgcgcaaagttatggctgatttatcaaacagaaggtttaaatggagattactaacttcaacgatgcctccacccaaaccagtcccttgattagatttattgatgttgttaatcacatctattttaaaggaatggactgctgtccagtctttatgtttttcatcacctgattcgcctttaatatcagtgaagaaaatgtacgcatcgggcgttggaagagtagacataatttttcgccttaatcttaattaaagtttaatgaggaaggtgtatgtaacattggtatcccatcgatgtttattgggatacatatatagaggtaggggggattgctacagaaagatcactaaagtagtgatattggattttgtgttgaaaaataattgatgagtatcatgctccttttagtgagggtaattttgaaaccaggcgtagagaaactgtcaggccttctaattgatagtgaggccgcaggaaaaatttagcctgatagtatcctgggttgctctcaatctcttcgacctgaacttctgcggctgccagtggtttcttggccttagtgaacggtgttgaattgactgggtcaccatcgacataatttgtgatccattcattcagccagcgttccatatcactgcgctcctgaaatgtcccgatcttgtcacggacgatacatttcagataatgggcaaagcggcagcatgcaaacaaatagggcagacgagccgaaaggttggcattcgcagttgcatcagaatcataatattccgagggtttttgtagtgactgggcaccaataaaggcggccatatcagtgtttttacggtgcaggagcggaataaagccatttttggctaattcagcctcacggcggtcactgatggcaatttcggtggggcatttcatatccacgccgccgtcatcagaggggaaagtataacaaggcagattttccacaatgccgccggattctacgccacggatagaggtacaccagccatacagtttaaatgaacggttaatattaacggccatcgcataagctgcattcgcccaggtataattttcgtgggtaggcccatcggtattctcttcaaaattgaagttatcaacgggatttgtcagagcaccataaggtaaacgggacagaaaacgcggtaatgctaatccgatgtaacggacgtcttctgattcacgtaaactccgccagggggcgtattccgtattctggaagattttggtgagatcccgcggattagccagctcctgccaagagctcatctgcatcacactgggtgcggctccggtaataaacgggcagtgcgctgaggcgctgatttgcgctatttggcgcaatagttcaacgtccggtgcagtgtggtcaaaatagtaatctcccaccagacagccgaaaggttcaccaccaaactggccatattctgcttcatagattttcttaaacagtgggctttgatcccagctgatacccttaaagcgttttaaggtgttacgaagttcttttttggacagacacatcacacggattttcagcatttcatccgtttccgtgttattaatcagataatgcagaccccgccatgcgccttcgagtgtctgaaactcatcatggtgcaggatatggttcatttgctgtgagattttggtatcaatttcggcaatcagtgactggatggtacgataggtatcaccagagagcgtcactgtattttccagtgcctgctgcgccagtgttttgaccgcattttcaacggcactacgggtctgatcactttgcgggcggaattccttaccgagcaatacacttaactcatcagccgtgtactcttttagcgtctgctcttgttgagacaaggtttcttgttcggtcgtgctcatcaattactccttattttcagcgctttcatctgatcctggcgtgttgtcttcagatgaaatgctgtcttcaggttttggcgcttccgccagtgatttcaacagggctgggttttgcagtatttcggcaatcagttgttctgcaccagttttgccatccatataagacagcaggttcgccagttgggtacgtgcttccaacagattagccaaaggctctacctttttagcgatagcatctggctgaaaatcctccattctttcaaaaaccagttcaacattcagtttgccatcacctgtcagggtgttatcaacctgaaaggcagcccggggttttattgacttcatgcgttcgtcaaagttatcaacatcgatttccagaaatttccgatcggtaatttctggctgggcttctgtggatttccctgccaaatcagccataacccccatgacaaacggcagttgaaccactttttctgagccataaagctcgacatcgtattcaatctggacacggggagcgcgatttcgagctataaatttttgtccgctggatttcatgacaaattctccaatactggctagatagattaaggggagagtgaataatgcgttgaatctctgaataagaggttataagcggttagtgggtatcatcttggtctgtatctgtaccggaattatcagcatagccaaaaatgatggcgagctgatgtaatccttctggtgcaagattagaaataatgtcgataaaattacgatcaatcagctgttgaatgcggtcaatcatcatcggagcggggtggctcggttcatgtgtgatgaaataaagcttcactttttccaacaacatacgtacttcttcgcgattatgagcttccacttcataccagtcgaatgaggataagtcagctgatggttcggggattaccgtattttttactgaagtggatgccggtttactcactggttcagactcagaagcggctttatcgctatcagtcataggagcttctgctgaggctggtggttttaacagactgaactcaatcaccgtattcaggtgttttaacagcagcgaaaactcaggtgaatggctggcggataaatgccggtgaatcagttcagtcagggctgtgacgtgatcacgaataactaccagtatagatatttccgggctgctcgattcttgttttaactcctttaataaacgtgtacgtcctcctgtatagccactaatttcggttattgacccgtcgagcagtgagtaaacatcacggaatgataattcctgcaaaacatttttcagcagaatcgaattctgtactttcagagtcagcggagagccgtcttcgatatctgccagcgtattgagacggaataaaggatcgtattcaccatcaaattccagttttggccacacttcatcccaatagcgttccaacatctgtttaaggagagccagaccatcggcataaccggataatccacgcgcttctacccatgcatgcatcagggcgataataatacgcaggtctttagtccgggacagcagtaggtttgtggcctgtttttctacttccagccagttagggggttcggccgggatcaggaaatcaccgaactgctgctctgttttgccaacgagactttgttctaatagcagaaaatcatcatcgtattcgagattctctccgcaagggaacttgctgcttattggcgcaagtaacgcatcgatattcgtactgttttcatggctcatggcgtttatatgctcttcatattcggacaggagaatgcaggcagtttaaacggactgaaaatactgtttggtgtaaatcccagtacgacagtgtggccttgaatattaaatgtggcctgtagagctgaatcatcatgatgggcagaactgctatgcgagacttgttttgctttatccagcaatcggttcagcgcccaggggccggaagcggataaggtcgctgttgtaccatcagctaagttcagttgaatactggcctgattaactccggtagaccccggccagttgatgagttgtggaacctgagggccgtggctgtattgcaactgctgccctccgacattcagaaccatgctcaatatttggttacccatactgatcggctgaaccatgacagtaaatgacggtgtaggagtgccgttcccaaagaatgtatcactgatgatcttagcctgttggaaaggccggagtaatcttgctcctcccggcagcggtttgccatccacacccggcataaagcgccattggggctgggatgtatcgacttttccctctaagttctttttgtaaaaactgtccatcatccctttttcgggggcaaacatgcgagccatatcatctggtttaatatcgacatgtgccgtagctaccagcggataacgatttgtgatggcctgattgcaaaacccgccgatttcagagctgagctgtttaccgacacttctcatatcgctgatttgtgcatcactgctggcaccgattgccagtgaggtgatcatatccctgaacggcataggcagtcgctctgatgcggtctgtagttgagtgataatattattgggaggaaacgttgaaccggtattcacggcattctgtactgaagtcaggtattggtataagtcaccaatttttttcaatatatcatcgaaaggtatttgcgggttttttccgtccggatttttagccaaatcggtaatttgcgcaaaatgtgcctctaacatattttccggtgagggttgcccgttattctgtaatatcatctgttggggagccaggttagataacctattggctttattggctaaattactggtcttgctgcttaagctacccagtttcgcaatattcttgcctttattcatcaggctattgagcggatcattcagggttagatttttactgatattgatcagaagaagacgcaggggtgaaaccgaagatgaaagtaagcgcgcagtgttagcccgctgcgttaaatcatcaatatggtttaaacgaatatcacccagaaatttatcccattgataaatatagtcattaacataaatttgccggacagattgctcaactagtttaactggctgttttttggcgtaagaacccagcacccagctatcttgtatataggaaccggcaatcaacggttccatatctttgatgattttctgataacccgctggcgtaaacagcccaggaactccactggttattggttcattactgatatgagaaaaagccagatcagcctgtggaccggcaagggtaactaaattgaccggttctaaatcgggattgttcagcagagcgctttgtagtctggcgtaggttcgtactgcgagaggcgtactgctgatgaacgcctgcctgctttcaaccagtgagctatcaaagacatagggtgatgtaaccggctgattatccagtagctggccgaggtgccagtccagctgtttgaattgtatctcaggagtatctggtgctaattgtgcctccagatactgcattacccagttacgcaggaacttaccgtcataatggtcgggttgatataacatctgatatgcctttaatgcactgtatgttttatcgatatcattattactgacctgttttagctgatcggtgataagccttgctacatgtggcagcagtaatgattgtagtgctttcgtatacaggtcatgtccggcatcgttgactagttcacccgtgtacaagcccatgcgataagatatcggggggtcgtccagcgaaaaatggctgactttgggccagattggccagcgtgttcaacatcggtaataagttatagatattatttgtttcattagcattattggtgttttgctttaactcatcgcccagtttcgtaatcgcgggcatttttgcttgaatttcagcaagataattttcattattgtgataactggtcagaaataaggttgttaccgcgatcaggatcgctatcagtgtcatataacctaaccagttaaccagacgattcttgtatatcctccaacggttataactggcaagcccggcttcttgaaaaatgccttccagtaagtttttcagaaagtacggctgctgggcctgagagggatagtgcatccctttattatcttcaccattgccccatgacatcgaaatactattgttatcagtcggtaactggacattttgattaaatttttccatcacagaatcaaacggaattccttcctgtttaccgctggtgaaataaagccctctgggataactgggagcttcaaatccggatcgggcgaaaattatctcaagatactgggcaatatacggatgcagggcagcaaactcctggggaaacagataactttcagcagattgctgtggattggattcattcagcagaatatagggtaattcagcatccagtcgccgttgtaactgacggtattgttcgtcaaaggcagcgttgatgttccattccactttgttgttttgtggaaaggtcagcccccaaatttgttcgcgtgatgctttatcaaggtgcgtaaaataggcagtgaagccttttaacaagtcggttttagtaataaaaagataaaccggaaactgagtcttaaatttttcatgtaattccgataagcgcctgcgcagcatataggcgtggttatcacgggcttctgtcgatggattcagcaaatcttccacactgagggtcaggataaccccattaataggctgacgtgtgcggtatttcttcaacagcttaataaatgttttccattccctgaaattggatttttggacagtattatcctgaatcgtatagcgcccggctgtatccagcagaacggcattagtcgtgaaccaccagttacagctattactatcctgcatgctgtacagggcagctctgccgaaataatctaatagtggaaaattcaggccggaattcgacagcgcagttgttttacctgaacccggcgccccgatgaccagataccagggtaattggtataggtactggcggctgaaaaaacctctcagggtgggtttatttttaccattcaggccggaaaaataagcttttctcaataattttacagcatcagaaaaacgttctgacagggacagatattgttcattttgttgtttttcctgcgtcttttcggattcgctgcctttgataatattcagctgattagccagttttttattcagccaagtccggtataagtgagggacgagtaaactaataacccaaaaaaagtaaaggaaggcaatggtggctacccgtattgtaaatgatttaaatggtacaacatcaccaacagaaataatgggcccccagaaaccgataatgcaagcaagtatcgttattccgataaaactccatgtcagtctgctggtgataatagaaaggagcacattcaacatcttagtttcctcactttatttgagcatcaggagaaactaacagcgtgatttctactcgtctgtttttagcccggttagcgggggtgttattgggtaccagaggatcgcttgcacctttt

SEQ ID NO: 3082 - DNA, 34319 bp, Xenorhabdus sp.
  CDS (26902)..(27681)
aaaaggtgcaagcgatcctctggtacccaataacacccccgctaaccgggctaaaaacagacgagtagaaatcacgctgttagtttctcctgatgctcaaataaagtgaggaaactaagatgttgaatgtgctcctttctattatcaccagcagactgacatggagttttatcggaataacgatacttgcttgcattatcggtttctgggggcccattatttctgttggtgatgttgtaccatttaaatcatttacaatacgggtagccaccattgccttcctttactttttttgggttattagtttactcgtccctcacttataccggacttggctgaataaaaaactggctaatcagctgaatattatcaaaggcagcgaatccgaaaagacgcaggaaaaacaacaaaatgaacaatatctgtccctgtcagaacgtttttctgatgctgtaaaattattgagaaaagcttatttttccggcctgaatggtaaaaataaacccaccctgagaggttttttcagccgccagtacctataccaattaccctggtatctggtcatcggggcgccgggttcaggtaaaacaactgcgctgtcgaattccggcctgaattttccactattagattatttcggcagagctgccctgtacagcatgcaggatagtaatagctgtaactggtggttcacgactaatgccgttctgctggatacagccgggcgctatacgattcaggataatactgtccaaaaatccaatttcagggaatggaaaacatttattaagctgttgaagaaataccgcacacgtcagcctattaatggggttatcctgaccctcagtgtggaagatttgctgaatccatcgacagaagcccgtgataaccacgcctatatgctgcgcaggcgcttatcggaattacatgaaaaatttaagactcagtttccggtttatctttttattactaaaaccgacttgttaaaaggcttcactgcctattttacgcaccttgataaagcatcacgcgaacaaatttgggggctgacctttccacaaaacaacaaagtggaatggaacatcaacgctgcctttgacgaacaataccgtcagttacaacggcgactggatgctgaattaccctatattctgctgaatgaatccaatccacagcaatctgctgaaagttatctgtttccccaggagtttgctgccctgcatccgtatattgcccagtatcttgagataattttcgcccgatccggatttgaagctcccagttatcccagagggctttatttcaccagcggtaaacaggaaggaattccgtttgattctgtgatggaaaaatttaatcaaaatgtccagttaccgactgataacaatagtatttcgatgtcatggggcaatggtgaagataataaagggatgcactatccctctcaggcccagcagccgtactttctgaaaaacttactggaaggcatttttcaagaagccgggcttgccagttataaccgttggaggatatacaagaatcgtctggttaactggttaggttatatgacactgatagcgatcctgatcgcggtaacaaccttatttctgaccagttatcacaataatgaaaattatcttgctgaaattcaagcaaaaatgcccgcgattacgaaactgggcgatgagttaaagcaaaacaccaataatgctaatgaaacaaataatatctataacttattaccgatgttgaacacgctggccaatctggcccaaagtcagccatttttcgctggacgaccccccgatatcttatcgcatgggcttgtacacgggtgaactagtcaacgatgccggacatgacctgtatacgaaagcactacaatcattactgctgccacatgtagcaaggcttatcaccgatcagctaaaacaggtcagtaataatgatatcgataaaacatacagtgcattaaaggcatatcagatgttatatcaacccgaccattatgacggtaagttcctgcgtaactgggtaatgcagtatctggaggcacaattagcaccagatactcctgagatacaattcaaacagctggactggcacctcggccagctactggataatcagccggttacatcaccctatgtctttgatagctcactggttgaaagcaggcaggcgttcatcagcagtacgcctctcgcagtacgaacctacgccagactacaaagcgctctgctgaacaatcccgatttagaaccggtcaatttagttacccttgccggtccacaggctgatctggctttttctcatatcagtaatgaaccaataaccagtggagttcctgggctgtttacgccagcgggttatcagaaaatcatcaaagatatggaaccgttgattgccggttcctatatacaagatagctgggtgctgggttcttacgccaaaaaacagccagttaaactagttgagcaatctgtccggcaaatttatgttaatgactatatttatcaatgggataaatttctgggtgatattcgtttaaaccatattgatgatttaacgcagcgggctaacactgcgcgcttactttcatcttcggtttcacccctgcgtcttcttctgatcaatatcagtaaaaatctaaccctgaatgatccgctcaatagcctgatgaataaaggcaagaatattgcgaaactgggtagcttaagcagcaagaccagtaatttagccaataaagccaataggttatctaacctggctccccaacagatgatattacagaataacgggcaaccctcaccggaaaatatgttagaggcacattttgcgcaaattaccgatttggctaaaaatccggacggaaaaaacccgcaaatacctttcgatgatatattgaaaaaaattggtgacttataccaatacctgacttcagtacagaatgccgtgaataccggttcaacgtttcctcccaataatattatcactcaactacagaccgcatcagagcgactgcctatgccgttcagggatatgatcacctcactggcaatcggtgccagcagtgatgcacaaatcagcgatatgagaagtgtcggtaaacagctcagctctgaaatcggcgggttttgcaatcaggccatcacaaatcgttatccgctggtagctacggcacatgtcgatattaaaccagatgatatggctcgcatgtttgcccccgaaaaagggatgatggacagtttttacaaaaagaacttagagggaaaagtcgatacatcccagccccaatggcgctttatgccgggtgtggatggcaaaccgctgccgggaggagcaagattactccggcctttccaacaggctaagatcatcagtgatacattctttgggaacggcactcctacaccgtcatttactgtcatggttcagccgatcagtatgggtaaccaaatattgagcatggttctgaatgtcggagggcagcagttgcaatacagccacggccctcaggttccacaactcatcaactggccggggtctaccggagttaatcaggccagtattcaactgaacttagctgatggtacaacagcgaccttatccgcttccggcccctgggcgctgaaccgattgctggataaagcaaaacaagtctcgcatagcagttctgcccatcatgatgattcagctctacaggccacatttaatattcaaggccacactgtcgtactgggatttacaccaaacagtattttcagtccgtttaaactgcctgcattctcctgtccgaatatgaagagcatataaacgccatgagccatgaaaacagtacgaatatcgatgcgttacttgcgccaataagcagcaagttcccttgcggagagaatctcgaatacgatgatgattttctgctattagaacaaagtctcgttggcaaaacagagcagcagttcggtgatttcctgatcccggccgaaccccctaactggctggaagtagaaaaacaggccacaaacctactgctgtcccggactaaagacctgcgtattattatcgccctgatgcatgcatgggtagaagcgcgtggattatccggttatgccgatggtctggctctccttaaacagatgttggaacgctattgggatgaagtgtggccaaaactggaatttgatggtgaatacgatcctttattccgtctcaatacgctggcagatatcgaagacggctctccgctgactctgaaagtacagaattcgattctgctgaaaaatgttttgcaggaattatcattccgtgatgtttactcactgctcgacgggtcaataaccgaaattagtggctatacaggaggacgtacacgtttattaaaggagttaaaacaagaatcgagcagcccggaaatatctatactggtagttattcgtgatcacgtcacagccctgactgaactgattcaccggcatttatccgccagccattcacctgagttttcgctgctgttaaaacacctgaatacggtgattgagttcagtctgttaaaaccaccagcctcagcagaagctcctatgactgatagcgataaagccgcttctgagtctgaaccagtgagtaaaccggcatccacttcagtaaaaaatacggtaatccccgaaccatcagctgacttatcctcattcgactggtatgaagtggaagctcataatcgcgaagaagtacgtatgttgttggaaaaagtgaagctttatttcatcacacatgaaccgagccaccccgctccgatgatgattgaccgcattcaacagctgattgatcgtaattttatcgacattatttctaatcttgcaccagaaggattacatcagctcgccatcatttttggctatgctgataattccggtacagatacagaccaagatgatacccactaaccgcttataacctcttattcagagattcaacgcattattcactctccccttaatctatctagccagtattggagaatttgtcatgaaatccagcggacaaaaatttatagctcgaaatcgcgctccccgtgtccagattgaatacgatgtcgagctttatggctcagaaaaagtggttcaactgccgtttgtcatgggggttatggctgatttggcagggaaatccacagaagcccagccagaaattaccgatcggaaatttctggaaatcgatgttgataactttgacgaacgcatgaagtcaataaaaccccgggctgcctttcaggttgataacaccctgacaggtgatggcaaactgaatgttgaactggtttttgaaagaatggaggattttcagccagatgctatcgctaaaaaggtagagcctttggctaatctgttggaagcacgtacccaactggcgaacctgctgtcttatatggatggcaaaactggtgcagaacaactgattgccgaaatactgcaaaacccagccctgttgaaatcactggcggaagcgccaaaacctgaagacagcatttcatctgaagacaacacgccaggatcagatgaaagcgctgaaaataaggagtaattgatgagcacgaccgaacaagaaaccttgtctcaacaagagcagacgctaaaagagtacacggctgatgagttaagtgtattgctcggtaaggaattccgcccgcaaagtgatcagacccgtagtgccgttgaaaatgcggtcaaaacactggcgcagcaggcactggaaaatacagtgacgctctctggtgatacctatcgtaccatccagtcactgattgccgaaattgataccaaaatctcacagcaaatgaaccatatcctgcaccatgatgagtttcagacactcgaaggcgcatggcggggtctgcattatctgattaataacacggaaacggatgaaatgctgaaaatccgtgtgatgtgtctgtccaaaaaagaacttcgtaacaccttaaaacgctttaagggtatcagctgggatcaaagcccactgtttaagaaaatctatgaagcagaatatggccagtttggtggtgaacctttcggctgtctggtgggagattactattttgaccacactgcaccggacgttgaactattgcgccaaatagcgcaaatcagcgcctcagcgcactgcccgtttattaccggagccgcacccagtgtgatgcagatgagctcttggcaggagctggctaatccgcgggatctcaccaaaatcttccagaatacggaatacgccccctggcggagtttacgtgaatcagaagacgtccgttacatcggattagcattaccgcgttttctgtcccgtttaccttatggtgctctgacaaatcccgttgataacttcaattttgaagagaataccgatgggcctacccacgaaaattatacctgggcgaatgcagcttatgcgatggccgttaatattaaccgttcatttaaactgtatggctggtgtacctctatccgtggcgtagaatccggcggcattgtggaaaatctgccttgttatactttcccctctgatgacggcggcgtggatatgaaatgccccaccgaaattgccatcagtgaccgccgtgaggctgaattagccaaaaatggctttattccgctcctgcaccgtaaaaacactgatatggccgcctttattggtgcccagtcactacaaaaaccctcggaatattatgattctgatgcaactgcgaatgccaacctttcggctcgtctgccctatttgtttgcatgctgccgctttgcccattatctgaaatgtatcgtccgtgacaagatcgggacatttcaggagcgcagtgatatggaacgctggctgaatgaatggatcacaaattatgtcgatggtgacccagtcaattcaacaccgttcactaaggccaagaaaccactggcagccgcagaagttcaggtcgaagagattgagagcaacccaggatactatcaggctaaatttttcctgcggcctcactatcaattagaaggcctgacagtttctctacgcctggtttcaaaattaccctcactaaaaggagcatgatactcatcaattatttttcaacacaaaatccaatatcactactttagtgatctttctgtagcaatcccccctacctctatatatgtatcccaataaacatcgatgggataccaatgttacatacaccttcctcattaaactttaattaagattaaggcgaaaaattatgtctactcttccaacgcccgatgcgtacattttcttcactgatattaaaggcgaatcaggtgatgaaaaacataaagactggacagcagtccattcctttaaaatagatgtgattaacaacatcaataaatctaatcaagggactggtttgggtggaggcatcgttgaagttagtaatctccatttaaaccttctgtttgataaatcagccataactttgcgcaaatatgttgtttcagggaaacatattaaggaagttaaactccatgttcgtcggcaaggtggctcacaagagtcctggtatgagctgaccctgacacaagctatggttgcagacgccagacttgtatacggagatagcaacttctattgtgacgttcagcttgccttccaaaaacataaagaaagctacttcccacaagacttccagggtaaaaaaggtgctgaagttacctatacctgggattcctacactaataaactggaataatacaccgtggattttactgataacctccttgaaacaaggaggttatcctcatccacattatccttatcaacaataaggatccacgcttatgcgattcaccattgttaaaaacaacagtacaagccagccaacacaactgagttatgaattctctcctccgggaggaactatcggccactgtaaagataatagttgggttttacctgatgctgagcagggcattgcccgtgttcaggctattgtatccatcaatacagatggaaaatgccggatcaccaatctaggttctgcaactgagcttttgctaaatacaatccctgtggctccgaatcgtcaggttgaaatacgcgatggtgacgtactgaatattggcagttatcagattcaggtcattgatccctaccaaaatgcacgactacaaactgatatttccgctaccagtggatcctctgagtcggatacgcagggtattcccagtgaagtctgggacggccttgaaaaaattttcacgatccctgataccccgacttcctctgacaagcatcaggcatcatcagatggaaatgaccataacccgctgtttccctccagccaacaagaaaacgatgaacgtaatcccattgatccattagcaaaaatcaaaacaactgctgatctggataccctgcagctacgggcgaaagatcctgtgactatgttcaacacggatcccctcttccggcaggaagatattcttaatgataatacgccgacaaccttattccagaatgataaagaatatgatcttgagcacaatgataaggaaggtgaagtcgatccactggcgttattttctgaccataatgttaaacagaaacaaaatactaaaaatgaagacccattggatttgatgttaggcactgccgcaccactaacatctcctgatcatcccaaaattgccgaacctaaatcggtttctgtcacacaatctgcatctgatcataatacacaatcagaagctcaactctcttctttacctccgctcttcacaacagaagagctatccagagaaataaaccaagatttagtcacaaaccagttcggcacagaaacagaagaaacaatgggagaagatatcttctttaacacacctaataagcagactgaccagagtcatcagccttatattaatcagcagattaagcaacttaacacaccatcacatatcagcgatgatgaccctatttatgaacggctgaatatcgatccaatcagctataaatccgatgaacatatgacagagggtgtcaaactggaaggaaaattactggcagccttattggaaggtatgggactcaaaaatcttcgccagccacagtttgatgaacaccgtatgtatcagttaggccagcttatcagccagttatctcaggggcttgttgcactcaatacttcacgtaccctactgaaacgggaagcagaagccggaataacccaaatgttatcagataccaataatccctttaaattattaccttctggtcaatcggtactggttcagatgttcggtgatcatatgccgggatttatgtctattgagcaggcaacccgcgatattttagttgaattacaagcgcatcaactgggaatgattgccgggatgcgagccattacggtagatatcctgcaactcttccatcccactattcttgagcaaaaagcacgggacgaaggcggtatgccacgtttgtcattatcatcaacctacaaagcatctttatgggagtttcttactaaacattatcaaaaaacagccagtgaatttgagcacaactccggcctgtttggtaagaacttcctgttggcctatgaaaacgaagtaaataactataaaaattcccagaaaaaaataaaaaaacagaccggataaaaccatcaattcttcagataccccatgaatttcagcttgtaagctgaaagacaacgggaacaaacctttcagcatatcaaccctattgcccatagttatctattatcacgactaactatcatcactgctaataattaataggctccccatgaatgacaatacgactttgatacatagtggctatcatcgtccgggtaataccagacatatcactgccagagacaaaatgcggccttccctgctggacaggctcaccgataatgaacccgataagaaaaaagaggcagccagtaatcatctgatatcacacaatatattacgccagaatcttctgcgggatttacagtggttactcaatagtatcaacggcgaatcagaacagaacctttcccctttcccggaaatccgtcgctccgtctataactttggcctggagcctctggccggtaagctcatgtctgaaatcgaatgggaggatatccagcataaaatcactaaagcgatacatatctttgaaccccgcattattcccgacggtcttgaagttaattgtgtttcagatacccactcactgactttatacaacagattatctatcgagatcagagggtttttatggtgtgttccctggccacttgagttcctgtttcacagtgatattgatttagaaaatggctatttcactattaaagaagctgggtaagccggcaaaaaacaggagaatacattttggatagcaaactgcttgaatactacaatcgtgaactgatctatttacgtgagatgggcaaagaatttgctgagcgttatccgaaagtcgccaaccggttggggatgcatggcattgatgtgactgatccttacgttgaacggctgatggagggtttcgcttttctgacctcccgcattcagctgaaaatggatgcagagtttccgaacttttcccaacaattactggagatgctgtgccccaattatctggctcctacaccgtcaatgtctattgccgagctccagcccgataccagtaaaggggatatcagccacggatttttagtaccacgcgggactatcatgcattgtcagtcactgaaaaaagacggtattacgcttcagtacagcacggcacaggatgttattctgcaacccctgcatttgcaaaaagttgaactgggaaaaattccggccaatattcctctggcatctttaaatcttcatcagtgcggtgcagtgagtgcgttacgtattcatctcacctgccaaggaaaattcttcctcagtgagctggaactcaataaactagttttctttctttccggaccagatattcaggctcagcaattgcaggaactgctgatggaacattgcgtcggaatgatctgtcagactctcggtgataccccccagtatcaggtattacctgatatctccccgcatcacgaagggtttgatgatgaacagtcattattacccaatgatccacgcacgttcagcggttatcgacagctgcatgagtattttgcttttccggctcgttttcagttcttcagtattagcggcatgcaatctttgctggaagagactaaaaaagagagtgagtttgaactgatcctacttttggacaaaattgatgaggatttagagcatctggttgatgtctcttacttagccctgaacagtactcctgtcattaacctgttccctaaactgactgaacgggtcacgctaaaagagagtactaatgaataccatttagtggttgataatacccgaccactggattacgaaattttttcagtacaacgcctgcacggtgcagatatcaagcgacgggaaactcagatcttccgacctttctggtcaacattcagtgatgataaaggaaattatggcgcctatttttcccttcgtcgtgatccccggattttgtctgagcactccctacattatggaacccgcaccagctaccttggcacagaagcctttgtttccattgttgatgaacaacactccccctggccgaatgaactcaaattccttactgcggatgtgatgtgtaccaaccgtgatttatctgcgatgttgcggcaacaggatatcgacagttttgtcatgcttgattccattccaatcaaccagattgtatttcttaaaaggccgaccataccacatccggctctggcacagggttcagcttcctggaaattaatcagtcagttacagctcaattacctgaatttcatggataaggatgatgaacaaggcactcaggcattacgacaattgctgagtctttatgccaatctttcagaaccggccactgcccgtcagattaatggtattcgccattgttcactgaaaacaattcatcgcagagtaccagaacccggcccaatcgtttttgcccgtggtgtcggaattgagctggaagtcgatgagcaggagtttgccggaaccagcccttggttactgggtagtgttctggaacgactcttctctcatttggttaccatgaactccttcactgaaatgacgctctatagccagcaacgcggcaaaatcggttactggccggcccgaatgggtaaaaaacagctgttataatgggggaaatgacgatgagtgaaacaggtgccgttgctattcacagcataagccgtctacctgataatttctggcaagaactcacccagacgccgtggcagttcgatctgttccagaccctgcggcggatagatgcacagtccggggaatattatatgctgggttcatccccattaccacgatacgacctactgcggttagggcaaaaggcatcaatgatattcgccccttgtactatctctgaagccaaacaacggaaaaactcaaaacagtatgacgtactgatttacagttttggtctattcgggccaaacggaccactacccactcacattaccgaatatacctatgcccgacagtataactatcaggatccaacgctgaccgcgttcgctaatttatttcacaataggttaatacaattattttatcgggcctgggcgaatgcgcagtctacagtatcgctggatcgtcaggataatcagcgtttctgccattatctggcctgtctggttggtatgggtttacctgcccagaaaaacgcagattctattaatgaacatgcccgctatttattatcaggccatttgtcccgtcaggggcatagtgctgaagggctggaaaaaatactgttcacctacttcaatattccgttaaagattaaacaaaatattccgcaatggctggatgttgagattcaggatcaggcccggttaaaagccggacgtaacatgccacgtttaggacagtcagcctttttggggactgcattatatgatgttcagtataaattccgcatcaaacttggcccactgacaatatcagagtatgaagacttcctgccaaaccagccaaagtcacaacaattacgcgactgggtacgtcaatatcttgggattgaatatgcatgggatatccagctggcacttcatcgtacagatatacagggtatccatctgtcagatccggtaaaactagggctaagcagttggcttgggaagatggaacagaaaatccatcgtgatgatttaatctacaatccctagttttacccgcacactcccgaccggtataccttttcttgccttttgctctctaataacgggttgttatctaaatgctcgttattacttacgtacctaaacattatcaacgacaacatcacggattacatgctatgtcagaaatcagccgttccgtactttttggtaagctcaatccgatcctgttcacatcattagaaggtgccactgctttctgtaagttacgtggtaacccttatgttgaactggttcattggctacaccaaatcatgcaacaacaaaacagtgatttacagaaacttatccaccatttagggctggatgaatctgcattgaccaaagatattgttgctgcgctggatagcctgccccgtggtgccagtgccatttctgatctctcagaacatattgacaatgccgtagagcgagcctgggtttacggctcgctaaaatttggtgttgctcagatccgtagttcgcatttactgataggtatattaaaaactttcaatcttcgcaatgcactgaaagcaatttctcccctgtttgatcatatcaatgccgataccctgatcgataattttaacaatatatttgatggcagtgatgaggctcaggaaagcataatatcatcaaccgaaactcagggagcatcgccacagtctgtaacaggctcagctttgcaacaatacggacaggagttaacagcccgggcccgtaatggtgaaattgaccctgtttcaggacgcgatgaagaaatccgccagattatcgatattgtgatgcgtcgcagacaaaacaacccattactgactggtgaggctggcgttggtaagactgcggtcattgaaggtctggctttgagaattgtggctggcgaagttcctcccccgctgaagaacgttcagctttggctgctggatatcggtatgttacaggccggtgcgggtattaaaggagagtttgaatcccgtctgcggaaagtcattgaagaagtccagtccagcccgacacccatcattttgtttatcgatgaaattcacactctgattggagccggtggacaacaaggtacaggcgatgccgctaacttattaaaaccagcactagcaagggggcagttgcggacactgggcgctacaacctggtcagaatataaaaaatatatcgaaaaagatccggccctgacccgccgttttcaggttgttcaggtgcatgaacctgatgaaaccaaggctctgataatgctgcgtagtctggtcaatacgctggaaaaacaccatcgtattcttttactggatgaagcggttgatgcagcagtacacctctcccatcgctatattcctgcccgtcagttaccggacaaagccatcgcattactggacaccgcctgtgccagagttgcagtcagccagcatgcagaacccccgcagctggaaaactgccgtcataagatagattcgttgaatgttgaactgggaatagtggaacgggaatccaaagttggtatgggcgatcccctgcgggcagaaaatattctcagccagttggcaacgctgacagagcaacaagagcagctagaagcgcgctggcaacaggaattgttgctgacagacaaaattatccagctacgtcttcagttacatgaagaacaagccgatgaagaacaaaacaataatgataaaatcactcttcatacggagctggctgagctgcaacaacaactggaaatgttacagggtgaagaacctcttatctttgccgcagtagacagtaatgttgtttccgctgttgtctcagactggactggcattcctttaagccgaatgatgaaagatgaaattgaggctgtattgcaattagccgatacccttaaccagcgtgtcattggtcagtatcatgcgttagaaaccatcgcaaaccgggtacgcacttcacgggcaaaactggacgaccctaataaaccggtaggggtctttatgctgtgtgggccttccggcgtcggtaaaactgaaaccgcactcgctctggcggaaacactgtatggtggtgaacaaaacctgatcactatcaatatgagtgaatttcaggaagcacatactgtatcaacattaaaaggtgctcctcccggctacgtcggatatggcgaagggggtgtcctgaccgaagccgttcgtcgtcgtccatacagtgtcgtattactggatgaaattgaaaaagcgcatcctgatgtccatgaaattttctttcaggtattcgataaggggtggatggaagatggtgaaggtcgtcatattgactttcgtaatacgattattattctgacatcgaatgtcggcgcggatttagtcaactcaatgtgctaccagcattaccaacagagtaatacactacctgagccggagcagcttagttcagcactacgcaaaccgctattaaacacattccccgccgctttactggggcgtttattagtcattccatactatccattagatgatgaagtcatgaccagtatcgtttatttgcagcttggacgcatacagaaacgattgctggaaaaccacggtattactgccacgttcgatgaagccatgattgaaaatattgtcagtcgttgtaccgaagttgagtcggggggtcgtacggtagatgctattttaaccaatactctattgcctcagataagccagcggctgctatctgcctgtgcccatggtgaacaatttaaccaattacaggtgtcgctcgaacagggagaacttaatttccagttttcgaatgatatatagatcctgcatgatatccgtgtgtaatttgtcatgcgtcgtttataaacatttcctcaagagtataaataatttcataccaaccatgtcacactcccacataatttaacaggaggactaaatgttcggagtaaataaacacagccaataaagaggcaacttgaaaattcgacaaaaaatagaacatgaggttcaagaggccatctattatgcagaattcttacaataactctcttaagaccaagcatccattattacaggcattacccattggatactgtttcaatgagttggaaattgaaaaagtagtgggtaaaggaggatttggtatcgtataccgagcctgggatcacagcaaacagtgtgcagttgccataaaagaatatctgccatccatgattgtggttcgccgtaatgatttgaaactaaaattacgccacccaaatttacaggaaagattcagaatcgggcttcacagttttatgcgtgaagcccatatcatgacttgctttaaccatccgtgcctaccccgcttcatacgtttctggcaacagaacagcaccgcttatatcgccactcccttttaccatggcatcaccttgaaagtattacaggtaaagtatgcaaagatagttacacagagttggctgtgccatattttgtcccctctgcttgatgccatcaacaccctccaccaggctggctatctacactgtgatatttcgctggataatattttacttcagaatgatcgattacctgttttgctggatttagggtctgcccggaaaatagcagaacgtttatctgacgaagaagaaataacggtcaggccggggttcacaccctgtgaacaatacacggccaatgaagaggggcagcagggcccctggagtgatatttatgcgctaggggcagtattgcatactttgattgtcgggaggccaccaccggtaagcatagtacgcaatattgaagatcgttatcagcctttaacggaacggtgtcttaccggttattcattatcatttctacatgccatagattgtatgttggcaataaaaatagcagaacggccatcctctatttctaaattaatcccgatgataaaatcccctatcatccaaacctgtttccctcctaacttctcctcatctctacaaaatatccttaccacctgcccaccttcagaagattcagagcaagaataaaaggggaaatttatgccacaagaaatctgtatattttattaccaaaaaattattcatcacccgattcagcatgtttctttccactcaacccatattcacgcaatttattcgcaattgcagtatgagaaaccccaagccgtttcgccagcttgcgagtactgggatagtgacgataaaggcgcgtcaggacagagcgttcaaaacgtttgctaatttcatccaaagaaccaaccagaatatcctcgctgataaatgaagtttctgcttctaaatgcggtaactgaatatcctgtgagcttaactggttatcttcaagctgcgtcaatgcccgatagatggcattgcgcagctgcctcacgtttccgggccagtaataactgcataggaattgttccagatcaggggcaaactttggtttttctacaccctgttcttcggcaaaacgggtcacgaaataatccgtcagtggcataatatccgcctgacgttcccgtaaaggcggtaatgtgatggtcaatacattaagccgatagtagagatcttccctgaattccccttttcgtaccaactcaaccagattcttctgcgtggcgcagatgatcctgacgtccactttcacttcattatcttcccccacccgacgaaatgttccatcgttaaggaaacgcaataatttaatctgcatctggggtgacatttcaccaatttcatccagcagaaccgtaccgccatttgcttgctcaaaaaagccttttttactttccgttgcgttaggataagcgcctgccgcatagccaaacaattcactttcgactacgtcatccggcatagaggcacaatttaagccaagaaaaggctgttttcctcttgaactgcgtaaatgacaggctttggcaaattcatctttccctgtccccgtatcaccaatcagcaacaacggcacatccagcatagccattttacgagcctgctcaacgacatgaaccatcttcgggctaacagcaacaatattttcaaaagcctgatcatcattgacgatacgttttttctgggcaggctctgcctgcgtgaagacacgcagcataatgactgccccgacacatttaatttcctgattttcatcagtcagcggcatcgggatcacatccatcaaataggttttctctttgatggttaacgtgactgaatgaggctcggggtgatcactttccagccaacgaagaaaattataattactgataagttggctgatatttttctggctgattttttctttactgatgccaaataatgactgtgatgccagattggctaaatcaatatttcctttcatatcaacggacagaatcggatccggtacagactccagtaatgtacgcatcgcccggtgttctttttctgatggcataaacgccaccgtcctgacatccatcacaccattaatacggcggatttccgccattaacaagcggaaggtattgaaatcaatttgagtaaaattaaggtaaatacgacgagcaggagaaatctcaattcctttcaggtcaatatttcttaaaaccaataaatcaagtaactcgcgagtcagtccgattcgatcctgacaggtaacttccaatcgcatttattccgaccttatttacacaatgttcataaccacctgaaatattactcgttactgtgcgatagatgaagccccctgtcatttaaagttgacagtaagacaaagtgtcaactttaaatgacagtatcatcctgagttatgagcccgactttttggcttcatttctcgttttcggcttagtcgccagtgtactttttagctggctaattaactgataccggaaatcacctaatttaggtttatcgccatcaatccagggtaaagggcggcacaactccatcgacttaattcccagccgggcagtaagcaaccctgcaccaatgccttgtgcggcacgggctgaaagccgagcggcaatatcctgtgacagccagtccatacccacttccctgaccaactctgatgccccagcaaaagcaatattcaacaataccagccgaactcaacaaccaccgactaaagtcggtgggttagtgattaacggactgaaagtccggatacgcatcggctaaacgatgcgtcaattatccagcctgaagtgatcattcgggttcggttcaaaatgatgcgccagataggcctttatcatctcttccgttaactgacctaccgtcgcacaaaaatagcctctgccccaaaaatgctgaccccagtaacgctttttcaagtgagcaaactgttcaaacaacttacttgctgtccttccctttattcgcctcatgatttctgagggcgctaagctcggaggacaactcaccagtatatgtacatggtctttgctcacgaccccttctactatcctgatttcgaacgcttcacaggtctgacgaactaactctctcacccgtaaaccaacttcacctgttagcactttgcgcctgtattttgttacccacacaaaatgatactcaatctgaaataccgtgtggctgccatatctgtaatccatattgcacctctcgtgcaacacagtatcgcagctaaagctgaccgactaaagtcggtggttttaaccttttatatggaaaaataaatctacaaactctatagataaagtcggataggactctttccctttatttaacctgatgcaaaacatcacctactgcattgaacatccggtcaaggtcttcaggtttagcattaaacattgggccgaattggagcccatcgccaccaaagcggacataaaaaccggctttccataatgcaagtcccgcttcaaaaggacgtatcacgccatcgccattccgtggtgcaatttggatggtgccaatcaaaccacagttacgaatatcaacaacgttagggcaatgcctgagttcatgcaggattttttcaaaatgaggtgctaattcagcagattgttggatcagattttccttttccagtaatgttaacgttgccagaccagcggcacaggcaacaggatgagcagaataagtatagccatgactgaattcaatcatatgctcaggaagaggttgtgacatgaatgtgtcgtagatctcactggagacaacagcaccaccaagaggaattgcaccatttgtgacctgcttagcaaaagtaagaatatccggagtgacaccaaaatattcagcccctgtccagcgccctaaacggcctaatccggtaataacttcgtcaaaaatcagcagtatattgtgttgggtacatatttcccttaaacgttgcagataaccttgtggtggcacaatcgcaccggcagatccagcaacaggttcgacaataacagcggcgatattactggcatcatgaagttctatcagtttcagtagttcatcagccaattcaatgccgccagttgccggaacgcctttagtaaatgccatattgctttgtaaggtgtgtgacagatggtcaacttccatcaactgaccgaacatcttgcgatttccgccaataccgccaagacttgttcccccgatattaacaccgtgataagcgcgcattctgccaatcattctggttttagtcggctgcccttttatccgccagtatgcgcgtgctatttttactgctgtatcaacagattcagaacctgaattggtaaaaaatacatggtttaaatcgccgggcatcagactagcgattttatctgctaaccgaaatgacagtggatgagcatgctggaaaccgggtgagtaatctaatgtacctaattgttcagaaacggcctgacgaatttctgagcgtgagtgccctgctccgcaagtccataaaccagataaactgtcataaatgcgacgacctttatcatccgtcagccagtgaccatccgcagagacgatcatgcgtgggtcttgctgaaaatgacgattggcactaaacggcatccagtgtgcttttaaattcagatcatgggatggattaacatggaaggaacgggtttgaacggtattgctatctgacatttttttaactcctcgcacgaaaatgtaacaaaaagtcatcacagtgagtttgcaataaaacgatattcaagttaaatcttatttattgaatcattagttatgagtttactcacgcaaatgaaacctgcaaactttaggcaagtaactgattttgatttgaaattattacgtatatttaagatcgttgcagaatgtggcagtttttccgcggctgaaagcctgctcggtatcactcgttcagcaattagccttcatatgggggatttggaaaagcgtttgggcatgcgcttgtgccaacgtggtcgcgctggtttttctctgacggatgaagggcgggaaattctgcgagccagtgaaaccatgatggcgtcaattgaagaattccgccagcatgtcaatcaaatacataagcagttacggggagaatttaatatcggcattattaataaccttgtaacacaaccaatgatgcggattactaacgcgctggagcgcctgcgttcagcaagtgacggcattctaattaatataagtatgagtactccgacagaaattgaacgaggtatattggatggaagattacaggtgggcgccctaccttttatcacaccattgtcgggattaaattacttaccactctacaatgaacgatcatatctttattgtagtaatacacatgaagcatttctgcttgcggataactttgatactgagcatttaaatcaactggatgccgttattcccggctatcgtataagtactgaagcaatgaatcaccataagttgctgaacagcgcagcaacagcatctgatcgcgaaggcatcgcatttttaattcttaccggtaagttcgtgggatttcttcctgatcactacgctcgcatctgggtagagaaaggttttatgaaggcactgttacctgagaaaatttattatgattctaaaatctcaatcgtgacacgcaaaggtaaacgaactaatgcaattcttgggttgtttttggaggagttaggatattaggcacttaataaaattgatattgccagtctaaaaatgcatatcaaaaatattatgcaaatatgatagggttatctcgatgtaacatatcttacttttatgcctctgaataaattaaatatagaactgatatagcgcaattaaaaaacgaaaatattcatttctcaatcaaatgataatttcggattctgaatcctacatattcacattaattaggtatatcaagatgaaatttaaatatattccaatttatttcacttttcttttttgtttgttaaatgtcaacgtgtatgcaaaccctttgcatgatgctgtcaatcagaacgatatagaaaccgtcaaatccctattgaatgatgatcaaactttacttgatgagcgtgacgggcaacagcgcactccgctcatgctggctacgcagcataattatgcggcgattgctattttccttatccagagcggtgcagatgtcaatgctaaagatagacagctcgatacgccttatttgctggccggagcacagggctacaataaaatactcattgcaactttacatcatggcgcgaacctgaaagataccaaccgctatggaggaactgcgctgatccccgccgccgaaaaagggcatcctgaaactgtacagatcctgctggatgctggtgttaatcctaatcacattaacaaattaggatggacggcgttaatggaagctgtcgtattaggtaatggttcttcggtttatgtcgacattattgatcggctaattaagggcggtgctaatgttaacataccggataaaaacggggttactgcgcttactcatgctcgccaacgtggatataaagacatcattaaactattggaaagtgctaacgccaaataatcagagaaaaattctttaacaaaatcagtaaaaatacagtaagattggcgcccaatcgttagtattgatccggatcaatagtttgttatcactttttcatctatcacagcgccgaacacctgcctggattgccttgctggcaattctgatgctgttcattgctccagtggtatcaaaaacactggaacatcatcgcggtggtatgaaaaatgaagcatgtcatggtatgccaatgccagatatgcaaaatagtcaccatcaatcagacagcatgaatcatcatggcgttgatcatgttcatatggggctgatggatgatattgcctgtggttattgccagctattgattaacctgccgttattgtcaggttcatttattcctttcatcttgttgacgctgacgatttcccgtgcgccaccagccccccgcttttctggcccggctatccggctgttctatggtgagtcacaaccacgcgcaccaccccttaattaattcgcttatctgaataaataaatcatctatttttcttgcctgaaatcatttttggcaagtcggtattgttttaaacaaattcaaaaacaggatttgtgattaattaaggaatatttttcatgtctactacacaattgtttagcgcatcgcctttggctacggctttagctatcgcactctttattccaaatggtatggctgccacaaaagaacgtgctgaagagacaaaaaatttaaactcagttcgtggaaatgtagcctatgaaagtgaatcagtcattaccgtaactgctccggctgtttcgcccctgaatattttttcctcactcaaaactccccgtcaacccgttcccgccagtgatggttcagattatctgaaaaccattccgggattctctcaggttcgtagtggcggtactaatggcgatccggtattccgtgggatgtttggttctcgcttacggatgctgattgatgacggcgaagttatgggctcttgcccgtcacggatggatgccccaagttcatatatttcaccagaaagttatgatgttttgagtttggttaaagggccgcagactgttctttggggaccggggaactccgcaggaactattcgttttgaacgctcccgtccacaattttcagaaccggatgctaaaggtaatatcagcacagtcgctggttctaatggacgctgggatggtaatgcagacctgagtttcggcaatcagtatggctatatgcgccttatcggtaataaatcccgctctaatgactacaaagacggtgatggctatcgcattccttcccattggaacaagtggaatacggatgtggcattgggttggacaccggatgataataccctgctggagttaaatgccggacagggagatggaaaggctcgctatgctggtagagcaatggatggctcgaaattcaaacgcgaaagtttgggaatgcgctttgaaaaatccaatattggcgatgtatttgacaagtttgaaactaatttttattacaacgccactactcatgtaatggataacttatcccgcccttcccttgcagcaatgaaaatgggatctggcgacagccatatgggacacggaaatgggcatatgaaaagtagccacatgaatcatggtagtcatggaggacacggcagtcacggtgggcatggtaatggcatgaaaatgtctcatcaggtagatcgcaaaactctgggcggacgcatgatgggtacatggctttgggaagatttcacattacaaagcggtgtggatatgcagaccaatacgcaccgtaatcaatcacaaaaagatgcccgtttccgtgattatggtgtttttggcgagctgacctgggatgctgacgaacaaagtaaggtaatcagtggtgctcgtttagatcgcgttctagtggatagatatcctcaaaaaatcgaggaaaaacaggaagaacgaaccgatactttaccagccggttttgtccgatatgaacataacctgaaagaagctccggtgatgttctatgccggacttggttatactgagcgcttccctgatttttgggagttgttctggtcaaaaggccgtgtttttaatcaactgaaaacagagaaaacaacacagttagatatcggtgctcattataacgatcatcatttgcaaggctggatttccgcttatgcaggtaaaatcgatgactttattctgttccattatgccggtcaaaaagccgataacgttagcaacattgatgccaccatactgggtggtgaaatggggattggctatcatctgaatgaaaattggaaaaccaatgcaagtctggcttattcctgggcgagaaataattccaaccatcgtccactgccacaaactccgccattggaagcccgctttggcctgagctgggagtatggcaactggagtagcaacggtttattgcgtctggtcagcaaacaaaaccagattgcgatgaatgaaggcagtgtagccggaagggattttgatcgcagtgccggttttgccgttctttctgctaatgccgcctataaggtgactaaaaatatgcaggtcagtgccggtgttgacaatatttttaataaaacctacagcgaacacctcaatcgtgcaggaaatgatggttttggttattctgccaatacgcctgttaacgagccgggccgtacttattgggccagatttaacgtgaaattctaatctctgattgacctcccggactttgccctgagttaaatcggggcaaagtttcttttcttttcatttcttaatgaacttttttactaaagttatttttacatcacattaagaaatatttttttaaaaagattcttttaaaaaatcaaaattatcagactaatcctaaatatctgactcatttgctagtaaccaatgacgcaaaagcatagccaattgctcttgttgttcattcgataatgcactaagaatctctcttgagttttctaaatgactttcaaccgctttatcgatcagcgcccttccctctgaagttaaagagactttgcaactgcgtcgatctttgtcattagccgcacgttcaactaacccacgctgcaccatatgttcaatacgggtgctcattgcgcctgaagttaacataactgactgatacatttcggttggtgtgattggagaattatgacggcgtagtgtcgcaagaatatcaaactcaatagcgctcaggtcaaaggttttgaatgtagcctgcaaccgctgttcaataattttattcgcccggcataaacgcccgataacgcccatcggtgatgggtcaagatctggacgttgttgttcccactgtatgagtaaacggtcaacgtgatcgtacttcatgttttttccctattcatttatttttgtgaaaagatacttgataaaatttgtataggctattattttaatttatctttacataaagatactttttaaaaggaagtatagggttaattgttggatggtagtccatatgaatttcaatacgaagataataaaagttcatcttgaaatccgatagataaatctgtaatcaaagtataaatagacgaagtaactacaatgcccgcaggtatatgagtattgcgtaagcaccgattgttatgggcaagcacttatgttattactactgaaatgttgccacctaatacccccttacttgctgcaactctcagagcactacctgccggaattttattactgttaatttgccgtacatttccaaagggaatatggtggtttcgtctggctattctcgggttattaaatatcggagcctttttctatttcctttttatggctgcttggtaccttcccggaggaacagccgctttgattatgtcatctcagcctatttttgttattctgctaagtacttttctacttaaaaccccgctgacgaaaatgcatatcgcttcagaaattctcggaattataggtattgcactcctcgtaaccaatgcaaacacacgtttaaactggcagggaattattgctggttttgccggttgtggctgtatggcattgggtgttgttttaaccaaatattggaaccgccctactaatttatcgttactgagtttcactggctggcaattaatgttaggtggaatgatgttactgccggtggctattttaactgagggaataccgcatcagattacattaactaatatcttcggctatagctatttatgccttatcggtgcggttttttcttacattatttggtttaggggaattgaaaaactaccggttgtcacaatatcttttttaggttttatgagtgcattatcggcgtgcatacttggctttgtttttttaaaacaaacattttctttcttccaatttataggagcctgcatcattatcatcgcggtttggctttctatacccagacccataaataggatccaaacagctccacaaccctacaactttaaaaatgcaaattaaaaataaaaggaatattaccgtatgaagttaaccttaatctctggtagccagcgtcaggattccaacagccagcgtatagcccgttatttacagaagttaagtagtgaatatggatttaccgataccacatttcttgaattatgtaatgtcgaactccctcttcatgatggctatacaaccgatatctcagcggaatcccacccgtggcaggcaattgctcatcatttaagagacagtgacgcttttatttttgtctctcctgaatggcatggaatggtaccaccagcactgaaaaacttattgttatattgctctgtgaccgaattaggacataagcccgcattattaaccagtgtttctagtggaccaaatggggtttatcctatctccgaactgcgtatgactggttttaaaaataaccatgtctgtttcctgcctgatcatttaattttccgtcaggctggtaatttaatttctcctgaattggtttgcagtgatacagcttttgaaaatcgggttcactatacattgaagctacttaaatcttatgccgaagctttgaagcatgtacgagacgctattggtgatgaaatgcaacagtatccgtaccgtatgtaaggaagttgtattataagttttaaaaatatattttccctctttcaagttgcagccagtaaaggtggaattattcatcccaagtacccggtttatatctctgcattcttaagcataaaatacccggttcctgtctcttattttatccctggatttgtcgtatcgggccaacaaaattcatactgcatcaaatgtgttaaatttagtggagcggcttagattatttcgcttatcacattaaaagccagtcattctgtaatccattgctaatttctatctaagaaaacaaaggagctaatttaatggcctggttacatgaactttttagcctttctcctgaaattgcactttttctcgctttggctggtggcacatggttggggaggttcaaactaggagcattccaactgggtggtgtagccggcgcactggttgtagccgtgttgattagccaggttggtgtcagtatcggcgacggaattaaaaatgtcctatttgccctgtttatttatgctgttggctttgatagcgggcctaaattcttttcctcactgggccgtcaaacgctacgtgaagtcgcactttctttggtactggcagtgagtgggctgttgacactcgtcgtcatggcaaaacttttctctcttgatcaaggtaccgctgcgggcatcgccgctggtgcactaacacaatccgcgatcatcggcaccgctggtgcagccattgctaaacttgatctggctccggcacagatacagcagttgcaaggcaacgttgccgtcggttacgcagtgacttacatcttcggttcccttggtaccatcattatctgcgttaatatcctgcccaaaataatgaggcgatccattcgggaagatgcgatgaaagccgagctggatttactcaaaggagcacctttattagccgcagaccagacgcctgctctaccgggtattgtgggccgtctctatgaggccggaccggcaaaaaatatacacgtctcagaactggaagcgttagcttctccacagttccccgttacgctggaaaggctaaagcgcggaggagaagaaattcatgttacgccggatcttctccttatggagaatgatgttttacttctggtcggacgccgacaaggtattatcggtctggctaagcatctggggaaggaagtactaaccgagcacgggccatcgatggtcatgacaaccaatgaagcgttggtggtaaacccggcctttattaataagcggcttgcagaactccgcactcaggtggcctccgatgtacgtcatggtatctatgtcatcagcataaaacgtggagaaaatatgctgaccctttctgatgatacggtcatcaagcatagcgacgtgataacgctgtatggcagcgaacaggatattcagcgagcgatatcactggtcggcgcttctctggtgaaaagtatcaaaacagatttgctttttcactgcctcggtattgccgttggcctattaatcggcctgctaatagtacgtatcggctcagtacctcttactctggaaagtggcggtggcgcacttttatccggtctgctttttggctggtatcagtcgcgtaagccgctgagcggtaatatacccagcggtgcctcttcaatccttcgtgatttggggctggccggttttgtggcagtagttggactgcaatcaggcctgcaggcggttgaaactattcgctcaagcggtatttcgatttttcttattggtgtggtggtcactgttgtgccgttgatgattacgttgtttatcgggcgttatctcctacgctatgacaatgccgccatttttgccggagccttgtcgggaacccgcagtgctaatcccgcttttggtgaagttctcaataaagccggcaatgccataccaacagccccttttgctgtgacgtatggtttagccaatgtgttcctgactttattaggcccactcatcgttgctattgcgtaagccaatgtaacctttacaagtggagtaaacttcatgtctaaacaacaggataagtatgctgctctcagtccttttgaacttaaagatgcgttgatccaactggcgtcaagtaaatccgggcgcacgatgctcaatgcaggtcgtgggaacccgaattttctggcaaccttaccgcgtcgggcgttttggcgtttaggtctatttgccacttcagaagctgagctctcctattcttatttgccgcatgatatcggtggattaccccggattgagggtattgaggcgcgctttgatgagtttctgtcagcaaaccatgaccaacccggtatctcttttctcgccagagccgtcagctacgttcgtgatcaacttggtctgtcagcttctcagtttctgcatgaaatggttgagggaattctcggagccaactacccagaacctcctcgtatgcagcggattagtgagcagattacccgagagtacattgtaaaagaaatggtaggcggtctggtttcagcacatgatgtggaactttttgctgttgagggcggcacagcagcaatgacttatctgttcaatagcctacgcaataatggtctggtgaaggtcggtgataaagtagcaataggctcccccatctttacaccttatattgagatccctcagcttgaagattttcagcttaagacggtgatggtacaggcgtcacccaaaaaccgctggcagtatcccgacagcgagctggaaaagttgttggatccttcggtaaaaatatttttctgcgttaatcccagtaacccggcttccgttaaaatcgataagcatggtttggaaaaactggcagacattatccgtcaacgccctgatttgattattcttaccgatgatgtttatggcactttcgctaatgattttaaatcccttttcgcgacctgcccacggaacacaattctggtttattcattctccaaatattttggtgcaaccggatggcgtctcggtgtaattgcgttacaccgtaacaatattctcgagcagaaactggctgctttacctgccagtgagaaaaaacgcttgaataaacgttatgagtccctcactcctgatgtcagtgccctgcgcttccttgaccgggttgttgcagacagccgcagtgtggcgctgaatcataccgccggattatccaccccacagcagattcagatggtactgtttgctctgttttccctgatggatagtgataatggttataaatcctctgtaaccaagatcattcgtcggcgtcaggcggtgctatatcgtgaactgggcattgttcagcctgatgatgaagaatccgttgattactatacgctgcttgatctggaggaaatatcccgccgcatttatggtaatgctttcgcaacatgggtgaagggtacggttgattcaactcagttcctgtttaaaatcgctgaagacaccggcattgtgatgttgccaggttcgggtttcggcaccctgaaacccgcaggcagaatatcgcttgccaacctcaatgagtatgaatatgccactatcggtaaagtattgaaaaaattacttgaggaatactttgttgttttcacaaaagagggaaaacacaaatcaaatatttcctcgagtaaagtgaataaaaaagatcattctaagatagatagttattaaaatttaataggtggctattaagttcaatgtctatcgaaagacggatcttggcgtatcagcctgttaacaacgatagagtgcaaagttttgcactctatcgttcaatgaccttagtcatcatggaatcgttcgattcaacgctctcaacagacaaaatgcaacaaaagcggcagcgatgttatagaacattccgctgaccaaggcattttgatatcccataaaagcagaaacacctgtaatgtctaatttccattgaaccagaatactgacaatagcaaccccaaaagcagcaccaacttgctgtagcgtagagacaatacctgaagccattccggcaaatttggtatgaacaaaagccagcacaatattaagtaatggtgtcatcacaaaaccctgcccataccccaaaatggtaacaaccggaatgattaacagtaatttagagtcaacctgtaattgagcgataacgacagccaagacactcaacaaccaccgactaaagtcggtggttttaaccttttatatggaaaaataaatgagacaaaatatagcagtgctcccgccacaatagcccgattcccgaatcgtttaacccagtaaggagctgtaagtgaagataaaacaaacccaatactggcgggtgcaaaaattagtccggcatctatggcagcaagacccagaccactttgtaaaaataatgcaaaaataagaaagaatgaactggatgtggaatagatacacaaaaccaataagcaacctaagctgaactgtctgtttttcagtaactcgaaattgagtaatggcgtttttccctgatagacataacgcctttcatgccgtacaaattgtgacaacatcaccagtgagaacaagagcagtaaccaacaccatgctggccatcccaggactgggccgactaaaagtggcgacaataaagcaaaaataccaataccggaaagtgcgactcctccccagtccaaccctgttttttccttcgccttgctctcaggaatataaccagaaaaaatcagtgccaacatcccgacaggaatattgacgagaaaaatagagcgccattgtaaatcccagatattggccgatatcatccatccacctaagatttgccctgcgatagcagcaaaccctaaagtcatacccaataatccaaatgccttgcgtgcgttgtctccctcgaaattaacacgaatacaggaatatacctgtggaaataagagtgcagcagcaaggccctgcaagaaacgagcgataattaaagtatttgcggttggcgctaaaccacaaagtaatgatgtgaatgtaaaggtaagaataccaaactgaaataaccgccgtctgccaaacaaatcacctaaacgaccaccggtaatcagcaataaaccgaacccaatttcataggtcacaatgaccagcgtaacctgaaatatacttgcctgtaagtgggtctggatattggtaatggcaatattgacaacaaacaaatcaaaaatagtcacaaatccagccagtaataatacggacagggctaaataatcccttttagtcataatcagaaccccctcgctattttaaattaagcggattttagttctcatattatcctgttacaatttaaccaattatactattactaaaagtaatgggtttgagctcaatgacaaagttaaaaagaactcgtactgaattagccaattttttgcgtactaaaagagaaagtatcagccctgaatctgtcgggctaccgcacattggccgacggagaacatcggggttaaggcgtgaagaagtcgcggctttggccggtgttggcctgacatggtacacatggttagaacaaggtcgggaaattggcgtatcggcaacttttttagataatattgccagtgtttttaaactcaattcagcagaacggcggcatctctatttactggcccatatgcgtgaacctattaccaccagccagacgcgaagttttatttctcccctgatcaaacgattgatgggggatttatcccctcatttaacgtatgtattaaatctatattgggatgtgctggaatttaaccagcaggccgatgaatattttcatttcagccagataaaagatgagcaacgtaatttattatggttgttatttaccaataatcatgaccgtgaattattaccaaattggcaacaggatgattataaaatgttagccagtttcaggcgtgattatgcgatagcttcaaaagatagttatgttcaggg

SEQ ID NO: 3083 - DNA, 34319 bp, Xenorhabdus sp.; identical to SEQ ID NO: 3082
  CDS (849)..(1838)

SEQ ID NO: 3084 - DNA, 34319 bp, Xenorhabdus sp.; identical to SEQ ID NO: 3082
  CDS (1819)..(3816)

SEQ ID NO: 3085 - DNA, 34319 bp, Xenorhabdus sp.; identical to SEQ ID NO: 3082
  CDS (3822)..(4940)

SEQ ID NO: 3086 - DNA, 34319 bp, Xenorhabdus sp.; identical to SEQ ID NO: 3082
  CDS (5143)..(5577)

SEQ ID NO: 3087 - DNA, 34319 bp, Xenorhabdus sp.; identical to SEQ ID NO: 3082
  CDS (5581)..(7083)

SEQ ID NO: 3088 - DNA, 34319 bp, Xenorhabdus sp.; identical to SEQ ID NO: 3082
  CDS (7361)..(7741)

SEQ ID NO: 3089 - DNA, 34319 bp, Xenorhabdus sp.; identical to SEQ ID NO: 3082
  CDS (8061)..(9650)

SEQ ID NO: 3090 - DNA, 34319 bp, Xenorhabdus sp.; identical to SEQ ID NO: 3082
  CDS (9799)..(10353)

SEQ ID NO: 3091 - DNA, 34319 bp, Xenorhabdus sp.; identical to SEQ ID NO: 3082
  CDS (10434)..(12254)

SEQ ID NO: 3092 - DNA, 34319 bp, Xenorhabdus sp.; identical to SEQ ID NO: 3082
  CDS (12269)..(13300)

SEQ ID NO: 3093 - DNA, 34319 bp, Xenorhabdus sp.; identical to SEQ ID NO: 3082
  CDS (13432)..(16089)

SEQ ID NO: 3094 - DNA, 34319 bp, Xenorhabdus sp.; identical to SEQ ID NO: 3082
  CDS (21642)..(22379)

SEQ ID NO: 3095 - DNA, 34319 bp, Xenorhabdus sp.; identical to SEQ ID NO: 3082
  CDS (22663)..(23259)

SEQ ID NO: 3096 - DNA, 34319 bp, Xenorhabdus sp.; identical to SEQ ID NO: 3082
  CDS (23426)..(23755)

SEQ ID NO: 3097 - DNA, 34319 bp, Xenorhabdus sp.; identical to SEQ ID NO: 3082
  CDS (23950)..(25986)

SEQ ID NO: 3098 - DNA, 34319 bp, Xenorhabdus sp.; identical to SEQ ID NO: 3082
  CDS (27778)..(28374)

SEQ ID NO: 3099 - DNA, 34319 bp, Xenorhabdus sp.; identical to SEQ ID NO: 3082
  CDS (28998)..(30365)

SEQ ID NO: 3100 - DNA, 34319 bp, Xenorhabdus sp.; identical to SEQ ID NO: 3082
  CDS (30399)..(32051)

SEQ ID NO: 3101 - DNA, 34319 bp, Xenorhabdus sp.; identical to SEQ ID NO: 3082
  CDS (34006)..(34317)

SEQ ID NO: 3102 - DNA, 34319 bp, Xenorhabdus sp.; identical to SEQ ID NO: 3081
  CDS (15399)..(16973)

SEQ ID NO: 3103 - DNA, 34319 bp, Xenorhabdus sp.; identical to SEQ ID NO: 3081
  CDS (15020)..(15262)

SEQ ID NO: 3104 - DNA, 34319 bp, Xenorhabdus sp.; identical to SEQ ID NO: 3081
  CDS (12961)..(14322)

SEQ ID NO: 3105 - DNA, 34319 bp, Xenorhabdus sp.; identical to SEQ ID NO: 3081
  CDS (7680)..(8171)

SEQ ID NO: 3106 - DNA, 34319 bp, Xenorhabdus sp.; identical to SEQ ID NO: 3081
  CDS (1882)..(2151)

SEQ ID NO: 3107 - DNA, 29043 bp, Xenorhabdus sp.
  CDS (9959)..(10438)
  unsure (1)..(29043): unsure at all n locations
gtaacgcccgaactttccntgagcaagatttaacagcgaaccaccggaaaaggcgacaatcgttcccggttcagcaggccgctgggcaacaatagcgttgtaggcaacagcgccgactccaccgggcataaatgttacccgcataggagaattaataactttagtttctaataatgagacctgagctaatttacaggttaagtcaaacccgccaccgggtttggctggagcgatacattcagttctgtcaggggcgctggctgcaaaggtattgacactgaaaagtaaaccagtagtcactaataatgtttttaatattttcattttttattcctcatatggcaccagtccagtaatggtgacaatgcaataaatctccggtgcattattatttatagatccgaaatctcttattagccgtgaaaaatacctatatgtgacattaatcacctaatgtcacatttgacttactttgaaatacaccgaaatgtttaatgttatatataactgaaatagagtaaatctgggcttatgtttttatattagagaatcttctttaaatgactctttaatagagttcaatattagaattcattaataataaataaatttactttatgtatttttctgaatgaatttgatatccacaaaaataaatttatagattatagaatcaacaggtttcagttaaatacttcacaagtcggctatgaacaataaatgctgggaatggtaaataagttcagttaggagggtattttattatgatctgtttttgcagttatcgcccaatggcattattgggcgataactggtgataaagttatttaaaatttctgatgattaacttttgatacttttttcagtttgttttttataactgttaattggagtgcgtaattgttgggcaatcatcacaccagctaacacaataccccctccgataaggtgatagctgtgcatcttctcatgaagcactacaatcgcaataatggcagtaaagaccggagccaggttcataaatattgatgtcatatttgcacccagtcggctaactccctgtatccacacgtaaggtgcaataattgaagccggaatacctgcaaacagtacaagagggatattatcgccggttagccggacatcttctgtcatcatgaagttgggagaaagtaacagcacgccaaacccaatttgtatataaagtgcctgccagttgggtaatggaattgcccagcgtttggtcaggacgccgtacagagcgtaagcggctgatgcaataaacatcattacatctccgatccctaatccgttcttcaacaaagtagacggttcacctttacccactagccatatcagcccaaacagtgaaaaagcacttccgagtataattccaacggttggcgtgatccgtagaacaaatatactgagtatgatcgtcagcaacggaattaatgaggttaagattccgatcagtgttgcactgaccgtatgggcggcatagtaaatcaggctttgattcagaaccataccaagaaaacccagaatcaataacttccaccagtgtggaatgattgttttccactgttttagtaccggcagtaagataaaaggtgtcaaaatcaaaaacgcgacaaaccagcgatagaaagcgatagcgccgggttcaattgaggttgctgcggatttactgactaccgcattagctgaccaaatcaggacagcaataaggggaaataataaatttttcattgaatttcattgtgtgtagaacatcgtgcacttagtgtagcagtgaccgatttattatatatattgataatccgccaactgatgaggcaatcaggacaatttataaattcctctccgtttttggaagtaaaaatgaattttttgaaagggagttaaccaaatgatgtttcagttaccggactgggatatgcccaacactctcattttccgtgatgaaactctgaatgctgatactgaatttatgttgcattcccacccattcgggcaattgatttatgttgtctgcggcgttatggagatgactgtggaagggcaacgttttctggctccaccggagttttgtatctggatcccgaaaaatagtgttcattcgagttataaccggaaaacaatgcggttttggataatcgatatttcaccgcaattgagcaagtcgttgccccctcatccatgtcttatccggttaagttctatttttcatgccattatgcaggatttctttagccgtaaagttattcggccacagaccgataaagatcagcgtctgacacagattcttatcgatcagcttgaactgtcaccaagccagaatacttacctgccttcatcaaaagataaacttcttgcaccgattttacaggaattagagcataaccccgctgataatacttcattagtagaatgggcaaagaagcgttatacctcagaaagaaccttatcacgtcgttgtcagcaggaactaggaatgtcttttagtgagtggcgacagcgtctgcgttttctgcacgcaatttctttactggcacaggggaaaagcgtttatgaagttgcatttgatgttggttatagctcatcgtccgcttttattgccatgtttcaacagattgcaggaacaacgccggaacgtttcaggaaaggatgagctgaaataaacatcaatcagagtgtactaggctgcagaaattttctgataaagcgccaagcagaaagataaagggagattaggcattatgtcgattaaatggcagaatagcggatcacgcccacttaagtcgttggataagaaaagtgaaaattttagtcgatgaaaatatgccttatgctgaacaactctttaaacaattaggagaagttcaggcaattccggggcgccctgtgcctgagggggttttggaacacgcagatgcctttatggtgcgttctgtcactaaagttaatgagttcctgttaaaaggcagcgctgtaaaatttgtcggtacagcgactgcgggtatggatcatgttgatcagccgtggttagagcaggcggggatcggtttttctgctgctcccggatgcaacgcaattgctgttgttgagtatgttttctccgcgctgatgatattggcagagcaggatcaatttcagctgaaagataaaactgtcggtattgtcggtgttggtaatgtcggggggcgtctggcagcacgactggccgctctgggcgtgaaaactctgttatgcgacccgccacgggctgatcggggagatgaaggtgaattctggtctttagaaaaactggtcaaagaggcagatattctgacattccataccccgctcaatacatcaggcccttatcagacttatcatctggcagatgcagaactgctttctgccttgccggataaccggatcttaattaatgccagccgtggtgaagtggttgataatcaggcactgttatcagctttacaaaacggaaaaaaattgcgcgtcgtacttgatgtctgggagccagaacctaacctttcattacctttactggagctggtggatatcggtacacctcatattgcgggatatactctggaaggcaaggctcgtggtacaactcaggtttttgaggcgtattgtgaatttttagggaagccacaaaaaaccgcattgtctgacttactgcctgagtctgatttcagccatatcactgttcgtggtgaagtgacacaaagcatcctgaagcgtctgatgcatttagtgtatgatgtgcgccgtgatgatgcaccattgcgtcaggtagccgggcagaacggtgcttttgaccagctgcggaaaaattatccggaacgccgtgagtggtcttccctgacagtgcattgtgattctgaaagcagtgctcaattactatcccagattggatttgacgttaaagtcatttaaaaacatttgattagctgaattcaattaaccgtattgaattaactgtattgagttaacaacaggcagaattctctgcctgccagcaaaataaaagagaagtggagagaaccaacatgtcagaaggttggaatattgcgctgttgggtgcaacgggcgcagtaggtgaggcgatattggcgttattacaggagcgccagtttccggttggtgaactgcatcttcttgccagtgaacaaagtgccggtagcattaagcggtttaacggtaagaacgttactgttcgcgatgttgccgaatttgactggtcacaggtacagctagcattttttgctgtgggtatggaagtcacagcacaatatattgcacaggcaacagaagcgggctgtctggtgattgatagcagcggattgtttgctgctgaaccggatgttccattggttgtgccgacagtaaacccgcatgtgctggctgagtatcgtaaccgtaatattgttgcggttgccgatagtgcaaccagtcaggtgttaacagctatcaagcctttaattgatactgcgggtatcgcgcgtttacaactgaccaatatcctgccggtttctgtgcatggtaaagcagcgattgacgaactggcggggcaaagtgcccgtttattgaatggaattccaccagatgaagggcgtttcaataaacaactggcattcaacttactgcctttgctgcctgatgcggaaggcacagtgcgtgaagagcgccggattgtcgatcaggttcgcagaatattacaggatgaaggtttgcctgtttcagtcagctgtgttcagtcttccgttttctacggtattgcccagatggtcagtgtggaaacactgcgtcctgttggcgtagaagaagcgcgtgacgaatttgaacgtcttgaagaaattcaggtctcagaagaaggggattacccgactcaggtgactgacgcatcaggtgctgatgggctgagtatcggctgtctgcgtaatgattacggaatgccggagatgttacagttctggtctgttgccgataacattcgtttcggcggtgcattgatggcggttgaagtcgcagaaaaactgatgcaggagcaattttactgatgtctgatacagaactgaatcagtctgtgccagaagcaaaaaaagtgaaaattgcactggggattgaatacgatggcagccgctattatggctggcagcgtcagcaggaagtcagaagcgttcaggcatgtctggaaaaggcgctgtcaaaagttgcaaatgaaccaattgctgttttctgtgcaggcagaacggatgcgggtgttcatgcaacggggcaggttgtgcattttgaaacttcggcacagcgtaaagatgctgcatggacaatgggcgttaatacccatttacctgcggatatcgcagtgcgttgggtgaaagcggtagatgatgaatttcatgcccgtttcagcgcaacagcacgccggtatcggtacgttatctttaaccatcgttaccgtcctgcggtactggcgaaaggcgtcacgcattttcattatccgctggatgagaaaaagatgcatgaagcagcacagtgtctgttaggagagaatgattttacttctttcagggccgtgcagtgccagtccaattcgccatggcgtaatctgatgcacattaatgtcagtcgccacgggcattatgttgtcgtggatatcaaggcaaatgcttttgtccatcatatggtgcgtaatattgtcggcagcttgcttgaaattggctgtggcaatcagggtgtacaatggatgactgagttgttagcactgaaagatcggacaaaagcagcagcaactgctaaagctgaaggtctatatttagttgcggtggattatcctgctcactttggtttgcctgagccggtgatggggcctttgtttttggctgatgagttagtttctgactgatgaactggtttttgactgataaatgctgattttttcgaatgatggcagggatgtttgagcactacgaggaatattatggagttttttactcattttattgatttcgcgaagttcattgttgattttattttacatattgatgcccacttggctgaattagttgccaattatggtgactgggtatatgggatcttatttttaatcgtattttgtgaaacggggctggtggttacaccgttcctgccgggagactcactgttatttgtagcaggagcgctgtcggcattggattctaacgatcttaacgtacatattatggctgcattgataattgccgcggcaattatcggggatgctataaactatactattggtcgtgttttcggtgagaaactgttcaataatccaaattcccggattttccgtcgcagctatctggagaaaactcatcagttttatgagaagcatggcggaaaagcgataattctggcgcggtttgtgccaatcatccgaacatttgctccattcgttgccgggatgggaaaaatgtcttaccgacattttgctgcatataatgttattggggcattgatatgggtattattgttcacttatgccggttatttattcggtgacatgccgattatccaacagaatctgaaattattgattgttgcaatcatatttatttctattctgccaggtgtgattgaaatctggcgtcatcgccgggcgacatctaaaaaagcgtcagataataattagatgttactaaatgatagatagccacaaacaggtttgagcagttttttatccactctgttatagcattgtggtttaatggcacgtaaaacaaaagctggcttataccgaggaaatgcagcccacgttataggccagaatcagacggaaaggttcattaatgagctggattgaaaagattctaaacaaaagcaaaatcatgcaaactcgcaaggcaaatatccctgaaggagtttggactaaatgcgacagttgcagtcaggtgctttatcgcgctgaattagagcgtaacctcgaagtgtgtccaagatgtgaccaccatatgaaaatttctgcccgccagcgtttgcagtcatttttggatgagggaagtacaacagagttaggcagcgaattagagcctaaagatatcctgaaattccgcgatatcaaaaaatataaagatcgcctggcagcagctcagaagcagactcaggaaaaagatgccttagtcgtcatgaaaggcttgttacatgatatgccggttgtagcgggcgcatctgagtttaactttatgggcggttcaatgggttcggttgtcggcgctcgttttgtgcgtggcgttgaacaggcactggaagataactgcccgtttatctgctttgtctccagcggtggagcacgtatgcaggaatcactgatgtcactgatgcagatggcaaaaaccagtgctgcattagcgaaaatgcaggatcgtggcttaccttatatttgtgttctgactaacccgacatttggtggtgtgactgcaagtatgggtatgctgggtgacattaatattgcagagcctaaagcattgatcggttttgctggcccacgggttatcgagcagaccgtacgtgagaaattaccggaaggtttccagcgcagtgaattcctgctggaaaaaggtgcgattgatatgatcatgcgccgtccggaaatgagagaaagaattgccggtatgcttgccatgatgactcatcagccacatcccgacgcgaaaaaagaagtaacagaaattgttgctgaacctgctgacgtcgaagttgacataaacatcaaccctaataaagaagatgtctgatactttacaaattcctcaagccacatcgtcactgacgatgtggctttcctaccttggaaacctgcactcgaaagcgattgatatggggcttgagcgtatcggtacgcttgccgataaactggatttattacatccggcccctaaagtcattacagtatccggtaccaatggtaagggcacaacctgtcatacccttgaatccattcttctggctgcgggcctgaaagtcggggtttacagctccccacatctggtgcgctataccgagcgggtacgtattcaggggaatgaaccaacagagcaggatttttgccgtgtatttgccggtattgaatctcagcgtggtgatatctccttaacctattttgagtatggaacactggcggcattgcagctcttcaaagaagctgatcttgacgttgtgatcctcgaagtggggctcggaggtcgtctggatgccactaacattgtcgatgcagatattgccgctattaccagcattgcactggatcatacggattggcttggcgcggatcgtgaacatatcgggcgcgaaaaagcgggtattttccgtcatgggcactttgctgtcgttggcgagccggatatgccccattccattgctgatgttgccgatgaactgggagcaaaattattctgccggggtaaagactgggattttacccaggaaaaagaaagctggcactggcgcacagttgatcgacaatttaattcgttgccgatccctaacctgccattagctaatgctgcaactgcactgggcgtcattcattgtctgttacagcagaatgataaagtcagtcaggcgattgatgaacaggctattcatgatggcctgaagcgtgctcagttaccggggcgttttcaaatcatcggggaaaagccgcgtatcattctggatgtggcacataatccccatgcagccggatatctggcacaaaaactggcggagttatcccgtccgcagggcagtaaggttcggggtgttgtcggcatgttgcaggataaggacatcgcgggaacactggcctgtcttagcgggcaaattgacgaatggtattgtgcatcactacatgaacttcgtggtgcagaagcggctgtattggctgaacacctacctgatgcccggatatttccggacgttgaacaggcatggcatcaggctatggaagaggcatcagagcgggatattatcgtggtctgtggttctttccatacggtcgctcatgttatggagtcattggaggagatgaagggacgtggcaagtaaatttcaaaatcgcttagtcggaaccatcgttcttgtggcactgagtgtcatcgtgctgccgatgctgctggacggcgataagaaatacaatgaggaaaaattcgcttctataccattagtgcctaagccgggtgatgaagagaatattgattcgattccgccactgacacaaagtatgccgtctgcacctccggaaggggctgcagaggcaatgcagacacaagttcaggagccgcagcaagatacggatacattttccggttctttagccccggaatcagtaccggagccatcggcagcaacggcaggatacaccggagaacaggcaaaacctgatctttctgttattcctaaaacagaaaccaaaccgcaggttaaggtagagaaccgcactgaaagccagccggaagtgaaaccccgtgctgctgaacaggcaccgcaggccgttgcttatgttgtgcagcttggggcattaaaaaatgcggataaagtgaatgaaattgtggctaggctacgtctttcagggtatcaggtctatacggttccttcttcggcagtacaaggccagttaacccggatttatatcgggccgaatgcatcaaaacaggctttggggtctattttgcctgaactgagagaattaaccggcttacaggggcaaattaaaaattacacgccataacatcatgctcttacatactgggctacaatccgctgtgaaagatcaggaacccttcataatgcgcacagcttgtacaggcagatatgaacggttccttaaattatttttaatagcagagtgataaatctgctacgcaaacgttttcgttttctgttagaatgcgcccgacctgaaagtcgggagcctgttttggattaaaatatggtctggatagattatacaattattgccattattggtttctctgcactggtcagcctgattaggggctttgttcgtgaggcactttcactgatcacttggggatgtgctttctttgttgcaagccacttctatacttacctggcggtttattttacccgtcttggagatgagctggtgcgcaatggggtagcgattgctattttattcattgcaacactaattgttggtgcagtagtaaattatgtgattggttcacttgttcagcgaacaggcttatcaggtactgatcgggttctggggatctgtttcggggcgttgcgtggtgtattaatcgtttctgccattttgtttattgcagactcatttactccgcttccccaaagtgcggactggaaacagtcgcaattgatccctcagttcagtcaaattatcaggtggttttttgactacctgcaaaacgcgtcgagtttcctaccggagaaatagccttctccgcctgactgatgaggaaagactacatgtgcggtattgttggtatcgttggttttacatcggttaaccagtcgatttatgatgcattgacggtgcttcagcaccgtggacaggatgcagcaggtattgcgactattgatggtaacaatgaattccgtttacgtaaggccaatggtttggttaaagatgtgtttgaaacaaaacacatgttacgtttacaagggacaatcggaattgggcatgtccgttacccgacagcggggagttccagtgcttctgaagcccagcctttttatgtgaactcaccttttggtatcacattggcacataacggcaatctgacaaacgcgccggaactgaaaaaaagtctgtttgaaaatgcccgtcgccatgtcaacacaacgtctgattctgaaatcctgctgaatatttttgccgatgagttaacacaatttccgcatttcccattagaacctgatgatatttttgcggcagttgcggcaatgcaccagaaaatccggggtgcttatgcctgtgtcgcgatgattatcgggcatggtttagtggctttccgtgatccgaacgggatccggcctctggtattagggaaacgtacactggcagatggccgcagtgaatatatggtggcatcggaaagtgtggcactggataccttagggtttgagttcctgcgggatgtcgcttcaggtgaggctatttatattactgagcaggggcaattatttactcgccagtgtgcagaaaccccctcattaactccctgtctgttcgaatttgtttaccttgcccgcccagattcctttatagataaaatttccgtttataacgcccggttacggatgggaagaaagctaggggaaaaaatagcccgcgaatgggaagatttacaaatagacgttgttatccccattcctgaaacttcctgcgatgtcgcactggaaatcgcccatattctggataaaccttatcgtcaggggttcgttaaaaaccgttatgtcgggcgtacctttattatgcccggccagcatgaacgccgtaaatcagtccggcgtaaactgaacgccaaccgtgctgaattccgtggcaaaaacgttttactggtggatgattctattgtccgtggtacaacgtcggagcaaattgtggaactggcccgggaagctggcgctaagaaagtctattttgcttcagctgctcctgaagtccgctttccgaatgtctacggaatcgacatgccaaatgctaatgaattgatagcgcacggtcgtgaagttaatgaaattcgccaactgattggtgctgatgccctgatatatcaggatctttctgatttaatcgcggcgatgcatgaagaaaacccggatattgaaaaatttgaatgttcagtttttgacggtatctatgtcacgaaagatattgatcagacttatctcgattatctggaaaacctgcgtaaagatgatgccatgaaattacagggacagagcgaaatcgagagcctggaaatctataatgaaggataataacactcctatacacaatggatttcaagatgcatcgcggcggcaagggagttcatccccgggagcatagataactatgtgactggggtgagcgagtgcagccaacaaagaggcaacttgaaagacgaagtgtatatcattaaattatttccggtattactgaggagcgcatgaaaaaactgatcgtcggtctgacaggggcaagtggtgcaatttatggcattcggctactacaggtcttacagcctgtagaggatattgaaacacatctgataatcagcaagtcagcccggcaaacactggcactggagacagactacaccttgcgtgaagtacagtcccttgctgatgtggtacacgataaccgtgacattgccgcctctatctcttcgggatcatttaagacgtcagggatggtgatcttaccttgttccatcaaaacattatcgggcattgtgcatagctatacggatggcctaatcacccgtgctgccgatgttgttttgaaagaggggcgtaaactggtgctgggagtcagggaaacgccattacatttggggcatttaaggttaatgactcaggccgctgaaataggggcagtcattatgccgccagtacctgcattttatcatcggcctgaatctgttcaggatattgtcgaccagacagtcaaccgcgtgcttgatcagtttgatatcgacctgccagcggatctatttaatcgttggcagggagcaaaacctgtcaatatttaacatatcagtatttaaaacgtcagcgttcaatattgtctgacgttttccgtcagtaaatgttttagggcttcttctaattcaaaatagcggaagccgaatccggcttcttccagccgcttcggtatcgcttgttgcccgcctaataccagtgctgcggcttcacccataactatttttaatacaaaagcagggatcctgaacaaagcagggcgatgcagtacttttgccaatattgcgctgaactgatcattatgaacaggatagggcgcggtcatattgaaagggccctccaactcaggagagaccagcagatagtaaataccattgaccatatcatcaatatggatccacggcatatattgtctgccatcccctatagctcccccaagccctaaacggaacataggcagcattttactaagggcacctccctgacttgccagcacaatacctgttctcagcaaacatacccgggttttttcacttttagcctgtaaggccagtttctcccagcgttcacagagttggtgggaaaattcatcatggggaggctcatcttcggatacaacggactgtccttgatcgccataatagccgacggctgaaccggaaataaaaacagaaggaggagactcacctgctcttatcagcgcacttaatttttcggtcagttcccagcggctctggcagagtttatctttttgttttggtgtccatcgcttatctacgataggctcaccggcaagattgataactgcatcaaagccatccagagtgttccggtcattcaatgttgtccagcattccacctgatcactaaataaagaataaactttttgtggagaccggctcagaacagtgatggagtgggagagtgaaagtaattgatagactaaccgtcggcctatcagtccagttccccctgtaactaaaatatgcataaccactccttgtgaacaaagcaaaagcgggtatatcagggatctctcaggcacaccaactaggcggtatcctgaaaacgtaaagtatagtcaatgactgactatagcaagggatgatgtacgcagcagtgagatatgctgttatctgctatcgacatcaagttttcagatgaaaaattcacgtggataaataattaggccctatagattccgggcaacttcccggtgacaaagaagtgacaagtttgtcgggaacaaatttgaccagccaaagacaggccttcggtgaaaggcaagagcctttcattagtccccgatagcataagttatgttaccgggggaaactcagatacaaaaaatcagtttggagagcttacttattgtagatggcctgcgtggcagggcgctggctgattttttctaaccatttttctacagcgggataatcctgcaaattaattttttgatattcatagcaatacgcccacggataagtagcaatatccgcgatactgtattcattgccgccgagataaggtgttttttccagctgggtattcagtactttgtatagccgctgagtttctgtgacatagcgatttattgcgtagggaacaacttcaggcgcatagcggttaaagtgatgattctgtccgagcatcgggccgaatcccccaacctgccagaatagccactgtaattgccggatacgttcccgttcattctggctcaatagtttcccggttttttccgccagatagagcaaaatagcacctgattcgaagagcgataagggttctcctctgtcggcaggttgatggtcgacaatagcagggattttattattgggtgaaatggcgagaaactctggcgtgaactgttcattggcgcttatatcgatgggataaatcgtataagggaggcccacttcttcaagaaacagcgcgattttatggccattaggtgtaggagcatagtataggtctatcatataacctctagtaataataatgttaggattaatgttagatttattacattaccattgttcctgtttgactgtaaaattccatcgaagcaaaagtcggcatatatattatttagtaaaggtttgaagatgactcaagaaaaatcagtagatattgagtgggttgatattgtcaatgaagaaaatgaagtcatcgcgcaggcaacccgtgagcaaatgcgtaatcaaaacctgaggcatcgggcaacttatattgttgtacatgatggcatggggaaaattctggttcagcaccgtacagaaacaaaagatttttaccccagcaaactggatgcaactgcgggtggagtggtaacgatgggagagcatctgcttgaatcagcccgtcgtgaagcagaggaagaactgggaattgcgggaattccttttgctgaacatggcatcttctattacgaagaagaaatttgccgtatatggggaggcttgttcagttgtgtcagccgcgggccattcgcattacaggaagaagaggtttctgcggtttactggttatcaccggaagaaattacagcccgatgtgatgaatttacgccagattctttgaaggccctttctctatggctgtcacgtaataaagatctatcctgatccaataaatattcccttttcattgcgtatatacacaatgaatttcaagatgcgttgcggcagcaagggagtgaaccctgggagcatagataactatgtgaccggggtgagtgagcgcagccaacaaagaggcaacttgaaagacgaagtgtataagcagaatggagccagaatgcttaattctgcttagcaaaatctgatgttaactcccgctaaataccagtaggaatggcacccatattattcccagtaacccttaccggcactttcgccgtctgttgtgccttttccaaaaccttcaaaatgaccaattacactaaaaccattccaaaactgcatactgcccgcaaaaaatgttacagcagaagaataggctgttccgtttttatatagaaagtcaatctcatcagaaagctctaaggatcatatttgataaacaaaaaatcttattttaaatgctaaattataactcgtggttttatctgataatgttttttctcagattttatctataccttttaatctttcctttaacagttcagagagaaagccagatgttttttatttccattcattaagtcatattttattgaccatatactcctgatattttttatttatcacatattaattaatctttttttgtgtctaaatggtgttattttattgttttttaaagaataacttgtggtttttcttaagctaaagtaattttttaaattgaaacaataatggattaaaggtataccaataccctgttacgtaaaacgttagtcgtttatctttataatgattaacattataaaatttataatgaagaaaataataaatatacttaatataggcttcgtcttttaggtcagattcattaggggagtgttatggcttcattgaatcacgaaaaacatctgacaatggccgatttttacaatgccattgtgcgtacttttattgatgtcaccattattggcggaatttattttttcctgtgtggtttacagggagaagcgccttcggccagtgtttatcttattatttatcctttagtttcgattgttacagtttcttttgagattatatttgataatgtcaaatctgttccggataaatatagtcatcagactctatcaaataatgttaaaaaatcagggatcctgataaacaagaatggcagtgtttatcggctctggggattgattaccctctatgcctttatgttttatattatactgatcctgccattttgttttttattgcagagtatttctatttcgtcacaattaaatatttggttagcattaactggcagttttttattgatatcactttcaagttgtttcattgtatccagacttaaacattacgctattgaactatatgatcagctattctccgctaaaaaagaggaagtaaaaaaagaagacagcgattctcatataatatttaattattttttaccctgggcaattattggtgctgcgattgcaggtttattggcatatggttatttccgtgccgagagtggtaattttaccgatgtaattaccgtttcaatggtagccttcagtgcaggcggaacatcttatattatttctctatggatagcttatgtaacacaaaaacaatctatcctcgatattaaagcaaatttattacattttgaaaaagatgataagcttgatgaatactcaatgtattttctcattcatctcttcagtggtgctgtcataacattaatttttattgcgtctaaatttttatcgattgagcatttttctctaatacaaatcatagttattgaaacacttgccggagcagcggctgctgtagcgggttcattagccggattattaagaggaagatcaaaaacgttatcctaaaaagtttaattaatatttttgtcagaatatcttgctaatctattttggctgcggatatttgaatacatattcgaaaatatactcaatagattgagaatggtattcctgatagcagtgaaaacactcaatacagtgcatgagatatgcgctggatatgggattgctttattcagaacgcgagggatgtatgtccaggacatattttttgcatgacagaaaaattaatggagatattgcgattgtcgggatggcaactcatttccctgatgccccgaatttatatcaattctgggaaaacatcataggtaaaaaggattcgctgatcgatatcacggagatgtcaaaagaagaatattggaaaaaagaagacttttatcatccagacccgacagccactgataaaacttatggtcatcgagccggctttgtgccagcgattgattttgatccggtcgaattcaaaattcctcccgctattcttgattcactcagtaccgctcagttatttgccttgtatgtggctaaacaggcaatgcaggatgctggcttactggatcagcaaaacagcaaaactgaccgtgatcgtattggtgtgattttaggcggtggtggcaacggaaatacatcattttcgctggctgcccgccagcaggcaccttatctgcgtgaaatcatgacaaaggcaggtctttccgaagaagtcgcggatgaaattattgaacgtgcgcacggaatgtatctggaatggaatgaagacagttttccgggatttttgggtaatgtggcctgcggcaggatcgccagttattttgatcttggcgggacatcctatatggtggatgcggcttgtgccagtagtcttgccgcaatcaaggccgctatcggggaattacattccggtagctgtgatgctgtcttaacgggcggcgttaatctggaaaactccattttttctttcctgtgtttcagtaaaacacctgctttatcgagaaataacgtatcccggcccttcgatcagagtgctgatggcatgatgctaggggatggtgtgggaatgctggtgttaaagcgccttgaagatgcagagctggatggcgacaaaatctatgcagtcataaaatccgttgaagcctccagtgatggccgtgcaaaaagtatttttgccccccgtctggaagggcaggtaaaagcgctgaaacgggcttatgccagtgcaggtattatgccggctgatattcagctcgttgaagcacatggcaccggtacagcttctggtgatgatactgaactcaagagcttgcacgcagtctttggtgaatctcagcttccgccgaaatcggtggcaatcggtagtatcaaatcccagattgggcatacccgttgcgccgctggtgctgcttctatgatcaaagtggcactggcattgcaccataaggtattaccacccacaattaatgtggaaaaaccgacagatttgctgatgtcggaaaccagcccgttctatgtcaacagtgaatccagaccgtggctacgttcggtcagaaatgcgccacgtcgggcggcgctgagtgcatttggtttcggcggaactaactttcatgccattctggaagaatacgagaaacaggcaaatgggcgttatcggctgaatgaatccccctgggttgtgctgcttaaaggggaaaaccccgctgaattacttacgcagtgtgaagccacattatccctctttacccgtgattcagcggaaaatgccatccgcaggcatcttgatcagcaggatattgataatttccagcggcttcaggccagaatactgttcgtttctcagtccatagaacaatcggtggatctgctttccactgcgatcaggcaattacagaaaaacagcacagaaggctgggaacaccctcacgggatttattatcagcctgaaggaaaaatgctggatggcagaatcgttgccctgtttccggggcagggttcgcaatatgtcaatatggcgcgggatattgccaatgattaccctgaaatgcgtcaggcactggaagtgctggatgatattgccgtcagtgaatcaggtcacgaattatccccgatcatttaccctgttccggctttctcagatgaagaatatgccgggcagcagcagcggctgacagataccgctaatgctcagcctgcattgggtgcagtcagtgcaggttatttcaatatattgggaaatatgggattcaggcctgattttgtggccggtcacagctatggtgaggtaacggcactttgggcagcgggcgtcctttccgacaaagatttccatcgggtttcccttgccagaggcagagccgccgcatcagcgagtcagctttgtggtacaggttctgatgccggtgcgatgctggcggcatcattacctcatgaccggcgtggagaaatactccaccgttatacagacgttattattgctaatgataactctgaacagcaggtcgtcttcggaggcgatactgctcagattaatcagctacataatgaattgaaaacacagggcattcattgccgtattctgccggtatctgccgctttccatacccggtttatccagcccgcttatcagccttatcgtgaatatctggcggatattaacttccagtcaccggagtgccagttattttccagtgcaacggcagaaccttatagccgctcacctcagttgatcaaagaattactggcagaacagctgataaaacccgtccaattccgccagaccatagaagcaatttaccaacaaggagggcgtttatttgttgagtttgggccaaaaggtgttctgggcaagctcgtatccgatattctgaaaaatcgggagcacactgtgatttcaactaaccccaccgataaaggggaggagagattacagctcgcccgtgttcaggcccggttattggcagaaggtgtaaaactgcgggatatcaaccggtatgtccgtattcagcctgtggaagaagaaaagaacagacgtctgacattcagattaagtggcggtttcttcttgtctgagaaaaataaagcccggcgtcagcacgccttacgtgttggcgaccatgctgttgttgagcggtttatcgcaggatctttgcctgtacaggcagaaattgaaagtccccctgtttatgaagttgaaagtagagtcgaagttatcgctgaaagtgatcttaaaagcgagattgaaaccgaaaaaatggtagagcataaccagcccgtttcagccgaatttatccgacagaacgtactgacaattattcaaaaacgagataaccctatggaacagaataataaaataagtgaaagcctgaatgccgacacactaaatgaactgttgcaggcccagcaagtgatgagccaactacatcagcaattccagacaaatcagaaagaatatattcagttgctgagtatgttattggaaaaacaatacagtttgatggaaacctgccgggatcatcagaatctgcctgtgatgctctccagcctgagtcagagtgttcaattgttggataaaaatcttgaactgtatcataccaaccacgagcgttatttcatgactcagcagagtctgttccagtccggacaggtaacttctgctatgtcattatcgtctatgccatcctcgcctaagtcatcaccatcggtgagccatgtgacaacgcctgctgtggaatactctgctccggttaaacctgtggaaccaatttcgacagcagtgacaaacatccattcagcagaaaaaatggaagagattgtagctgtacgcccagtcgtgccggaaatgcctgaaaccgaggaaatgccggttgcgccgatgatatcgatggctgcttccgaacctgccaatgagcctgttaaaccagagccggagccggttgaaatcaaagtaaaaacacagaaactcactccggaaatagaaaagctggtcaagcgtcttgatcagatcaccgaagaaaacattatcagccaactggtgaatatcgtcagtgaaagaacgggttatccgcaagatatgatcagcccggaaatggatctggaagccgatttggggatcgactccatcaaacggctggaaatttttggcgcaatgtttgatgccttctcggcaaatctggagttgtacggtgaaacatcaagaaataaagacttggaaaacttcgaagtcgattcactgagtactatcgccagaatgagtaacttcttcagggagatggtcgatgaagcgattaatgccttatacagcagggggaatggttcgggatcagcgcaatctccatcactgacagaaaaccatcctgctgaaaagcagcagaaagaaatgaaagaaatggtgacggacagaggcgagaaatcagataaattacgttctctgggattcgttacatcaacgacatcatctgcgagtgccaatgtaaaaaagcagttggctgaatcgcaacggatagagacctctgcggttcagcctgtactgaatcatcacactgtattgaataaagaagcaccgaaaaaagaaactgaaaaagacccttttgctgcctcgccggtttcccgttttgccgtggtcaaacaagcattgccgatgccggagcatttgcaggatgttttttcatccccgaaatgctggctgatcgttgatgaagaaacagcaggttcgacttgtgcgaatagttgtgcgaatagttgtgcgaatagtattgctgagtcactgaaaacgcagggccagagggtcgtcattatgtcactgaggcgggatcaggcgtcaatgagcgatgaatcgctcctggatgctgccctgaccgatattgaacagcaacatggccctattgaaggcgttatctatttacaggcggtcaaacagcaagttaaggggctgattgatgtattcagtgagcaggattatcgttcagttgagacaacttttctgctggctaaacgcttgcaagggagccttaccggtgatgggaaacgatcggggtatttcatggtgattatgcggggggatggtgaactgctgacctccggccgtgagtacttacctgtcgtttctgcgggtatcaccgggctgacaaaatcgctgaacattgaatgggctaatgttttctgccggacagtagacattgataccagaatcaaagacagcgatgtggcaaaaatagtgatggaagaacttcaggacagccggactgaaatgggcgaaatcgggcgtggcgtgaataatgaacgcatgacattagccctgagggaagaaaaagtactttcagtgacacccgggatgcaggtcagtccccgcgatgttctggtcgtcaccggaggtgcccgcggcataactgcacactgtattactgaactggcaaaacagagtcaggcggcgtttatcctgctcgggcgtactgatattactgcaccgttgccggtatggtcagcaggtaaaacaaccctgtctgaacgtaaagccgcagccattgattaccttcaggaacaaggtattcagccgacaccggttaaagtgaataacatgctaagccgcctgatccatattgatgagattaatgccacattacaggcgatcaggcaggcgggggcacgggcaatatatctgcattgtgatattactgtgccggagcaagtaaaaactgcactggagaaagcacagcagcaattcggtcagataacggggttgattcacggtgccggtaatctggcggataagcggatcgaaaagaaaacgctggccgatctacattcagtttttcatgccaaagtcagagggcttgaaaatgtgtgtcgcgcaatagactgcacatctctgcgccatatcatcctgttttcatccgttgccggattttttggtaatgccgggcagactgattactcgctggcgaatgaaatactgaataaatttgcttacctgccgtttcggaacaaaaacaaacagataatccgttcagtgaactgggggccgtgggatggtggaatggtcagcgatgtgcttaaacgggcctataaagctcagaacatggtgattatcccgcttgaagaaggagtacagcgttttgtccgtgagttctgcgactcccgctcacgccagattactattggtggaagaatgtatatggccccgaaaaaaatgacaccatgatatttcaaccgatttcaaagtgcgccgtagtggtcaattaatgcagccgacaaaaaagcaccttgaaagacgaagtgtatagcaaaaaataattatggcttgtgaataataaaacaatatacctgagcgaaaatatccgctcagggaaacgctatcatattaaggagtctctcctttatggaacatattgctattattggagtcggatgtttatttcccggcgcggattcccctgaaaaatactgggataatctattgcatgaaaaagattgttccactcctttatcagctcaggaattaggtgttgatccggcctgttattattcttctgaagcggctaaacctgacacaattaattatattaataatggtcatgttcgtgattttcattttgatggcaaaggttatcatttgccggaagaagaattaaatacactggatgatctatttaaatggacaatttatgccgcagatcaggcattaaatgacagtggctatcgacagcataaaaatattttgcaaaaaaccggattaattcttggcagtatcggtatgccgactcactccactaaacaattaatgaatccgttttatcacaaaatattacagccttatatcagggaattaattgggcagccggattttaaatttaatcaattctggcctcaggctaatcattctgagcagaatttaataaccggtggctataacgccacaattgctgcattagcattagggctggccgggcctcggtattgccttgatgctgcctgtgcatcggcattgtatgccatcagactgggagcagattatcttctcagtcacaaggcggacatgatgttggttggctcaatctgccatgtggatcatatttatatcgatcacggatttaatatattgcaggttttcccggaaaaaggggattctattccttttgataaatcatccaaaggggtaaaagccggtgaaggtgttggcgttgtagctattaaacgttactccgatgcggttcgtgataacgataaaatatatggggtgattgaagccattgggttatctaatgatgcaggtactaaacatttgttggtgccggatcaacagggacagaatattgcactggagcgtgcctatcagaactgtctgcgggaaattgattatattgaatgtcatgccaccggcaccaatatcggcgatcaaatcgaactgtcaacgattgaagccttttttggtggcagtaaaaatgctgatgaaagtgaaaacattccattaattggtgctaataaagccatcaatggccacatgctgactgcatcaggtatgggcagtctgctgaaagtgctgttagccatgcagcataatctgatccccgccacgccacgggttaatcaactggtatcgacaccgcaaggcaagcttaatatcagtcatatcgtacggcaggcgagaccctggcctgagcgtcatcgccccaaaagggccggtattaatgcttttggctttggtggtgtcaacgggcatatggtcatcagtgaagatagtcctgaacggcgatccgcctgtataccctcccagatgcaaaaaatgcaaaaaacggagcgtctggcaaattgttggtataggtgttcatctggcaaaaacggaagataaccagacgctggatcaggcgttacagcagggaacccaacacttttatccgctgccgaaaacccgttggattggcatggaaaaacgcccggatattctggcgatacgcgggatcagtcagcctccgttaggctcctatattgaaacttttgacgttgattgcaggaaattcaaattaccgcccaatgttatcggagcgcatctaagctgccatctgtttttgttaccaattgcagagcgggcttttcttgatgcgggatatcagctggatggcagtaaacgtaatatcgccgtcattgtagcgggaggaattgactatagctgcctgcgttatcagatacgtaatgaaattagctggcagctggaacaaagtttagtgagccacggtattcagctatcggcagaagatatcagcgcattgcaggaaattgttaaagatagcctgttcccgaaaccttatcctgaaggcatcaccggtggaattggtaatattgtggcgagccgtctggctgcacatctgaaactgaatggcccggcttttacgctttataatgaagaaagctctccgtttaaagcactggaactggctcagtttatgctgagcagacagcatgtggatgccgtcatgattgccagcagcagttttggtggcagtctggaaaatgtgttgtgggatcaccagtccgatcatggaaatcagatagtcggggacgggggaggtgtgattgtcctcaagcgtgaacaggatgccatcaaggagaaaacaccggcctatgccatgttggatggaattggcatcagttacgtacctgatcattcacttgatttccggataaatgaagacgcgattgttgctgctgcacagtcaagcctgactgctgcgggctgtagtgtggatcaggttggctatattgaactgtatgccgggggaagatccggcgagattgcgacggaactgtccgcactcgggcgggtttatggcacaccagacggaaagcccaccgcagctattggtacgctgaaagcaaattatggtcatttatcagcatctgcgggtttgcttgccattatcaaatcagccctgcaactgacgcaatgttacttgccgatattaccggattatcctcagagacaaacactggcccagcatgctgcgggtaaattccatttaccggtacagactcaggaatggcctgcttcagagggtgcctcgcgctgtgctgccatcagtcacttaggtattgaccgttcttacagccatgtcattttaagtgaaccacaaaacggaaaacgcgcacgtctgacaccgccgccggtatcaaatcagccgggcctgaaagtgacgacttataccgcacgagaaaaaacagtagaagaatttattctcaatgagcagacattagcccgattcgcacctttgagagccatttctgcacaacaacaggccgtatcagcaaaagaaactgaaactactcaaaaagcccttccaccagcggaagtaaaccatttcatacgcaatgcccgtactcagctgtgttatctgcaactggaacagacattttatcaactgataaaacagaatttagcgcaatccactgagatagaatcagtcaatcaggcgtcgccaatggctgagaaaaccgcagtggctgcccctgttatttttgatgaacatcaattactggagctgaccgacgggagcgtggcaaaaatactgggagcggattatgccgaagtcgataactacccgatccgtacccgtatgccatcccctccgtttatgtttgtttcccgtattacggggctttctgcggttaaagacaagctggagccttgttacatcgaatgggaatacgatattcctgaaaatgcgtggtatgccgttaatggtcgcgttccttccttcgtcgcgctggaatcatcccatgcgatgattgtcgcgtttaccgtgattggctgtgacatgctgttcaaaggacagctttgttaccgcgcggttgactgtagtacgacaatttacagcgaaatgccgaaagccggagaagtattgcgcgggcgagtcaatatcacttctgttatacgggtaggaagccggtttttggcgggttatgaatatctttgctatgtgggggatcgtctggttttccggctggtagccacatcgggtttctttagccgtaaggaaatcgaaaaagcgggtgcatttgacagtaaggcttattttgccaaagccagagcagcggtcacggaaaaccccttcacgcttttattatctgataagccttccccgaaaaaggcaacaccagacagacagggacagaaaacaccatcatatgctgaattcctgcccagcgcatttttgcactgcgacaaaaccacatttaatacacaagatatcacggatgtcatgaatggggatttgtctgcctgctttggctcccgctatggacgcactcacagcgaaaacctgtgtacgccggatacccgtatgctaagccggatcctgagcgttgacaaaatgggtggagagtttggtctggggcagatagtgggggaatttgatatcgatcctgaacactgggcgttcagggcacatttcaaaaatgatccggtcatgccgggaacactattggtagaaggttcagagcaattgatgaaattctacttattttatctcggattacattctctgccggatctggaagcacaaacactgacagaacatacaaccagcgccaaattccgtggggaagtgaaatgtacgcgggatgtgctgcaattccggctgacctgtaaatccattgatgcccgttataccgctgataaacagcagggcgacaaactggattcgatcaccttgtttttcatcgcagaaactctttatcgcggcaatgtcgtgggtatcagtgacaacatgggggtgaagtacatccgtcgtcagccacagcaaacggcagagccggaacaggaagccgtaaaatgaatcagccgaaagcaatttcgtcaaaattgttaaaaaacagattgctaaaaaacagtctgtcgatggaaagcgtttcccgtttgcaggatttgggcactgaactgaggatagttaaatccggcacttctatttcattgctatcaacggatgagccaataacagatccggttactgttctggggagtctgcctgcaataacggcaggcagtctgggaaatgccggttttatggcggattatggtgtggactacgcctattatgccggtgcaatggcaaatggtatccattctgaagagatggttattgcattggggcggcaacgaattctggggatctttggttccggtggtttgcatattccccggattaccgcagcgattgcccgtattcggcaggcattaccggaagggccgttcggggtaaatttgctgcataaccccggtaatccggactgggaaatggcctgtgtgcgtctgtgcatagaaaatcaggtgcgggtaattgaggcttcagcttatatcaatctcagtccggcactggtttattaccgtgtcagcggattgtctcagcagccagatggctccgtgttgcgtcgccatcgcctgatagcgaaagtttcccgtcgggaagtcgcccagcattttctgcgcccggctcccgaaaacctgctgcaaaaactgtgggcagacggccttattacggctgaacaggttgagttggcccgtcaggtttcaatggcagatgatattaccgtagaaggtgattccggcgggcataccgatcagggcgtactggcctgtattttccgctcggttgtacaactacaggatgaaatcgcagcagatgaaagccaaatcggttatcaggtacggatcggcgcagcaggaggattgggaacaccccatgctattctggccgctttcgcactgggagcggcttacgttgtcaccggctcaatcaaccagagttgtgtggaagcgggaacatcctctgccgtgaaaaaaatgctggggcaggccc

SEQ ID NO: 3108 - DNA, 29043 bp, Xenorhabdus sp.
  CDS (8061)..(8228)
  unsure (1)..(29043): unsure at all n locations
gggcctgccccagcatttttttcacggcagaggatgttcccgcttccacacaactctggttgattgagccggtgacaacgtaagccgctcccagtgcgaaagcggccagaatagcatggggtgttcccaatcctcctgctgcgccgatccgtacctgataaccgatttggctttcatctgctgcgatttcatcctgtagttgtacaaccgagcggaaaatacaggccagtacgccctgatcggtatgcccgccggaatcaccttctacggtaatatcatctgccattgaaacctgacgggccaactcaacctgttcagccgtaataaggccgtctgcccacagtttttgcagcaggttttcgggagccgggcgcagaaaatgctgggcgacttcccgacgggaaactttcgctatcaggcgatggcgacgcaacacggagccatctggctgctgagacaatccgctgacacggtaataaaccagtgccggactgagattgatataagctgaagcctcaattacccgcacctgattttctatgcacagacgcacacaggccatttcccagtccggattaccggggttatgcagcaaatttaccccgaacggcccttccggtaatgcctgccgaatacgggcaatcgctgcggtaatccggggaatatgcaaaccaccggaaccaaagatccccagaattcgttgccgccccaatgcaataaccatctcttcagaatggataccatttgccattgcaccggcataataggcgtagtccacaccataatccgccataaaaccggcatttcccagactgcctgccgttattgcaggcagactccccagaacagtaaccggatctgttattggctcatccgttgatagcaatgaaatagaagtgccggatttaactatcctcagttcagtgcccaaatcctgcaaacgggaaacgctttccatcgacagactgttttttagcaatctgttttttaacaattttgacgaaattgctttcggctgattcattttacggcttcctgttccggctctgccgtttgctgtggctgacgacggatgtacttcacccccatgttgtcactgatacccacgacattgccgcgataaagagtttctgcgatgaaaaacaaggtgatcgaatccagtttgtcgccctgctgtttatcagcggtataacgggcatcaatggatttacaggtcagccggaattgcagcacatcccgcgtacatttcacttccccacggaatttggcgctggttgtatgttctgtcagtgtttgtgcttccagatccggcagagaatgtaatccgagataaaataagtagaatttcatcaattgctctgaaccttctaccaatagtgttcccggcatgaccggatcatttttgaaatgtgccctgaacgcccagtgttcaggatcgatatcaaattcccccactatctgccccagaccaaactctccacccattttgtcaacgctcaggatccggcttagcatacgggtatccggcgtacacaggttttcgctgtgagtgcgtccatagcgggagccaaagcaggcagacaaatccccattcatgacatccgtgatatcttgtgtattaaatgtggttttgtcgcagtgcaaaaatgcgctgggcaggaattcagcatatgatggtgttttctgtccctgtctgtctggtgttgcctttttcggggaaggcttatcagataataaaagcgtgaaggggttttccgtgaccgctgctctggctttggcaaaataagccttactgtcaaatgcacccgctttttcgatttccttacggctaaagaaacccgatgtggctaccagccggaaaaccagacgatcccccacatagcaaagatattcataacccgccaaaaaccggcttcctacccgtataacagaagtgatattgactcgcccgcgcaatacttctccggctttcggcatttcgctgtaaattgtcgtactacagtcaaccgcgcggtaacaaagctgtcctttgaacagcatgtcacagccaatcacggtaaacgcgacaatcatcgcatgggatgattccagcgcgacgaaggaaggaacgcgaccattaacggcataccacgcattttcaggaatatcgtattcccattcgatgtaacaaggctccagcttgtctttaaccgcagaaagccccgtaatacgggaaacaaacataaacggaggggatggcatacgggtacggatcgggtagttatcgacttcggcataatccgctcccagtatttttgccacgctcccgtcggtcagctccagtaattgatgttcatcaaaaataacaggggcagccactgcggttttctcagccattggcgacgcctgattgactgattctatctcagtggattgcgctaaattctgttttatcagttgataaaatgtctgttccagttgcagataacacagctgagtacgggcattgcgtatgaaatggtttacttccgctggtggaagggctttttgagtagtttcagtttcttttgctgatacggcctgttgttgtgcagaaatggctctcaaaggtgcgaatcgggctaatgtctgctcattgagaataaattcttctactgttttttctcgtgcggtataagtcgtcactttcaggcccggctgatttgataccggcggcggtgtcagacgtgcgcgttttccgttttgtggttcacttaaaatgacatggctgtaagaacggtcaatacctaagtgactgatggcagcacagcgcgaggcaccctctgaagcaggccattcctgagtctgtaccggtaaatggaatttacccgcagcatgctgggccagtgtttgtctctgaggataatccggtaatatcggcaagtaacattgcgtcagttgcagggctgatttgataatggcaagcaaacccgcagatgctgataaatgaccataatttgctttcagcgtaccaatagctgcggtgggctttccgtctggtgtgccataaacccgcccgagtgcggacagttccgtcgcaatctcgccggatcttcccccggcatacagttcaatatagccaacctgatccacactacagcccgcagcagtcaggcttgactgtgcagcagcaacaatcgcgtcttcatttatccggaaatcaagtgaatgatcaggtacgtaactgatgccaattccatccaacatggcataggccggtgttttctccttgatggcatcctgttcacgcttgaggacaatcacacctcccccgtccccgactatctgatttccatgatcggactggtgatcccacaacacattttccagactgccaccaaaactgctgctggcaatcatgacggcatccacatgctgtctgctcagcataaactgagccagttccagtgctttaaacggagagctttcttcattataaagcgtaaaagccgggccattcagtttcagatgtgcagccagacggctcgccacaatattaccaattccaccggtgatgccttcaggataaggtttcgggaacaggctatctttaacaatttcctgcaatgcgctgatatcttctgccgatagctgaataccgtggctcactaaactttgttccagctgccagctaatttcattacgtatctgataacgcaggcagctatagtcaattcctcccgctacaatgacggcgatattacgtttactgccatccagctgatatcccgcatcaagaaaagcccgctctgcaattggtaacaaaaacagatggcagcttagatgcgctccgataacattgggcggtaatttgaatttcctgcaatcaacgtcaaaagtttcaatataggagcctaacggaggctgactgatcccgcgtatcgccagaatatccgggcgtttttccatgccaatccaacgggttttcggcagcggataaaagtgttgggttccctgctgtaacgcctgatccagcgtctggttatcttccgtttttgccagatgaacacctataccaacaatttgccagacgctccgttttttgcattttttgcatctgggagggtatacaggcggatcgccgttcaggactatcttcactgatgaccatatgcccgttgacaccaccaaagccaaaagcattaataccggcccttttggggcgatgacgctcaggccagggtctcgcctgccgtacgatatgactgatattaagcttgccttgcggtgtcgataccagttgattaacccgtggcgtggcggggatcagattatgctgcatggctaacagcactttcagcagactgcccatacctgatgcagtcagcatgtggccattgatggctttattagcaccaattaatggaatgttttcactttcatcagcatttttactgccaccaaaaaaggcttcaatcgttgacagttcgatttgatcgccgatattggtgccggtggcatgacattcaatataatcaatttcccgcagacagttctgataggcacgctccagtgcaatattctgtccctgttgatccggcaccaacaaatgtttagtacctgcatcattagataacccaatggcttcaatcaccccatatattttatcgttatcacgaaccgcatcggagtaacgtttaatagctacaacgccaacaccttcaccggcttttacccctttggatgatttatcaaaaggaatagaatcccctttttccgggaaaacctgcaatatattaaatccgtgatcgatataaatatgatccacatggcagattgagccaaccaacatcatgtccgccttgtgactgagaagataatctgctcccagtctgatggcatacaatgccgatgcacaggcagcatcaaggcaataccgaggcccggccagccctaatgctaatgcagcaattgtggcgttatagccaccggttattaaattctgctcagaatgattagcctgaggccagaattgattaaatttaaaatccggctgcccaattaattccctgatataaggctgtaatattttgtgataaaacggattcattaattgtttagtggagtgagtcggcataccgatactgccaagaattaatccggttttttgcaaaatatttttatgctgtcgatagccactgtcatttaatgcctgatctgcggcataaattgtccatttaaatagatcatccagtgtatttaattcttcttccggcaaatgataacctttgccatcaaaatgaaaatcacgaacatgaccattattaatataattaattgtgtcaggtttagccgcttcagaagaataataacaggccggatcaacacctaattcctgagctgataaaggagtggaacaatctttttcatgcaatagattatcccagtatttttcaggggaatccgcgccgggaaataaacatccgactccaataatagcaatatgttccataaaggagagactccttaatatgatagcgtttccctgagcggatattttcgctcaggtatattgttttattattcacaagccataattattttttgctatacacttcgtctttcaaggtgcttttttgtcggctgcattaattgaccactacggcgcactttgaaatcggttgaaatatcatggtgtcatttttttcggggccatatacattcttccaccaatagtaatctggcgtgagcgggagtcgcagaactcacggacaaaacgctgtactccttcttcaagcgggataatcaccatgttctgagctttataggcccgtttaagcacatcgctgaccattccaccatcccacggcccccagttcactgaacggattatctgtttgtttttgttccgaaacggcaggtaagcaaatttattcagtatttcattcgccagcgagtaatcagtctgcccggcattaccaaaaaatccggcaacggatgaaaacaggatgatatggcgcagagatgtgcagtctattgcgcgacacacattttcaagccctctgactttggcatgaaaaactgaatgtagatcggccagcgttttcttttcgatccgcttatccgccagattaccggcaccgtgaatcaaccccgttatctgaccgaattgctgctgtgctttctccagtgcagtttttacttgctccggcacagtaatatcacaatgcagatatattgcccgtgcccccgcctgcctgatcgcctgtaatgtggcattaatctcatcaatatggatcaggcggcttagcatgttattcactttaaccggtgtcggctgaataccttgttcctgaaggtaatcaatggctgcggctttacgttcagacagggttgttttacctgctgaccataccggcaacggtgcagtaatatcagtacgcccgagcaggataaacgccgcctgactctgttttgccagttcagtaatacagtgtgcagttatgccgcgggcacctccggtgacgaccagaacatcgcggggactgacctgcatcccgggtgtcactgaaagtactttttcttccctcagggctaatgtcatgcgttcattattcacgccacgcccgatttcgcccatttcagtccggctgtcctgaagttcttccatcactatttttgccacatcgctgtctttgattctggtatcaatgtctactgtccggcagaaaacattagcccattcaatgttcagcgattttgtcagcccggtgatacccgcagaaacgacaggtaagtactcacggccggaggtcagcagttcaccatccccccgcataatcaccatgaaataccccgatcgtttcccatcaccggtaaggctcccttgcaagcgtttagccagcagaaaagttgtctcaactgaacgataatcctgctcactgaatacatcaatcagccccttaacttgctgtttgaccgcctgtaaatagataacgccttcaatagggccatgttgctgttcaatatcggtcagggcagcatccaggagcgattcatcgctcattgacgcctgatcccgcctcagtgacataatgacgaccctctggccctgcgttttcagtgactcagcaatactattcgcacaactattcgcacaactattcgcacaagtcgaacctgctgtttcttcatcaacgatcagccagcatttcggggatgaaaaaacatcctgcaaatgctccggcatcggcaatgcttgtttgaccacggcaaaacgggaaaccggcgaggcagcaaaagggtctttttcagtttcttttttcggtgcttctttattcaatacagtgtgatgattcagtacaggctgaaccgcagaggtctctatccgttgcgattcagccaactgcttttttacattggcactcgcagatgatgtcgttgatgtaacgaatcccagagaacgtaatttatctgatttctcgcctctgtccgtcaccatttctttcatttctttctgctgcttttcagcaggatggttttctgtcagtgatggagattgcgctgatcccgaaccattccccctgctgtataaggcattaatcgcttcatcgaccatctccctgaagaagttactcattctggcgatagtactcagtgaatcgacttcgaagttttccaagtctttatttcttgatgtttcaccgtacaactccagatttgccgagaaggcatcaaacattgcgccaaaaatttccagccgtttgatggagtcgatccccaaatcggcttccagatccatttccgggctgatcatatcttgcggataacccgttctttcactgacgatattcaccagttggctgataatgttttcttcggtgatctgatcaagacgcttgaccagcttttctatttccggagtgagtttctgtgtttttactttgatttcaaccggctccggctctggtttaacaggctcattggcaggttcggaagcagccatcgatatcatcggcgcaaccggcatttcctcggtttcaggcatttccggcacgactgggcgtacagctacaatctcttccattttttctgctgaatggatgtttgtcactgctgtcgaaattggttccacaggtttaaccggagcagagtattccacagcaggcgttgtcacatggctcaccgatggtgatgacttaggcgaggatggcatagacgataatgacatagcagaagttacctgtccggactggaacagactctgctgagtcatgaaataacgctcgtggttggtatgatacagttcaagatttttatccaacaattgaacactctgactcaggctggagagcatcacaggcagattctgatgatcccggcaggtttccatcaaactgtattgtttttccaataacatactcagcaactgaatatattctttctgatttgtctggaattgctgatgtagttggctcatcacttgctgggcctgcaacagttcatttagtgtgtcggcattcaggctttcacttattttattattctgttccatagggttatctcgtttttgaataattgtcagtacgttctgtcggataaattcggctgaaacgggctggttatgctctaccattttttcggtttcaatctcgcttttaagatcactttcagcgataacttcgactctactttcaacttcataaacagggggactttcaatttctgcctgtacaggcaaagatcctgcgataaaccgctcaacaacagcatggtcgccaacacgtaaggcgtgctgacgccgggctttatttttctcagacaagaagaaaccgccacttaatctgaatgtcagacgtctgttcttttcttcttccacaggctgaatacggacataccggttgatatcccgcagttttacaccttctgccaataaccgggcctgaacacgggcgagctgtaatctctcctcccctttatcggtggggttagttgaaatcacagtgtgctcccgatttttcagaatatcggatacgagcttgcccagaacaccttttggcccaaactcaacaaataaacgccctccttgttggtaaattgcttctatggtctggcggaattggacgggttttatcagctgttctgccagtaattctttgatcaactgaggtgagcggctataaggttctgccgttgcactggaaaataactggcactccggtgactggaagttaatatccgccagatattcacgataaggctgataagcgggctggataaaccgggtatggaaagcggcagataccggcagaatacggcaatgaatgccctgtgttttcaattcattatgtagctgattaatctgagcagtatcgcctccgaagacgacctgctgttcagagttatcattagcaataataacgtctgtataacggtggagtatttctccacgccggtcatgaggtaatgatgccgccagcatcgcaccggcatcagaacctgtaccacaaagctgactcgctgatgcggcggctctgcctctggcaagggaaacccgatggaaatctttgtcggaaaggacgcccgctgcccaaagtgccgttacctcaccatagctgtgaccggccacaaaatcaggcctgaatcccatatttcccaatatattgaaataacctgcactgactgcacccaatgcaggctgagcattagcggtatctgtcagccgctgctgctgcccggcatattcttcatctgagaaagccggaacagggtaaatgatcggggataattcgtgacctgattcactgacggcaatatcatccagcacttccagtgcctgacgcatttcagggtaatcattggcaatatcccgcgccatattgacatattgcgaaccctgccccggaaacagggcaacgattctgccatccagcatttttccttcaggctgataataaatcccgtgagggtgttcccagccttctgtgctgtttttctgtaattgcctgatcgcagtggaaagcagatccaccgattgttctatggactgagaaacgaacagtattctggcctgaagccgctggaaattatcaatatcctgctgatcaagatgcctgcggatggcattttccgctgaatcacgggtaaagagggataatgtggcttcacactgcgtaagtaattcagcggggttttcccctttaagcagcacaacccagggggattcattcagccgataacgcccatttgcctgtttctcgtattcttccagaatggcatgaaagttagttccgccgaaaccaaatgcactcagcgccgcccgacgtggcgcatttctgaccgaacgtagccacggtctggattcactgttgacatagaacgggctggtttccgacatcagcaaatctgtcggtttttccacattaattgtgggtggtaataccttatggtgcaatgccagtgccactttgatcatagaagcagcaccagcggcgcaacgggtatgcccaatctgggatttgatactaccgattgccaccgatttcggcggaagctgagattcaccaaagactgcgtgcaagctcttgagttcagtatcatcaccagaagctgtaccggtgccatgtgcttcaacgagctgaatatcagccggcataatacctgcactggcataagcccgtttcagcgcttttacctgcccttccagacggggggcaaaaatactttttgcacggccatcactggaggcttcaacggattttatgactgcatagattttgtcgccatccagctctgcatcttcaaggcgctttaacaccagcattcccacaccatcccctagcatcatgccatcagcactctgatcgaagggccgggatacgttatttctcgataaagcaggtgttttactgaaacacaggaaagaaaaaatggagttttccagattaacgccgcccgttaagacagcatcacagctaccggaatgtaattccccgatagcggccttgattgcggcaagactactggcacaagccgcatccaccatataggatgtcccgccaagatcaaaataactggcgatcctgccgcaggccacattacccaaaaatcccggaaaactgtcttcattccattccagatacattccgtgcgcacgttcaataatttcatccgcgacttcttcggaaagacctgcctttgtcatgatttcacgcagataaggtgcctgctggcgggcagccagcgaaaatgatgtatttccgttgccaccaccgcctaaaatcacaccaatacgatcacggtcagttttgctgttttgctgatccagtaagccagcatcctgcattgcctgtttagccacatacaaggcaaataactgagcggtactgagtgaatcaagaatagcgggaggaattttgaattcgaccggatcaaaatcaatcgctggcacaaagccggctcgatgaccataagttttatcagtggctgtcgggtctggatgataaaagtcttcttttttccaatattcttcttttgacatctccgtgatatcgatcagcgaatcctttttacctatgatgttttcccagaattgatataaattcggggcatcagggaaatgagttgccatcccgacaatcgcaatatctccattaatttttctgtcatgcaaaaaatatgtcctggacatacatccctcgcgttctgaataaagcaatcccatatccagcgcatatctcatgcactgtattgagtgttttcactgctatcaggaataccattctcaatctattgagtatattttcgaatatgtattcaaatatccgcagccaaaatagattagcaagatattctgacaaaaatattaattaaactttttaggataacgtttttgatcttcctcttaataatccggctaatgaacccgctacagcagccgctgctccggcaagtgtttcaataactatgatttgtattagagaaaaatgctcaatcgataaaaatttagacgcaataaaaattaatgttatgacagcaccactgaagagatgaatgagaaaatacattgagtattcatcaagcttatcatctttttcaaaatgtaataaatttgctttaatatcgaggatagattgtttttgtgttacataagctatccatagagaaataatataagatgttccgcctgcactgaaggctaccattgaaacggtaattacatcggtaaaattaccactctcggcacggaaataaccatatgccaataaacctgcaatcgcagcaccaataattgcccagggtaaaaaataattaaatattatatgagaatcgctgtcttctttttttacttcctcttttttagcggagaatagctgatcatatagttcaatagcgtaatgtttaagtctggatacaatgaaacaacttgaaagtgatatcaataaaaaactgccagttaatgctaaccaaatatttaattgtgacgaaatagaaatactctgcaataaaaaacaaaatggcaggatcagtataatataaaacataaaggcatagagggtaatcaatccccagagccgataaacactgccattcttgtttatcaggatccctgattttttaacattatttgatagagtctgatgactatatttatccggaacagatttgacattatcaaatataatctcaaaagaaactgtaacaatcgaaactaaaggataaataataagataaacactggccgaaggcgcttctccctgtaaaccacacaggaaaaaataaattccgccaataatggtgacatcaataaaagtacgcacaatggcattgtaaaaatcggccattgtcagatgtttttcgtgattcaatgaagccataacactcccctaatgaatctgacctaaaagacgaagcctatattaagtatatttattattttcttcattataaattttataatgttaatcattataaagataaacgactaacgttttacgtaacagggtattggtatacctttaatccattattgtttcaatttaaaaaattactttagcttaagaaaaaccacaagttattctttaaaaaacaataaaataacaccatttagacacaaaaaaagattaattaatatgtgataaataaaaaatatcaggagtatatggtcaataaaatatgacttaatgaatggaaataaaaaacatctggctttctctctgaactgttaaaggaaagattaaaaggtatagataaaatctgagaaaaaacattatcagataaaaccacgagttataatttagcatttaaaataagattttttgtttatcaaatatgatccttagagctttctgatgagattgactttctatataaaaacggaacagcctattcttctgctgtaacattttttgcgggcagtatgcagttttggaatggttttagtgtaattggtcattttgaaggttttggaaaaggcacaacagacggcgaaagtgccggtaagggttactgggaataatatgggtgccattcctactggtatttagcgggagttaacatcagattttgctaagcagaattaagcattctggctccattctgcttatacacttcgtctttcaagttgcctctttgttggctgcgctcactcaccccggtcacatagttatctatgctcccagggttcactcccttgctgccgcaacgcatcttgaaattcattgtgtatatacgcaatgaaaagggaatatttattggatcaggatagatctttattacgtgacagccatagagaaagggccttcaaagaatctggcgtaaattcatcacatcgggctgtaatttcttccggtgataaccagtaaaccgcagaaacctcttcttcctgtaatgcgaatggcccgcggctgacacaactgaacaagcctccccatatacggcaaatttcttcttcgtaatagaagatgccatgttcagcaaaaggaattcccgcaattcccagttcttcctctgcttcacgacgggctgattcaagcagatgctctcccatcgttaccactccacccgcagttgcatccagtttgctggggtaaaaatcttttgtttctgtacggtgctgaaccagaattttccccatgccatcatgtacaacaatataagttgcccgatgcctcaggttttgattacgcatttgctcacgggttgcctgcgcgatgacttcattttcttcattgacaatatcaacccactcaatatctactgatttttcttgagtcatcttcaaacctttactaaataatatatatgccgacttttgcttcgatggaattttacagtcaaacaggaacaatggtaatgtaataaatctaacattaatcctaacattattattactagaggttatatgatagacctatactatgctcctacacctaatggccataaaatcgcgctgtttcttgaagaagtgggcctcccttatacgatttatcccatcgatataagcgccaatgaacagttcacgccagagtttctcgccatttcacccaataataaaatccctgctattgtcgaccatcaacctgccgacagaggagaacccttatcgctcttcgaatcaggtgctattttgctctatctggcggaaaaaaccgggaaactattgagccagaatgaacgggaacgtatccggcaattacagtggctattctggcaggttgggggattcggcccgatgctcggacagaatcatcactttaaccgctatgcgcctgaagttgttccctacgcaataaatcgctatgtcacagaaactcagcggctatacaaagtactgaatacccagctggaaaaaacaccttatctcggcggcaatgaatacagtatcgcggatattgctacttatccgtgggcgtattgctatgaatatcaaaaaattaatttgcaggattatcccgctgtagaaaaatggttagaaaaaatcagccagcgccctgccacgcaggccatctacaataagtaagctctccaaactgattttttgtatctgagtttcccccggtaacataacttatgctatcggggactaatgaaaggctcttgcctttcaccgaaggcctgtctttggctggtcaaatttgttcccgacaaacttgtcacttctttgtcaccgggaagttgcccggaatctatagggcctaattatttatccacgtgaatttttcatctgaaaacttgatgtcgatagcagataacagcatatctcactgctgcgtacatcatcccttgctatagtcagtcattgactatactttacgttttcaggataccgcctagttggtgtgcctgagagatccctgatatacccgcttttgctttgttcacaaggagtggttatgcatattttagttacagggggaactggactgataggccgacggttagtctatcaattactttcactctcccactccatcactgttctgagccggtctccacaaaaagtttattctttatttagtgatcaggtggaatgctggacaacattgaatgaccggaacactctggatggctttgatgcagttatcaatcttgccggtgagcctatcgtagataagcgatggacaccaaaacaaaaagataaactctgccagagccgctgggaactgaccgaaaaattaagtgcgctgataagagcaggtgagtctcctccttctgtttttatttccggttcagccgtcggctattatggcgatcaaggacagtccgttgtatccgaagatgagcctccccatgatgaattttcccaccaactctgtgaacgctgggagaaactggccttacaggctaaaagtgaaaaaacccgggtatgtttgctgagaacaggtattgtgctggcaagtcagggaggtgcccttagtaaaatgctgcctatgttccgtttagggcttgggggagctataggggatggcagacaatatatgccgtggatccatattgatgatatggtcaatggtatttactatctgctggtctctcctgagttggagggccctttcaatatgaccgcgccctatcctgttcataatgatcagttcagcgcaatattggcaaaagtactgcatcgccctgctttgttcaggatccctgcttttgtattaaaaatagttatgggtgaagccgcagcactggtattaggcgggcaacaagcgataccgaagcggctggaagaagccggattcggcttccgctattttgaattagaagaagccctaaaacatttactgacggaaaacgtcagacaatattgaacgctgacgttttaaatactgatatgttaaatattgacaggttttgctccctgccaacgattaaatagatccgctggcaggtcgatatcaaactgatcaagcacgcggttgactgtctggtcgacaatatcctgaacagattcaggccgatgataaaatgcaggtactggcggcataatgactgcccctatttcagcggcctgagtcattaaccttaaatgccccaaatgtaatggcgtttccctgactcccagcaccagtttacgcccctctttcaaaacaacatcggcagcacgggtgattaggccatccgtatagctatgcacaatgcccgataatgttttgatggaacaaggtaagatcaccatccctgacgtcttaaatgatcccgaagagatagaggcggcaatgtcacggttatcgtgtaccacatcagcaagggactgtacttcacgcaaggtgtagtctgtctccagtgccagtgtttgccgggctgacttgctgattatcagatgtgtttcaatatcctctacaggctgtaagacctgtagtagccgaatgccataaattgcaccacttgcccctgtcagaccgacgatcagttttttcatgcgctcctcagtaataccggaaataatttaatgatatacacttcgtctttcaagttgcctctttgttggctgcactcgctcaccccagtcacatagttatctatgctcccggggatgaactcccttgccgccgcgatgcatcttgaaatccattgtgtataggagtgttattatccttcattatagatttccaggctctcgatttcgctctgtccctgtaatttcatggcatcatctttacgcaggttttccagataatcgagataagtctgatcaatatctttcgtgacatagataccgtcaaaaactgaacattcaaatttttcaatatccgggttttcttcatgcatcgccgcgattaaatcagaaagatcctgatatatcagggcatcagcaccaatcagttggcgaatttcattaacttcacgaccgtgcgctatcaattcattagcatttggcatgtcgattccgtagacattcggaaagcggacttcaggagcagctgaagcaaaatagactttcttagcgccagcttcccgggccagttccacaatttgctccgacgttgtaccacggacaatagaatcatccaccagtaaaacgtttttgccacggaattcagcacggttggcgttcagtttacgccggactgatttacggcgttcatgctggccgggcataataaaggtacgcccgacataacggtttttaacgaacccctgacgataaggtttatccagaatatgggcgatttccagtgcgacatcgcaggaagtttcaggaatggggataacaacgtctatttgtaaatcttcccattcgcgggctattttttcccctagctttcttcccatccgtaaccgggcgttataaacggaaattttatctataaaggaatctgggcgggcaaggtaaacaaattcgaacagacagggagttaatgagggggtttctgcacactggcgagtaaataattgcccctgctcagtaatataaatagcctcacctgaagcgacatcccgcaggaactcaaaccctaaggtatccagtgccacactttccgatgccaccatatattcactgcggccatctgccagtgtacgtttccctaataccagaggccggatcccgttcggatcacggaaagccactaaaccatgcccgataatcatcgcgacacaggcataagcaccccggattttctggtgcattgccgcaactgccgcaaaaatatcatcaggttctaatgggaaatgcggaaattgtgttaactcatcggcaaaaatattcagcaggatttcagaatcagacgttgtgttgacatggcgacgggcattttcaaacagactttttttcagttccggcgcgtttgtcagattgccgttatgtgccaatgtgataccaaaaggtgagttcacataaaaaggctgggcttcagaagcactggaactccccgctgtcgggtaacggacatgcccaattccgattgtcccttgtaaacgtaacatgtgttttgtttcaaacacatctttaaccaaaccattggccttacgtaaacggaattcattgttaccatcaatagtcgcaatacctgctgcatcctgtccacggtgctgaagcaccgtcaatgcatcataaatcgactggttaaccgatgtaaaaccaacgataccaacaataccgcacatgtagtctttcctcatcagtcaggcggagaaggctatttctccggtaggaaactcgacgcgttttgcaggtagtcaaaaaaccacctgataatttgactgaactgagggatcaattgcgactgtttccagtccgcactttggggaagcggagtaaatgagtctgcaataaacaaaatggcagaaacgattaatacaccacgcaacgccccgaaacagatccccagaacccgatcagtacctgataagcctgttcgctgaacaagtgaaccaatcacataatttactactgcaccaacaattagtgttgcaatgaataaaatagcaatcgctaccccattgcgcaccagctcatctccaagacgggtaaaataaaccgccaggtaagtatagaagtggcttgcaacaaagaaagcacatccccaagtgatcagtgaaagtgcctcacgaacaaagcccctaatcaggctgaccagtgcagagaaaccaataatggcaataattgtataatctatccagaccatattttaatccaaaacaggctcccgactttcaggtcgggcgcattctaacagaaaacgaaaacgtttgcgtagcagatttatcactctgctattaaaaataatttaaggaaccgttcatatctgcctgtacaagctgtgcgcattatgaagggttcctgatctttcacagcggattgtagcccagtatgtaagagcatgatgttatggcgtgtaatttttaatttgcccctgtaagccggttaattctctcagttcaggcaaaatagaccccaaagcctgttttgatgcattcggcccgatataaatccgggttaactggccttgtactgccgaagaaggaaccgtatagacctgataccctgaaagacgtagcctagccacaatttcattcactttatccgcattttttaatgccccaagctgcacaacataagcaacggcctgcggtgcctgttcagcagcacggggtttcacttccggctggctttcagtgcggttctctaccttaacctgcggtttggtttctgttttaggaataacagaaagatcaggttttgcctgttctccggtgtatcctgccgttgctgccgatggctccggtactgattccggggctaaagaaccggaaaatgtatccgtatcttgctgcggctcctgaacttgtgtctgcattgcctctgcagccccttccggaggtgcagacggcatactttgtgtcagtggcggaatcgaatcaatattctcttcatcacccggcttaggcactaatggtatagaagcgaatttttcctcattgtatttcttatcgccgtccagcagcatcggcagcacgatgacactcagtgccacaagaacgatggttccgactaagcgattttgaaatttacttgccacgtcccttcatctcctccaatgactccataacatgagcgaccgtatggaaagaaccacagaccacgataatatcccgctctgatgcctcttccatagcctgatgccatgcctgttcaacgtccggaaatatccgggcatcaggtaggtgttcagccaatacagccgcttctgcaccacgaagttcatgtagtgatgcacaataccattcgtcaatttgcccgctaagacaggccagtgttcccgcgatgtccttatcctgcaacatgccgacaacaccccgaaccttactgccctgcggacgggataactccgccagtttttgtgccagatatccggctgcatggggattatgtgccacatccagaatgatacgcggcttttccccgatgatttgaaaacgccccggtaactgagcacgcttcaggccatcatgaatagcctgttcatcaatcgcctgactgactttatcattctgctgtaacagacaatgaatgacgcccagtgcagttgcagcattagctaatggcaggttagggatcggcaacgaattaaattgtcgatcaactgtgcgccagtgccagctttctttttcctgggtaaaatcccagtctttaccccggcagaataattttgctcccagttcatcggcaacatcagcaatggaatggggcatatccggctcgccaacgacagcaaagtgcccatgacggaaaatacccgctttttcgcgcccgatatgttcacgatccgcgccaagccaatccgtatgatccagtgcaatgctggtaatagcggcaatatctgcatcgacaatgttagtggcatccagacgacctccgagccccacttcgaggatcacaacgtcaagatcagcttctttgaagagctgcaatgccgccagtgttccatactcaaaataggttaaggagatatcaccacgctgagattcaataccggcaaatacacggcaaaaatcctgctctgttggttcattcccctgaatacgtacccgctcggtatagcgcaccagatgtggggagctgtaaaccccgactttcaggcccgcagccagaagaatggattcaagggtatgacaggttgtgcccttaccattggtaccggatactgtaatgactttaggggccggatgtaataaatccagtttatcggcaagcgtaccgatacgctcaagccccatatcaatcgctttcgagtgcaggtttccaaggtaggaaagccacatcgtcagtgacgatgtggcttgaggaatttgtaaagtatcagacatcttctttattagggttgatgtttatgtcaacttcgacgtcagcaggttcagcaacaatttctgttacttcttttttcgcgtcgggatgtggctgatgagtcatcatggcaagcataccggcaattctttctctcatttccggacggcgcatgatcatatcaatcgcacctttttccagcaggaattcactgcgctggaaaccttccggtaatttctcacgtacggtctgctcgataacccgtgggccagcaaaaccgatcaatgctttaggctctgcaatattaatgtcacccagcatacccatacttgcagtcacaccaccaaatgtcgggttagtcagaacacaaatataaggtaagccacgatcctgcattttcgctaatgcagcactggtttttgccatctgcatcagtgacatcagtgattcctgcatacgtgctccaccgctggagacaaagcagataaacgggcagttatcttccagtgcctgttcaacgccacgcacaaaacgagcgccgacaaccgaacccattgaaccgcccataaagttaaactcagatgcgcccgctacaaccggcatatcatgtaacaagcctttcatgacgactaaggcatctttttcctgagtctgcttctgagctgctgccaggcgatctttatattttttgatatcgcggaatttcaggatatctttaggctctaattcgctgcctaactctgttgtacttccctcatccaaaaatgactgcaaacgctggcgggcagaaattttcatatggtggtcacatcttggacacacttcgaggttacgctctaattcagcgcgataaagcacctgactgcaactgtcgcatttagtccaaactccttcagggatatttgccttgcgagtttgcatgattttgcttttgtttagaatcttttcaatccagctcattaatgaacctttccgtctgattctggcctataacgtgggctgcatttcctcggtataagccagcttttgttttacgtgccattaaaccacaatgctataacagagtggataaaaaactgctcaaacctgtttgtggctatctatcatttagtaacatctaattattatctgacgcttttttagatgtcgcccggcgatgacgccagatttcaatcacacctggcagaatagaaataaatatgattgcaacaatcaataatttcagattctgttggataatcggcatgtcaccgaataaataaccggcataagtgaacaataatacccatatcaatgccccaataacattatatgcagcaaaatgtcggtaagacatttttcccatcccggcaacgaatggagcaaatgttcggatgattggcacaaaccgcgccagaattatcgcttttccgccatgcttctcataaaactgatgagttttctccagatagctgcgacggaaaatccgggaatttggattattgaacagtttctcaccgaaaacacgaccaatagtatagtttatagcatccccgataattgccgcggcaattatcaatgcagccataatatgtacgttaagatcgttagaatccaatgccgacagcgctcctgctacaaataacagtgagtctcccggcaggaacggtgtaaccaccagccccgtttcacaaaatacgattaaaaataagatcccatatacccagtcaccataattggcaactaattcagccaagtgggcatcaatatgtaaaataaaatcaacaatgaacttcgcgaaatcaataaaatgagtaaaaaactccataatattcctcgtagtgctcaaacatccctgccatcattcgaaaaaatcagcatttatcagtcaaaaaccagttcatcagtcagaaactaactcatcagccaaaaacaaaggccccatcaccggctcaggcaaaccaaagtgagcaggataatccaccgcaactaaatatagaccttcagctttagcagttgctgctgcttttgtccgatctttcagtgctaacaactcagtcatccattgtacaccctgattgccacagccaatttcaagcaagctgccgacaatattacgcaccatatgatggacaaaagcatttgccttgatatccacgacaacataatgcccgtggcgactgacattaatgtgcatcagattacgccatggcgaattggactggcactgcacggccctgaaagaagtaaaatcattctctcctaacagacactgtgctgcttcatgcatctttttctcatccagcggataatgaaaatgcgtgacgcctttcgccagtaccgcaggacggtaacgatggttaaagataacgtaccgataccggcgtgctgttgcgctgaaacgggcatgaaattcatcatctaccgctttcacccaacgcactgcgatatccgcaggtaaatgggtattaacgcccattgtccatgcagcatctttacgctgtgccgaagtttcaaaatgcacaacctgccccgttgcatgaacacccgcatccgttctgcctgcacagaaaacagcaattggttcatttgcaacttttgacagcgccttttccagacatgcctgaacgcttctgacttcctgctgacgctgccagccataatagcggctgccatcgtattcaatccccagtgcaattttcactttttttgcttctggcacagactgattcagttctgtatcagacatcagtaaaattgctcctgcatcagtttttctgcgacttcaaccgccatcaatgcaccgccgaaacgaatgttatcggcaacagaccagaactgtaacatctccggcattccgtaatcattacgcagacagccgatactcagcccatcagcacctgatgcgtcagtcacctgagtcgggtaatccccttcttctgagacctgaatttcttcaagacgttcaaattcgtcacgcgcttcttctacgccaacaggacgcagtgtttccacactgaccatctgggcaataccgtagaaaacggaagactgaacacagctgactgaaacaggcaaaccttcatcctgtaatattctgcgaacctgatcgacaatccggcgctcttcacgcactgtgccttccgcatcaggcagcaaaggcagtaagttgaatgccagttgtttattgaaacgcccttcatctggtggaattccattcaataaacgggcactttgccccgccagttcgtcaatcgctgctttaccatgcacagaaaccggcaggatattggtcagttgtaaacgcgcgatacccgcagtatcaattaaaggcttgatagctgttaacacctgactggttgcactatcggcaaccgcaacaatattacggttacgatactcagccagcacatgcgggtttactgtcggcacaaccaatggaacatccggttcagcagcaaacaatccgctgctatcaatcaccagacagcccgcttctgttgcctgtgcaatatattgtgctgtgacttccatacccacagcaaaaaatgctagctgtacctgtgaccagtcaaattcggcaacatcgcgaacagtaacgttcttaccgttaaaccgcttaatgctaccggcactttgttcactggcaagaagatgcagttcaccaaccggaaactggcgctcctgtaataacgccaatatcgcctcacctactgcgcccgttgcacccaacagcgcaatattccaaccttctgacatgttggttctctccacttctcttttattttgctggcaggcagagaattctgcctgttgttaactcaatacagttaattcaatacggttaattgaattcagctaatcaaatgtttttaaatgactttaacgtcaaatccaatctgggatagtaattgagcactgctttcagaatcacaatgcactgtcagggaagaccactcacggcgttccggataatttttccgcagctggtcaaaagcaccgttctgcccggctacctgacgcaatggtgcatcatcacggcgcacatcatacactaaatgcatcagacgcttcaggatgctttgtgtcacttcaccacgaacagtgatatggctgaaatcagactcaggcagtaagtcagacaatgcggttttttgtggcttccctaaaaattcacaatacgcctcaaaaacctgagttgtaccacgagccttgccttccagagtatatcccgcaatatgaggtgtaccgatatccaccagctccagtaaaggtaatgaaaggttaggttctggctcccagacatcaagtacgacgcgcaatttttttccgttttgtaaagctgataacagtgcctgattatcaaccacttcaccacggctggcattaattaagatccggttatccggcaaggcagaaagcagttctgcatctgccagatgataagtctgataagggcctgatgtattgagcggggtatggaatgtcagaatatctgcctctttgaccagtttttctaaagaccagaattcaccttcatctccccgatcagcccgtggcgggtcgcataacagagttttcacgcccagagcggccagtcgtgctgccagacgccccccgacattaccaacaccgacaataccgacagttttatctttcagctgaaattgatcctgctctgccaatatcatcagcgcggagaaaacatactcaacaacagcaattgcgttgcatccgggagcagcagaaaaaccgatccccgcctgctctaaccacggctgatcaacatgatccatacccgcagtcgctgtaccgacaaattttacagcgctgccttttaacaggaactcattaactttagtgacagaacgcaccataaaggcatctgcgtgttccaaaaccccctcaggcacagggcgccccggaattgcctgaacttctcctaattgtttaaagagttgttcagcataaggcatattttcatcgactaaaattttcacttttcttatccaacgacttaagtgggcgtgatccgctattctgccatttaatcgacataatgcctaatctccctttatctttctgcttggcgctttatcagaaaatttctgcagcctagtacactctgattgatgtttatttcagctcatcctttcctgaaacgttccggcgttgttcctgcaatctgttgaaacatggcaataaaagcggacgatgagctataaccaacatcaaatgcaacttcataaacgcttttcccctgtgccagtaaagaaattgcgtgcagaaaacgcagacgctgtcgccactcactaaaagacattcctagttcctgctgacaacgacgtgataaggttctttctgaggtataacgcttctttgcccattctactaatgaagtattatcagcggggttatgctctaattcctgtaaaatcggtgcaagaagtttatcttttgatgaaggcaggtaagtattctggcttggtgacagttcaagctgatcgataagaatctgtgtcagacgctgatctttatcggtctgtggccgaataactttacggctaaagaaatcctgcataatggcatgaaaaatagaacttaaccggataagacatggatgagggggcaacgacttgctcaattgcggtgaaatatcgattatccaaaaccgcattgttttccggttataactcgaatgaacactatttttcgggatccagatacaaaactccggtggagccagaaaacgttgcccttccacagtcatctccataacgccgcagacaacataaatcaattgcccgaatgggtgggaatgcaacataaattcagtatcagcattcagagtttcatcacggaaaatgagagtgttgggcatatcccagtccggtaactgaaacatcatttggttaactccctttcaaaaaattcatttttacttccaaaaacggagaggaatttataaattgtcctgattgcctcatcagttggcggattatcaatatatataataaatcggtcactgctacactaagtgcacgatgttctacacacaatgaaattcaatgaaaaatttattatttccccttattgctgtcctgatttggtcagctaatgcggtagtcagtaaatccgcagcaacctcaattgaacccggcgctatcgctttctatcgctggtttgtcgcgtttttgattttgacaccttttatcttactgccggtactaaaacagtggaaaacaatcattccacactggtggaagttattgattctgggttttcttggtatggttctgaatcaaagcctgatttactatgccgcccatacggtcagtgcaacactgatcggaatcttaacctcattaattccgttgctgacgatcatactcagtatatttgttctacggatcacgccaaccgttggaattatactcggaagtgctttttcactgtttgggctgatatggctagtgggtaaaggtgaaccgtctactttgttgaagaacggattagggatcggagatgtaatgatgtttattgcatcagccgcttacgctctgtacggcgtcctgaccaaacgctgggcaattccattacccaactggcaggcactttatatacaaattgggtttggcgtgctgttactttctcccaacttcatgatgacagaagatgtccggctaaccggcgataatatccctcttgtactgtttgcaggtattccggcttcaattattgcaccttacgtgtggatacagggagttagccgactgggtgcaaatatgacatcaatatttatgaacctggctccggtctttactgccattattgcgattgtagtgcttcatgagaagatgcacagctatcaccttatcggagggggtattgtgttagctggtgtgatgattgcccaacaattacgcactccaattaacagttataaaaaacaaactgaaaaaagtatcaaaagttaatcatcagaaattttaaataactttatcaccagttatcgcccaataatgccattgggcgataactgcaaaaacagatcataataaaataccctcctaactgaacttatttaccattcccagcatttattgttcatagccgacttgtgaagtatttaactgaaacctgttgattctataatctataaatttatttttgtggatatcaaattcattcagaaaaatacataaagtaaatttatttattattaatgaattctaatattgaactctattaaagagtcatttaaagaagattctctaatataaaaacataagcccagatttactctatttcagttatatataacattaaacatttcggtgtatttcaaagtaagtcaaatgtgacattaggtgattaatgtcacatataggtatttttcacggctaataagagatttcggatctataaataataatgcaccggagatttattgcattgtcaccattactggactggtgccatatgaggaataaaaaatgaaaatattaaaaacattattagtgactactggtttacttttcagtgtcaatacctttgcagccagcgcccctgacagaactgaatgtatcgctccagccaaacccggtggcgggtttgacttaacctgtaaattagctcaggtctcattattagaaactaaagttattaattctcctatgcgggtaacatttatgcccggtggagtcggcgctgttgcctacaacgctattgttgcccagcggcctgctgaaccgggaacgattgtcgccttttccggtggttcgctgttaaatcttgctcanggaaagttcgggcgttac

SEQ ID NO: 3109 - DNA, 29043 bp, Xenorhabdus sp.; identical to SEQ ID NO: 3108
  CDS (13376)..(13474)
  unsure (1)..(29043): unsure at all n locations

SEQ ID NO: 3110 - DNA, 29043 bp, Xenorhabdus sp.; identical to SEQ ID NO: 3108
  CDS (14360)..(14977)
  unsure (1)..(29043): unsure at all n locations

SEQ ID NO: 3111 - DNA, 29043 bp, Xenorhabdus sp.; identical to SEQ ID NO: 3108
  CDS (15351)..(16265)
  unsure (1)..(29043): unsure at all n locations

SEQ ID NO: 3112 - DNA, 29043 bp, Xenorhabdus sp.; identical to SEQ ID NO: 3108
  CDS (27514)..(28200)
  unsure (1)..(29043): unsure at all n locations

SEQ ID NO: 3113 - DNA, 29043 bp, Xenorhabdus sp.; identical to SEQ ID NO: 3108
  CDS (28915)..(29043)
  unsure (1)..(29043): unsure at all n locations

SEQ ID NO: 3114 - DNA, 29043 bp, Xenorhabdus sp.; identical to SEQ ID NO: 3107
  CDS (28086)..(29042)
  unsure (1)..(29043): unsure at all n locations

SEQ ID NO: 3115 - DNA, 29043 bp, Xenorhabdus sp.; identical to SEQ ID NO: 3107
  CDS (25117)..(28023)
  unsure (1)..(29043): unsure at all n locations

SEQ ID NO: 3116 - DNA, 29043 bp, Xenorhabdus sp.; identical to SEQ ID NO: 3107
  CDS (23574)..(25043)
  unsure (1)..(29043): unsure at all n locations

SEQ ID NO: 3117 - DNA, 29043 bp, Xenorhabdus sp.; identical to SEQ ID NO: 3107
  CDS (17346)..(23396)
  unsure (1)..(29043): unsure at all n locations

SEQ ID NO: 3118 - DNA, 29043 bp, Xenorhabdus sp.; identical to SEQ ID NO: 3107
  CDS (14811)..(15329)
  unsure (1)..(29043): unsure at all n locations

SEQ ID NO: 3119 - DNA, 29043 bp, Xenorhabdus sp.; identical to SEQ ID NO: 3107
  CDS (12168)..(12752)
  unsure (1)..(29043): unsure at all n locations

SEQ ID NO: 3120 - DNA, 29043 bp, Xenorhabdus sp.; identical to SEQ ID NO: 3107
  CDS (10480)..(11997)
  unsure (1)..(29043): unsure at all n locations

SEQ ID NO: 3121 - DNA, 29043 bp, Xenorhabdus sp.; identical to SEQ ID NO: 3107
  CDS (9092)..(9757)
  unsure (1)..(29043): unsure at all n locations

SEQ ID NO: 3122 - DNA, 29043 bp, Xenorhabdus sp.; identical to SEQ ID NO: 3107
  CDS (7777)..(9075)
  unsure (1)..(29043): unsure at all n locations

SEQ ID NO: 3123 - DNA, 29043 bp, Xenorhabdus sp.; identical to SEQ ID NO: 3107
  CDS (6840)..(7784)
  unsure (1)..(29043): unsure at all n locations

SEQ ID NO: 3124 - DNA, 29043 bp, Xenorhabdus sp.; identical to SEQ ID NO: 3107
  CDS (6014)..(6682)
  unsure (1)..(29043): unsure at all n locations

SEQ ID NO: 3125 - DNA, 29043 bp, Xenorhabdus sp.; identical to SEQ ID NO: 3107
  CDS (5072)..(5917)
  unsure (1)..(29043): unsure at all n locations

SEQ ID NO: 3126 - DNA, 29043 bp, Xenorhabdus sp.; identical to SEQ ID NO: 3107
  CDS (4062)..(5072)
  unsure (1)..(29043): unsure at all n locations

SEQ ID NO: 3127 - DNA, 29043 bp, Xenorhabdus sp.; identical to SEQ ID NO: 3107
  CDS (2821)..(3948)
  unsure (1)..(29043): unsure at all n locations

SEQ ID NO: 3128 - DNA, 29043 bp, Xenorhabdus sp.; identical to SEQ ID NO: 3107
  CDS (2045)..(2674)
  unsure (1)..(29043): unsure at all n locations

SEQ ID NO: 3129 - DNA, 26355 bp, Xenorhabdus sp.
  CDS (6376)..(7035)
acagttcggttatatatgttgtaggggggctctttggtcaccattgatgaacttcaaaattcattgggtatagaaaaggtacataaccgctctggctcttgtgtagagtctgcaattaacatcatggtaatgcggctcagtcaaataaatgaattgtctctgggcctgtgttatggataataaatagacatttagactagagtggcttgctatttttaatagtatgcaagataatgagcgccgctttgaagttgaaagcaaacgtcaatgagggctctattggttctcccgcaatgctaacttgttaacttggtcagatctggaaagaagcagccatagcaggggatgtgtgtgctgggatgtcgctgatagagccctcacccattttttcggtccgctattctcatcccatattcagtttaatcaagaaataaccaatatatggggagccgataatagttaccggccttcactacttcctatctgatcacgacaacgtattatcgaacaaatttccagacagacgatgggattttgtcatagagtttattcatggtcagttcagccaggcggtggtcagctgcggaatagaacaattccagttcatcgtccgaaagctcatatttgtttttttcaattacacgttccagcgtttcaatagaggtgcattttctcaaacgcatcagatagtcagttttagtcatggtcgccttatcttatttggtataaaaatggttaagaatatatttatcagattttgcttaaagaagcgttcaaatcatgtagtagaatactcgttaagtgttcgtttgttctttgccagtttgttagttcaacaaagcttatcttatcactaccaaacaaattatatgtttcatccagatatttatcaattaaggtactgaggttgtagttatcagtatatttaattttaaaactccagacaaacgccgtaatgtgctcaatcaattcgtttagtcttaagtttttttcggaagtcagatcattgatccaatgattatcagtgcgattcaacactgaaaatgcttcgtgaattaaattttcacataagtactttaattcagcaatatcatgtcttcttggtgaatattcatccataaacaccctcccgtaaacaacgcacggcttatttgaactaaggcttatacatatcaattattatagtcgttcttttaaaattaagcctatcaaaacatgattattatttattaataataaaactctgtttttctgttcaccaccagttcatttaaatgattgccaatttacctctggcttcagccaaaggctagctatcagctaaaaaggtgggtataagccatgtatcattgaatatattgaattatactaatatagtggatgttatagcaataggtacgcaaatcattatatacctaccttctttcaaattgctacttttttgctggctgcgctgttaggtgtacttacttacatcgcgttttatacatagttatctaccatagtgtttataagccggctttatgcttgcagcttgggtttggcctatatatgaattgtattgcagcgttaaaaatgaatgtgatgccattattgcatatgtcatcagcgtgggggaacattttttatcattaaatggctaatcagaagaaaaagatgctaagtttccgacttatcttccctttattataaaaaacgtaaaggtatcacattttaaatgtaaggtattttttataaatatttattttgcttactgtaagagtgtttgtcttttgttgaaatatcagtaaaaaaatttttcatctaatgccatttttccaatattaaaggccaccggagtggcctttaaagttatttattgaatttaatgagaagatgaaatgtgttcagtatcctcatttttcttgctaaaacggcgtttaatcacaacgaagaatacagggacgaagtaaattgccagagatgtcgctgcaatcattcctcccagtacgccagttcctacggcattctgagcaccggagcctgcaccgttgctcagtaccagaggcatgacacctaacatgaaagccagggatgtcatcagaatagggcgtaagcgcattctgactgcttccatcgttgattcaatgagtcctttgccgtctttttccatcaggtccttggcgaattcaacgataaggatggcgttttttgcagacaggccgattgttgtcagcaaaccaactttaaagtagacgtcattatccataccacgcataaaggttgccagtaatgcaccaataacacctaatggaacaaccaacattacagagaatggtatggaccagctttcatacagggctgccagacagaggaataccacaagcagagacagggcatataaagccggagcctgattacctgaaagtcgttcctgataagacattcccgtccagtcatagccaatacctgccggcaattgtgacgcaagtttttccatcagagccattgcctcaccagtactttttccaagtacagcttcaccaacaatttccatggatggtaatccgttatagcgttcaaggcgcggaggaccgtagatccacggttctttggtagtgtccatgaatgtagaaaatggcaccatttcaccgtagaagttacggacatataatttggcaatatcttttggcaacatacggaaacgggcatcagcttgaacgtagacctgcttgatacgaccacgatcaataaaatcattcacataagtaccaccaaacattgtactgagcgtgatattaatgtcattgatggagacaccctgtgcttctgctttttcctgatcaatgtagaagcggtattgaggcgtatcattctgaccattaggacgcacaccggtcagtacatctgaattttgagccgccatgcccagtaattgattacgggcatttgtcagtgcttcatgcccgagatttcctttatcaattaactggaagtcaaaaccactggcagagcccaattccacgatagacggaatgttaaatgcgaataccattccttcttttatttgtgaaaaacgaatattagctcggtttacaattgccggaaccttatctttgtctttcttacgttcatcccagtcttttaagctgacaaacgccagccccatattttgcccctgaccggcaaacccaaagccgtttaaggtaaatacagactgaacaacgtctttttcattggtgtggaagtaatcattaatttcattcagtaccttctgtgtttgctcctgagtcgagccgggaggtaactgaaccattgccagcaatacaccctgatcttcttctggcaggaaagatgccgggatacgaatgaataacaaagccgttcctgcgatgagcacgacataaatcagcagataacgccttgtaccgcgtagcatacgcccgacactgtcagtataatgatgagtgcttttttcgaataaacggttaaaccagccaaagaaacctgtctgaataccgtggctgcctttggcaatcggcttaagcattgttgcacaaagtgctggcgtcaggatcagggcaacaaatacagacaagatcattgccgaaacgatggtgatggagaactggcgatagattgcccctgttgcgccaccaaagaaggccatcggaacaaatactgcggaaagaaccagcgcgataccgaccagagcactttggatctgtcccattgatctttttgttgcttcttttggtgaaagcccttcttcctgcatgacgcgttcgacgttttctactacgacgattgcgtcatcaacaagcagaccgatggctaataccatagcgaacatggttaatgtattgatggaataaccaaatgcagccagaacagcaaatgtacccagcaatacgaccggaacagcaatggttgggatcagtgtagcccggaagttttgcaggaacaggtacatgacaacaaataccaacagaatagcttctatcagtgttttcaccacttcgaaaatagaaattttaacgaaaggggtggtgtcatatgggtacacaacatttaagccatgtgggaagtaaggctgcatctctgacaatgctttcttgacggctttagaagtatccagcgcgttggcacctgttgctaatttgatacctatacctgatgccggtttaccattaaatcgggcaagaaaaccatagtgctgggcaccgagttcaacagtggcaacatcggccagagtgattttggaaccatcaggattaacacgcagcaaaatccgactaaactgctcaggagagctcaggcgagtctgggcaataatagaaacattcagacgctgaccgggaacagaaggtgttgcccctaattgtccggcggcaacctgattattctgctccttgatgctcttcatgacatccagcgcggtcattttatagttgaccagtttatcgggatcgagccagatacgcatggcatactgagtgccaagaagcatggcttcacccactccagccacacggctcagggaatctttgacattggctccaacgtaatcggaaatgtcctcctgagacatggtattattctcagaaatgaaacccgcaaccattaaaaatgagctggttgtcttctcaacgctaacaccttgctgttggacttcctgaggtaacagagggagcgcctgctgtagtttattttgtacctgaacctgagctgtatcagcattggtttctgcttcaaaagtcagagtgatactagtacggcctgctgagtcactgttggaagacatatacacaagattatcgataccattcatattttgctcgataacctgagtgaccgtattctgtaacgttattgcgtcagctcccggataagtagccgaaataacaatcgatggaggagcaatggcaggatattgctccacaggtaatttcattatcgccaacagaccagcgagcatggtgataatcgcaattacccatgcaaagattggtcgttctataaaaaacttaggcatgaatccccaactcctttattgagattttttggctgattcagttttatttgtttcaggtttggcatccagatccacttctgttggctgaacagtagctcccggcgcagctttaaacagacctgtgacaatcactttatccccggccttcaacccttcagtgacgagccatttattaccaattgcctgaggggctttgagataacgcaattctactttgttatctttatcaacaatcagtgctgttgcctgcccacgaggcgttctggaaatggcttgttgtggtaccagaatcgcattatggcgaacaccttcctccagtttggtacggacaaacatacccggaaggagttcttcattcggatttgggaaaactgcgcgcattgtgatggtgcctgttgtttcctcaacggtaatatcagaaaactcaaggtggcccgtccggctgtattccattcctgtatctgtgactaaatgaattttgggcttgccgttttctcgctgaatcgtaccttttgcgatttcatttttaagtcgcagataatcatcactggattgggtgatatcaacataaatcggatccaattgctgaacactcgtcagtgccgttgtctgaccggcagaaaccaaagcaccttcagacacagccgatttacctatacgtccggagataggcgcagtgactttggtataggctaaattgatacgggcactttccagcgcggctttagcagactgcacatctgcgacagcctgagcgtaatcagagttagctttatcaaattcctgcttactgacatactgtgttcccagcagtggcttatagcgttcaacagttaaatggccgacgttttcatttgctgtcgctctggctaagtttgctttggctttattgtaatcagcctgatagcttgctggatcaatttggtagagtgattctccggcggtgatatcactgccttctttgtaattacgtttcagaatgatgccactgacttggggacggacctcggcaactcggaaagctgaagttctgcccggcaattcagtgatgactgtcagaggttcagctttgagcgtcacgataccgacttcaggagcctgctcgccagcagccctttgctgagtattttgattatcgttacatcctgagagaatgaagctgcctgaaagtaccagtaatgtggccagaggcaaaacccctctgttttttagcataagtaaacctcaatttttcaatgtaaactctcgagctttatgagcgttaacgagtgaaattattacttcattaatgagcggtgctatagtacaaacatacatgaatgtatgtaaatcagccttgagtcaaaaacaaagtttatggcatgaaaatggcacgaaaaactaaacagcaagctaacgaaacccgccaacacattatcgaagccgcgataaaggttttttctgaacgtggtgtgtctgcaacatcattgtctgaaatcgcggttgcagcgggtgtaacgcgaggtgcaatttactggcactttaaaaataaaactgatttgctttttgctgtgtgcaaaatgccagcaaacaaaatagacgcgttagagaaagagtatcaggcaaaatatcctaataatccactcctcgtactgagatatatattaatttttctactaaaagtaatgacgactgattctcaaaatcgtttattaatggaaatatttttccataaatgtgagtttgttggagaaatgtcttcattagctgaacagattagagaagtctgtatttctgattatcaaaaaatagaagacatgttggttatgtgtattcagtcaggagagttaccttatgatcttgatataaggcgttcagctatcatgttaagggcattaatgaccgggttgcttgaaaactggttatttgcaccagagagttttaatattcaggcacaatctgaatctctggtggatggctttattgacaccctaaaatatagtcgtcacttgcgtcgcattgaagagcttcgttctgagtaagtgaaaccaataaaaagacaattaagcggtaaaggctatacatctatacattatggtgatggcactttcttaacgagcagaattgccgatacttcagtgctatcattccattatctgtaaacgatgagtagattaattcatggttcaatttaaccgcggtttgagtgtcttactcaacaaaacgggcctgtcatgcaataaaagacccgatatattatattttcgccagctgggcctaatcagcctgcttttttttctgttgttttttcttcaccctgcctcggctgcgttcagcaatgatgtaccaacacgtgatgatatccagaaccagcttaaggtgttaacggaccgtaatgagcatactcttgaagagagagcctcgatcgctgatttggaaaaagcactttctttctttgataagatcgagaagattcagcaggattctgagcagctggcaaaaaatttacaacaattacctcagaagtcacaacagctcaccgctgaattagcgagcctgaaaaataattcccaacaaaatgaggatgaatataagcataatctggcgactttatcactaaagcaacttgaatctaaacagagtgttacacttaacagtttacaaaaagcgcaggataatctcgctaactacaatagccaactgattgggttgcaaacacagcctgaacggacacaaaatctgctgtttaataatgtccaaagattacagcaactccgtaatttgcttaataatgctgttacggagcaatcggacgttcgccatactgagattgaattattacaggtagagcaagctttcctgacgcagcaaaaggaatatcaaaaatcagctttgcgcgcaaatacacagctgcaaacccttctacagctacagcgcgattatacctcctttcagattgaacaattagagcggcatgtccagtttattcaggatatggtcaatggaaagcatctaattgattcggaggaaaccgccaaagaagctcagagttcagacgataccagtccccatattcagtctaatccgctggtcagagaagaaattatggtgaaccgtgaattcagtgagcgtctggtagcggcgacacgggataataatcagctggtgaagaaaaaaattcaggtgaagaattttttagacagagctatccagtctgaacgtgatttaaaagaacaggttaaggtgttacgcggtagtttattgttatcgcgtattttgtttcaggaacagctaaaggttccccaaactgtcctgacaaaggatttacctacgaagattgctgatttacggctggagcagtttgaaatcgcacaacagcgtgatcaactttatttagtggacgattatattaatcaactactgaatcaacatgccaatgatataaaaaatgaatctcaggaagctgttggagaaatccgtaatgcgatagggcaattgctggaaattcgtcgagagttgctgaatcaattgaataaccagttaggacagcagatcacacaagcgattaatttacagatggatcaacaggaattgttgaatgtgacacaatcgctggaacagacgctcgcccaacagattttctgggttaacagtaataagccgatgaactgggtctggctgaaatcattgcctcttttagctcatgaagagctgactcactttagtgtgcactttactatcagagggattatttccgggttgcagaactctgtccattttgtcattcctctattactggtaggcctgtttctgcgttggcagacaaaaagtattaacgcacatttgaagaaaatttcagctgaaatagggcagctacgcagggatagtcagctacatactccactggctttggttctgacgctgataaaaacgctgccattggcgtttattattctggctataggttattggtattcgaagtcagaggatgaactgggaggaatgatatgggatttctccagtcatttggctttattctgggttgtctatggttccagttaccaaattctggaaagaggcgggataggagaacagcatttttcactcgatagagaagtctgttccttattccgcaaaaatctggtcagattatcagtcgctttactgccgattttgttttgggtaactctgggagttaagcatccgcttcgtttggctgatgatgttatcggtcaatgtacggtgttgatttgcctgctcttcgtttttatctttgtttttccgttctgtcgtcaggtatggcgtgaaaaaagttcgcatatgatccgcacgatcgtggtgacaatgttgactttttcaccactgattctgatagtgctgatggtgtcaggttatttttacactacgttacgcttgtctgaacgctggctttacagcgcttatttgctgcttctctggcatatttgctatcaatcctgcctacgtggattaagtcttgctgcccgccgtatcgcatatcgccgggccatgtctcgccgtcaggcacaggcaaaagaaggtgcggaaggtgaagttatcgaagaaccgccaatggccttggagctgattaatcagcaatcattacgtctaacgaccatggtgctgtttttgatcttttttatggcgttttactggatttggtctgatctggtgacggtcttctcttaccttgatggaataaacctgtggcaatacagcacgacaaccgatcagggaaatattctgcaacacgttaccctgaaagatttggcactctcagtcgcaatgctgggtatttcatgggtgatgatgcgaaatctgccggggctactggaagtattagtgttgtcccgcttacagctacaacagggttcttcttatgccattaagacaacgctgacttatttaatcatcggcgttggcggaattagtgcgctgggcacactgggagtttcgtggaataaattacaatggctggcagcggcactttcggttggtttgggatttgggttacaggaaatctttgccaactttgtttcgggcttaattattttatttgagcgccctgtccgtatcggggataccgtaacaatagggacttattccggttcagtcagtaaaatccgtattcgggctacaacaatcactgactttgaccgcaaagaagtcattattcctaaccgggcttttgtgacagaacgcctgatcaactggaccctttctgacactatcacgcgcattattattaaagttggtgtcgcctatggttccgatctcgataaggtgaaagaagtcatgctacaggcggcgaaaagtaatcatcgtgtaatgagtgaaccggaaccacaggtttattttatgagtttcggtgccagcacgctggatcatgaattgaggctttatgtaagggaactgggagatcgcagccgtacagtcgatgaggtaaaccgcagtatagataaattatgccgggaaaatgatattaatattgccttcaatcaactggaagtttatttgcataacggtcagggcaatagcctacaagaggttaaaaggtcgataagtggttctgagcaccagactggtgaacctcctatgcctgatgataagccgttcttaccttaaataatcataatatacccaatggatttcaaattgcatcgcggcggcaagggagtgagtccccgggagcataggtaaccgtatgtttataaaaacggtgactggggtgagcgagtgcagccaacaaaaaggcagtttgaaagatgacgggtataaaaggggaacattccgggctgtacaatcaggaatgttcctcagattgttgaggtaattgttttaatttgccctgtagatcttgtctgacgatatctaatgctgccaaagccgtttcaggggaaatatcattacattcgagcaggtaaatgagatcaactgcaagcttgatctctggtggcgcatttttgagtgacataatgggggattcctctaatcattaatcagaatgttcctgcttttcaatcgttctttctatgcgcattaacgcctgacgacaacgagccagtcttcctgccagagcggcgatctctttttgcagtttatatttatcgacggactcagctttctgagccagctgtaattctcggtcatcaatcattgccattaaacggcgttcataatcctgatgttcggccagacgatgataaagatcctgctcttgtgactgacgcccgaatttatcttcctgcttgcggagaacctgcgtggataattcccgtttcagtgcttctatttgcatcactaaacgttcagagagaaatttaacctgtacagtgcgattatcccggacgcagcttttcagctgatccatattctgatgaatttccagcatatagccactgagtttattcgtatggctgtggaataacgcctgatcaaaacgggcaattgaaaatggtatatcaggcagggaagataattcggccgctagcatactgatttgtttttcaagcacatctaataaattttgtatacccatcagtatcccgttatagtcgataatcttttggttgaatgctatttcatctgacccgcgttgtgtttaacgatacgcagggatcagctgaggataagcttgataaatatcaacaaaaattaagcgacaacttgctttgttgttgctttttcccggtagtttgcatagattttagcgttttcattttttaactggctggcattgattatgaccgctaacgcacaaaaactgcaatttattaaagatagtatcgaaacaatacctgattatccgaaagcgggcatacttttccgcgatattaccacgttattggataatcctgttgcatatcaggcgacgatcgatttattggtagcccattttcaggacaaaggtattaccaaaattgtcggtactgaagctcgtggtttcttgttcggggcaccagtggcactgcgtcttggggtaggttttgttcctgtccgtaaaaaaggcaaactacccagagagacgttaagtgaaacttatgctctggaatacggtactgatacattagaaattcataaagatagcatcaaagccggagataaagttctcgttgttgacgacctgcttgcaaccggtggcacgattgaagcaactgtgagcttaatccgccgtcttggtggtgaggtttcagaagcagcctttattatcggtcttcctgatttgggaggcacagaacgcctgaaaaatcagggcattgatagctacacccttgttgaatttccaggccactgatcgctcttgtttttgtattgattgccctgatttttgcataattgatacatcagcctcgccgactatggtgaggctgtgctagcatgataggcagtcgtgttcaatttccccggtattcatgagctatcaggtacttgcccgtaagtggcgcccacaaatattttctgatgtgattggtcagcaacatgtgttgactgcattggctaatggtcttgaacaccagcgcctccatcatgcttattttttttccggcacacgtggtgttgggaagactactattgcccgcctgttggcaaagggcctgaattgtgaaacaggtatcacaaaaacgccttgtgggcagtgtgttaactgtctcgaaattgagcaggggcggtttgtcgatctgattgaaatcgatgctgcgtcacgaacaaaagtagaagatacccgtgaactgctggataacgtgcagtatgccccagccagagggcgcttcaaagtttacctcattgacgaagttcacatgctgtcccgccatagttttaatgcgctactcaagacattagaagaaccgccggagcatgtgaaatttttgctggcgacgacagatccacagaaattacccgtaaccattctttcgcgctgtctacaattccatctgaaagcacttgatgtcagccagatttcaggccagctggaacatgtgcttaatgcggaacaaatagagagtgaagcccgggcccgtcagctattggcccgcgcagcggacggcagtatgcgtgatgctttgagtctggctgatcaagcgattgcccttggtggcggaaaactgacagcagatattgtcagccagatgctgggaacgctggatgatgaacagcctttagaaatggttgaagctctggttcgcgcggatggacagaaacttctgactttagtggaacaggtcgcagctcgtggtatggactgggaaaacctactggtcgaaatgttatcgttgctgcatcgtgttgcgatgattcagttgctgcctcagcaaccagagattgaaccttcttcaacagaagggcgcttgcggttgttggcaagatcaatgccacccagcgatttacaactttattatcaggcgttattaactggccgtaaagatctcccctatgccccagagcgtaggatgggggttgaaatggcgttattacgtgctctggcatttcatccaaaaacgataattgaagaaatacccgtctctaataacgcagagataccggtcgcatcgggtatagcattcatgcctcctcagcaacagccagtttctgataattttggttctgtcagccctgaatctggtatggcagataaacagccctctgcccagaaacagagaatggccccaagggaggggttagagccagttgctgatagcccgactgcaaaattactacaggcaaaaaatctgctttcgcggcaggaaggcacttcctcaaaaggaagtgctcctccaaaaaaggctgagccggcagcgtctgttaagacgaagccggcgagttcggcactggagcgattggttgcggtggccgaacaacggccccagtcttttgttcccaaggcacgtgaagttaaaccggtaaaacaagaggcttatcggtggcgtgctaaaaacattgaagaaaagcgggttgttacaacaccaaaagctatcaaatcagcacttgaatatgaaaaaacacctgaattggtgaaaaagctggctattgaatccagacagcgggatcaatgggcggctgaaattgataatctgaatattcctaaactggttcagcaggtagccttgaatgcatttaaagagcagattaatgaaaatcagttctgtcttcatctgcgttcaaagcaacgtcacttaaattcggcttcggcacagagatctttatcggaagcgttgactgaattgcatggaaaacctattgaactcagtattattgaagatgataatccagcagtaaaaacaccgctggagtggcgacaagccatctatgaagaaaaattggcacaagcgcgccaatccattatttcggataaaacgatccaaacacttcaacaattgtttgatgctgaagtggatgaagaaagtatccggcctgtttaaccccgcagtgtgtattgatactgtgtctacagcaaagagagaaaattatgtttggtaaaggtggtttgggcaatttgatgaaacaggcccagcagatgcaagataagatgcagaaaatgcaggaagaaattgcaaatctggaagtaactggtgaatctggtgcgggtctggtgaaggtcactattaatggcgcacataactgccgtcgtgttgaaatcgatccaagcctgatggaagatgataaagatatgctggaagatttgattgctgcggcattcaatgatgcggcccgtcgtattgaagaaactcaaaaagaaaaaatggctagtgtttccagcggaatgcagttaccacccggctttaagatgcctttctgatgcaaaccagccctcttcttgaatccctgatggaatccttgcgttgcttgccgggagtcggtcccaagtcagcacaacggatggcgtttcatcttttacagcgggatcgcagtggcggtatgcggcttgctcaggcattgacacgtgctatgtctgagattggtcattgtcaggactgtagaacgtttacagaacaggaacagtgcacgatttgtaccaatccccgccgtcagcaaaacggtcagatctgcgtggttgaaagcccggcggatatccacgctattgaacagacgggtcagtttgcggggcgctattttgtccttatggggcatttatcgccgctggatggcatcggtcctatggatatcggcttggatcgtttggaagaacgtttatcttctgaaacgctgtcggaaattattctggcaactaatccgactgtcgaaggagaggcaactgcgaactatattgctgaaatgtgttcgcaatatggtgtgactgccagtcgtattgctcatggtgttcctgttggaggagagcttgaaatggtagacggaacaacactgtcccattcccttgctggtcgccatagaattactgatttgtgatcatacccccattttttaatggaaaatcccaatggatggtgttgcgaaacccgcctccatccataatatattaaataactaattgttttttaaagtctaaataattaatttcacattcttcttattccctgaacttgaaagtcttaagttttatccccatctgattaccatcgtccgattttacatatctgaactggatttagattgaggtaataaatgagcatgaaagatcaggaaacccgtggatttcaatcagaagtcaaacaactgttacagttgatgatccattctctctattccaataaagaaattttcctccgtgagctgatttcaaacgcatcagatgcggcagataaattacgtttccgttcattatcagcgccagagctgtacgaaaatgatggtgaactgcgtgttcgtctggctttcgataaagagaataaaacaattaccattagtgataatggtattggtatgacccgtgatgaagtgatcgataacttgggaacgattgcaaaatctggtactaaggcatttcttgaatctatcggctctgatcaggctaaagacagccaattgattggtcagttcggtgttggtttttattcttcctttattgttgctgataaagtgactgtacgtacccgtgcagcaggcgcggcgacggaacagggcgtattctgggaatcaaccggtgaaggtgattacactgttgctgatattgaaaaagcagaacgtggaacagaaattaccctgcatttacgtgaaggggaagatgaatttttgaatgactggcgtttgcgttctgtcatcggcaaatattctgaccacattgccttacctgttgaaattgaaacccagactaaaaatgaagaagatgattcagttactgtagcatgggaaaaaatcaacaaggcacaggcactgtggacccgcggtaaagctgaaatcagcgatgatgaatataaagaattttataaacatatttcccacgatttcgctgatcctctgagctggagccataaccgtgttgaaggaaagcaggaatataccagtctgctgtatatcccttctcaggcaccatgggatttgtggaaccgtgaacataaacacgggctgaaactgtatgtacagcgtgtcttcatcatggatgaagctgagcagttcatgccaaattatctgcgttttattcgcgggctgatcgattccaatgacctgccactgaacgtttcccgtgaaattctacaggacagttcaatcactcgtaacctgcgcagcgcactgactaaacgtgtattacaaatgctggataaactggcaaaagatgatgcagagcaataccagtctttctggcagcagtttggtctggttctgaaagaaggccctgctgaagatggcggaaataaagaagctattgctaagctgctgcgttttgcgactacgcataatgacagtgcttcacaaactgtttctctggaagaatacgtcagccgcatgaccgaaggtcaggagaagatttactacattaccgcagatagttatgctgcagcgaaaaatagtccgcatctggaactgttccgtaagaaaggcattgaagttctgctgttatctgaccgtatcgatgaatggatgatgagctatctgacagaattcgacggaaaatcattccagtcagtcagcaaagctgatgagtctctcgataaactggctgatgaaaacaaagcagatcaggaagaagaagataaaaaactggaaccattcgttgagcgtgtgaagacactgcttggcgagcgtgtgaaagaagtcaaactgacccatcgactgactgatacaccggcgatagtgaccactgatgctaacggaatgaccactcaaatggcgaaactgtttgcagcggcagggcagtcagcaccggaagtcagctataattttgaactgaacccggatcataatctggttaaaaaggctgctgaaattcaggatgacagccagtttgctgactggattgagttgttactggaacaggctctgtttgctgaacgtggaacgctggatgatccaaaccagtttatccgccgtatgaatcaattattattagctgaaagcgcgtaatatcgtttaaattatgccaataaaccacgcttcaacggaaaatggagcgtggtttgttttttgataagcgcgaaaacgtttacctgttttcttgagcgactatcattccagtggtatggtggttcgttttctttaaaaaatacgaaaagcaaatagcaaggggatttacgcgatgcgtattattctgctgggcgcgccaggcgccggtaaggggactcaggcgcaatttatcatggagaaatatgggatccctcaaatttcgacaggtgacatgttgcgtgccgcagtaaaagcaggcagtgagctgggtttaaaagcaaaagaactgatggataatggcaaactggttactgatgagctggttattgctttggttaaagagcgcatcaaacaagatgactgccgtaacgggttcttgttggatgggttcccacgtactattcctcaggctgatgctatgaaagaagcgggtgtcagtgttgattatgtactggaattcgatgtgccggatgaaattatcgttgatcgtattatcggccgccgtgtacatgccccatcaggtcgtgtttaccatatcaaattcaatccaccaaaagtggaaaatcgtgacgatattacaggcgaagaactgactgtccgtaaagacgatcaggaagatacggttcgtaaacgtctggttgaataccacgctcagactgcacctctggtttcttactatcagcaagaagcacaggcaggtaatacaagctacttcaaacttgatggaacccgtcaggttgctgaagtcagtgaagagttagcccgcattctgggttaaggctctggggtattagtgccctgaggtattagtatcccgaatagatagttgtgcgacagatttcagattaatttgatcctgaagcatagagcaggcggtgtgaataccgcctgactttcacctttccgtaccagatcccccccataaaatgtattatacccttcgtctttcaagttgcctctttgttggctgcgttcactcacccccgttcacatagttatctatgctcccggggatgcgtttccttgccgccgcgacgcaccttgaaatccattgtgtgtatgtgactatcaccgagttttatcctgaattatccgtcactttaatgggtggagtgttgaataatgagtaatcgtaattatggtgtgctattagttaatcttggcacaccagacgcgccgacacctgctgcaataaggcgttatctggcaaagtttttaagtgatcggcgagttgtggatattccgccattgatttggaagcctctgttgtatggctttattcttcctttccgttctttccgtgtagccaggctgtatcaggaaatctggacagatgaaggttctcctttattggtttacagcaaacgtcagaaacagcgattaagtgaaaaactgggtaatatacctgttgagctggggatgacttatggttcaccttcattaactcaggcagtcgataaattactacagcagggtgttgaatatctcatcgtacttcctttgtatcctcagtattcaagtacaacatcagcggcagtatttgatagtctcagcaaaatattacagggatatcgtactatcccacatttgaaatttatccgcagttacgcccagcatccggcatatatcgccgcattaaaggaaactgtagaacagagctttgaaaagcatggtcaacctgatcgcctgattctttcctatcacggtatccctgagcgtctggctgaaatgggggatatttatccacagaactgtctggcgacaactaaactgctaacggaattgttggactatccggcagatagaattatgatgacataccagtcgcgttttgggcgtttaccgtggttagcaccctatacggataaaacaatagccctgttgccagagcagaatgtggagcatattcaggtactgtgtcccggattcgcagccgattgtctggagacactggaagaaattaagcagcagaataaagctatttttttagatgcgggcgggaaaaagtttgaatatataccagcacttaacgataatgaggcgcatatttcactattcatgcaattaatcaatgatgccatgagataacgaataactggcagttatggattatggctgggtttcatactgaaaggacattggcagatatggatatttttgcttatagttagtcggtgtgtattctgccgattgtgtgattttttttgaatattgcttcaaaatcaacatataacgtaagctgggacagtaatctggcagggaataacgagaagcaaaattatttggattggacatagagataatgagtaataaacccgttaagcatacagacttttatgaggaacatgcagactattatcatccaaagcaagatgatgaaattgatctgtttgaactattctccgtaatatttcagtcaaaatatttgattattgcagtatccttcatttttgcagtgattggctttggtgttgcgtcatttttaccacaaaaatggaccagtacggcggcagtggtgcaacctgaactggaacagtttcagccattaaaaaatgttttaacagaactgaatgttcttagtcttgatccaaagattacagagtattcactatttaagcgttttattgaaaactataactcccgtgtactgcgtgaagaatatctggtagataccgattacttcagaacactgcttgccagtagcgaagatattacggcacaggctaaaagaagtctgattgaacagattgtaaataaaaatatctcttcgtctgtacctaataaaaaagataaagatgatgaattttatgaaacaacgctttctttcagtgcggggacagcagaagattcatacaaattattgtctggttacatcaaatttatctcctctgttgttcgtgaccagataaaagatgaactgaatgatgcggtgagtcagaaactggtttactcgaaaaaaatgtatgatattgatttagaccgtatcaccaatatgcgttctaccgatattgaacgactgaagtatgcaatttctattgccaattcagcgggtattaagaaaccagtctctagtggtggtgcagtcgttaaggatgacccggattattccatcgctctgggtactgatgcgttgcaacgtaaattgcagatcacagaaggcattaccgatgcaacaacgatagatcctgacttacgtaaccgtcttctttatatcaaaaatctggaagcggtaaatattgataagcttgatttccagccattcaaatatatgcaggagccatacgagccaacggcgaaagattcacctaagcgtttgttaattctgattggtgctggctttattggttttattctgtcagtaatgtttgttctgatgcgccatatggtgcgtagccgtcagaagcaagcagcctgaagcttatgagctgagtttaattctcagcggttcataatcactgaactttagcagccagtgtgttatcacattggctgtttcttttcatcaatactgaatactgtgctttttgtttcatagtgggattatgctaatatggcgcatgttttggctccatagcaacaatcaattatgaaattccccggtaaacgcaaatctaaacactattttcctgtcagtctgagagaccctctgcttcagcccatcaaagagatgatggatactgagaataaccgagcatatattgttggtattgaccagatattggtagatattgaagcgaaggttgatgaaagctttatccaacgttataacctgagtcagggacattcattagttattgaagatgatgttgctgaagcgctctacaatgaactggcagataataacctcatcagccatgaatttgcgggtggaacgattggtaatactctgcataactattctgtgctggcggatgacaaatctgtgttgcttggcaccatgtgcaataacatccaaatcggcagctatgcctattgttatctttgtaatacttccagccggatggatttgaatcatcttcagggcgtcgatggcccaatcggtcgctgttttactctgatcactgaaaatggtgaaaggacatttgccatcagtccggggctaatgaatcagcttaaaccggaaagtattcctgagcatattattgcagaggcatcagcactagtaatcacggcctatctggtacgctgtaaatcaggtgaaccgatgccggaagcaaccatgaaagccattgaatacgcgaagaaacataatgtgccagttgttctgacactgggtacaaaatatgttattgcggacgatcctcagtggtggcgcgattttctggcagagaatgtctctgtggtcgccatgaatgaagatgaagctctggaactgaccggttttagtgatcctttgttggcagcagatatggccctgaattgggtcgacctcgtattgtgtacggctggcccggcggggttgtatatggccggttatacagaagaagagtccaagcgtcagacattacacccattattgccgggagcgattgctgaattcaatcgttttgaattcagtcgtgctatgcgtcaggatgattgtcagaatcctatgcgggtctattctcatattgagccatatatgggaggacctgaaaaaattatgaatacgaatggtgctggagatggcgcactgtctgccttactgcatgatattacggctaatagttatcatcgtatgaatgtccctaattcgagtaaacatatgcgctcctgcctgacgtattcttctctggctcaggtgtgtaagtatgcgaacagagtgagctatcaggtattgagtcaacatgctccacgtctgacacgcggtttaccagaaagggaagatagtctggaagagtcttactgggaacgttaatttctgattcaggagtatcccccttggaatttttgggatactccctattaatcaatttattatgctgctgatgaattagttggtgaaaatgctgatggtagtgctatcgggcagtcaggcgtggattcagggagtgaatcagccatcgccctggcgatttcatgttcgccaataataatatgatcagcgccacgtgctgtaaggtaagtgacttcatcatcgtaatgagcgcgaacgataatattgatatccggcctgattgctcttgcactctcgataattttgccggcttcataaccattcgggatagtcaggaatagcgcacaagcacaatccagccttgctaatgccatgatatcttctctggccgcattccccatcacagcactaatccccatttctcccagctcttcaaatcgggcacgagtatcttcaatagcaaccagtggaaaatgtttttcctgcagacgctggcaaagcaggcgaccgaccctgccatatcccacaacaatcgcatggccgcaaatattgacagggatttgagtttcttcctctaatgtttcttccagtatctgttcttctatcgtttctgttttttccagatagcgatccaacaggctgaacaaaatcggattcaacataatggaaagaatagcccctgccagtatcaggttacgtgcatcaccatctaacacacctaaagtgacacctaatccagccagaataaaggcaaactcaccaatttgggcaagactgacagaaatagtcagtgccgtacgtcgtgagtggccgaaaagcctgaccagcaacagtgctgcgacagatttaccgataataataatggtcagcgttcctaaaatagcaatgggttgctggatcaagattattggatcaaacaacataccgaccgaaacaaaaaacagcacagcaaaagcatctctgagaggtaaagtatcctgtgcggctctatggctcagctctgattcattcagtaccatcccggcaaaaaatgctcccagtgcaaatgaggcgtcaaacagctccactgcaccataggcgacccctaaggcgatggtgaggacagccagagtaaataactcgcgcgagcctgtactggctgtttttgccagcagccatgggatcagacggcggccgacaaaaatcatcaataaaataaatgcgacaactttgccgacggtaatggcaagttccagaagtaattggccgatatcagtattatggttatctaaaatacccgcagaggcaggcaataataccaaagccagcaccattgccagatcttcgacaatcagccagccaatggcaattttcccccgctggctgtcaatgagttggcgttcttccagtgctctgagcagtactacggtactggcggtggacaggcagaggccaaagacaattccgctgaataaaccccagcccagtaattttgacaggccggctcctaatagcgttgctacggcaatctgggcaatcgctcccgggattgcaattgattttacggctaataaatctttgagtgaaaaatgcagaccgacaccaaacatcagtaagatcacgccaatttctgaaagttcaggcgccagagaagtatcggcaacaaaacctggtgtaaaaggcccggcaagcacaccggccataagataacctaccaaaggtgagattttcaggcgctgtgcaagcatgccaagcagataggcgaggagaaaaccgccaacaatagtcgtgatgagaggtgtcgaatgctccatcaagtctccttctgggttggataaatgtaataggatgtattatcagattgggtaattattaattttacaaataatttaaaatgtttgcttgaaaaatatactttattggggaaatgagggtgatctacataaagagcattgtaatggtattttatgtagatctttttattatttactcatgtttacaaagagaaatgataataaataatgaatattttttattatttcgtactgattttattatgtttatttcctatatttggtaagaatagagtgaaaatgccaagaagtggtaaaaaagcacagattttataaactaattctatactggttttatctgctatatatccgagagcggctgctccgacaccccccataccgaatgctaatccaaagaataatcctgctatcatccccgtgttgccgggaagtagctcctgtgcatagacgaggatggcagaaaatgcagatgccagtatcaggccgataataacggtgagtatacctgtccagaatagtgatgcataaggcaggagaagagtgaagggggcaacacccagaatcgaaccccagatgacatacttacgaccgattttatctccgatgggaccaccaatcatggtgcctgcggcgacagcaaacaaaaaaacgaaaagatgaatctgtgcattttgaacagaaacaccaaatttttggatcagataaaaagtatagtagctgctaatgctggtcagatagaaatactttgaaaagatcagtattagtagaatgatgaatgaacggacaatgatttttctgggaaaaactggctcaaatcttgtattggaggcgtgacgtgaagtcgtacgatactgcattttgtaccattgactgacttgtaacagaatgatgatagccagcagagctgccagagaaaaccaccctatatttcccttaccgtaaggcgcgatgaaaatagcggctaacagtgggccaagtgaacttcccagatttccgcctacctgaaataaagattgcgctaacccaagacgcccacccgaagccattcgggcaactctggatgattccgggtgaaaaaccgatgaacctgtaccgaccagtgctgctgccagcagtatcataggaaaactttcagcataagccagcaaaagcaatccggaaagggtaaaacccatcccaacgggtagcgaataaggctgagggtgtttatctgtatataagccgatgaggggctgtaataaagacgccgtgacctgatatgtcagggttatcattccaatctgtataaaactgagcgtaaattcagattgtaatagtggataaatcgccagaatcagcgattggatcatatcgttcaaaagatgagacaggctaattgcactaagaatagagaaaaccgttttctgtgttcttttttgtgagcctgattgtggaattgtactattttgtttatttctgttcatttcgtcaccaatgtcacctgtgttgtatggtgttgaacggttatttaattgttacaccttaatgcatattcactttccaataaaacctttgctgatcttggtataatttgatgcctatcgcaaaaaaatggaacaacactctatttaatagcttatttatgtaatcttgatcgaaaaaatacggcattaagtgctgtgccgctagtccgttctgttgttgaatatatgcctgtgccggccatatttcttgtcataaaaaagtaatatttctttgaaatgaggcaggttttaacgccattgaaaaacaataacagtcatgcagtcaatttatttaggagcatggagatatccgatgaaattttcatttaaagcgtcagtatgtacccttgttgtttctctggctttgtcaccgatggtggcttcggcctgggaaaaagataaaacgtacgatattacgatcttgcataccaatgatcatcatggtcacttttggcagaatgatcatggagagtacggattggctgctcagaaaacggtagtcgattccatacgacaggaagttgctaaaaaaggtggcagcctattactgctatcgggtggagacatcaatacgggtgtgcctgaatcggatatgcaggatgccgaggcgggtttttt

SEQ ID NO: 3130 - DNA, 26355 bp, Xenorhabdus sp.; identical to SEQ ID NO: 3129
  CDS (7175)..(10636)

SEQ ID NO: 3131 - DNA, 26355 bp, Xenorhabdus sp.; identical to SEQ ID NO: 3129
  CDS (11751)..(12305)

SEQ ID NO: 3132 - DNA, 26355 bp, Xenorhabdus sp.; identical to SEQ ID NO: 3129
  CDS (12424)..(14430)

SEQ ID NO: 3133 - DNA, 26355 bp, Xenorhabdus sp.; identical to SEQ ID NO: 3129
  CDS (14478)..(14807)

SEQ ID NO: 3134 - DNA, 26355 bp, Xenorhabdus sp.; identical to SEQ ID NO: 3129
  CDS (15059)..(15415)

SEQ ID NO: 3135 - DNA, 26355 bp, Xenorhabdus sp.; identical to SEQ ID NO: 3129
  CDS (15638)..(17527)

SEQ ID NO: 3136 - DNA, 26355 bp, Xenorhabdus sp.; identical to SEQ ID NO: 3129
  CDS (17700)..(18344)

SEQ ID NO: 3137 - DNA, 26355 bp, Xenorhabdus sp.; identical to SEQ ID NO: 3129
  CDS (18689)..(19654)

SEQ ID NO: 3138 - DNA, 26355 bp, Xenorhabdus sp.; identical to SEQ ID NO: 3129
  CDS (19941)..(20981)

SEQ ID NO: 3139 - DNA, 26355 bp, Xenorhabdus sp.; identical to SEQ ID NO: 3129
  CDS (21153)..(22463)

SEQ ID NO: 3140 - DNA, 26355 bp, Xenorhabdus sp.; identical to SEQ ID NO: 3129
  CDS (26111)..(26353)

SEQ ID NO: 3141 - DNA, 26355 bp, Xenorhabdus sp.; identical to SEQ ID NO: 139
  CDS (25673)..(25855)

SEQ ID NO: 3142 - DNA, 26355 bp, Xenorhabdus sp.; identical to SEQ ID NO: 139
  CDS (25318)..(25605)

SEQ ID NO: 3143 - DNA, 26355 bp, Xenorhabdus sp.; identical to SEQ ID NO: 139
  CDS (14831)..(15349)

SEQ ID NO: 3144 - DNA, 26355 bp, Xenorhabdus sp.; identical to SEQ ID NO: 139
  CDS (2121)..(3833)

SEQ ID NO: 3145 - DNA, 15714 bp, Xenorhabdus sp.; identical to SEQ ID NO: 271
  CDS (3050)..(3856)

SEQ ID NO: 3146 - DNA, 15714 bp, Xenorhabdus sp.; identical to SEQ ID NO: 271
  CDS (1466)..(1630)

SEQ ID NO: 3147 - DNA, 15714 bp, Xenorhabdus sp.; identical to SEQ ID NO: 271
  CDS (2383)..(2775)

SEQ ID NO: 3148 - DNA, 15714 bp, Xenorhabdus sp.; identical to SEQ ID NO: 271
  CDS (2772)..(3053)

SEQ ID NO: 3149 - DNA, 15714 bp, Xenorhabdus sp.; identical to SEQ ID NO: 271
  CDS (3864)..(4700)

SEQ ID NO: 3150 - DNA, 15714 bp, Xenorhabdus sp.; identical to SEQ ID NO: 271
  CDS (4951)..(5229)

SEQ ID NO: 3151 - DNA, 15714 bp, Xenorhabdus sp.; identical to SEQ ID NO: 271
  CDS (5382)..(5711)

SEQ ID NO: 3152 - DNA, 15714 bp, Xenorhabdus sp.; identical to SEQ ID NO: 271
  CDS (5825)..(6208)

SEQ ID NO: 3153 - DNA, 15714 bp, Xenorhabdus sp.; identical to SEQ ID NO: 271
  CDS (6997)..(7182)

SEQ ID NO: 3154 - DNA, 15714 bp, Xenorhabdus sp.; identical to SEQ ID NO: 271
  CDS (7378)..(7734)

SEQ ID NO: 3155 - DNA, 15714 bp, Xenorhabdus sp.; identical to SEQ ID NO: 271
  CDS (10221)..(11777)

SEQ ID NO: 3156 - DNA, 15714 bp, Xenorhabdus sp.; identical to SEQ ID NO: 271
  CDS (11777)..(12373)

SEQ ID NO: 3157 - DNA, 15714 bp, Xenorhabdus sp.; identical to SEQ ID NO: 271
  CDS (12390)..(13388)

SEQ ID NO: 3158 - DNA, 15714 bp, Xenorhabdus sp.; identical to SEQ ID NO: 271
  CDS (13391)..(14755)

SEQ ID NO: 3159 - DNA, 15714 bp, Xenorhabdus sp.; identical to SEQ ID NO: 271
  CDS (14811)..(15566)

SEQ ID NO: 3160 - DNA, 15714 bp, Xenorhabdus sp.
  CDS (6178)..(7632)
atctaccccggcaaaatggagtatgcctcttctatttgcccatcttctgtcggcatatcgggcgttttcaataccaaagtagatgcccagtttcccgtgttttaatggtgcgccatgctctccggtttcgatgccatgccctgcgggttcaacaccctatcaggcgcacatgagtttccggaataaattctgtaaataagccgatagcatttgaaccaccgccaatacaggcaatacccgcatcgggcaggcgtccttctttttccagaatctgagctttggcttcttcaccaatcatgcgctggaattcacgtaccattgttggataaggatggggccccgcagcagtgccaagcaaataatgcgctttatcatagctgccggaccagtcacgcatggcttcgttacaggcatctttcagtgttgaagacccactgtgaacgggaatgacttctgctcccataagacgcatacggaatacgttgggggactggcgttcaatatcttttgcacccatatagacacggcattttaagcccagaagggcgcatgccagtgcggttgcaaccccatgctgacctgcaccggtttcggcaatgatttcttcttttcccattcgctttgccagtaatgcctgccctaatacctgattggttttgtgtgcaccgccatgaagtaaatcttcacgtttcagatataaacgggtttttgtgcctttggttaaattctggcataacgttaaagccgttgggcggccagcatagtttttcagtaagttatgaaattcttgctgaaattcaggatcatcttttgcctcgataaatgcttcttctaattgatcaagggcagggacgagaatttgggggacgaactgcccgccaaaatcaccaaaatacggatttaatttactcattattttcattttccactttctgtctgaatattagttatctgaaagattacgggtagcagcgtaattgttggaagacttgttttattttctggctgcttttaatcccaggctggatttcgacaccggaattaaaatccagtccgtaacaacccaatgcggcggcctgtcgacagttctcagcatttaaaccacccgcgagaacactgttatgttgagaacctttatcaattaatttccagtcaaacgtttttcctgtaccgccgaaaccattatccagtaataagtgatcaatattggagagaccggaaaatacttcagttttcgacatatcaacagatttccagatttcacaattttccggcaataaagaacgaagtgcatcaatatagggctgatcttcattaccatgtaattgaacggctgtcagtgaaagcgcccgggcagtctggcagacaaaatcaacgggctgattctggaatacgccaacatataataaaggaacttcattaataatttgttgcgcttgttgctggctaattctacgtggagatttttcagcaaaaatcaggccaccataaacagctccggcctgcaatgcagctttggcatcctgtggacgggtcaaaccacaaattttgttgtcacccagaatcaatcgtcgtaacgctagatccaaatcggactgaaccattaaagcactgccaatcagaaaaccgtgagcaaactggcttaaatcacgtacctgctggtggctgtgaattcctgattcgctaataacgatagtctcttttggtaaaccggcggccagtttttgggtacgttgtaaatcgatggacagatcgcgcaggtcacggttattgatgccaatgacttttgctcccagagcaattgcccggtggcgttcagcttcattactgacttccgttaatactcccatattaaggctatgtgccagagcggaaagttcgcgataggtatcatcatcaagtacggaaagcatcaacaggatagcatccgcctgataatagcgggccagataaacctgatagggatcaatgatgaagtctttacacagaacaggttggtgtacggctgcactaaccatacggagaaaatcataactgccctgaaaatatttttcgtcggtcagtactgagatcgcagccgcataaggctggtaagttttagcaatgcgtaccgggtcaaaatcagaccgaattaaaccttttgaaggagacgcctttttacactccaaaataaaaacagtctgtttgtgagtcagtgcctgataaaatcggcgatggctcggtacaacagcatccagaaaactctccagcggctgttcagccttgcgggtgatgagagataacgccttatcttcaacgattttctgtaatacattacttttcatgattaaatccctgctgctagtgcgatcactttttcataggcccggccactgtaaatcgtgtccaatgcctgttgtgtattttgccgtaaatcttcctgaccatgtattttcattaaaagagcaacattggcagctaccgcatcgacatgcgcttttttaccttgcccttgtaataataagctcgtcatatggcgattttcttgcggtgttcctccgctgagtgatgatatcgggtgatttggcagcccaaagtcttctgctgttaactgatattggataatttcaccacagttaagttcagcaacctgaattggagcgtgtaaagcgacttcatccatgccgccgctatgtacgaccgcagcacgctgaaaccccaatacctgtaatgtctgagcaatagggtttaccaattccgggctgtaaacaccaatcagggcaagaggcgggcgagcaggattgattaacggaccaagtacattaaacaaagtacgggttttcagttgctggcgaacattaactgcatggcgaaatccgctgtggtactgcggagcaaacagaaagcagatactgatttcatccagtgcccgacgggattcttcagcactggcattgagtgcgataccaaactcagccagtaaatcagatgaccctgaacggctggaaatgctgcgattgccatgctttgccactttaaggccgcaggctgcggcaacaaaagcgctggttgtggagatattgacgctgtttgttccgtcaccacctgttccgacgatgtcgcagaaagggtagtcagggcgtggaaatgaagatgcattggctaatagtgcctgtgcagccccggcaatttcctgaggctgttctccgcgcagtttcatactgattagtacggccgcgagttgaggctcactcagctcgccacaaataatagcagtaaaaagtttttggctttcttgctgggtcagtgcctgggcactaaatagtttttctaaaattaattgcattttcccaccctcccttttattgccccgattcctgtgaattcagtgcccatgccagtgtttgctcaagtaagcgggttccctgtgttgtcaggatggattcagggtgaaactggaatccacaaactctgttctcgtcgtgacgaactgccattactgtatcgtgacaataagcggaaacaatcagtgttgccggaatatttacacccaccagagagtgataacgggcaacgggaagcgggttaggtaaaccggaaaacatagccagcccatcatgagccgctaatgttgatttaccgtgcagaatttcactggcggctgagatattgccaccataggcttcgataatggcctgatgcccgaggcagataccgatcacagggattttaccgataacctgctgaagtaattgtggcatacacccggcttctgaaggttttccggggcccggagacagcatcagtaatggtgatgccatgttttccagttgagccatgattatctcgacggataccgtattacggtagataacaacctgatgacccccacagcgtagttgatccacaagattgtaggtaaaagagtcaacattatcgatcagaagaatatttgccatcagaatgttacctctgtgttatgagcttgagcgatagcgtgaatgacggctctggatttgctctgggtttcctgaacttcggattgtgggacggaatccagaacgatgccggctccgacctgaaccgttgcttctccgttttctacataggcagaacgaatcacaatgcatgtgtcaaaatcccctttaccggtgaaataacccactgcaccggcatagctgccccgacgttcattctcatattgagcaataagttgcatcgcccggactttcggtgcacctgttagtgttcccatattcatacaggcctgataagcatggaaaatatccagatcgtggcgcagtgtaccgaccactcgggaaacaagatgcataacaaatgaataacggtcaacgttcatcagatcagcaacgtagcggctacctgattcacaaatacgcgctatgtcattacgggctaaatcaaccagcatgatatgctccgataattccttagcatcggtacgcatttctagttcaagccggctatccagatccgcatttagttcactactggcattgcgtccacgggggcgtgtgcccgcgattggataaatttcaatttgctggctatcggcatcatatttaagggcactttcaggggaagcaccaaacaggcaaaaatcctgatcctgcatgaaaaacatatacgggctcggattgagtcttttcagggtgtgataagcattcagtggtgctgggcagggtaacgtgaaacgccgggatggaacgacctgaaatatatcacccttccggataaaaccctgtaattgctgaacgatgtcggcatactgctcatcactgcggttacaggcaatttgtataacaggtaatgttacgggcgttaagggttgacgaggcttagcaatgatgttttccagtgcagataaacgctcgttaaggcgctgttcttctgcttctgattcaccaaatcgtgttgtttgcaatatggcgtgctggcgcggatggtcgatcaccatcatggtttctgccagataaaaacagaaatcagggcagcgttgagaggttttgagtatgggaagctgttcaaattctgctactaaatcataggaaaataatccacctgaaaaaatggcatcagaatcttcagccagggtggataattgagtcagagcacgtaatgcatcaaaaacagaatcggcttttaaacggctgtcttcatctaaattttccttaatagcaggaaattgagcctgaagagtgtgtgcttcgagagtgatctgagctttgtctgatagtaggccggctaagatgggcagcagatttttgccattttcagttaacgctgcaaaatcaacctgtcggccattagcggtaatacgcatagcgctatcaataatcagcatgcttttgatagcgttcttactgttaacttccgctgattctaacaataatgttgctggccggttattgcataactcattgaaaagcaacgttggatcagactggtagactgtctctcgttgatttactgaaatattaaattctttacccatcatacccacctcttttgttatctttttctacagaaaattggtataaaaaaacccgcttttcagggcgggttattggcactttggatctcgacttatgtgtgctactcaaccgccctgaatgggaagctgggccaccaacgcatattttgagctgctttcataagtgtgatcatcgtaagtgccttgttaaagtagagtgttagttatatgtgttcaacaagtaaatcttgcgtactagtaaactggttccttgtttgcttgtcaaccgtttttttgatgtatttttcttcggtgtatattgaatgggttatatcgatcagtagtttaagtctataacagatggctcattttttataaatgcaattggttgaattttattctttatgaatttattgtgaattacttctgttgtttttcatcaacggcattattttttaatgagctattatcttatgaaaaaaataaacttatatgccatgttgttttttattaccccaattttttttcataactctagtgcaattgatttagataaaaatgttattgttccctataagataaataaccaagataaaccgaaaggaaagccatttttagtacctccttcttcttattacaatttaacaattaagaacgcgagtaaatatgataaattaaatctttatagaaatgatgatcattgtatgtataattcaggagaaaaaaatattgatttgcaggcaggggacgaaaaaacagaacaaattgaaattagaaacagcgttttttcttttcctgtatgttctcaagtagcaaaaagcattagttggacagcaacaacttattttaataataaagaatataaaagttgctatgttgatttgactttttcttataatccgttcgcgctcctcggcccagggatgggttggttttaccatgttgatacgaaaagaggatgtgggttagaggtttccgccgattgtggtgggaataattgtttaaataatgatggaacacctattacagacgattataacattactatcactataaaagatgataaaaactgggagtcgccaagaattacatctcctaaatcgggaacacagttaagcaacaactatactacaattttagggaaagggctcaatgaagatggaagcttacctgagatttacgcctttgtttggagtgaaacttatccaactcggtctacaggtgatggtgataattggatggcgcaaatctggtggccttgttatatcaagagtgacattcaaattaaagacgtagtttatactactataatgttatatggtccctggtgtggtgcaacaattacttcaatgcaggatgggcaaactattcctgctggaaaatacagtttatctggtctggtgaatagcgatacgattgatgaatcaaaacgtatgcaggttaaaattacgggttataaccgtgatgggtcgatttatttaccaacaaagaattatacgccgactgttgatacggatacaggtcgatggagtctggaagatatagaggctgtttgttccattaagtataaagcttcttcatctgtgtcttcaagctatattgatacatcgggaatgccgggtctaccagaagtcaattattctgtacaaagttgcccggcaaagataaccagcccgaaacctaattccaccgttggcaataactatattactgtttcaggaacaggccgtactgaagatggaagctggcctgagcttgttaccagtttcgatagccatagttattcaacccagcctacaggtgatggtgataattggacagcacatctctggatgccgtgcggtattagcggcactgtgagtatttctggtatgggtgactcgggtgttacatttaatggtcccccatgtggagaaacgattacctcaatgaaggatgggcaaactattcctcccggaaaatacagcttatcgggtcggataaatagcgatacagctgatgatgaaaaacatatgcaggttcaaattacggggtataacagtgatgggtctatttattcaccagcaaaaagttatacgccgaatgttgatacagatacaggtgaatggagtctggaaggtttagaggctgtttgttctattaattatagtgtaaattaacataaaaaacaaataattaataattacaggggtgctattggggtgctgagaaatagcacccggatatgaattccaatcaatttactttcttcttcgactgcattctttccacttcttttgctgccagctccctttgcttatcgatgtactccgcgaggtcatgcacatgaacaattctcggcgacttctgactgtcattcattctgtatgtcggaaattttagcttaccttcaatagccttacgttctgctgtcgctggagtcaatttaaggtacttctcggctatagctgacagaagaatttgcgaagtttcaaactctgccattaataagaataccgtattcattttcactgctcccctcctttctgatacccgctctccaatatcaccctcgccacactcgccggtgttgctttatcactccacgttgcatcgaaaataatgtcgctcagttccgccatgagaatatcgttcaaattcttcggtcttgcagagtagggcaccccatcgggcacaccttccataatgtcgatagtgagctgagctatttctgttgcttcccgttccggcttacggtatccagaatgccagactacatcagtgatatcagacggatcaccccatactgaggcaataatctgagttagttggaatgagtgactgaacacttcatttttttcctgatggcggtgcatgagtttcatttcctctccttccgaataatccgcacataataagccagcactgatttagcactgaatctcatgtggttgagtggtttaaatttgggggtatgtttatctagaattgcggtgactgatttgtcgtcgtatttggatagtttctcaatttctttaaggcaatcccttgccaccttcctcctggcgttctcgaattcgttagtcatcggtaagtgtggtttttatttccgaagctggaaactcaatatcatttaatgcatcctgtacagtatcagttatggacaaaaccaaactttcatcagataacttgtcatcatcataaaaatcacaaaactctttagctgatttacgagatatttcaattgatatttttggtatattcacgttattttccttatttcgttattacctatattgaataggtattctttatctacagtggttattaattttcgtggggtaataaaaggctgccaaattaaaaacatggagccttttgtatttgaatttctctttctttgctctacgggtataaattgaactcttccacccgttattaacctgacctcatcaaccgtttccaatgccaacttaaaccagcccacagaggtatcggacggaactaacatcacgacgggctgcaattgcttttggcattcgatagcggctttttctacccacggactaatattggaataaggtgggttgcaccagatagcaccgtaactcacccagtcagactccaatgcattatctcgttccgtgagataatgtgtgcacagggtattttgagcagatgcggctacatcaagggtaaagttaaattctaggtcgagtgctttaaataacgggaggggagtttgccataaatctttaaattcgggtggagtattgctaccaccaaaatctgacatgttatttctcgttatttgtttgggtgacgtattttataaactgaattctgggtttttatatacccgtccgattcataagtttcgatgttccgaactaaagtggtaattatttcacttccatcagggaattctttcttgctgtcatgaaatactttcccgtacacaatccctttaccatctttgctttttggaaaattagttatttctatttctgccctgaacaccatatcttctatttcccgcgccaactcaattacatcattgctcattattaattctccgaaattcaattacccaaacccacggattagcatcccaactttctttgtcgtagattgaccaccatgtttgtgcgaaccacgagcgagaaaaatcaggaaaaccaaactgctgtgatacttcatctattgatgtgtggcttggtgggccgccttctgctatagcatcttttttgcttatactttgtactcgttgaatccaaatatcagtaatctcaagcttccctttgatattgccgtctttgtcggtgaagttaataatgtcgctaaactgaccatacgggcagtcaacatcaataaaaccactttgccatgcgccattaactacttcttcaagagtaaatccttctcctatcgaacccatttgacttagcctttgttcatccagctgaggctgtggtttaattggtcttcgagtctgtgttttagttcctgccaaaatagcgtctatcatttcatcattaaatttcagtggcttcatttaaactccctacatatactctctgctttcttacacatatcagtatcaaaccagccgaagtgacaggtgttaaaactgatgtctaattgacgtgctaaccattgatacgcttccgtgcgttctaaattacgactcctgacgacatcatcaaagtatcgatgtgctgatactctagcctgacgcgttttcttatccgccagtgaccccatcgggatatcggttcccggatgaatgctgacacgcgcgccacatgtccagcagtggtataaccacggccagcggctgtcatggatgcgtttaaagacattcagatgatgctcaatcatcacgtgcctgccacaatatcggcagtgtgtcgggatggggtaggggtcgttaactctgaggatcgcttttggatttgggttccatggggtatacatgcaacctccttaatgctgctttcacggcattacataccaattaaatgtttctacatttaccaaattagaacaccatttcgcaaagagacatcatcaatatctacccctaacgcttttgcaacctcatcctttagtgataaatactcttcatcgaaattttcagatgtgatagtggcggtgtgaatttccttgccaataaaatagaactcaccagaaaaataagagccatgacgcgcataaccttcacaaactaaatcttcaatttcttcatcgctaatacttacattttccagttcagttccgacaattagttttgaatcataattagtagacataaataatcctcccgccgcacagcagcgtagtgatagggtatggggttaaagagttctatttggattgccgagcacaaacactcggtgctgaaaatcggtaggtaggtaaattcttcctcttgatatcctttcatgatttttagagttctttctacttttcctgtctgattccttatggcactcaacacagcatttatttctaacatacctcactgtgtgacctaatttacacggcttaccttcaaaatatttattcggttcctcgatcatcagctttatctcccatgctattgagtttatcaacctgcttctgggttgtttctggtttatcgaaccaatcatctacacttgacattccatcacgcaaagaagcgtagattttcttcatttgtaccatctgagcggggcgcattgcctcaacacggcactgaatacgtttctgaatctgatcactggttacgccaaattctgttttgaatacgtcaaccattttcttgatagactctggcgatgtatcggcgttacttttgagtgtcacatcacactgattaaccgcagcttcaataacatcgcccggtatgacactgagaatacaggcacgtaaccgccttgagccttggttggctactaattcatagatatcgcgagggtcttccagtttctttttaccgttgcgagtaaagcgaatatgagggacagtaaatgtttttacctgtcgagtattcgtctctatatcccatgcaaaggcttcaacagtcgactccccgcttttttgttccagctcacgaataccgaattgaatatttccccagttttgagcgaccgcttcagccaatctaatactggggccagtaacctcagcaccaccacgtgagtatgaatacaaggcactctcagccaatgtagcgcgagtacatgcctgtaatattttgtccatagcaacaattgggtcacgcgggaattttttggcaatcaccattgcggcctgtacttcttgtatcgcgcgctgctgttcaactgctaccatcccctgcgtggactgtgcttgcggtacattagaaccaaatggattgataacgttactcatctcttctcctagcccattcagggcgttgaacaacttcaaaacctaagccgaaatttcccttttgtcggcactcgtggtacgtatttaagtctcttctgaacaaatcaaaaccaacttctctgtcgtactgatccagcacaaataggcgtaccggatatttaccgcaatcgatagactcactgactgctaaaaaacaaaaggttgggataattccgccggtatgttgtcggtagccttcactatacatggcatcctgaacgtgatagcgatattcctcgatgttagaaggaaacctatttatgccagaaactttcttgacgtctacaatgagattttcatcaggtatcagtttatctgggcgtattcgacataattcgccagtttcaggatcgtcccagtagatagatgtttcgcatgttccgtcatgctcaaatatttttcttcctcccggatgcgccataacactgtctcgcattaattgcagttttcgatgctgttcatagtccattattatttttcccgtactcttgcatccctctatgaattctttctcttcttgttttccttcattagtacgacgattaaactctggtgccttaataaacctgttatcaaattcatccggttccaataacaagcaatgcaaagctgttcccatatcaagagcattccttttctcctcatcttcaggcgcgtctctgtcccagattaaaagagccggtgtttttgccaccttatccagcatcgacttactcaccccctcgcccttgtgatagtcctcattggagatatcgtaataaatgccgggcttcatgctgccctcccaatgattttatccttcaggcctatcatcacgacctcattcaggacacctacgtatctatcccacgcagaggggttgcttttgaatatcgggttaagtactttgccagcctcttcaggtaatgaattatcgataaaactcaagacaattttctcaacctcttcgtcgagttctttttcggtcatttcctgacaagctgctgccgtaataatatcgtcagcttcattacggcggtcattccaataggtttcattagagtcgtatctcatacgacctcctcttcgaaatactgagcaatagccatgacttcatgataggtatagcctgcctttttcatctcttcggctgctcgctcctcatcgcaatgtgttcggatatgggtatacatatcactgatatctggactcgaacgtttagcatactcagtgaatggtatatcgagtaccagatctgcggggtaggtgaacgtgatttcagtacgtccgtgcaagactctgctggttgtttctgcataggtataacttagagtgatggggtacataatgacctccgttaagctggaataagcacaacaattgaaataaggaataaggcgagacggcgcttccatgcgcgccggttcctgactgcttgtggttttttgggtatgaccatgcaccaatcgaatgagttattacgcatataaaaagccctcgttagtgaaaacgatgcgttatttttgggttggattatttagcgccgagacttttagcgaaattaattgccgattccaaagaaccgcgcttgacgatttgcttatactggtacttatttgtggttggataaaaaagtactttcccttttggggtattaaaacgaacagttccgttattatcgatagtgtagggaatatcaatcgacgaatatttatctctattgattgaatgccgttcctccttacgtctttttaattcctccctccacactctataatcatcaccgacatcacccatggctattcctttttctgagtcagagcaataagggcttttgcgtgcaatatcgccgattccttatctagatgaataattcctgaatttagtctttctgagtcagttttataccaatcccaacgagatattaaataatcaggaactccatttataattgatggcataaaatattcatttttatcctctaacttgaataaatcagggttgctaactggctcaggaacatcatattccccgattttgatagtgcggggtttgaggcggtaagaaaataattgatgaaatgaggtatcagataaacaagattcccattcgccattaacttcatacttaacctcaaaatactcccacggcctatcggtaatatgagacaacctagcgtactcagatattaaatcagcgtgaatgtgtttcggcattatctatcctccaaagacatagctccatcttctggataatcagtgcaatagacccccatttgttcgaagtaaatcccaccttcatcttgaatgcctactttaccgatggtatattcttcattcaatctatcttcttccactttctcgtaagaaataccagccatatcacagatatactgtatttgtttaattgttagattaattctgctcattacactttcctatattcaggtaataaaaagccccgcattggcgaggctgttatttaactcaccacagcccactcggaaatgagctggaattagttaaatgcaaccatagttgttacgtagatataaaggaatatcattaagccatgagcgataatgcctacgatacatcaagcaaatttcaatatgaagtctacgtaaaacagggttatctcgataaacaattaacttactacgataatggtcatatccttctttatcagattgagcgcataacattgcaaatttagcttgagatttagtcatacttacaccctcgcagtaacattccccgactccaatcgacggcgggatttggttttggttgaaattggttttttcgatggagcaccgttaactgtcgtaataaagcaggttaatgcgttaacagtattgctttcctttatttttggtgataaaagagtcacttatgtctcatttttacttattaatccctttttatgatgtaataacttaacaagaaaaggaaatagatatgagtgggttacttgacaagctgtgttcttgtggtggaaataatacttcatgctctatttgtgggggatgggggtatatagattcagtatccaccaatagaatagttacgagtgattgtgataccacaggagtcagttatcagcccgctcaaatgaaacaaatagctaatttagagcttgatgcaaaaaaagatactgcaaaacaatgtaacaagaatattgcagatcctgctaatagtaaaaaatctaaaaaacagaataagtacaaaaaagagataccgttaatatgcagcttatgtaaaaaagaggtaaaagatttatctacacattattgtggagtatccaaagaaaaagcacataaattcttcagtaagataaattttaaataatacctcatgttcttacgctctagctgtaatatcttccgattttagacgagagcggagcttggttttagttgaataaagtgctacttcactcatacagcaagagccgctgttgttgtcgttcttaatctctttcttcaactcaatcatcaattgcgccagtacatcaatttcatctactggcttaatgattgaatccaaaatttcctcgatcgttcttggtgctgtcatccttgcttccatgcggttttgcttccgtctcaatttataacgttgtcgtgagttcatatgtcctccgcaaattgattttgatggtgtggtgatcgctacgttgtggctctatcgcagatcgcgcctcccgtagtcctgatacagtcatcacctgcgcttgaggactgattacttttaggctcagtcaccacaccccaaaaccaacttgttttggcctcccgttttcaaggaggaagttaaattgttaaagagcgaacttccttttac

SEQ ID NO: 3161 - DNA, 28262 bp, Xenorhabdus sp.
  CDS (1212)..(2333)
gctttggatcgcaaagtgcgaatatcgagagtaccaatgtaggggaaaatgtattgctcgaaacctcgcataattcggtctcgatggtcttcactccaccgtttattgctggcgtgccattcacgggcgatccgttcaaaagtatatgcaccctttgattcggcttgtgcgtcttttttctctgctttgggatcaatcccttgagcgagcaattttttagcttcatcccgtttagcgcgagcatcagctaatgaaacggcaggataaacaccaaaggccaaccgatcttcttttttatctgtggggcgatgatacttcatgcgccagtatttagaaccgcgcggcgtgatttcgagatacaagccagcgccatccgctaatttataggatttctctttcggtttcgcagtctcgatttgtcgggcgtttagtttcatttttggggcacatttacaatcgaagtgtaggtgccccaaattatgccccttggtgcatgttgattgcaacagactggagtagacgtcaaaataacgtaatttgttgacttattgggattttcagggagtttgtagacttgggtagacgttagaaaactaacgaatggtgccgaaggccggactcgaaccggcacacccgaaggcggttgattttgaatcaactgcgtctaccgatttcgccacttcggcactgaaaggggtcggaaaacgagagccattatacttgcccgaagaccattcgcaacacttatccttccaattttgttcaagtgctgaaaaaaaaagcaaacacaataactttcacataaatttgcttaaatttaagcccacattattctatgtaacataaatcgaccttttataacttcttatcatcgatagacaacccataatctccttatataattcaaaataaaatactataaaacactgctgttgaggtaaatcagtatgacgcttatcacttggatatttgcaggtattctgctgggttttgttatcggtgccgttattgcgatatttaagaagaataaataacggttgagtttcgccatgcattacgctccctgattggttaatccgaaaatgaacaaacggctctataaattttgtgttgtttcagctctctcattagcgatttcagcctgctctgcttctggcaattcgcaccagaacaaaacgccgcactcaggtaaacagcctacaaaatgggaagtgtttgacggcgatgtttcaaaccggaaaatggcttcagcgctggttgaagagtatgcacagtcaatctttaatgaaggtaatccgctaggtatggcaatggtagtgattgataataatcaggtcatacaccatagttttggggaaacttatccagggagcggcgtcaaacccagccagaattctttaatccgcatcgcttcaatcaccaaactgatgaccagtgaagtcatgatcaagctagcagagcaaaagcgtattaaaatcaccgatccattacaaaaatatacttatcatggtgtgcatgtacccgattttggtactgatcagcctattcggttatatcatctggcaagccacaccagtgggttaccacgggagcaacccggaggaaaatgggggcgtccggtatttatctggccgactcagtctaatcgatggaactggctgaaaaatgcagatctagaaacggcccccggcacaacggcttcttattctaatctggcctacgatttattagctgatgccctttccaaagcaaccggcgaaccttatagccgccttctacatgaagaaatcactcttccctataaaatgaaggatacaaccctgacaccaacccctgctcagtgtgcccggttgatggaagggatcaaatccagcccttgcctcaatactatcgccgcagcaggcagtggcggcatttattctactcccgccgatatgcaacgctggatgcagcagtttttatcctcccacaatcatttgagaaaacagactgccagccgtgaacagggcatttattttaaacgcgctgagctggcttcaatcagaggaatggatgtggcaggaaaagccgatggtatcgggcttggctgggtttatatgaacggtaagaaagatgttccgggtatatatcaaaaaacaggcggtggcggcgggttcaatacttatatggcgatgatccctgagcagaatattggcgtctttatcgtcatgacccgaaaagagcacagtaagtttcatcaggtgactaaaggtgtgaatgagctggtcactgcactggcacagaatcataaccagattccagagcaacccgtgatggagctggtgaaaaaataggtgccaataaaaataacagcctgagtttatatcatcaaaactcaggctgtatcagtctgatagaagctggatatcaatttgtggctgctattttcttttcaaaagtaagtaaacactcactgtaaagaacagcaggctcggcagcaatgcacccaacatcggcggcatgctataaaccagactaagtgggccgaatatctcattgagaacatagaaaacaaagcctgagctgatcccgaccacaaccctgaatcccataggaacactgcgcaacggcccgaagataaaggaaagtgccatcaacatcatgaccgccacggataacggcgcaaaaacctttttccacatattgagttcgtagcgcccggcatcctgctggctctgtttcagataagtaatgtattgatacaagccacgaatagaaagcgcagtaggctcaagggaaacaacccccagcttttccggtgtcagtcggcttttccagtcagcagaaatgtactgtgaaccggtgatccggccaaaatgatttaaatcagactcttccacctgagataacttccattgcgcatttcccgtatcatacacagcggatgccgcatatttcactgacaatagctttttgtcgttatcaacatgatagatactgacaccgttcagagagctatccttccctacactttgaatgtagacgaaatcattaccatcttttgcccaaagccctttggaggtggacatcaaagagccaccatacatcttctgtgaacggaagttacgggcgatttgttccccttgtggagcaacccactcaccgatcaccattgtcagtaaaaccagcgggatagccgttttcattaccgcaccggcaacctgaagacgggtaaaaccagaagcctgcataaccaccagctcactgcgggttgccagcgctcctaaacccaaaagcgctcccaacaaagccgccatcgggaagaaaatctggatatctttgggaacactcagcaaggtataaataccggcagaaagagcggtatattcgccctgcccgactttacgcaactgatcgacgaacttaataatgccggatagcgacaccagcgtgaacagtgtcatcagtatggtttgcaggattgtccgcccgatatatctatctaatacaccaaacatcaggcagctccttgagttttaaagcgtgaacgcagtttacgcatcggggtggtatcccatacgttaagcgccagtgccagagcaaaatacacaccgttaaccagccacatccagatcatcgggtcaagtttccctttactgccattagagcgcagggaactttgcagcaggaagaaaatcagatagagcaacatggctggcagcatactgagtacgcgcccctgccgcgggttgaccgcactaagcggaacaaccatcaatgccataatcaggacagatgcaatcagcgtcagacgccagtggagttcagaacgggcatctttatcattgctatgccacagctcagccattgatttttgttcaactttaccgctgtctacatccgggttttgatgtccgataacggcacgatagtcgttaaaatcggtaatgcggaaatcacgtaacaaggccgttccctcgtagcgagttcctgtatgaagcaccgctacctgattgccgttgggtaacgcttccatatgtccgccatcagcaatgacgattgaaggccgctgattatgcgtcgggcgaagctgggcaaggaaaacattctcaaaattattccctttgacgttaccgatatacagcaccatattgccatcattagaaggcttgaactgcccttccattattgcggcaaggcttgggtttgctttcgcatctgccagcacttgctcctgatatttagatgaccacggagtgaaccagataacgttggccgctgccagcatcgcagtgagcagagccagaatgagggcggatttcaccagcacgcttttacctaaaccacaagcatgcatgacggtaatttcgctttccgtatagagtttactgaatgtcattaacaccccgagaaacaagctcaggggtaaaattagctgcgccatctccggcacacctaatcctaacaaagataaaactaaatttgcgggaatattaccttccaccgccgcgcccaatacctcaactaatttctgactgaaaaagatcagcaataagatgaaaagtattgcgatttgacttttcagggtttcccgtaccagatatctaatgatgatcacgcttattacgcctgtgaaaacttgtctttttgcaggaaagtcgctaacttcgtcgtatatctaccatttatatgaatcagtttggcttccccgtagctaaaatgataccaaagcattccatatatttgttctcaattagagcatacttatcgttggctaagtatctaaaattaatatactcagcttaacatagcagagaactttatttgggatgatttaatgcggaacgtggtattttagcgattgtatctgtctttgtctttaagattcaggagaacgcatggagtttagtgtaaaaagcggtagcccggagaaacaacgcagtgcgtgtattattgtcggcgtatttgaaccgcgccgtctttcccctatcgcagaacaacttgacaaaataagtaacggttatatcagtgccttactgcgccgcggtgaacttgaaggcaaagtggggcagaccctgctactgcatcatgttcctaatgtgctgtctgagcgcattctgctggttggttgcggaaaagagcgtgaactggatgagcgccagtataagcagattattcagaaaaccatcagcaccctcaatgaaaccggttcaatggaagctgtctgtttcctgactgaattacacgtcaagggacgtaacaactattggaaggtacgtcaggcagtcgaaacagcaaaagaatcactgtatgtcttcgaccagcttaagagcagcaaaaccgaactgcgtcggcctttgcgcaagatggtcttcaatgtaccgacccgccgcgagctgaccagcggtgaacgtgccattcagcatggtcttgctattgccgccggcattaaggcgacaagagatctggttaatatgccgcctaatatctgtaatgctgcgtaccttgcctcacaggcacgccagcttgctgacagcgctgaaaatctggttaccaaagtcattggtgaagagcagatgaaagagctgggcatgaatgcctatctggcggtaggtcagggttctcagaacgaatctctgatgtcggtaatcgaatataaaggcagtaaagacccgaatgcgaaacctatcgtactggtgggtaaaggcctgactttcgattccggtggtatctccctcaagccagccgatggcatggaagatatgaagttcgatatgggcggtgcggcttctgtttatggagctatgcgaattgtggctgagctgcaattgccgattaatgtcatcggcgttctcgctgggtgtgagaacatgcccggtggccgtgcctatcgtcccggagatattttaaccacaatgtccggccagaccgttgaagtgacgaatactgatgcggaaggtcgtctggtgttgtgcgatgcactgacttatgttgagcgtttcgagccagagctggttattgatgtcgccacgctgacaggtgcatgtatggttgcactgggcagtcattatactggtttgatgtccaaccataatccactggcccatgaactgctgaatgcgtcagaacaggccggagatcgggcatggcgtctgccgttgggcgatgagttttccgagcagttggagtcgaatttcgcggatatggttaactcctgtgggcgtcttggcggcgcgattactgccggtgctttcctgtcgcgttatacggctaaatacaattgggcacatctggatatcgctggtacagcatggcgggcaggtaagcagaaaggagcaacaggtcgtccggttgcactgttggcacaattcctgttaaatcgtgcaggtcttaatgctgatgattaatacccctccgccattttttgcataataatatggcgtatacccaacagatttcaggttacaacctgaaaaatgatggcgataaaaaggtattaaagaaaagggtattgcagcagcaataccctttttccgtcaccttgcctgtcgtttaaccatttttctgtaacctattttcgataatcatgagactatgaaaaacgccactttctatttattggaaaagatgtcaccggaacaatcatcgtctttagatgatttacagccacatgaatggctggcatgtcagcttgccgctgaccaatggcgtgcagggaagcgggttctgattgcttgtgaaagccagcagcaggccgaaaagctggatgaagtcctatggcagcgagagccgggccagtttgtgccacacaatcttgcaggagaaggcccccgttatggcgcacctgtagaattgtgctggccgcagaaaagaggcaatgctccccgtgatattctgataacactgcttcctcattttgcagactttgccacagctttccatgaagtggtagacttcgtccctattgatgaaaatctgaaacagttagctcgcgaacgatataaatcctatcgtagcgtcggctttaatttgaccatggcaaccccgccaacctattaaatatcaagataaaatggaaaagacacccgctactaaaacgcaatctgagccatctctcgataaaacgtataacccgacagagatagagcaacctctttacgatcactgggaaaagagtggttatttcaagccaaacggtgacaccagccgtgaaagcttctgcatcgtcattccaccgccaaatgtgaccggtagcctgcatatggggcacgccttccagcagactatcatggatacaatggtgcgttaccagcgtatgcaaggcaaaaacacgctgtggcaggtcggtactgaccacgcaggtatcgcaacgcaaatggttgttgagcgcaaaatcgcagctgaagaaaacaaaacccgctacgattatggccgcgatgcttttattgacaagatttggcagtggaaagcggaatccggtggcacaatcactaaccagatgcgtcgtctgggtaactctgtggattgggagcgtgagcgcttcaccatggatgaagggttgtcaaaagccgtcaaagaagccttcgtacgcatgtatcaggacgacctgatttatcgtggtaagcgtctggttaactgggatccaaaactgcgcacagcaatttctgatatcgaagttgaaaaccgcgaagtcaaaggttcaatgtggcatctgcgttatccgttagctgatggcgcgaaaacagccgaaggcaaagattaccttgttgttgcaacaacccgcccggaaacggtgctgggagataccggtgttgcagttaacccggaagatccacgttataaagatctgattggcaaagaaatcattctgccactggtaaaccgccgtattcctatcgtgggcgatgagcacgctgatatggaaaaaggcaccggttgtgtgaaaatcactccggcccacgatttcaatgactatgaagtgggtaaacgtcacagcctgccgatgatcaatatcctgacgctcgacggtgatatccgcgaagccgcagaggtgttcaatagcaatggcgaagcttctgacgcttattcaaccgagatcccggctgaataccgtggaatggagcgttttgccgcccgtaaagctatcgttgcagaattcgaaaagcagggtctgctggtagacatcaaacctcacgatctgaccattccttatggtgaccgtggtggtgtagtcatcgagccaatgctgaccgaccagtggtatgtccgcactgcaccgctggcaaaagtggcaattgaagctgttgagaatggcgacatccagttcgtaccaaaacagtacgagaacatgtactactcttggatgcgtgatattcaggactggtgtatttcccgtcagttgtggtggggccaccgtattccggcatggtatgacgcagaaggtaacgtctatgtgggtcgcaatgaagaagaagtccgtcgtgaaaacaatctgggtgcagatataattctgactcaggacgatgatgtgctggatacctggttctcttccggtctgtggacattctccactctcggctggcctgaacagactgaagcactgaaaacgttccatccgaccgatgtactggtcagtggcttcgatatcatcttcttctggattgcccgcatgatcatgatgaccatgcacttcatcaaagatgaagacggcaagcctcaggtgccattcaagacggtctatatgacaggtctgatccgcgatgaagaaggccagaagatgtctaaatccaaagggaacgttatcgacccgctggatatgattgacggcattccgctggaaaatctgctggaaaaacgtaccggcaatatgatgcagccacaaatggcagagaaaatccgcaaacgtactgaaaagcagttcccggaaggcattgaagcccacggtactgacgccctgcgtttcaccctggcggcactggcttccaccggtcgtgatatcaactgggatatgaagcgcctgcaaggttatcgcaacttctgtaacaaactgtggaatgccagccgtttcgtgctgatgaacaccgaaggacaggactgtggtcagaatggtggcgaaatgtcactgtcactggcagaccgctggatcctggcagaattcaaccagacagtgaaagcttatcgcgaagcgctggatacttaccgtttcgacatcgcggctaatattctttacgaattcacatggaaccagttctgtgactggtatctggaactttccaaaccggctatcaataaaggttctgaagcagaagtccgcgcagcgcgccatactctgattgaagtgctggaaggcctgctgcgtctggctcatccaatcattccattcatcaccgaaaccatctggcagcgtgtgaaagtggttaaaggcattgatgcagataccatcatgctgcaatctttccctgaattcgatcaggcgaaagttgatgaattagcgctgaacgatctggagtggattaaagaagcgatcattgcagtacgtaacatccgtgcagaaatgaacattgcgccaagcaagccactggaagttctgctgcgtgaagcgaatgccgatgcacaacgccgcgttgctgaaaacctgaacttccttcaggcaatgggccgtctctcctctgttaccgttctggcagcaggagaagaagcacctgtttctgtgaccaagctgatcaacggtgcagaagtgctgatcccaatggctggcttagtagacaaagatgcagaactggcacgtctggataaagaaatcgagaagctggataaagaaatcagcggcatcgaaggcaagctgtctaatgaaggatttgtcagccgcgcaccagaagccgttgttgccaaagagcgtgagcgtctggcaacaaacaatgcagctaaagaaaaattactggcacagaaagtaactattgctgctctgtaatattttctgaattaaattaagccactgtatatttgcagtggcttttttttgattgctagctattgggatagaatacatcaacatgaatataatcttcattcagttgataactctcttttaatagctcagacatatcactgatcatattaggagaaccacacatataaacttctatctgattattctggtcaatttctcttttaaagacatcctgcacatacccacaatggacttcgggatagtcttcttcatctgaccgtgataaagccatatggaaatagaaatttcctaatgtgtttttccagttatctacaatctcagagaaatagtgatcagcttttcgtcttcctccccaaaaaagatgaatttttcgttcattgaatacgccagattctattatggattttatcggtgcaaatcctgttcctgtcgcaacaaaaacaatatctcttacctcatcatgataatccgaaataaaatcaccataaggcccgtatatccacaatacatcattgactttcagcttttcacaaatcacatctgaaaacacgccatttttattcttagctacatgaatttcaacatacccatcatccttcgggatattagctacagaataataccggcattttccattagggacttctataccaatatattgtcccggaataaaatccatcttagatcttttcgataacttgaatcttataacagtgattccgggagttcttgttatatcacatataacagcgccttctttggtatctgaaagcgttttattatcaccatctgcttcacaaacaatattgctcttggcaatcgcgcagcatggtaaaaagtaattatcgtccagttctttctttgttaatccaattttattcccgaccgtatactctatatcaccggataataactttaacttacaaacccgacaggctcctaaccggcaaccattttttaaagaatgtccgttattttcggcttgttccaatatagttatgttttcatcagaaaaaaattcgatttcatttttattaatactaacaaaatgtttcattttacaattaggatcattccatgccattcaaacattcaacatacttcttcccggcgataataaattcttccggtgaaaaaccgccgcctgattcttcaataataaaattcccctgataaccttcactcaccatataggataatactttgtgatagtcgaagttgccttcatccaacggtaagtgaacgtgttcgccattcagtacatcattgaaatgcgcattcctaatatagggcagaattctttttaacccttccttatattctctggtactgtttttatgcataaatgattcaaaatgcacaatgtccagagtcaggaaaacaccgtactgatggcataagatctcatgctgttcatcacttagtacgatatacttctctctgtcacttccggtattttccagcaggatggtcatcccattttcttttgcaacttctgataagttctggatagatttagacaattgctgaaaatcaaaatcagaaatcccattatcatcaaattcaagatagccgggatgaatagtaatatattcagcaccgatcttcttcgcttcataaatgaatgattcaagataatcaacagcaataattctgtccaattcttcactattagcaatatctgttttgatgccgatataaggcgcgtggacagaatagtaaagatcgttatcttcttttaacttattcaatacagcaactttctcattccatttctcaggatgataatcaattaagtctcttagctctttttcaaattcaatttcaatacgcttaaaatatttacttaactgttcaaccaaaacgtctatatctgccggattttcaaaaatgtttgttgagaagccaattttctgagaaaaattcataaccattcctattaaatatcttgctgagaaagtttactgcttgataatctattaaaataaaattttcgttccaaacctaatgtatcagggttgataaattcgtaagtttcagggaattttttaattccattttgatgaatacctgcgcaagttgaaaacgcatatttacctaataaaggtttattaggatgaggcaatttattgataatgtcataataaaaattgcataggtcaatgagatctttcatatcaatatctgctttaaacctatttttatattcacttctataagacagaattgccattatttcttcaaacgacgcattaccacagcgctcaccgactccacccagtgtcacctgcacttcatctgctccggcatcaattgcactgattgagttagcaaccgccagacctaaatcattgtgacaatgaacagagaaccgtatacccggaaacttatttttaaaataactaatcagattactgatatataacggtgtagcacaaccggtggtatcggcaaagcagatatcgttaacatggtaagctgtcagtaactcaattttctcttctaaaagatcaaagctccctcttgatgagtcttctaaaatagctgaaactttacctgtataaacactattagctatatattccaaagaatccttcagcatcaataatatgctgtctttggtggaatcaaacttttttctgatatgtatttctgaaccaacacacagcaaatttaatttgggctttttaaatctgcttaaagctaaagttgttctttcaatatcatcgggttttaatcggcataaagcggcaatataggtatctttaaaatcgatatcagatgatgcggcctcataaaaaaattttcgctatcttcatctgttaccatgccaatctcaatagaatcaacccctaaatcaattaaacgtggtaacaatttcaactttttttcattcgagagtaaacacccaatcccctgctcaccatctctcaatattgtatcaaaaaaacatatttttttcattaacccaccatgatattaatgtaaataaaacagatgatataattaagctctttaatatagagcctgtacgcttactgataaaataagcagttataaccgtaataattgcaagagcatacttaatttcaaaatgataaattaactcgctgatttttatattaccaagagaaatatttacaataatactgccaaggataaaacatactgaataatctaaagaggtaataagaaaaccatctttcttaattttcttgttacccattaaaaatggtataacccgaagaaggtaactgattgctcccatcaataagatcataatcatgttcaggctccctttttaatttttaattcataaaatgcaatgcacattccaaccataatgggtattgctatatccataagctgaatatttaattcattgatgaatggtgcacataacccacctaccagcgtagcaaaaacagacaaatcttttccggcacgcttagcagtaagggatgaaaaatgaatcggaattaacataacaagaaaaagagagattgaatcgtaattcagataatctgaagatacatatcccaataaggttgcaagaacagcaataacaaaactggggatagatacacccagataataattaaattgcgcctttccttcagggatcttctccgaaactaaatgagcatgagttacagtgtatgtgctggcactgaatgccaacattgacaatacaaccttgctttttgagatgccatgaaaatactgtgacataaccatcgacattagaaagaagcgaaagttaatgatcagggtgagtattatcactgataaaaatgcgccattagcaagataattaacaaccgcgacctgcaacggtgcagcaaaagtgaatacagaacccaccattgtctctattaatgaaagccctttattttgatacagagcaccaacggatgcaaaaatgaggaaaaaagaaatgcaaacaggtaatgaatctaacattccttttctaaataatgaactttgcattgaacaccaacttttaatatcaataaattcacacaaaaaatcataatatggaaaaacattacattaaaaaaaatgatgcttcaatgtttttgacgctatgttattgagaacaattattattaatgtggcttgcacatttaattacttttattccatgttaataaaaccaaataaacatccccgccgcaagcagcggggtattccgatatgaaatcacccgcttcgcatcgttcaactcttatttgctcgtcgcaagcgacggggaattaaaccctgagagattaaatagcaaaaacaaaaccatttaaaatcaaaaggataataaaattaaaaaaacaaatatgttttttaaaaaatgtttctctattattaaaaaatggaagtaatcaacattggttacaagaacaggtatgaactattagttttctcacaatattttcatataggaattaaaatacaatatataatttcctattatatataaatcattgggactaaaaagccagtcatgtattatatttgataatagctctcattatcaggaaggtaaaatgaaaattatccataaaatattattagcaggaatgattcaactgggctttacacatttaacttatgcagaatccaccctgaataagatccagtcctctggcatattcaggatcggaacagagggtgcgtatgctccattcagttatcatgatgcctcgggaaaattaactggatttgatgtagaaatcggccgtgaaattgccaaacgaatgaaagtaaaacctgaatttattgaagggaaatgggatgggctgattgctggtctggatgcgggacgatcagatgcagttatgaaccagattgcgattactcccgaacgtcagaaaaaatatattttctccttgccttatgtcatttcagaagctgttctgattaccagaaccgataacaataagattaaaacgtttagtgatttaaaagacaaaaagtccgcccataccttaaccaataacttcgcccagattgcgcgtcagcacggagcagaaattatcgctacaaatggctttaatcaggaagttgagcttgtcagtacgggccgtgcagatgccaccatcaacgataagctatcctacctcgattataaaaaacatcgcccggaagcgccggtacaaattgtggcaaccgatacccatgcagcacagacggctatactcctgcgcaaaaacgataccgggttaaaggctgcaatcgatgaagccattactgaaatcaacgctgacggaacttaccaacgcatctgggacaagtattttagtcactgatccgccagttctaagctataactttattttatataaggatgctctcttattgccatatcatcactaaaacaatcttataaaaaataaatactttttgatgttaatataggaacgatatatgactccatcctggctcagcttagcactggattctctctggccgatgatttacgcaggcctgacattcactatacccctcaccctgatcacatttgccctcgggcttacgctggggtttatcgttgccctgatcaggctttacgggcctaagccattggttgcagtcgtacgtttttatgtctggctgatccgcgggacaccgttattagtgcaactgtttctgatattttatgcactgcccagcatcggcattacactggaagcattcacttccgccgtgattggctttacgctgaacgtcggtgcttatacatcagaagttatccgggctgcactgaattcagtgcctaaaggccaatgggaagcctcccactctatcggtatgagttggtggcaatccctgcgtcgtatcgttctgccacaggcagcaagagtttctattcctccactgtcaaatacctttatttctctggtaaaagatacctcactggcgtctgttattaccgtgccggaaatgtttctggccgcacagcgcatcgccgctgtgacataccagccactgatcctatataccgaagcagctatcctttatctgctcctgagttcgctgttatcagcactgcaaacccgtatggaaaacaagttctcccagcaatacgctaaaaatagcaataataaggaagccaataatgattcagctctctaacattgaaaaaagtttcgacggacaaaaggtgctgaaaaatattaacctgactattaaggaaggcagcctgaccgcccttattgggccttccggcagtgggaaaagcaccctgttacgctgcattaatctgctggaaattccacaggccggtcaactcatgctagggaaagaaagaattacatttaccggcaaagagcggctttcccacaaggaaatccagcgctttagcctgcaaaccggcatggtattccagaatttccagctttttccacacctcactgtgattgaaaacatcatggaggggctgatttgggtacagaaatggcctcgtgaacgtgccagagaacgggcgatggagctactggaaaaagttgaaatgtcgcataaagcagatgtgtggccaaccacattatccggtggtcagcagcagcgtgttgcaatcgccagagcgatggcgccatcgccaaaggtattactgtgtgatgaaccgacttcagcccttgaccctgaactatcaaaagaagtcgtctccgtactgaaacagctggcagatgaagggacaacaatgttaatggcaacgcacgatctgcgtctggctgctaaccttgctcatgatgttatctttctggaatttggggaaattatcgaatcgggaagcgccaagcacatgtttacccgcccggatcaccagcgcactatcgagtttgtttcaactctgactgaaactttaccggattggcaaatatagagagccactacatttttataaaaattcatttggagaacatcatgaaagtattcttaaaattgctgcttgcaggtgccgttactcttgctatctctgctcccagctatgccggtaaagatttagatgccataaaagcctctggcgtatttaaaattggtactgaagggacttaccctccatttacctaccatgataccagcaataaattaaccggctttgatgtcgatattgccagagaaattgcacgtcgtatggatgtaaaacctgaatttacagaagtaaaatgggacggtttaattgcaggactggatgccaaacgctttgatgctgttgttaatcaggttggtgtgactcctgcgcgggaagctaaattcagtttctcaattccttacacaacatctcaggttgttcttatcacccgtgataacaatgacagcatcaaatccttttctgacctcaaaggaaaacgctccgcacaatctttaaccagcaactatgggcaattagcaacatcttatggtgctacgctggtcagcacggatggttttaaccagtccattgatttggtcgccaccggtcgggcagatgccacactaaatgatcgtttgtcatttctggacttcaaaaaccagcgcccgaatgcgccggtgaaaattgtcgctcagcagactgatgccagtaaatcggccgtattactgcgtaaaggtgatcctgaattagtcgaagctattaataaagcactgcaaggcatgaaagatgacggaacttatgcccgcatttctgagaaatactttggaactgatatttcgaagtagttcatcatacagtttgtaaaattgcggcatcataatggtgccgctttattttatatttccgtaatcccttctgatttaatcatttacttatttttcttttcaattaatatcgatctaataattacaccgttacagtatcaataataatttcaagcaggcttccagtatcctcgcttattcagtcgttcttttcgagacacgcctattgtctcgattatctttaatgaaaaatagtaaagaggaagaaatggcagaaaacacaaatcacgactacgtcatccgccctattacccaacaagataacccagatattgccgccattattcgtgaagtatctgccgaacacggtttaaccgctgacaaaggcttcgccgtcgctgacccaattctggatactctgtacgaagtttacagccagccccgcagtgcatactgggtggttgaaatggcggggaaagtcgttggaggcggtggagttgccccactgtcaggaggtgatagtaatacctgtgaactgcaaaaaatgtatctttcgtcagcattacgtggcaagggtgttgccagacaaatcgtaaaacaatcgctggaattcggggtagaacaaggctttacacgctgttatttagaaacaacagaaaacctgaaagcggccatcgctttgtatgaaaaactgggattcagttaccttgatgcccccctgggcaatactgggcacagtgattgtgaggttagaatggttaagatgctgtaaaacataataatatgccccgcgcgaaccgtggggcaaatgcgatagaaaaactcagtgtaatctgggttcatcttcttccgggaagagatcgcctacatcatcttcatcatctgaagcattagggtcttcaaaataagttccccagccatcgtaattcacacccattttttcagccagatccatcaattgctcaacctgtgcaatgatcaggtcagcctccagacggctctcactgatgacatcacaacacatcaaaataacgctgtcttctgtttccagctcttccgcatctgtcacttcataaccaagtttaaatgcttcaactgctgctttctccagacggtcaaaatcgtctgctgaaaaatggtgttcaatgatataaagcgcttcaggatcactgccatcttccaataactcttcgatgatcaagcgagtttcttcgcgctgttcttccagtgcatgtgggtctgccatgccaatcccctctgtcagttggctatcctgttccgcattctcccatcttttctttgcaaaggatatagctatcccgtgctgttaaaccaaaagtacaggccttaagcgccgggtcacaattctcttggctatccttaaatcttcaatacacactatacacttcgtctttccagttgcctctttgttggctacgctcgttcacccctgtcacatagttatctatgctcccggggattctctctcttgccgccgcgacgcgtcttgaaatccattgtgtatatagcgcttgtaataagattttttattgatatatagtgcatattaattcaatttatccctatggagaaaatgtcacatgaatccattttttcaccgtcatctcctgagattacttgattacaagcctaaagaaattgagctttttttatccctgtcaatgaaattgaaagcgaataaaaaatcaggtaaagaaattcccttgctggcaggaaagaatatcgccctgatttttgagaaagactccacccgcacacgctgtgcatttgaagttgcagcacatgatcaaggggctaatgtcacctatttaggccccagcggcagccagattgggcataaggagtctatcagggatacagcaagggtacttgggcgttggtatgatggcattcagtaccgtggctatgggcaggcaatagtcgatacgctagctgaatatgctggtgtgcctgtctggaatggactgacggatgagttccacccgactcagctactggcagatttgctgacaatgcaggaacacagtagaaaacccttaactgaaataaaactggcctatctgggcgatgcccgtaataacatgggtaatagcttgctggaagcggctgcattaacaggattagatttgcgtctggttgcaccaaaaacctgcctggccggatgctcaattagtgagtgaatgccaaaaacaggcaacgaaaacaggtggaaaaattacactgacggaagatatcgtggctggcgtacaggctgctgatttcctttataccgatgtctgggtctcaatgggtgaacctaaaaatgtctggcaggagcgcattgaattattagcgccttatcaggttaatatggatctcgtgaaactaacgggaaatccggatgtgaaattcctgcattgcctgccggcttttcatgatgaagaaaccattcttggtaaacagcttgcggaagaattcaacttgtctggtggcctggaagtgactaatgatgtgtttgaatcagaatacagcattgtttttgatcaggcagaaaaccgtatgcatacgattaaagctgtcatggtggctacattagtacaggagctggatttatgattaaagtattatgcggtgcacctgagcaccgcttgtcttttttcactgaaacaagcaactattccccgtcactcatcgccggcttaacgccagattaaccgcaaaaaacagaaataatccacctgtcgcccggttcatccatttgatgacattaccacgctttaacacatgggaaagcggacgtgtggcaaaaatcagaatcagtgaccatatcgtacccaatgcggcatgaatagcaactaagccaaatgtccagatcatgggtgaatgcccctgaggaataaactgaggcaagaaagagacataaaacacacctacctttggattcagcacatttcccagcatgcccctgataaaccagttcgacgttttaaccgaagaagtattctcaccaccaagatcggaattagggcgcaggatcatctgaaggcctaaccagcatagatacagcgctccacaccatttcagaatattgaatgccagttcagatacggctatcaatgcacccagaccaaatgccaccatcgctccccatataaaacatccggcatcaattccaagagcggcctgaaaggcttttttcccaccttccgctgctgcggttcttaaaaccaaagctgtatccagaccgggagttaatgtcaataacgtagcagcaaccatgaatgcaagtagagaatccagaactgtcatttttatctccagagttaagtgtgcataaacatgtttaattatgatgttattttatactgatatatgcgacagaaaccgcctttgtcaaccagacaccgttctcagcctgatggaatttaattccctgttcatacattaactgggcatcaatttttagaatagcaactttgccatgtcgttgacccaccttaatcgcggtcacttcatccgccgataaatgcacataatggcgatttcccgccaccagcccttgtttaaatattgaatccagaaagcgggttgcggtaccgtgaaacaaaacggccggaggtatcttttcctgataagagatatctaccggtttggctgaatgcccttgtactgccctgatacgtttcctgtcttccgaaatcgcaaagcgttttttatcattagtcgcgacaattgtttcaatcatagggtaattcagccgctttccttgcttcactgcgcatttaatcagcgtactgatatccgcccagccttcactatccagtgttaagccaatagattcaggctgatggcgcaatacgtaacttaaaaatttgctgattttagtatcgatatgatccatattttccctcagtaatcggcgttttttatctatttttcagtacccaacgcttcagataactatcaagtaaatcctgactgcgttcacgattatccttcagctcacaacgcactactgtctcactcagttctgattcaataaatgcgtgaactcccggcttgcgcaaaccatattctgcttcattggcagctcgtttaattcgcagtaaatctgcaatttcagctttcaattgagagtcataaacggtaccagccaccagcgtttcaaaatctatgggaggagcacctttacccatctcaatccaacgcacagccagtaacggacgcaatacgtaaaagtatttttttagccgaacctgctcaccctgcaaataacccctgaagtttttcttcgccattgaaagatagtgataacgcgctttaatatccgaaaagaaatgcggcaccatcgctttcagtccattagttgcagccgcatctgcatgatatagcagaatcatattaatatgacataatagctggattcatatgacaaaggataaagtgagatgggctatagtctggattttcgaaagcgagtactggcatataaagacaagcattcgttgaccttcgaacaaacgtgtacccattttgagatttctatgcggaccttatttcggtggcgtcacaaaatagaaccctgtgtgacacggaataagccgcccacgaaaatcagtgatgaagcgcttctcactgatgtcaaaaattaccccgatgactatcaatgggaaagggcaaaacgcttgggtgtcgcgcaatctgctatccattacgccttgaaacggctgaaaataaccgtcaaaaaaaacgctaagacaccccaacgctgacgctcaggctcgtcaggcgtttgtcgaacgcatcagccactacgaacaggcgatgaaaccgattgtttatctggatgaaagcggtttttcgcagtctatgccccgcacacagggttattcggcgaaagggttacgctgcttcggcacacacgattggcaggccaaaggccgcattaatgtcattggcgcgatcctcaaaaagaccttcgtgaccttaagtttattttcgggaaacattaatgcggatgtctttcatgcctggatgacacaagatttgctgcccaagctccccagcggagccgtgattgtgatggataatgccccattccataaacggcatgacacaataaaagcgatagcagaccacggttgcctgttggaatggttacctccttacagcccggatttgaaccccatcgaaccgaaatgggctgaagtcaaagcgataagaagacgagaaaggtgttcaattgatgaactgtttatgacgcatgtgaaatatgtctaattattttgattcagctataactcttcagtaatctccaccgcatcagccgggatttcagtactcatcccccggatataaaaaccatttttggccgcactaaacaatttcatgttaataatctccgactgcaataaatctgatagggtcagcattgaccgtccgggagacttcaatctggttcaagcccaccaaactgacaccggcgttcacacccggaccactgcttgcaccaacgccacccacaacatgaccaaacgatttaaacgccaccggcaaggaataacgggtggttgatcctgtcggagccatgacaacaccggtctgaatcaacatgccattcagggtaaacgccgcgataccgccctgacgggtttgtttaatttttgaggacgccacggttaatatttcatcccagtttgaccagctattttccgacggatgataggcgcgccggtatttaacgcctgtaccgtactcaaggtattcctgaatcacgcccacactgcgataaacaaccaatgtccccgccagtgttgacgggtaatttttacctcggtgtgcttcggtactcgaaaactgcacgtaaatccccggagtagtaatcgtattcagatcaatcctctcacccagagattcaacctgattaaagatatcctgagaggaaagcacaatatcccttgccaaggatttaccattaattttccggttgtcaggcacagagcgttttgcctgattgacggtatcccgtaaagccagattgttaatgaacgcatttttatccaggatatccgccccattcttggttttttcgagaaaggtattataaatatacgcagatgtcgtggtcagcacttcgctccatgcagaccaattattttctgaagggtgaaacgtccgccgataactcactccggtggaatattctgtgtattcctgaaatataccggcactacgatagacaatcagtgtacctgctaccgtcgagggatagttttttccgttataggcttgttcactggaatattgtgcataaatccccggaacggtgatcgtattcaggtcaatacgattacccaatgattcaacctgactgaaaatatcctgagaggaaagagtgacatcactcaccagtgatttgtcattaattttgcgcgtggcgggaacacggctattggcgttgtcgttgacctgattaaccaatttaccaatcgcttcagacaactgggcatcgttgcttttattgggctgcatccccgctttcagcagcacattaataatttcccgttgcagagtattaaaccactccgcttctaaaagcgtggggggaataaagtcactggcaacctgcgccatcgccccctctgacaggacaaccaacagcaacacggtcattgccgtgatatggcggtcaaccgctccttgctgatagcgggtgttctgaaatgcagccaatgcctcgaaaattgccactttttcatccacgctaccggaagaatcaataatcgcgatcacgacctgcccggcggcctcgctgaaggtttccacggtgtgggcggcgtttaatgtatccagcctgtcggtaatggttttgcggctcatcaccacccccgccgtggtttttctgatgatgtccgcttcattatgctgccggtcatcccgtgaccgcagaccggtagccccggaaacggtgccgccaattttcccgcgctgataacgcccgtagcgctcactgccgaaggtggttttcagcatatcgctgaggttggtcacttcatccattgaacgggtcaccataccgatccattggttcgcggtctgtttaataatccgtatgccctgcgtcaccgaacggatctcacctctgaccatggcgatatattttgccagtgtggtggtataggtttgtaaccaatgcttttttacttcggtggcggatttggtgctgttggtgactgcaaagactttcagccctgattcaatcacggtgagcgtgaactcaaatacccggccaaactccttgctctcattcatgcgcaggccactttcggtcacactgaccgtcagctcccccagtgtcggatggactaaggtccccgtcgagccggtttcacaggcggccaccagatttttacgctgggtgatcacatccggcgcgtgataaaccgcactgttctgaatgataaaaccgcgcaacgtgaaccgccgggtagcccggcctaaatcctccagccatgccgtatcacggtacgggtattcatgcaccgcctgacggcgaccgaagacactttccccggagaccaccgcaaacggcaccccgcggaacgaagccgggtgcagatgttcagcccactgccatgacgcatcattgccaccccccagtagggaagaaacggcatctttaataaaagccatgcgagacctctttttgggacacaaaaaagccccgtagggggctgtttcgtgctatccgtcttctacttgatatttaaattaacctgaattctggataagaaattgacgagaagcctgttccaggagcaaagttttggtgaaagcctaaaactactccggggaggaacaggccatggacaagttagttgaaattttctgcggtgtcgacgacttttgtcgtcttttcatcccccagtgggagcagttttgtctcgataacggataccgcctgcgccgcagacaaggccgcatgtatcccagtgaaatcatgacaattttaatcctctttcagcggtcgcattaccgtgattttaaaaacttttatttggagcatatctggcaataccatcaccacgacttcccctccttgctcagttatacccgttttatcagcgttgctccgtccgttttggtccccttatccagttatctgactcaattaaaaggaaaaccgacagacattgcttttatcgactccacgagtttgcgcgtttgccataacatccgtattcctcgtcataaggtctttcagggcatcgcgcaacgcggaaaaacctcaatgggatggttctatgggttcaaattacacctgattgttaaccatctgggcgaaattttagcgcttaaagtgaccccgggtaatgtggatgatagggaacctgttcgcgaattatcaaaagatctcacgggttctctttacggcgacaaaagatatctgagtcagaaattggcggatgatttagctaaaacggatatcacctttatcacgaaaaagcgccgcaacatgaaagcgcttgcactggctgagtgggataatattatgcttaaaaagcgttttatcattgaaacgattaatggacaattaaaaaacgactctcaattagaacattctcgtcaccgaagtataaccggttttttgttaacgattttaacgggattggttgcttactgccttaaagagaaaaagccatcactgaaaattttctactcagaagaagatatttcagcaatagcttaagcggaattggggttaaattacatgctttagcgaatttattaacagcaactgctgaaccagatatatttcctgaaaaagattgcctgtaatcaacctcatcaacagaaatgcccgctaaaaatttttgctttgctgaacctaattgctttaataacgacaaaatcttttttctatcagtactcctagcttctattgcatcagaatttcttctttgtagaactgtgttaaattcgaccacctgattaccatcaactcttattaaaaaagtcgcaggtgtagatttaatatcgctatcatctattaactcaacataagaaactgataggtcattactatcgcatttgaatgcaatacctgatttagtgtttttaagctcccctataagaatggcgatattatcaccaaaaatactttcttctacatttgtaatccaggctgcacttaccataaacggagtaaataatagagttataaataattttttcatgagattaccttattaataaatattgcacactgggtaatgtcgtgtttttatctaaaaagacctctataagatcacttttctttattaaataaagtaattatcaatccatacaaaataataaaacaccctataatgacgtggttttgcttgcttgatactaacccaatgttatggatagattcaccataataatttgtactcatatttaaggccacaataagccatataacaccgaccaatatcaagaaccgtccgaatctattcatccacgcctccattaataataagataaaatcatattaatgtataagaaataagccatttcaaggttgcctcatagaagttgtgactttcccagcagaattcgactggaacttttgccgttcaccagttttatcattaattaaaataacttcgaattggaacggcttacctgcgatagcttcttggaacgcctttgccatgccctgtacgatatccatctgtgattcaggctcttttttattaccataaagcgatggttcgggctgcgactctcgtttatttcgaggatgctgcaagcgctgctctctaattatttctggttttcgtaatcccctccagcgatcgctatgaattgcatcattaatgcctactttgatttgctcatagctataggggtttatattgtcattttcatgtttaatcatggcagccatcaggttatttaacacctctggatcatgcatatctaaacgttgattacgggcgtatccagttcgttgagaaactgaacgtatataagcctcagtattgtttccggccttttcgagaagcgtatttatcaagaaagagatcaatagtattaagacccctttctgcatcgagcatcaactgacgagccatcgctgataaaccatcatgggctgtgtcaaatttcacgtaagtatgattattatcatattctttacccacagcatgaggagctgctgttaaattaccgggattattattgcgaataccgcgaggttgccttccagattcttttagcgggttagcgtagttggatccccgcacaacagggatatcagggactttttccccaacatggctaggttttttattcgggaaatagtaagcatttagcttgttgattaagtcttctgacgcatattcaagcaataaatccgttttttctttaaagctcagtgttttcctgaattcatcatctttttttgcttttttcaataatgctagctggtcgccaccgttattaaagccgaacggattaacgaatgtggctgcccctgataaaaaaccatgaaccggattcttatcttgagccgctgcttttggcttgtcccattgacccacgctcgtcagcaacatattatttttccagtccctcattgttcctgctactctgg

SEQ ID NO: 3162 - DNA, 28262 bp, Xenorhabdus sp.; identical to SEQ ID NO: 3161
  CDS (4878)..(6386)

SEQ ID NO: 3163 - DNA, 28262 bp, Xenorhabdus sp.; identical to SEQ ID NO: 3161
  CDS (6574)..(7038)

SEQ ID NO: 3164 - DNA, 28262 bp, Xenorhabdus sp.; identical to SEQ ID NO: 3161
  CDS (7052)..(9949)

SEQ ID NO: 3165 - DNA, 28262 bp, Xenorhabdus sp.; identical to SEQ ID NO: 3161
  CDS (14524)..(15252)

SEQ ID NO: 3166 - DNA, 28262 bp, Xenorhabdus sp.; identical to SEQ ID NO: 3161
  CDS (15386)..(16078)

SEQ ID NO: 3167 - DNA, 28262 bp, Xenorhabdus sp.; identical to SEQ ID NO: 3161
  CDS (16062)..(16826)

SEQ ID NO: 3168 - DNA, 28262 bp, Xenorhabdus sp.; identical to SEQ ID NO: 3161
  CDS (16868)..(17641)

SEQ ID NO: 3169 - DNA, 28262 bp, Xenorhabdus sp.; identical to SEQ ID NO: 3161
  CDS (17865)..(18392)

SEQ ID NO: 3170 - DNA, 28262 bp, Xenorhabdus sp.; identical to SEQ ID NO: 3161
  CDS (19222)..(19821)

SEQ ID NO: 3171 - DNA, 28262 bp, Xenorhabdus sp.; identical to SEQ ID NO: 3161
  CDS (19814)..(20236)

SEQ ID NO: 3172 - DNA, 28262 bp, Xenorhabdus sp.; identical to SEQ ID NO: 3161
  CDS (22601)..(22900)

SEQ ID NO: 3173 - DNA, 28262 bp, Xenorhabdus sp.; identical to SEQ ID NO: 3161
  CDS (25494)..(26369)

SEQ ID NO: 3174 - DNA, 28262 bp, Xenorhabdus sp.; identical to SEQ ID NO: 272
  CDS (24769)..(25842)

SEQ ID NO: 3175 - DNA, 28262 bp, Xenorhabdus sp.; identical to SEQ ID NO: 272
  CDS (23666)..(24766)

SEQ ID NO: 3176 - DNA, 28262 bp, Xenorhabdus sp.; identical to SEQ ID NO: 272
  CDS (17635)..(18258)

SEQ ID NO: 3177 - DNA, 28262 bp, Xenorhabdus sp.; identical to SEQ ID NO: 272
  CDS (16839)..(17243)

SEQ ID NO: 3178 - DNA, 28262 bp, Xenorhabdus sp.; identical to SEQ ID NO: 272
  CDS (15541)..(16374)

SEQ ID NO: 3179 - DNA, 28262 bp, Xenorhabdus sp.; identical to SEQ ID NO: 272
  CDS (14828)..(15025)

SEQ ID NO: 3180 - DNA, 28262 bp, Xenorhabdus sp.; identical to SEQ ID NO: 272
  CDS (9397)..(9819)

SEQ ID NO: 3181 - DNA, 28262 bp, Xenorhabdus sp.; identical to SEQ ID NO: 272
  CDS (7334)..(7954)

SEQ ID NO: 3182 - DNA, 28262 bp, Xenorhabdus sp.; identical to SEQ ID NO: 272
  CDS (6742)..(7287)

SEQ ID NO: 3183 - DNA, 28262 bp, Xenorhabdus sp.; identical to SEQ ID NO: 272
  CDS (6243)..(6716)

SEQ ID NO: 3184 - DNA, 28262 bp, Xenorhabdus sp.; identical to SEQ ID NO: 272
  CDS (2951)..(5251)

SEQ ID NO: 3185 - DNA, 28262 bp, Xenorhabdus sp.; identical to SEQ ID NO: 272
  CDS (679)..(1083)

SEQ ID NO: 3186 - DNA, 28262 bp, Xenorhabdus sp.; identical to SEQ ID NO: 272
  CDS (3)..(620)

SEQ ID NO: 3187 - DNA, 20157 bp, Xenorhabdus sp.; identical to SEQ ID NO: 109
  CDS (2672)..(3454)

SEQ ID NO: 3188 - DNA, 20157 bp, Xenorhabdus sp.; identical to SEQ ID NO: 109
  CDS (12308)..(13318)

SEQ ID NO: 3189 - DNA, 20157 bp, Xenorhabdus sp.; identical to SEQ ID NO: 109
  CDS (13575)..(14615)

SEQ ID NO: 3190 - DNA, 20157 bp, Xenorhabdus sp.; identical to SEQ ID NO: 109
  CDS (14720)..(15730)

SEQ ID NO: 3191 - DNA, 20157 bp, Xenorhabdus sp.; identical to SEQ ID NO: 109
  CDS (15736)..(16650)

SEQ ID NO: 3192 - DNA, 20157 bp, Xenorhabdus sp.; identical to SEQ ID NO: 109
  CDS (16672)..(17451)

SEQ ID NO: 3193 - DNA, 20157 bp, Xenorhabdus sp.; identical to SEQ ID NO: 109
  CDS (17478)..(18194)

SEQ ID NO: 3194 - DNA, 20157 bp, Xenorhabdus sp.; identical to SEQ ID NO: 109
  CDS (18662)..(19165)

SEQ ID NO: 3195 - DNA, 20157 bp, Xenorhabdus sp.; identical to SEQ ID NO: 109
  CDS (19364)..(20101)

SEQ ID NO: 3196 - DNA, 20157 bp, Xenorhabdus sp.
  CDS (19629)..(19778)
gaaacgtgcccaacagtaggtagcgccagttttcagcgataacagtaaaatccatatcaatgccctctcgccagtattctctgctgacgccactgcccccagccttccatcaccgcaataatcgcgatgtaaagcactgtcgcaacaccaaacgcttcaaaagttttcagggattgtgtttctacctgacgggaagcataggaaagttcagccacaccaatcgccatcgttaatgatgagttcttaacgatagtcatgtactgccctaaaaggggcggcatagcaattttcagtgcttgtggcagcacaacatagcgcatcgcctgccagccagttaagcccagagcctgagccgcatatttttgcccacgcccaatcccctgcatgcctgctctcagttcttccgcgacaaaaggtgctgaatagagcgtcagaccgataaaccccgccaaaaattcaaatgaaggccattccagtgttaaacctgccagtgtgatttcatgggaagtattcagccagatcatagcggcctgaggcaaaatctggccggaggcgaaataccagaaaaatagttgtaccaacagtggcgtattacggaataccgaggtataggctgtgaccagccaacgcaatggcttaatttgactgtcccgtgcagccgcaatgacaaaacctaataaggaagaggaagcaatagtacaggccgagatccacaacgtaatcagaaacccttgccagagccattgcagatattcaggagccagtaagtgctcgccgataaattgctcaaacatagcgcgttcaccatattaataatattcaccctataccctatgaatttcgagttgcatcgcagcggcaaaggaactcggggtgagtgagcgtagccaacaaagaggcaacctgaaagacgatgggggatctcaacacaaaacagcacagccccgtgcaaagacggggctggctttcgctgtcatttcaggtgctatctattactctgcctgattgtttaacggggcaaatctgaaatcaccgcgcggctgagccgattttgtttcagggccaaaccagcggttataaattttttctgcttcgccttctttttccagtttcagtaatgtctggtttacggaatcaaccaagcgggcttctccttttgaagccgctactgcctgatattcacgggtaatactgaacggagagatttcaaaatctgctttttgcgcctcaggcacattggccagcaggccaactaatttggcatcatcctgcgtgatcgcctgaacattaccatttctcaatgcagcaaatgccagcggagtatcgtcataagagatgactttggtcgttggataacgttcacgcagcgtaatttcctgaacagtccctttatctgcgccgatacgcagtttagcgatatcgtccgggttagtcagaacgcctttacgtgcaatgaatttttgccctgtggcaaagtaaggaatggagaaattcacctgttttgcgcgttcatcggtaatcgtgaagttcgcagcaattaaatcaatttttttggatgaaaggagtggaatacggttagcgggattggtcgggcgcagttccagttttacacccagatcgttggcaatggcattggcgatatccacatcataacctgccagtttttttgtttgaggatcgataaaaccaaaaggcgggttactatcaaataccgcaatacgaactgtgcctgctttttttatatcatcaagtttatctgccttagcgacacctgaagccaataccagactggtcagtaatgcagtcagtgctattcgggattgattacgccgagattgattgcggtatttcattggacacccctgttatcaataattgttcattgtttaacaaaagctatcaatttcggcatagcacatgaaataatataaaatactatatttatattattttggaataaaaattactcaccttttgtcagcagctcttccagtttatcgccaccaatatgacgaaaatcctgcccctttacgtaatagaaaataaactcacaaatgttctggcagcgatcgccgatacgctcaatagagcgggcacagaagagtgcggtcataatgcttggaatggtacgcggatcttccatcatataggtcattaattggcggacaatgccttcatattcctgatctacttttttatcttcacgataaatacggatggcttctgccaaatccatgcgagcaaaggcatccagtacatcatgcagcattcggatggtatgccagcccaaagattccagactgaccaacaacggttgatgctgctgagaaaaccgctccagcgcggtctgacaaattttattcgctccatcaccaatgcgctcaagctccgcaatggtttttgagataaccataatcaggcgcagatcactggccgtcggctgacgcttggcaataattcgaacacaggcttcatctattgccacttccatcatattaactttttcatcgtcttcaatgacctgctgagccagctctctatcctggttgtgcatcgccagaatcgctttgctaagctgctcctccactaatccgcccatcgccataagttcagtacggatatgttccagttcagcgttgaactggccggagatatgcctgccgaaattcagattatccatctttagctaccccatttctgcctgtatcaaccgtaacgaccggtaatgtaatcttcggtctgcttcattttgggtgtggtgaacaagatgtcagtgtcactgaattcaatcagctcacccaagtacataaaagccgtataatcagaacaacgtgctgcctgctgcatattatgagtcacgatcacaacggtatattccgctttcagttcactgataagctcttcaatacgccccgtagaaatcgggtcgagggccgagcagggttcatccagcaataacacttccggacgaatggcaataccacgggcaatacacaaacgctgctgctggcctcctgacaggctataaccgctctgatgcagcttatcttttgtttcgttccacaatgccgctttcgtcagtgcccatcgcacccgttcatccatttcagctcttgggagtttttcaaacaaacgtattccaaacgcaatattgtcgtaaatcgacatcggaaaaggtgtcggcttctggaaaaccatccccactttagcccgcagtaaagctatatcctgtttatcggccagaatatttgttccatcaagcaggatctcaccttcggctctctgttctccgtacagttcatacattttgttaaaggtgcgcaacaatgttgactttccacatcctgaagggccaataaaagcggtcactttattctgcgcaatatctaacgtcacatttttcagggcatgaaatttgccataatagaagttcagatcacgtacctgaattttactccctgccacatcattattaaccttattcatcaacagcttctctcttcagtttcagaatttcttatcggcaaatttctttttggcaaacaaaacccgagccaaaatattaatcaacaatacacacagagtaatcagcaaaacgccggcccatgccaattgctgccagtcagagaatggactcatggcaaatttgaaaatggtgacaggcaggttagcaatgggttggctgaggtctgtgctccagaattggttagaaagggaggtaaacaacaaaggcgcagtttcaccagcaatacgggcaatagccagcaggacaccggtaataatgccggatatggaggcttttaacgtgatcgccgtgatcattttccatttcggtgttcccagtgcataagcggcttcacgtaagttattcggcaccagtttcagcatattttccgttgtgcggataactatgggaatttgtaacaaagccagggcaataatccctgcccaaccggagaaatgctgcatcttcatgaccactatggtgtagacaaatagccctaccacaatagagggggccgaaagcaggatatcgttaataaaacgaaccatttcagccagcaaagagcgacggccatattcagccagatagatccccgccataattcccaaaggtgtgccaaataccgttgcccagaaaatcaggagtccgctgccgacaatagcatttgccagcccgcctccctcgctgttgggcggtggcgtcatttcagtaaataacgccacagacataccatcaatgcctttggtgattgtagaaattaaaatccagaccagccagaacaggccaaatgccattgttgccatagacagaaacagggcgaggcggtttttctgacgccgccaaacttgcctccggttgcggctggtatggctttctgagccagcactaccattttttcgtttatcagtaatcgccattttatttagcgcccctcatttctggccagacgcataatcatcagttttgacaacgcgagaacaataaaagtgatcacaaataaaatcagccccagctccatcagagcagaggtatgcaggcccgactcagcttcggcaaattcgtttgccagtgcagaagtgatactgtttcccggcatatagagcgaaaagctatccagttggtaggtgttgccgataataaaagtcaccgccatcgtttcccctaatgcccgccccagccccaacataacaccgccaatgacaccatttttggtgtaaggcagaacgatatgccagatcacttcccatgttgtgcagccaacgccgtaagccgattctttcatcattaccggagtctgttcaaagacatcgcgcatcacagaagcaatatagggaataatcataatggcaagaatgatccccgcagccagaataccgataccgaaggccgggccggagaacagtttccctacaatgggaatgcccgacaaaacttcaccgacaggctgctgaaaataggtggcaaaaagcggggcaaacacgaacagcccccacatgccataaacaatactgggaattgccgccagtaactcaattgcgacgccaagtggccgtttcagccagtttggtgccagttctgttaaaaacagagcgataccaaaactaaccggaacggcaataatcagggcaatgagcgaggtgactaatgtgccgtaaatcggtaccagtgcgccaaagatctctgccggcgcatcccagtctttctgccacaggaaagccattccaaactgctgcatactcggccaggaagcaacaaacaacgaaatgataatgcctcccagcaggaataacgtcatcagcgcagacagcctgaccagtgcactgaaaatgatatcgccatacctgcccggggctttatgttctgccatgcgttcaattcccatttgatacccttcgtctttcaggttgcctctttgttggctgcactcactcaccccggtcacatagctatctatgctcccgagggttcgctcccttgccgccgcgatgcaacttgaaatccattgggtagagttatcagtttccacccgataaggagctagtacagggcattgccatgctcatcctttatgttgcttttccatgctgcgcgtacctgtttgataacatcctgcggcaacacggcataatccagctctttcgcctgtcggcctcctttctcataagcccagtcgaagaacttcagaacctctgcaccatttgcgccatttttctgctgtttgtggataaggatgaatgtcgttgacgtaattggccacgcattttcgcccggctgattagtcagatcctgtgcgaaacttttactccagtcagcaccttttgccgccgcactgaaattggcttcagtgggaacaaccgtctttccgtcagcggtaatcaacccggtataagcaaggttattctgtttcgcataagcatattcaacatagccaatagaaccgggtaaacgctgaacaaatgcggcaataccatcgttgcccttaccgcccagcccagtcggccacttcactgtagaaccagagccgacttttactttccagtcactattcactttagatagatagctggtaaagacaaatgaagtaccagagccatccgcacggcgaataacggcaatgtcctgctcaggcagtttaagattcggattcagtttcgcaatggcgggatcattccatttcttaatggtgccgagatagatatctcccagcgttttaccatccagcaccagttggcccgatttgatattcggaaggtttaccgccaacacaatgccaccgatcacagtaggaaactggaataaaccctcagatgccagtttttcatcggtgagtggcgcatctgaagcaccaaaatcaaccgtaccagctatgatttgttttacgccacccgaagagccaattccctgataattgattttgttgccggtttctttttggtaggaatcagcccattgggtatatatcggtgccgggaaagtcgctccggctcctgtcaggctggttgctgaaaatgaagagacagataccatagctgatgctaccgccatcatacctactacagtgagacgcactggtttcatacaccctccgctaagagacacatcattcatcaaaaacaactgttagtagtttggttttataccaattcaacttcaagatgagtgttatatctccctgcgatgcggggagatataaggactcgcctcatattacccgttgaaacttgaagtttaccgagtataaaaagatgattctggagggaaaaataagtcactttgatgacagcaaaatgtacgaattatgacatttttatgacagtggttcagaatgaagaactcaggaatcagccgctagtgggatataagcgcgaatagataagcctcctttttcacttctgcccacatcaagatatccgtcatgcatgtcgatgatacggcggataatagcaagccccagcccaacgcccctgtgattatggcggttattcatgctatgcgcttttccctgcctgaaaggctggaacaaaatatcaatgtcttcctttgtgataccagcgccattatcttccacctgaaaccagccgaatttttcagtttttccagtgctgataccgatccatccattaccataacgctgagcgttagtgagcatattcgccagtacacgcttcactgacagagggtcggccataatgaaaaccggaataacagacaggttatctgcaatttctgccttttctgccctcatcacttccttaatgagctgatttaactcacaacgaatttttgccgtatcctgcccggcccgctgataatcgatgaactggctaataattgcattacactcttcaatatcctgattcacggattcacaaaggaaatcattttctccgccaatcaactccatcgccagccgtatccgtgtcagcggagtgcgtaaatcatggctgagacctgctataaaaatagcccgatcatcctccaacgacttaagcgccaccgacatttgattaaaggcacggataaccgaccgggtgccggatgttcccgattcaggtaatggggtaatgattttcccttttcctgtcctgatgattgcctgctgtatggcggccagaggacgcctttgtgcccgaaggtaaagacagcacattgcggcaacaaataatactgacaatagtgtgctgatcaggatatacgggaatacggtaataaatgagatgtcttcccgccttgccagcatggtggcagacagataactgatcatcaggctgctcaacggcatcgccagtgcccaaaccagagcacgggagaatttatgatgcagtgagagcctgaactttttcataacgtacttccaattattccttatgaggcaccttattacgatttatgcttggttaccgtcaggaacgaaaacatatcccaacccccaaacagtctggatatagcggggatgtgccggatcttcttcaagcagacggcgcagacgggaaacctgcacatcaatagaacgttccgttgcaccgtattccctgccacgggccagactcatcagcttatcccgcgataacggttcacggggatgagacaccagtgctttcagtacagaaaattcaccactggtcagggatagttgttcatctttatggaacatttctcgcgtcccgagatccagtttaaatttaccaaacgtcacgacggcattatccggtgtctgtgcgccggataattcattagagtgcctgcgcaacactgcccggatacgtgccagtaattcccgtggattaaagggctttgccagataatcatccgctccgatttccagaccgacaatccggtcaacttcttcccctttcgcagagatcataatgacagggatcgggttattctgactccttaatctgcgacagattgaaagcccatcttctcccggcaacattaaatccagtacaatcagttgaatagattctctggtcaataagcggtccatctgctctgcatttgcaacacaacgaacttgaaaaccctgctccgataagtagcgttccagcaatactcgcaaacgcatatcatcatcaacaacaagtattttataactctcttgcatgtgtcagctcccaagatgctccatgcccgcaatatccattattcttacagaaaatccatgccttaaaataacactaacgccatgtattttaagaatatttgcaatattggcaataattacttatgtttctgtttttcatccctgttttccttgctccctgatttacaccaactgcttttatatctccggtggctgataacggatttccagaatccagtaaaccgccagaccattcggcgtcattacagtcacttcatcatcaacccgcttgccaagtagcgctcttgccaccggcgaatcaatggaaatccattttttggccggatcaaactcatccggccccaccaggcggaaaatatattcttcggctttttcgttttcgactttaacccatgccccaaaaaaaacttttccttcctgtcgcggatcagggtctacaatttgcaagacatccagtcttttagataaaaaacgcacgcgacggtcaatttctcttaacctttttttaccataaatatattctgcgttttctgaacgatcgcctaatgcagccgcatcagagacagcctgagtaacttgtgggcgctcagttttccaaaggtatttcagttcctgatcaagcgcctgccagccctctcgggtaatatagttacttttgcccatgaaaaactcacttgagaaaatatgattaatggcgcagtactatatcttaaccgggcagatattcgatgagttccatcgcaacatgacagaaatattatgctatacctgttaaattccgagtcgcatcacagcagaaaataatcagtccctgcggtggttcagcactcgcaacaaaacggacaaccgaaagaaagatagaaggcatatacacaatggatttcaagatgcagcgcagccaacaaagaggccacttgaaagacgaaatatagaaactggaaattattgcgctctgtacgtatataatggagccaagtttgaaccctgccagcatccagttaaatgatgaatctggccctgtctgcggatatctgctgatatctacaggcgcagagaaagttgaagaaaatagactatgaatgaatctttaagtcgaattattgccggtgagttacaggctcagccccaacaagttctggctgctattactttacttgatgaaggaaacaccgttccctttgttgcccgttaccgtaaagaagctaccggaggtcttgatgacacccagcttcgccagcttgaaagccgtcttggctatctgcgcgaactgtcagaccgccgccagactatcctgaaatctatcgaagagcagggtaaactgacgagtgaactggctgaagccattaatagcacgctcagcaaaaccgaactggaagacctctaccttccttataaacctaagcgccgtacccgtggtcaaattgcgattgaagccgggctggagccactggcagacctgttgtggcaagacccgcagcaagaaccggaatctgccgctgctgcttacgttaatgctgacaacggtgttgcagacaccaagtccgccctggatggtgcccgctatatattgatggagcgtttttctgaagatgcgtctctgttggtaaaagtacgtgagtatctgtggaaaaatgcccacctgactgccaaagtcgttgaaggtaaagaggaagaaggcgctaagttcagcgattacttcgaccatcatgaagctatctcctctgttccctcacaccgcgctcttgcgatgttccgcggacgtaatgaaggcatcctgcaactgtccctgaatgccgatccccagtttgaagaagcccctaaagaaagttactgcgagcagattatcactgaccacctgaacctgcgtctgaacagcgcaccggctgatagctggcgcaaagctgtcgtgaactggacatggcggatcaaagtactgctgcatatggaaacagagctaatgggtacgctgcgcgaaaaagcagaaaacgaagcgatcaacgtcttcgcccgtaacctgaatgacctgatgatggcggctcctgcgggtatgcgttccacaatgggtctggatccgggtctgagaacaggcgtgaaagttgctgtcgtggactcaaccggtaaattgctggctacagataccatctacccgcacacggggcaggaaaataaagcagccgcagcggttgcagcgctgtgcaccagacataacgttgagctggtcgctattggtaatggcacggcatcccgtgaaacagaacgcttctttgccaacgttcagaaacagtatcctgcggttactgcacagaaagtcattgtcagtgaagccggtgcatccgtttattctgcctcagaactggcagctcaggaattccctgatctggacgtttcactgcgtggagcggtttctattgcccgtcgccttcaggatccactggcggaactggttaaaatcgagccaaaatccattggtgttggtcagtatcagcacgatgtcagccagactcagcttgccaaaaaactggataccgtggttgaggactgtgtaaacagtgttggtgttgatctgaatactgcatctgtttctctgctgacccgggttgcaggtctgagccgctctgtcgcccagaatatcgtcacctggcgtgatgaaaacggtcgtttcaacaaccgtgaagagctgctgaaagttcgccgcctcgggccaaaagcgttcctgcaatgtgcgggcttcttgcggattaatcagggtgataacccgctggatgcttctaccgtccacccagaatcctacccggtcgttgaaaaaattctggctacaacagagcagactttaccggaactgatgggtaacccagcggctttacgcgatttgaaggctcaggattttaccacggaaaaattcggtatcccgacggtcaccgatattctgaaagagctggaaaaaccaggacgcgaccctcgccctgagttcaagaccgccacgtttgccgacggtgtggagacaatgaatgacctgcgtgcaggtatgattctggaaggtactgtcactaatgtcaccaacttcggtgcgtttgttgatatcggtgtacatcaggatggactggtacatatttcttccctttccgatcgattcgtggaagatccacacaccgtagtgaaaacgggcgatatcgtgaaagtaaaggtgatggatgttgacctgaaccgcaaacgtattgccctgacaatgcgccttgatgagcagccgggagaagctccggcccgccgtaataacgctcagggaaataaccgccaggaacgtaatggcaatgaacgtaaccgaaatggcaaaagccgccagaatttgcgttcatccggttccgcacaattaactaatagtgccatgagtgatgctctggcagccgcttttggtaaaaaacgttaatatcctgcggtaatgtactttcagaactggcttaattaagccagttctgtcaggtataaaataccttaataaatcaatactattttcatcaccacactgcaatttattgtcgatctaatcaatttaaataggagaaattactgcctgtcttcattaatacttaatataatctgttgcgaaaattcaatcactattattaatagtgaccataagtcgcttacataattataaatacagataataaactcaaattgttaaggaataatttatgaataaatatatccaaagcagttttgacttactcagcaatataagattcttcaaccttgccactcatgctccgaatgccgagtcagcttggtcatccacacttttttatattcctaaatataatccattaagtttaatctggtattcaaaacaggatacccgccattctcaggagctacttatcaaccctcgggtcagcggtaccatatacagcagcattaccacgcctgattcatcgctgatactcgcaggctctcagttcatcggccacgcccgtcaggttcccgacgatgaactacaggaaacctatgactacttcttcctgaaaacttacccggatgagaatatcagaaagaaaaaatcccgtccgattgctgactatcatggcaatgcaatacgccgtttctatgaattaaaagtggaagcatggtgggtatacgactcaacaggctggagtgaacgtcaggatgatgcccgtgtctcaatatcattaaatgatcttctttatccaccgaaaaattaatagaaaaatatataacaacaagctccatttcttattggagcttgttattaattcctctcagatattctttacataactttaatttttgattaaatcgccattaaattgattaatatcaatttattccgtcattattcagtgataaatagatgatattggtattgcatattattctcattagcgctttaatccaaaataaccaatatactttttccttgtgaatttcgctttattgaggataatcattctcataatcactgtcttttgagttttaacggagtgttatatgtcactgactccaaatcaaagctataaaattctggggttcttcccacagataaatcgcgcatacaggcaaaaattattgtctctggggatgctacccggctctacttttcgggttatccgagttgcccctttgggagaccccattcaaatagaaacacgcagagtcaaccttattctccgtaaaaaagacttagcgctcctcacattagcagtacatccagcagaatgaagtccagatgccgtacagtcctgagactgaatgcaatgatgcacactattcctgatcagtaaaaagtatgatgaaacaattaactataggtttaatcggtaaccctaactctgggaaaaccactttattcaaccaacttacaggctcccgacaacgggtcggtaactggtctggggtcacggttgaacgtaaaaccgggcatttttccacccaaaaacatcaaatagaccttgtcgatcttcccggtacctattctctcacaaccatttccgagcaaacctcaattgacgagcaaattgcctgtcactatatactgagcagcgaagccgatatgttcatcaatgtcgttgacgcttcgaatctggaacgtaatctctacctttcattacagctcattgagcttggtattccctgcattattgccctgaatatgctggatatcgccaaaagccagcatatcaacattgatatcgcagcactggagcaacatcttggttgtccggtcattccgctcgtatctacccgctcaacagggatagatacgcttaaaaaagccattgaccactaccaccagcctgtacgtcctgtactggtgcaataccccgatacgttattgcaggaagccaacaaccttgctgatctgatcagcagaaacttcaatctgcaacagcgtcgctggctcagcctgcaaatactggaaggggatatctacagctttgagcgttcagggctgacgcaggcacaattggccgagagcaaactccgcctgcaacagaaacagattgaagaacctgaactcatcattgcagatgcccgctatcaggcaatcaataaattgtgtctggcagtcacggatgttgactcagcaatacccaataaactgactcaggcaatagataaaattattctcaatcgctggctgggtgtgcctgtctttctgtttgtcatgtatctcatgttcgtactggcgattaatatcggtggtgctttacaacccatttttgatggtgcttcctctgccattttcattgatggtatgcagtggctcggctataccctccacttccccggctggctgaccattttccttgcacaagggatcggaggcggtatcaataccatgctgccattggttccgcagatcggcatgatgtacctgtttctctcttttcttgaagactccggctatatggccagagctgcatttgtgatggacaggctgatgcagtctctgggattaccgggtaaatccttcgtgcccctgattgtcggcttcggctgtaatgttccttccgtgatgggttcccgaacactggatgcaccgcgtgaaaggctgattaccatcatgatggcaccatttatgtcttgtggcgcacgtctggcgatttttgccgtttttgccgctgcattctttaataaacatggtgccagtattgtcttttctctgtatatcctcggtattgtcgttgccatcctgacgggtctgctactcaaatacaccattatgcgtggtgaggcatccccctttgtcatggagctgccggtctatcatgttcctcatgctaaaacgctattaatccagacctggcaacgcctgaaaggatttgtgatccgtgcgggtaaagtgattgtcgcagccagtatgcttatcggggctctcaatagcttttctttctctggtaagacagtagacgatatcaatgaatcagcgctggcctcggtcagtaaagtcattacaccgatccttcatcctattggcgtacattctgataactggcaggcaaccgtcgggcttatcaccggagcgatggcaaaagaggtggttgtcggaacactgaatacactttataccgcagaaaacatcactaaacagccattcaacccggatgagtttaatctgcttgatgaactgacaggctcagtaacagaaacatgggacagcctgaaagagacattcaccctgagtgctctgtccaacccgattgaagccagtaaaggcgacggcaacatggacagcagctcaatgggcgtgatgagtgctaaatttggttctcctgttgcggcctacagctatttgatctttgttctgctgtatgttccctgtgtttctgtgatgggtgccattgcccgtgaaaccagccgcggctggatgacattctcaattttatgggggttaaacgtcgcctattctctggctgtactgttttatcaggctgcaaccttttccgcacatccacaaagcagcatgctcactattctggcggtcattttgttcaatgtcgctgtgtttgtcggattacgccgtgcacgcagcagaatcacgatcacattcaatagcaccagagaccggagctgcgattgttccggtagctgtcactaggagttgccatgattagtctgctgcaaatccgcgatacggtcgcccttcatgggcgcaccgatgccagatcactgagccatcagttttctgcgccactgcccatcgtagaagccatgctcaatcagttggtgacgatgggtaaactggaggaagtagacatttcctcctgcctcagtggtagctgtaaacagtgcccggaaacacagagatgtgctgttaaagcgtatcaactggcgatgataaaatgctgattatatcttcttaattcagcaacaagacatacccttctcttctgaattttcttaatctattcagcccagttaacgaattagactttacattcgaccaacgtctaattcgttaacattagcacagtaattcttttaaccatcgtgatagattaaagaataaaaaccactccctgattatttcatatgtagttctgtcataacgattaataacctgaggatatactcaaatgcctaaagagttatttgctgcaacaatagagtctgctggtcatcttaaaatgaaatgttcatcacgaggttttacctttcatgtggatgaacccaaaaatctgggcggaacagatgaagccatgaaccctgtggaagcactgctttctgcttttggtgcctgtcagtgtattgtggccaaaagttttgcccgcaaacataaaatcaacctgattgatattcaggtcaatgtggaaggagaattggataccgacggtttcaccggtaagaataaaaatgccaaaatcggcttttcgaaaataacatcaaaatttcatataaaagcagataatactgaacaagaaatccgcgattttattcagtttgtagaaagtaactgccctgtactcgataccatcgtcaatacaccggaaattgtcaccgaagtttatcctgtcagataaatatcaactacccataacagccatgttatgggtaattagtggtcaatagctgaaattactcagcgtcactcccgctgtccgcaaatgctatcaatagatcgacaaattcatccggatgggaaataaaaggcgcatgtgccgcatgacgcataatcacagaacgggtgtgcggccattcactatcaagcaaggcagcaatcttacgtggtaccaaaccatcaagataaccatagatacgcaggaaaggaagctgaagctgtgccagctcacttcttaaatcatcagtgcgcagaatttccagcccggcattgagcacttcgactgtcggcatcggcaggctcaataccactgatttcaataaacgcgcatcctgacgagcgctgttagtgcccaaagtctgcaatgctaaaaagcgctcgaccgtcttctgaaaatcttcactcaactggtgtttgaatgcactcagaaccgaaggctggatccccggccaatccccctcttcactgaattttggcgatgatgctactgtgattaaacccgcaactttatcaggatgatctaacgcaatctggctggcaataagccctcccagcgaccatccaagccataaggcattttctggcgcctgttgccataccgtatcagccatctctttcagtgtcatagcaggatacggctgactgcgcccgtatcccggtaaatccactaaatgtaaacgaaaatgcgaagctaatcgtgtttccactgaacgccagacctcagcgttcagcccccatccgtgcagcatcacaagatcacgaggagcttcgcctaaagtctgccaaaacaacttatccattgttattctcaccttatttactctcaggaatttcttatcaaggaagaaagcgatgttcacaaaaaccatgctaacaatggttgggtactgttggctatgccatcaaagtttgtatttcgctcatcatggaatatgccacatctgctggcaaaacctgaaacggcttgcgaacgtttgtccatgctgttctctgcctgccagttctcgtgatttaccctgtggccgctgcctgaaggagccaccactctggcaacaaatgatcgcggttactgattatgctccccctttaagtcagcttatccggcgctataaatatcatagtaccccccagctcgccgcagttctggcgcgcatatttcttcttcactggttacagggctatcgtgaagggcgctggatgaagccggactgcatacttggtattcctctgcaccgccagaaacgctggcaacgggggtttgatcaggttgaggttatcatcaggccattagcacgctggttgcgatgtcaacatcagcctaatcttttgcaacgcacacgtgctacactcacacaacggggcttatctgccgcccagaggaaaaccaatcttaagcatgcctttcaattgcgtggcgattttaccgatcaacatgtcgtcattttcgatgatgtgatcaccacgggaaccactctgcatgaagccacacagttgttaattcgtgctggtgcccgttccgtgcaaacctgggcaatatgccgaaccttgtagttcctttatgaatgggcgtattataaccaactataacagtcaactattgagcaaatgacatgattaatattactgaagcagcgcaagcgcactttgccaagctactggcaaatcaagaacccggtacacaaatccgcgtttttgtcattaatccaggaacgccgacagcagaatgcggtgtttcttattgcccacctgatgctgttgaagccactgacaccgaattgaaatttgaccaactttctgcctatgttgatgaaatcagtgcccatttcctggaagaggcggttatcgattttgtgactgaccagcttggctcccagctgaccctgaaagcaccaaacgcaaaaatgcgcaaggtagctgatgatgcgccactgattgagcgcgttgaatatactctacaatcacagattaacccacagctcgcaggtcatggtggccgtgtcagcctgatggaaatcacggatgaaggttatgccatcctgcaatttggtggtggctgcaacggttgttctatggtcgatgtcaccctgaaagaggggatcgaaaaacagctgttacagatgttccctgagctgaaaggcgttaaagacctgacagaacatcagcgtggcgaacactcttactactgattttagctcgttatttttttgttctttatatctttagtatctctagtcatgccttcccaattctgtcattgggaaggcaataaagtcataaagtaacatttttaagaaactgaaaccttaaaacgaaattttaagaaataaatctgagtgtttatggaacattttcaaacaataagccctgaacaagcctaccagaactggctcgataaaagtgctctgatggtggatatccgcgacccacagagtttccgtgccgggcatgtaacaggtgcatttcatctgactaatgaaactatcaatcaactcctgcaagagaccgattttgatcagccggttatggtgatgtgctaccacggccatagcagtcagggagccgcacagtatctgataaatatcggttttgaaaccgtatacagtgttaacggcggttttgaagtatggaaaaaagattatcctcatgccgttcatgctgagtaacgggcatctgtacctctataccctatggatttcgagttgcatcgcggcggcaagggaatgaaccccaggagcataggtaactatgtgactggggtgagtgaacgcagccaacaaagaggcaactcgaaagacgacgggtataaccctaatttaaggtgaataatacgcacaatgatccatgtaacttcaatccataacccaagactggctcaggcctttattgattatatggcgacacagggcattcacctgaccatctgccagaccaatgaaccacacgtggttgaactgtggctggaagatgaaaaacaattaagcgctgttcaacaggagcttaatcagttttcccgagacccgctcaatgagcgctatcaggctgccagctggcaggcaggtaaaacaagtaccgccgttgaaatacgaaagtaatctgaactggaatacactgaaaagccagtccggcccattaactatcaccatttctgctctctgtattctggtctatttttggatgcagttagctggagttaatgaggttatgagctggctggcatggcctaacaaagaacagtacctggaattgtggtgttggctcagccccgttttattacatttttcgttattacacattctgttcaatttggtgctgtggtggtatttcggcagtcaggttgaaaggaacattaataccggaaagcttgttgaaatcacaatagtatctgccattttcagtggctgggcacaatcgttgttcagtggctagcattttggtgggctttccggagtagtttacgctttaatcagctat

SEQ ID NO: 3197 - DNA, 20157 bp, Xenorhabdus sp.; identical to SEQ ID NO: 3196
  CDS (19026)..(19349)

SEQ ID NO: 3198 - DNA, 20157 bp, Xenorhabdus sp.; identical to SEQ ID NO: 3196
  CDS (18297)..(18872)

SEQ ID NO: 3199 - DNA, 20157 bp, Xenorhabdus sp.; identical to SEQ ID NO: 3196
  CDS (17554)..(18237)

SEQ ID NO: 3200 - DNA, 20157 bp, Xenorhabdus sp.; identical to SEQ ID NO: 3196
  CDS (16289)..(16648)

SEQ ID NO: 3201 - DNA, 20157 bp, Xenorhabdus sp.; identical to SEQ ID NO: 3196
  CDS (13414)..(15726)

SEQ ID NO: 3202 - DNA, 20157 bp, Xenorhabdus sp.; identical to SEQ ID NO: 3196
  CDS (12305)..(12829)

SEQ ID NO: 3203 - DNA, 20157 bp, Xenorhabdus sp.; identical to SEQ ID NO: 3196
  CDS (9688)..(12036)

SEQ ID NO: 3204 - DNA, 25983 bp, Xenorhabdus sp.; identical to SEQ ID NO: 110
  CDS (5596)..(6261)

SEQ ID NO: 3205 - DNA, 25983 bp, Xenorhabdus sp.; identical to SEQ ID NO: 110
  CDS (17828)..(18901)

SEQ ID NO: 3206 - DNA, 25983 bp, Xenorhabdus sp.; identical to SEQ ID NO: 110
  CDS (19059)..(19634)

SEQ ID NO: 3207 - DNA, 25983 bp, Xenorhabdus sp.; identical to SEQ ID NO: 110
  CDS (19636)..(20430)

SEQ ID NO: 3208 - DNA, 25983 bp, Xenorhabdus sp.; identical to SEQ ID NO: 110
  CDS (20446)..(20730)

SEQ ID NO: 3209 - DNA, 25983 bp, Xenorhabdus sp.; identical to SEQ ID NO: 110
  CDS (20745)..(20993)

SEQ ID NO: 3210 - DNA, 25983 bp, Xenorhabdus sp.; identical to SEQ ID NO: 110
  CDS (21535)..(21636)

SEQ ID NO: 3211 - DNA, 25983 bp, Xenorhabdus sp.; identical to SEQ ID NO: 110
  CDS (22215)..(23000)

SEQ ID NO: 3212 - DNA, 25983 bp, Xenorhabdus sp.; identical to SEQ ID NO: 110
  CDS (22987)..(23346)

SEQ ID NO: 3213 - DNA, 25983 bp, Xenorhabdus sp.; identical to SEQ ID NO: 110
  CDS (23883)..(25064)

SEQ ID NO: 3214 - DNA, 25983 bp, Xenorhabdus sp.; identical to SEQ ID NO: 110
  CDS (25134)..(25490)

SEQ ID NO: 3215 - DNA, 25983 bp, Xenorhabdus sp.; identical to SEQ ID NO: 110
  CDS (25736)..(25981)

SEQ ID NO: 3216 - DNA, 25983 bp, Xenorhabdus sp.
  CDS (21297)..(21839)
gccctaaaggtaatgatggtgaacagtttgtccaaaggggaggtttttggcgtgagttccagttgccatgtttcctgttttagttctttgaactcaattttaaaattttcttccagtacagcccgatctgcctgaaatagtgcacgcatcaggtgattgaactgaaacatctgaggatttgaatccgcagtaataacctgaggtgcttgccccgcgatagcctgaaccatccggttgtcatccagcactaaagtgagaggaaaaggtttttgctgatgccaccaaagtcctttatgttgagcaaccagcatttcaccgctggaattcagtggctgcggcattccttgaatatggcgctcttgggtgaactcagcccgtactacaggttgtgtagagaagcgttgttgcagttcttcaagcgtgacggcatgagcacagttattgatagctagactattaatagataatagaagtactgccaaccagaactttctcatggcttgactcccatacgctcaaacagaatatccgggctgacaaaggacatttcctgagttttttctgcaacagccacctgaatggtgtaacccgtcgttgttttgttgccgctctcagaatcaaaaatttgataaaccagtttcagacggttttcaaactctttgatggtggcttgtactcgtattttctgaccgaattctattgggcgacgatatttaatttttgcatcaacaaccggccagacatagcctgatgcgatcatttcccggtagccataattgagctgttccatcagtgcttcacgagcaatttcaaaataacgaaaataattaccgtgccagactacgcccatcgggtcggtgtcatggaaggggacggttaattcaacctcgctgctaaaacggggcgctgtcagcattccttactccttggctttatttgtaggtaattgccaaaaatcgaaaaagttaaaccaatcaagcggagataacagagcataatgctcgaggcgagaagcatagtgatcaaccgcctgctgtaatgcctgctctctctgtttacggggaagttccaatggatcggcgaaaggttcacaataaattctgaaccgatgattttgcttaagagcaaacatcagcaaaaccgggcagcgtaatacggatgccagaataaacggcccttggggaaaaggtgctgaatcaccaagaaactgactccagacgactctatgcgtgctgatacgtgatggattaacggcaatgcgatcaccgacaatggctacccattccccggcatcaattttttctttcagcaggatagcggtatctgcgcctacatccgtcactggcaataaattaatgcccgcttgtggcgagacttcttcaataatttgcttaaaacgctgggcatgttcagtaaacaccagagcattaattgttcgctgtcctgcatgttgagccagtgcccggcaaacttcaatatcacccagatgggaaaccaataacagttttccgcgtgagtcaccacctaaaagaatggcctccgcaccgtcggcaaattcgatatctttgccccatttcagatcaccgcgccagcttgctattttatccagcatggcaccaccaaagcgcaaataatgacggtaactattaagtccggaaggaatagcaatatttttgcgctgcatggtctgtttcaggcgattaaggtattgctgtgatgcctgacgctgtactccaccggttgcccagaaataacctacaaccggataaagtaaccattcaaatggcttgcgtccgagacggcggtaaactgccagcataaacttcatgccatacaaacctttacgctctttaatatcagaccagtgacgacgattaccccaccagcggctaagtaaagaacgtttacgccataataaagcaggaaggcgtggcaacatggcaaaaaacagacgggtgtgcatccacgaaatgctgagattgtcgtgtaaagcgtgaaaatgggatagcccattttcgggataagtgacttttgtcgggacaaattcactttctgtaccctgccagtacagacggaccatgatttcaatatcaaagtccatcctgcggccgatactcttttttgtcagtaaattgagagtgggagccagtggataaacccgaaagccgcacatgctgtctttaatggaaagagaaagcgtttctacccagacccagaaatgcgttatataacgcccgtaaagccgggatttgggcacagaggcgtcatactgcggcaggccggaaatcagacgatccgggtattgctgagctttggataaaaaaagcggaatatcttcaaggcagtgctgaccatctgcatcaacctgtaaagcatgactatagccagcatttgctgctgctcgcattccagccattactgccccaccttttccctgattttgttcaaggcggatcaaggaaacatcgggggttactgtagccagattttcgaggcaatgctgtgtcgctatgtcgctgccatcatcaacgataaagcaatgaagctgatagtgtgatagccgttccaagacagcggacatcgttgccccgtggttatagcagggaataaccacgcatggcgtaatcgtgtttacgcttagcgacataatttgattttcccctgactggccgttttgcactcgccactatcgggggattccacatcatactgaaaagtcagctgatgcttagtttcttcccaatgaatttttaggcgtaggttatcctcgggctgtaaaggtaactgaaattttaccatctcaacagaagaacaatgccagcccggagcaaacagagcttgagcataatgcataacccaatcgatctgtgcgacaccgggcaaaagtggctgaacggaaaagtgcccgcgaaaccaactcaggtcaggatctaaatacaggcgaataatggcctcgtttggagcaggttgctcaagatgggtttcaatgggtttcattaaatagctcctgtaactcaggccatgagcgtttactttgggcattcagtggaatagcggtagttactcgccagtagcgaggcagcgcaacaggttccagccaggaaatgagctgacggcgccaattctgagagcatttcccgctaccttgttggagatagtgctgaaatgcttcatcatctaaaacaaggacagccccgatatagttgcgttttcctcgattgatgatcagtgctgcggcatcgataaccccatcaattgcacatatacgacgttcaatttcagacagagaaatacgtttttcttcgatcttaactaagcgatcacgacgcccctgaagtgagaagttccccttttcatcaaatagcagtcgatcatccagaaccattccatctgtagtagaaagcaggggggagtaaacgcgtaagttattttccttatcctgccggaaagagacgtcagcgaatgtcttccagactgaatggtcttcccggcgagctcgccaggctataatgcctgtttcggtactgccataaatttcatttgggatggtcttgaaccattgtgtgacccgttctgcatcagcaaaatttaatggccctccggcggaaaccacgaaagagcagtttggggcaggaagagaatcatctaatcgttgtagaaatgccgggctgctgatcagtgcgtaacgtgtcaaagaggcctgtggacactgggttaactgttcaggaaattccaccattttacgttcaaatggcaaagcaacagacatcggcagccagattcggaaagttaaaccatacaagtgctggtggctgactgatgcacggataacacaagattgcagtctatcctgccataaagaggccagccattgggtttcgagatccattacagttacaggtttgatgacctgtttaggtacgccgctggagcctgaagtgaacataaccagtactgcatctggggatatatcaggcagtgttgtttcagggacaatattgtcttgttgagctgagaaaataggccagcatggacaagataattttaggggcagatcggtcagaaccccatcaaagctggattgttgttcctgtaactgtgcttcacggcagtgtcccggaataaccggtgtttttccggcatgcagagtagccagcaaagcaacacagaaatgataactgtcatcaaagcataatgcccagcgagatgcggtatggttcctcagacggtgacagagtatcgtgacctcctgtcggagtgtactcagtctgatacagtgattgccccaggtaatgagcctgtcagaggcattacctgctgataaccattgggatacaggaaaggttttcatctctttttcacacgttggcgtaccagccattcaataacgataagtagcccgattaacaggtaactgatcattccattccatagtgtccacagtgtcatatcgttatacaggcaagtaccgagagcgattgtgccatttaaaataaaaaataggcaccagatgtaagtcaccttgcgcgtataggtgatcccctcagttggcaaattcggctctttgagccgggccagcctttccacaacaggaggcccgtagtacagagaaccgccaaaaagggtaaataaaacgatattcacgacaactgggtagtacatcaaaagttggtggtcacgcaggataaaacttgccaaacccagtaaaattccggcaattgacagtatccagcccgtattccaatttacgttttgctgcttatccgctttttttctgtctatggttttacggcttagtaataagcgcaaaacgaaaaacaggatgataatgggcaatatgatattaaattgccgatagctgaccatcgcccataccaaaaatggccaagcgattaacatcacggtattggcaatacgaaacaataaaatcaacaggttcaattagctacccagcatgttcctatatttcaaagtgtatggatgagagaaattattcttcctgcaatagctgctcgactgcatccaccacatcttgaacggtgcggacagatttgaatgcttcgggtttaattttacgccctgtctttttctgtaaatgaacaaccatatcaactgcatcaatgctgtcgagttccagatcttcatagaggcgtgaatcaggcgtgatatcttcgggagaaagctcaaacagtttgaccaaaagttgtgaaacttcctgataaattttttgtttttccatgagttcctctgctgttatccctgttgtgactggatataagatgacaatgtagcaacagaagaaaagtgctgacgcatatcttcgctttcggcggatagcacaatgccatagcgggttttaatcgccagacctaactccagcgcatcaatggagtctaatcccagcccgtcaccgaacagaggcgcttcagtttcaatatcagcaggtgtgatatcttccagattcagggtatctataattagttgttttatttcgatctgtaagttttggtttagttcttgcatgtttgattcttgcattattgtatccaacatctagtaatttgatggtgttaataactgtgtaagttggcgattgagctggcgggcagcaatagcgtatccgctctctatatcggcagaaaaatccccattggcgagttgctcaccaacggtaatggtataaatcggttttttgggtggaatttgataccacttactttttttatccagcatcttttggctgcatgtaatgtgtacaacccggatatcacattcacagcggaccgcaatattggcagcaccgcgctggagtgaaataggatgaccgggcgttgtacgcgttccttccggaaaaatcaagatattgccaccggtagccagtctttcgcggcaggcaagcagcaaggtctcggcatcactgttgatgagatagcgagcagagcgaaccacaccactgagaaaagggttacgtagcagtgcagatttgacgatacaatccacatccggcagattcgatgccaagatgacgtaatccaacaaagtagggtgattggcgacgattagacagcctttatctgtacgcagtttatctgcaccattaaagtgataattcaatactcccagttttctggtcaaaaataggaacaggcgaaaacaggttgagatactacgccgtgcgatacggagccgtttctcagcgtttcgctgaaaaaccaatagtaaattaaaccagatcagagaaagtaataacccaccaataccaaacagagcaaaacagaaccctgtcatcagtagacgccagagccagttagcctgttcagtgatgcggtttattatcttttcttccatgctatttgctccagtgccatgcacaatgatcgccagctacggtaaagcgctgttttccgtttaaccagccgtgtagaaactgaaggctctggggaagggcagggtctgtctccggtgacgggtgcttttcacaatgtaaactctttccttgctcaaaaagaaacgcaactgcgaatggaaagatgggtgtattttcatctatttcattgtggtagaaatcggggatcttgccgtcaaaatcgacaagtaacactttgctgtaaccagcatgatgcagggtcgcaacttcaaataatccctgctgaaaactgtcaattccggcagaaactgaagaagaaaccagcggtgccttggctacaatagtgagattccccacagacgaattatgaactgacatggcgaaattagttggggaaataggttcggtttgtgccagattcatcagtatctgataattgcgctccagttcaccatgacggctggtatagacaatggcatccactttatttcggcgtaaaatgcttaaaccgcaatctacagctaggcggctgcctgaattgagacggcgagctgtcatcatcgggagctgagagcattttgctagagagtgtgagccatctatggcagctggtgaaatggcagaccattttacccattcttcaggaacagaaaggcccggagctacggcttgccaatctgtaatatccaatgtcaatttcatgaaataccgtcaattattttttcttgcaaaccagtagcgtatgcccaagccctaactgatcaattttgttttctacttcaaatccggctttatcgaggaattgattaaagttgtccatactataaaaacggctattgccatttgccatgcaggtaaaataaagcgaagttgcattgaggctatacgcagccgcttcaaatggttgacagtcccagaataattccatgatgcatactctggcatctggtttcattgatgcagcgatcttacgtaaaatatcaacaatctgtgtttcggaaaaacagtcgaggaactgactcatccaccaaatatcggcatctttaggtaatttacaatccgacaacatatcaacagggtggcctgaaatacgttcagccattccctgactgaggatatttttttcagccagttcaatttgctggggtaaatccagaatagtgacgctgactttactgtcatattggcagcagcgcaatgcccattttcctgtatttccaccaacgtcataaatcaatttggggttaagagaaaaaatggcttttaatgctgcattgaaagcagaatcagagtaaaaatggtcaaatgaaaaccagcttgttttggctggttctggtagttggctgagagccgggtaaattgttgaccattcaccaaatacttttaaaccggcaggcttattttcttgcagcgattctttcagatgaaataagccctggtaacatatgtcctgagtaaaatccatattgacgcgagtcattttatcatgcaacaaataatgaccaactttactgaggaaataacgatcatctcgcttaagaataattctgccacttaaccccatatccaataaaacacctactccatagttgtctgattttgaaccactacagatttcatcttttgttgctccctctttatggtgtttatccagaaaagataagataccaaaatcacgcaggcaaattgccgtctgaaatagcattggtgcaaaagcaatgcgctgagcttcagtaattgcttcaaacgcacttaaatcatcttggtcgtaattatggggagtggtcatatatccgtatatccaatggaatagttaaaccctaatgaaattagggttaatgtaaaaatagggctacgttcgcgtgaaatacgccagtaacatgaagaaattattggttggccatagtagctaaacgtacttgaatgtcattattcaatgtattagtccacatattatatttacggtggatctttccgtttttagcctttagtcctttgctgctgatatagtgaatagaataatttttattcgtgtaggtaatacgtatcttaacttcgtgcccacgagtattcagtaatccgtcgataacacccggagaaatttcattcattatccatttacgtttttgccctgcctcaaggatcgcttttttcactgtaggtagtgaattttttgtcacgattgttgtttgttgagtatttattggggttgtgcgggcacagccggcgagcataacgacacaggccagactaactaatatcttggatgttgttttcatcatttttctcttttggggtcgggatggatcacaagcaatatgtctatttccgatgatatattaaataaataatgatgatatcgctacacttactgcccatccttaacggaacagtgacttattgaacattaattgactcgttgttattgctatcatttatagatagttcgttataaaagtttgtttgtgaaatgaaattgtttatatttacctataattttgtagtttgacaggttaagtaaaatataaaaaatatactgatattttaataaaaaatttggacgtgacttattctatttctaataatgatcactcatatttattctctatttttactcaagtaatttatgattcattcatcaggtgaataataatcaccatatttattcttattattgccgcccattttcttatcgctaatcgactaagttaaaaacaagcaccattattgttcagctaatgaaccataatagtgcaaaccattatctctgatattttccccaaccttaatcagttgaaaaaaagcatattattattttggcatgcgtattgctgtgtaaatccaactatatccactggagtatcacagcatgacaacaatgactggctataccttaaaatactggcatgagcggatacgacacgatgtggagtccgtttttgctttactgcaacagcatctagattcctttttacctgatgataatgcctggatttatcttgcaacaccggagcagttacaggctcagattggtttacttttaccggcttatcagcgtaatcccgacgcatttcctttgttcggtattccttttgcagttaaggataatattgatgttgctgactggccgacaaccgcggcctgcccggcgtttgaatatatcgcagatgaagatgcgacagcggttgccagactaaaagcggcgggagctatcgtcgttggaaaaacgaatatggatcagtttgctaccggattagtcggcactcgttcaccttatggcgtcgttaaaaacagtttcaatgatcgttatattagtggcggctccagttctggctctgcttctgtcgttgcccggggattagtgccattcgcgcttgggacggataccgcaggttccggacgggtgcctgctggcttcaataatattgtgggtttgaaaccaacaaaaggctggctttccgccaaaggtgttgttcctgcctgtcgactcaacgataccttatctgtttttgccctgacggttgaagatgctttcagtgttgcggatattgccggaggattcgacgaaaatgatgcttattcctgcataaatccggcatctacacccgcaacattgccggatcaccctctatttgctattcctgccaatcctgtattttgtcatgacacgattgctgaatccgcatggcaggaggctctgcacgagttgcaaaatatgggggccactcttcagccaattgatttcttggtattcaaccaactgggtgagcaactttatcagggagcatgggttgctgagcgcacgactgttgtgaatggcatgctcagttttcctgcaatgatggatccagaagtgcgccagattattgacagtggtaaaaattacagcgccgtcgatgcgtttaatgccgaatacctacgggcagaactggcgaggaagatccagcacatattagccggctttgatgctcttattgttcccacgacaccgacaatcagaacgattgaagaaattaaaagaacgccgattcactataattctgaacttggcatttataccaatttcaccaaccttgccaatctttccgcacttgccttgcctgcaccgttccgaactgatggattacccgcaggtatcaccttacttgcaccagcctggcacgaccgggcacttgcatcatttggtctacgctggcagcagcacctcgcattaccacttggtgctaccggccaattacttgatggggaagcgatggtgttaccaccatccgggcagcatattcgtttagcggttgtcggagctcatcttcggggcatgcctctgaacgaccaattaaccgaacgtaacgccgtatttgttgagacgacacagaccgcgagctgttaccgactttacgaactagccaacactcagccccccaagcccggattagtgagggatgacacaggagcatccatcagtattgagctttgggatattccactggcctattttggtgcattcgttgctgaaattccgccaccattaggcatcggttcactggagttagccgatggtcgctgggtgaaaggttttatctgcgaaccggttgcactgaaaggtgcaacggatattacagagttcggtggctggcgtaattgggttatcaatcaggagaaagacaatgtttaaaactgtattgattgctaaccgcggagaaattgcctgccgtgctatccgtactctgaaacggctcggaattgtcagtgtggctgtgtattcagacgcagataaaaattcacaacatgttaaagatgctgatatcgcattaccgataaacggggaaaaagccagtgagagttacctgtgtatcgataaaatcataagcgcagcacaacagagccatgcagaggccatctggccgggatatggatttttgtctgaatgtctactgtttgcacaagcgtgtgaaaaagcgggtattgtctttgttggcccgacatcacaccagattggtgaatttggcctgaaacaccgagcgagagaactggccgcagaagcaggtgtaccgatgacaccgggaacagggttgctcaattcactggatgaagcacttagtgccgctgagactatcggttatccggttatgctgaaaagcactgccggtggtggtgggatcggccttagctgttgttatgacgcaaatgcactgagtgaggcatgggagagtgtgcgccatcttggtgaacagtttttcagtgataccggtgtttttctggagcggtgtatcaggcaggcacgccatcttgaagtgcagattttcggcgacggtaaagggaatgttgtggcgctggaagagcgtgattgctctttgcagcgccggaatcaaaaagtcgtagaagaagctccggcgcctaatttgccggagcagacccgaacggcgttgctggattccgcagtacaattgggccagttggtgaagtatcgcagcgcaggtacggtagagtacatttacgatgtcgaacaggatgaattttactttcttgaggttaatacccgtctgcaagttgaacatcctgtgacggaatgcgtgaccgggcttgatttagtggaatatatgctgcgggttgcggctgggctacccattgactgggaggatttaaagcgggcaccggttggagccgcgattgaagtgcgcctgtatgccgaaaacccactgaaaaactttcagcctgctccgggtgttctgacggaagttaaattctctgaaggtatacgtatcgatagtggtgtgagcacgggcagtgaggtttccgcgttttatgatccgatgatcgctaaaatgattgttcatgcagaaaatcgagaaaaagcgctgatcaaactgcgtgaagcactggattcctgccaattgcatggcattacaactaatctggaatacctacgtcaaattacagccagtgaaccattccaaaaaggacaagtctggacccgaatgctggatagctttgaacctcaggcaagtgttattgaggttctgaaagcggggacatggagcagtgttcaggattatcccggccggtcagggtattgggatatcggtgttccaccatccggcccgatggatgatctggcttttcggttagcgaaccggattgtcggtaatcatgaatcggccgccggactggaatttacgctggaggggccaaccttacagtttcattgtgacgcactgattgcgctgaccggcgcagagagtagcgcattattagacgggacaagcgtaccttattggcaaccactaaatatcaaagcggggcaaatacttgagatagggcgggcacaatccggctgccgtacataccttgcggtcagaaatggcattgatgttccctgttacctcggaagccgttctacctttgctctcgggcaatttggcggacatgctggccgcatcttaaaaattgccgatatgcttcccatctcacagccagccttacccgcctgtacaactcccgcaccaatcagcctaccaaaggcacctgaacctgcctcgatccccgtttatggcgatatatgggatattggcgtactttatgggccgcatggtgcgcctgattttttcgctcaggattatatagatgaatttttctctgccgaatggcaggtgcattacaattcaaaccgtctgggtgtacggttaataggcccaaaacctgtctgggcgcgtcctgatggcggcgaagcgggtttacatccttcaaatattcatgactgtgagtacgccattggttctatcaattttacaggcgattttcctgtcatcctcacccgtgacgggcctagcctcggtggttttgtttgccctgttaccattgccaaagctgaattgtggaaagtcggtcaggtcaagccgggagatcgtatccgtttccatcccgtcagtatggaagaagcgattactctggaagagcagcaaaatcgtattattgccacgttgagatcaacgtcggaagcaccattaaaactagagcgaacattacagatagaagaagaacattctggtgccgtgctggcagcggtttccgccactcattctgctccggcggttgtttatcgtcaggcgggagataactatattctgatcgaatatggtgaaaatattctggatttggcgctgcgcctgcgggtacatctgttgatggaaaaactacatgttttagctgaaccgggaattaaagaaatagctccgggtgtacgttctttgcaaatccgctatgacaatcggcaaatagaacagcagaaactcatcgctttgttgctctctttggagaaacagcttggcaatgtcagcaccatgaaagtgccatctcgcattatccatctgccgatggcatttgaagacagcgcaacactgggagccgtggaccgttatcagagcacggtaagatccagtgctccgtggttaccgaataacgtcgattttattcagcgtattaacgggctggctgatcgtgaagctgtgcgccgtatcctatttgatgccagttacctgatcctcgggttgggagacgtgtatctgggtgctccgtgcgctgttcccattgaccctcgccatcgccttttaagctcaaaatacaacccggcacgtacttttaccgcagaaggaactgtcggtattggcggttcgtatatgtgtatctatggcatggattctcccggaggttatcagctggtgggacgaaccctgccgatttggaacaaatttctgaaaaatgaacagttcgaggaagataagccgtggctgttgcgattttttgatcaaatccgtttttatcctgttactgaagcagagttagaacagttacgggaggattttcaggaggggcgtactgctatccatattgaaaatacgcaatttgattttgccgaacacctgcactttctgaaagaaaatgccgaagatattgcctatttcaaactaagacaggcagtggcttttgaaaccgaggtcatgcgctggcaacaggaacagccggaagaagagcgttctgttcaggatggggaggaacagccacaagaagaagcggatcttaatgagcatggtttgcagattagtgcggatatgagcgggaatatctggaaagtactggtcaaatcaggcgatgacgtggaagaaggccagccgctgattattgtagaagccatgaagatggagctggcgattcatgctccacaggcgggccgggttacaaagattagctgtcagccgggaagtgccattagccccggagatgcgttgttgtggctgggagcgggagatagctgatgtatcagtgatatcacatagccagctatgactgtcaaagtgaacggcgaaacagcgattattgttgtgtcgttatcactgtcagagcctgtgattatacgtgaggataaaaacggtattgtcccctttgatggcaaacgctggctgctgacaacctctgaaatctggtttgctgaaaacggtgttgttcatacaccgacattaagcgacggtcatgtattcaaggccttgatcaccctcaaacattgcctatagagacgccggatagatttaagcaagccaaaaattcatcaaaaattagtgttgcaaaaacgaggggaactatagatttaaaacgcgtacgacagcattaatgcttatatgcagggctttggctatatcacggatgccggcattgttcatggcaagatcaacgacttgtttttttatttttccatatgaaaggttaaaaccaccgactttagtcggtcagctttagctgcgatactgtgttgcacgagaggtgcaatatggattacagatatggcagccacacggtatttcagattgagtatcattttgtgtgggtaacaaaatacagacacaaagtgctcacaggtgaagttggcttacgggtgagagagctagttcgtcagacctgtgaagcgtttgaaatcaggatagtagaaggggtcgtgagcaaagaccatgtgcatatactggtgagttgtcctccgagcttagcgccctcagaaatcatgaggcgaataaagggaaggacagcaagtaagttgtttgaagagtttgctcacttgaaaaagcgttactggggtcagcatttttggggcagaggctatttttgtgcgacggtaggtcagttaacggaagagatgataaaggcctatctggcgcatcattttgaaccgaacccgaatgatcacttcaggctggataattgacgcatcgttcagtcgatgcgtatccggactttcagtccgttaatcactaacccaccgactttagtcggtggttgttgagtctggtggcagatgaactcagcgctaacttactggctgaaattccgcaggataagctggtgggtgttattgtgcgtgatggggcaactcattcacattctgcaatcttagtcagggcgatgggaataccggcgatcatgggcgctgatattcatcctgaattgctgcataaccgaatgttgattctggatggatatcggggagaatttttcattgatcctgagccactggttgttcaggaatatcgccagatcatcgaagaagagcaggttctcagtaaactggccgaaggcgggcagcaacaaaaagcccggcttaaaagtggagagagagtacgggttcagcttaatgcagggctgagcctgaaatatgagcaacaaataggcgatagtattgatggcgtcgggttgtatcgtactgagatcccttttatgctgcatagcggtttcccatcagaagatgaacagagaaatcgctatcaggaaatgctgacacttttccctgacaaatcagttgtgttgagaacactggatattggcgctgacaaacatcttccgtatatgcctattcatgaagaaaacccttgtcttggctggcgagggattcgcataacgctggatcagccggaaatatttctgatccagcttagggcgatgttgaaagcgaatatatcgaccggaaatctgaaaatattgttaccgatggtaagctgtattgaagagattgatgaagccaaaaaactgatcaacagggcaaagacagaagctgaacaatctgctggcacaaccattgcgatgccacaaattggcgtcatggtagaagtgccctctctgatcctgctgttaccacaattgaagaaacgggttgattttatctctattggtaccaacgacttaacccagtatttacttgcggtggatcgtaataatacccatgttgcttctttgtatgacaatcttcatccggcaatgattaaggccttaaaacagattgttgatgaaagtcagcgtattggtttacccgttagtgtttgtggtgaaatggcgggtttgccgatgggagtgctgatattagttggtttgggttatcgttgcctgagcatgagcggccggagtattccacgaattaaatacctattacatcatttagattccgcagaactgagttattttattcaggaaattctgagggcagaaaccacccaacaggtgaaagaaatttgttctgcttttatggaaacccacggccttggtgggctggtgcgtggtggcatttagccgcccatgctattatttaccattgttatttaaggtgatcggttatttacggtgatctgttatttacaatgatctgccttagggcattcacacaacattatttttagtggggaacgatgagcactagctatctggcatttcctaatattgatccggtcatattctcaatcgggccggtatcacttcactggtacggttttatgtatttggttggctttgtttttgccatgtggctggcaaatcgtcgggcagcaaaaccaaatagtggctgggagaagaacgaggtagaaaacctgctgtatgcggggtttgtcggggtattcctcggcgggcgtctcgggtatgttctgttctataacctcccggtgtttatggaaaaccctctgtatctgtttaaggtctgggatggcgggatgtctttccacggtgggctgatcggtgttatttgtgcaatgtggtggttctcccgcaggactaaacgccacttcctgcaaactgccgattttgttgctccactggttccttttggattagggatggggcgcattggtaactttatcaatggcgaactgtgggggcgtgttacgcttgatacaccgtgggcaatgttgttccccggctcccaaagtgaagacatcgcactggcaactaaagacccttctttatggcctattctggaaaaatatggtgtcctgccccgtcatccttcacaactgtatgagatggtactggaaggcattgtcctgtttatcatccttaatttatttatccgtaagtcacgcccgatgggaagcgtctcaggattattcctgatcggttacggtgcattccgcatcatcgttgaatttttccgccagcctgatgcccagctcggattatttgatgggatcagcatgggtcagatcctttcgattccaatgattttagtcgggatattgatgatgatatgggcctataaacgtcccagcaacaataacaccggcaacaatacgcgaaaaaatacgcagaaagacaaggtacaagaggcaaaatgaaacagtatctggatttaatgaaaaaagtgctggaagaaggcacagcaaaagatgaccgcacaggcacaggaacactttcgatctttggtcatcagatgcgtttcaatttgcaggaaggctttccgctggtgacaaccaagcgctgccatcttcgttccatcattcatgaactgttatggtttctgaatggtgatactaatatcaaatacctgcatgataatggcgtcagtatctgggacgaatgggctgatgaaaatggtgatttagggccggtttatggtaaacagtggcgttcatggggcgcaccggatggccgtcagattgatcagctgaccaacgttattgaacagctgaaaagtgacccggactcgcgtcggatcatcgtttccgcctggaatgtcggagaactggataaaatggcactggcaccatgtcatgctttcttccagttctatgtggcagatggcaaactgtcctgccagctttaccagcgttcctgtgatgttttcctggggctaccattcaacatcgccagctacgcattgttggtgcatatgatggctcagcagtgtgatctggaagtgggtgattttgtttggacgggtggtgatactcacctttataacaaccacatggaacagacgaaacttcaactgagccgcgaaccgcgcgcattgccgaaactggttatcaaacgtaagccagcatcattgtttgattatcgattcgaagattttgaaatcgaaggctacgatccgcatccgggtattaaagcaccggttgcaatctaattctgacctaattcagtcagtaaaaataattacttattttttccatccccgttttggggatggaaaaattctttttatatttagatatcatcggataagtaaatcggtaaagaaaaaaacaatttaataaattatcatttctggaaaacctgaataccctcacagaagaaataaattaacgagaaagtgacaaagatatacctcatggatttcaagatgcatcacagccaataaagagtgagagttttgaaatgaaacgtaaatctattgaaaaaaaagtggaaagtttttcggaggatatatttcacgcctgttcaatgaaagtaccgtcaagtagtgaaaaaatacgattgcaacatggagagtatggcggaagttgtgtttttttcaatccgaatggtaccgatacccgttttggtttaactgacgggataaatggcacaatgtatctggcgagtgatcccctgacggcaatgaaagaagtatttcaggggaagctggggattcgggaatctgatctggaaaatttctatattggtattgttgtcatcgaaaaggatctgaggctctttgatacaacaaaattaataaagaaaacctcgttgacactcaacgatatgaccacatcatcccggaaaacaactcaattactggctaaaaaagtccatgtagccgggctgaatggtatcaaatttccttctaacgtgacgactgaggaatgttttgctctatggcatgatgttcccgatggaactgggattgcagtcactaaagcacattctatacagcgccttagtgaatttgaatatcaggggaaatccgtggcagatattctggtagagcaattaggaatcccggtagaagaaggctgatattggaatttatagaatatacagacaggcaggggaaaattatccccttttcctgattatgcagcatcctgagagccgtataagtgaacaagatgatgcaattcctgcataacggcatcagatgccccctcttgtaataactgggcaacgctaaattcttttccttctggaaacatgccattcaatgcagtattacgcttctccataaagaacgaatattgcagacgatcactaaaccctctctctttcagtaaaggcagtaattgaccgattccttttaatacacctttattagacatcttgctgttatcagtaaactgaaatactggaaaataaaattccccatcaatatttagtgctaatagttttcctgcatctttccaatttttaacagtcactttcgatacacctaattgcttggcagtttctgctgatgaaagcaccccgccatcttttttcagggtttccatgaaaatgagcttgctttttaagcggcgtaatagcgttttcttttcaggagtaatttcttctattgccatcgccttagttgtgctggccagaacttcaaacatgaattcaacatcactctttcccaatacacgtttatcgatatgggcctgacctgaggtaaatgcttttcttatgatgtcagaaacagttgcaatgcggtctatcactacatcagtgtcgttgtaatcacgggcctgggcataagtgctcatttgatactccttatgtaagttgcatcttgaaatatgcagaggatagctgttttattaacgattttatattcagtatagtatattaaatcattaatatgagcaaattttaatcaattatgtcattgttgcaactgtgcggaaatggttttactcacatcccagatgtacaatgattccagagtctcttggtaatattatcgagtaggctcgcaaataaaatgtaaccccgcaatatactgatttctttcctcaaatcctctcgcataaatagaaactgacgcttttactctctttcggattgaatatattttgcctgtcggaatgaattgcggcataggctgaatactgatgggtaataaacaaaatggattcacgctgttagagctgctgatagcaatggttttagtttctatgagtctgctctgggggctgtatagctgggaaaattatcagaatagcctgcacttacaatcggcagcgcagaatgtgctgtcgtttatggaaaggcagcaggctctggctaattatcggaatcaggaacggacattatggctggtggctgggccgccctggtgtttagtttcatcagccactaaaagcagtgattgccatgaaggtgagggagaacgggttagttccccccatgatgatgtgtttctggcatcagcaactagccaccgaattgatttttatggtatccggaataccgcaatgccagccagcttcgcgctggcaaatgcagccggagaaataagtgttgtgatctcaggacggggcaggatcagaacatgcagtaataatctaaatcagctgcctgattgtgagggaataaaaaacctatgaactgggctattggttattacaggcaaaaacagtcaggtttttccctgttggaagtgttagttgccatgttggttggtagtgtcatttttattgcgatggcaaaaacctatccggttttatcgagtcagatcctcgatctttatcgtcagtatcgtcttcattatctgatcaaccgcgtggctcatatgatggaaaaagatctccgacgagcgggttattgtctggacagaaagcaatgtaaaggggaaccgctggtgatccaaaataaacaggctgaatctacaaattcctgctttattagcgcgtttgatcttaatttaaataatcgctgggaagaacctgaacatgcagcctctgaattcttcggttatcggttaaataatcgcattctcgaatggaaaagaggggcggtaagttgtcaggacaatggctgggaacggctttttgatcccaaagaggtgaatattgataagtttcaccttgaacaatcgaggtcactgcatggagtaatatttatcacgttatccatcaaggccagttgggtgaaatctccttctattattcatcatcatcgcaccacaatccggttgcgtaatatcaggaaataattcggtgaatcaacacaggtattcaagatgcgaacagcaaagcggaaatgccttattgatctctattcttatgatgctgacattaagtttgatgacgctgaaagcacttcattatcaacaggaaaacgccatgttaatgatgtttgatgaacaacggtatctgaatgcttttcaacatgctgaatcatctctggcgtggggaaaagtccagttatggccgcttgagtcgcagaaactggaaaactggtactgtttacaaaagcccggttcttatctgaaaagctgcctccggcactttgaggacaatctttttctgttaaagggaacagcgcagttttccgcaggagaacagcttgagttttatcaatggatgaaacggatgaaacacttaaatcgggatacacttattcctattgaaagtggctggctggatttttgccctgtgactcaggctgctttttgtttatgaacgttatttatgaaaatcgtttatgaaaatagccccgataaaccagagaaataaccgacagagtggcataagtttgccggaggttatggtggcatctgtggtgttcgctatctccctgttaggtttgatgcgttaccatcaggcgctgtcatcaaattttcagcagtactggctgcaactcaaggcagtaaagctggcacatgaacaattggaacgatatgaattatcagaaggcaaacctccacgggatgaaacagcgccacaacaagggtgggaaactgagtttcagcaggaatttgaattatcggggtgctaccggataacggtgaaggtgacaaaaggctataatccttcaggtaaattagaacgctggttttgtgcaggtgggagtattgatgtttacagtttatcattcaaatcaacttgatcttctgaaggagttgatgacgagatttattggggaaaaccctctcgccaacccatttgacaaagaagtgattctggttcaaagccccggtatgtcgcagtggctacaaattcagctggctgaaagactggggattgcagcaaatatcgagtttccactgccggcaacgtttatctggcagatgttcactgtggtattaccggacgttccgaaagaaagtgcattcagcaaagatgctatgaaatggaaactgatgacacttttacctggtctgttaacagaacctgaatttatagcactcagacattatcttgatcaggataacgataaacgcaaaattcaccaattggctggcagggtagctgacctgtttgaccagtatctggtttatcgtccgcaatggctggaaagctgggaaaaagggcaacttgttgaagggctgagcgccagtcaggagtggcaaaaacggctatgggttgcactgaacgaatatacccttcaattacagcagcctatgtggcatcgtgcccatttatatagccggtttatttcaacgttggaaaaaggccattttccacgggaaaaactgctttcacgggtttttatctgtggcatatcctccctgccacccacttatatgcaggtaattaaggcgctggggcaacagattgatatccacctgatgtttaccaatccatgccaatattattggggggatattcagagttatacatttctcgccagactgaacagccgtaaacctaaacattatcgaactcagcaatatctggagcggttccgggatccagataatgccccttctcttttcaacgaagaaggcgaacaggaactgagtaacccgttactggcatcatggggaaaactgggccgagacaatctttatctgctgtcacagctggagccagacgctgatattcatggctttgttgaacaggaaccaggttgccttttacatcagattcagcgtgatattctggaccttgaagatcatgcccagattggttcaacagataatacattcaacaatagcctgaaaaaacgtccgattgatcgaaaagatcgctccgtatcttttcattcatgccatagcccacaaagggaagtcgaggttttgcaggattatgtcctgcgcctgttagatgaaaatccttctctgacgccacgggatattattgtgatgatggcggatatcgacagttatacgccttatattcaggctgtattcggtaatgccccgagtgaacgttatattccttttgctatttctgaccgtaaagcccgtcaggcacatccggtattacaggctttcattactctgctggatttaccccaaagccgttttaccgccgagcaggtattggcactactggaagtcccggcactggcgggtaaattttcaattcaggaagaaggactgcgtttattacgtcgttgggtaaaagaatccgggatctgttgggggctggacgatgacaatattgaagcgctgtccctgcctgctacagggcagaatacctggcattttggcctgacacgtatgctattgggttatgcaatggatagccatgcagggccgtggaatgatgttttaccttatgatgaatccagcggattggccgcagaattggcagggcaactggctgaatttctgatggagctaaaccgctggcgcaagatcctgagtgaagaacagcctctggcggactggctcggtatttgcccacaattgctggaaaccttttttattgcggataatgaaacagagctggtattggcactgattacccagcaatggcagaaagtggtagaaaatggcctgtatgcgcattatgaccaaaaaataccgctggtattgttgcgtgatgaactggcacttcgttttgatgatgaaaaaataagccagcgttttctggcgggttcactgaatttctgtaccctgatgcccatgcgttctgttccttttaaagttgtttgtctgttgggaatgaatgatggggtttatccgcgaactattccaccactgggttttgatctcatggcagaaaaaagccagagaggtgatcggaaacgacgtgatgatgaccgctatctgtttctggaagccttgatctcagcagaagaatgtctttatgtcagctatatcggtaaatcaatccgcgatgataaagagtgcaatccctccgtactggtgaatgaactgctggattatatttgccagagttgccgcttgccggaagatgagatgctgaatgttgatgacagcgcaaaaaggatcagaaaccatttattgctccagcatacccgtgtccctttcgcgatagaaaattttcagcctgaacatgaacaacaaagttatgcggcggaatggctgccggcggctagtttgcagggcgtttccccggtttattttggtcagccattagattgtgacaccagcgaaataaaagaggtatcactggatgagctggtgcggttctatcgccatccagtcagggcattcttccagcaaacactgaaagtccattttgttattgaagaaacggagctgcctgaagaagaaccctttgtattggatcacctgcaacgttatcaattcaaccaactattgctaaatatcctgattgagcaggaacagcctgaatcgctgttttatcacctgcgtgcatctggcgggctgccacatggcgcatttggggaagtttactggcttaatcagttggaagcgatgcagttacttgcagataagatccgtgaagagagagtggagagttctgttattgagctatgctatgagttggatactgtcactttgaccggaaaagtgaataaagttcaaccggatggaattttatgttggcgcccggcgaacttaactgccaatgatggtatccaactatggattgaacaccttgcctattgcctttctggaggagacggcgaaagccgcatatatggaagagaaaacagtgcatggcgtttttcgccattatcggttaacgaagccagaaattatctgaaccatctggttgcgggttattttcagggaatgacagagcctcttcccctattttgccggagtggttgggcatggcttgaggcttgttatgacagggaaaaccagcagatcgattttagtgaagaaactcagcaaaaagcagaaagtaaattaatgctgcaatggctgggagcacaaagaaaaaatggtgaaattaacgatgcatatactc

SEQ ID NO: 3217 - DNA, 25983 bp, Xenorhabdus sp.; identical to SEQ ID NO: 3216
  CDS (19112)..(19666)

SEQ ID NO: 3218 - DNA, 25983 bp, Xenorhabdus sp.; identical to SEQ ID NO: 3216
  CDS (18000)..(18794)

SEQ ID NO: 3219 - DNA, 25983 bp, Xenorhabdus sp.; identical to SEQ ID NO: 3216
  CDS (17086)..(18003)

SEQ ID NO: 3220 - DNA, 25983 bp, Xenorhabdus sp.; identical to SEQ ID NO: 3216
  CDS (15695)..(16969)

SEQ ID NO: 3221 - DNA, 25983 bp, Xenorhabdus sp.; identical to SEQ ID NO: 3216
  CDS (14704)..(14931)

SEQ ID NO: 3222 - DNA, 25983 bp, Xenorhabdus sp.; identical to SEQ ID NO: 3216
  CDS (11116)..(14676)

SEQ ID NO: 3223 - DNA, 25983 bp, Xenorhabdus sp.; identical to SEQ ID NO: 3216
  CDS (9600)..(11039)

SEQ ID NO: 3224 - DNA, 29792 bp, Xenorhabdus sp.; identical to SEQ ID NO: 1440
  CDS (25773)..(26765)

SEQ ID NO: 3225 - DNA, 27693 bp, Xenorhabdus sp.; identical to SEQ ID NO: 1472
  CDS (21018)..(22442)

SEQ ID NO: 3226 - DNA, 27693 bp, Xenorhabdus sp.; identical to SEQ ID NO: 1472
  CDS (19955)..(20686)

SEQ ID NO: 3227 - DNA, 27693 bp, Xenorhabdus sp.; identical to SEQ ID NO: 1472
  CDS (17623)..(19875)

SEQ ID NO: 3228 - DNA, 27693 bp, Xenorhabdus sp.; identical to SEQ ID NO: 1472
  CDS (15630)..(17525)

SEQ ID NO: 3229 - DNA, 27693 bp, Xenorhabdus sp.; identical to SEQ ID NO: 1472
  CDS (14992)..(15498)

SEQ ID NO: 3230 - DNA, 27693 bp, Xenorhabdus sp.; identical to SEQ ID NO: 1472
  CDS (14051)..(14890)

SEQ ID NO: 3231 - DNA, 27693 bp, Xenorhabdus sp.; identical to SEQ ID NO: 1472
  CDS (13330)..(13944)

SEQ ID NO: 3232 - DNA, 27693 bp, Xenorhabdus sp.; identical to SEQ ID NO: 1472
  CDS (8617)..(9393)

SEQ ID NO: 3233 - DNA, 27693 bp, Xenorhabdus sp.; identical to SEQ ID NO: 1472
  CDS (7633)..(8286)

SEQ ID NO: 3234 - DNA, 27693 bp, Xenorhabdus sp.; identical to SEQ ID NO: 1472
  CDS (5150)..(6574)

SEQ ID NO: 3235 - DNA, 27693 bp, Xenorhabdus sp.; identical to SEQ ID NO: 1472
  CDS (2189)..(5062)

SEQ ID NO: 3236 - DNA, 27693 bp, Xenorhabdus sp.; identical to SEQ ID NO: 1472
  CDS (1213)..(2172)

SEQ ID NO: 3237 - DNA, 26092 bp, Xenorhabdus sp.; identical to SEQ ID NO: 344
  CDS (5301)..(6488)

SEQ ID NO: 3238 - DNA, 26092 bp, Xenorhabdus sp.; identical to SEQ ID NO: 344
  CDS (6466)..(6924)

SEQ ID NO: 3239 - DNA, 26092 bp, Xenorhabdus sp.; identical to SEQ ID NO: 344
  CDS (7226)..(7849)

SEQ ID NO: 3240 - DNA, 26092 bp, Xenorhabdus sp.; identical to SEQ ID NO: 344
  CDS (9648)..(10511)

SEQ ID NO: 3241 - DNA, 26092 bp, Xenorhabdus sp.; identical to SEQ ID NO: 344
  CDS (11235)..(12059)

SEQ ID NO: 3242 - DNA, 26092 bp, Xenorhabdus sp.; identical to SEQ ID NO: 344
  CDS (14678)..(15136)

SEQ ID NO: 3243 - DNA, 26092 bp, Xenorhabdus sp.; identical to SEQ ID NO: 344
  CDS (18990)..(19646)

SEQ ID NO: 3244 - DNA, 26092 bp, Xenorhabdus sp.; identical to SEQ ID NO: 344
  CDS (21917)..(23860)

SEQ ID NO: 3245 - DNA, 26092 bp, Xenorhabdus sp.
  CDS (24930)..(26006)
attaatggcgcgccggtctggatccatatcgactgggatgttcttgagcccggctttttaccggcggattattcagtgccggatggtatgttgccatcgcaaattcaggcaatatttgaagcaatgcctttggaacagcttttgggagtcgaactgtctgagtttaatgcttcaactgatgaagaaaagaacgaaaaagcactttcaattattctcgatattgttgctcctgtatttgaaacagcagcaaaagtgaaatagcaggagaacaattttcttatgcctctctacaacagtattcttgagacaattggccgtacgcctatcgttaaattaaatcgtatggctcccagccatgccacggtatatgtgaaggtggagtctttcaatcctggcggttcggtaaaggacaggcttgctctttccgttatccttgatgcagaagcaaaagggctactgaaacccggcgatacaatttgtgaatgtacttccggtaatgtcggcattgccttagcaatggtggctgctgcccgtggctacaaattcgtggcggtgatgtcggatagttattcggtagaacgccgtaaattaatacgtatgtatggcggaaaagttattctctcccccggtcatgaaggaagtagtggtggaaaccgtctggccgataagcttgcggcaaaacatggctggtttcgtgctaatcaattccaaaaccctgccaatccggcttatcaccgtgaaacaacagcagcagaaattctcagtgattttgccggaaaacggctggattattttgtcacgggttttggtaccagcggtactctgaccggagtcggtcagatgttaaaactggcgcggcctgacgtaaatattattgctactgaacctgaaaatgccgctgtactggcgggtaattcttggaatttacatcaaattcagggtctggcaccggattttatccctgacatactcgataaaagcgttattgataagctactgaccgtggatgaaatatcggcgcgtgatacagcccgtcgcctcgctagggaagaaggcatatttgtgggtatttccgcaggggcgactttggcaacagcacttcgtgttgctgaaagtgcaccagaaaattcggtattactcgcaatgctgcctgatacgggggaacgttatctttccacgtttttgttcgaagggatgaatgaagggtcagatgatgagtggctggcatctctgtaatcattgttgaggacatttgatctgatggaaattgcttaatgaatacagttgcattgattactgatgaagccagcttgccagaagattatgatatgccgttgttactcgatgcctgtcgcactatcgggctgagcactgagatatgttcatggcaggaccagactattgattggtcacgttttgatgcggtgcttttgcgttctccgtggagctacgtcgatcatttacctgaatttctggtctggtgtgaacgtattagtgttttaacagaactgctgaatcccttgccagtagtgcgctggaatcttgataagttttatctggctgatctcgcggcgcacggtgtgccggttgtacctagcaggtttattagccccggtatgaatatcttacagaacctgcgggcatttcttgctgagcatacggaagctgacgaaattgtgataaagcctactgtaggagcttattcgaaggatattcagcgctataaacgacagcaggaggataaggctgtcgagcacatcacttatctgatagaaaaaggttgtcacgtaatattgcagccctatctggcttcaatcgatagtgagggcgagactgacctgacctacttcgacggtatttatagccatgctatccgtaaaggtgctttgcttatgtccgatggcacagtgaatttcccattacaggaatttcgcaaggcgcgagtggcagatgaagatgaacgtgcagttgcttcacttgcccttgataccgctgttcggcatatggggcttgatcatgctttgctttacggacgtgtggatcttgtgcgggataatggtggtaagccgattgtactggaaatagaaatatgtgagccttcgctgaacctgccctttgctgagagtggggcgatgcgatttgcacaggctctggctgatcgactgataaaatattctgcttaacggaataatacccctgagaagtaaaagtttgcttctcaggggtacaaatttagccctgataatccaggtaactgaataaggctccaagtttatggttggcctcttgtttatcaaaaggctctagtggctgatgcggatccagtcccagtaattctaggtattctgcttcttcttccgtcagcagtttcttttttctcaacttgagtacattgttccactgccagataccgccggagtcttcaatcgggcatgtcccgtttcctgcggtgactttaggttgaatgatgtctttttccagaactttttctactgtgatctgatgatcccagcagtcaccaaagtcatattggtagtgaagctcactcccgacatcacgtaaaaataggccgagacagacctgatcataattttcttccgggatcattattccgccgacctcaaaacagaacaggtgtgcatcttcccatcccatagcagcctgtatcacatcatgcacttcactcagcgtcatctggttactgagatgaacccggcgccagactgctgggcttgcttcatctaagctgattttaacaaccagcccctgagggagtattgagtctgaggtatcagttagccccatagcaaagagctggaaactggcttctgacaggttgtcgaataagccaaaccttttacgattgatggcagggtcgtaaagcgcgtgagccaaatccagatattcattggtcaggcagcgctcttctgatgagagcttatatttctcgatagcagccgagtaggtcagtcgtccggcaaagatgtctttgttggcataatagtagagtttcagtaaatctctgggttttttcgctttcagtagatactcttcaggtggcagccaagtcatcatgagcgatgattgcacattgtgaccgtaattggcgtaaccaagacggctattttcctgtcgcttaggattgacctcataactcagtttctggctccattgctcaagatcaaacgcttctggctgcgtccagtcgatgggaagttgggctatccaatacagcgaatagaggtcgagtggtgtgttcttattttgctgaacggaaaggatccagggcaatatctgttttagccagtccggagaaaccggagtgaagttgatatcgctgcttaactgttctaacaactcaggaatgggttggtcaggatcgatattcagcatgctctctctgatgcctgatttaaaatcgagcatcatacttagctgatattcctgattattcagcatgactttcatcatcatactggcacagtcattgccatccacctcagaagcgtatatttcatatatttcagcggctgcccgtgctttatggtgtgccatagcgcgttttttccatcgcttcatataagacttcactgaaggatgtcggttgaaatgggcacacaggttcacaagctgcaaataggataaatttttccaggccgaagaagggtattgatccagcatttcagcactggcaagcgcaatagattcttcaaaatattgcgtcagcagaagcaaagcatcaataccccatggatattgaacgacttccgtcagaatataaggcagtacttcaggtggtgcgacagaaaaaccactttcaaaaacctcaatgaattcgatactggatttcaggttaaactcattaatcagttgcctgattttctgcggtttttgcgggaaaggggtaacattagcctcatcaggatactcagacttttccatcagctgtgcaagatccgtcctgatatgaaactgatatcgcttcaggattgagatacataacaggacattcttgtgattaagctcgaagttttctttgcaatattccaaaactaatccaacagcctgctcaaattgttctttggttcccttcggggaatgaatcgcgactaactctagttctgcgatggcaacatcaagccagtctttaacggcacttctgatatcatccatcatttcttcagggagtgttatcaccagagtgatcaacataaagacattctctggctcggaaaaccaacgtgtttgctgaggggttagctgctgtttctgctcaggctttttggcgtattcttctattgcagaggataatgtttcaggtgttattttcatcactaagctctttaactattgaggggtgaactaaaagagtgatcatgattactgtcaaatccacccttctgtttttttatgaacatgaataatctagattgtaaactcagaattagcgggatttcatgctgatgatacctgttattgttgtcttaatcgcgtatttattcagtgaatggataagctggtagctgattattattaacttattgatcaatttactaaagataaaatggcagatgtaaattctcaccaaaactcagtcttatcatctgaacgataaattcactctggagtgagtggcttcattttatttgtagtatgttgaaaaacttgtgctactttcatctactgatgttaaaccggtcttatacactcatacatggaactcagagtatgaataaaaaaataatttcaggatgctattttggactattgttggttgcatccttgctgttattgtttgaaaaaagcagtgatatctatcctgcactgatttctgttggggtattcagcattctttttggcctgacatttctgctttcagcgcgctggttattttccgtggtgtttaccggaactcttttcattatcatcaaattcctcaaccagctaaaagttcattactacaaagatcaactgatgttttctgatttgaatattatgcttgatccttcaaatcaggaaacattacatcattattggctggcaggtctggctgttgcagctatgctggtctggctaatcttcaatatattcctgagctggaaaagtgcaaagccagttccgggtatcaagtggcgtggattaagcgtggtactggttgctgtcggggtctgggatgtcaatatgacagtcagtgcttaccataatgaatggcaggcagagttgccaaaagggcgcggaacgatgactaatatggtcatgtcagcccgggatgcacaatatcagcctccccaatttggagtatcagctgattattttttgcagcaagcaaaaaatgtctccctgcctgaagcacagtcagaaataaaacctgatgtggtggtgttattgcaagaatctacggtcgacccacatatttatcaattaccaacaggtacccgattacctaatctctttatgttcgggcatgatgccgatgtgagcgcgcaaggtttgctgcgggtgcaaacttttgggggtggaacgtggttatcagaattctctgttctgacgggactggatacagatgattttggctcgcgtaaaaatggcgtgttttattttgtggttgatcatttgcaaaacagcctgttccgtacgatgaaagataatggctattacaccgttgtactgactccattcaataaatcggcttatcatgccgggcatgcttaccagacactgggtgttgaccgcattattcagccacaagagctgggttatccggcaagtatggatgagaatttgtggaaaatcagcacacaggatatgttgtcttatgtgaaaactattctggctaaggaaacggataaacccatctttatttattctctgaccatgtatgaacacgggccttatgaagagagccatagcgatgattatgggctggcaggcaaattggaaaattcatccgctgtcggaaaattcagtcattatatggaaaaaatcatagcatcagacccatcgatcagagaatttagtgagtttgtggctaaacgcgacaaaccgaccatttttctcacattcggtgatcatcagccaaatatccattttaacgattacgcttctaccctttctgatccggcacatctgacgcaatttaccatgagggataacctgaaacagggagagccgataacgaccggtaaactgaccgatatctcttttctcggtggtatgattttggaaagagcacggttgagcgttcccgctttctatcaggcaaatatgaccatgcgtcatttgtgtgggggggagcttaacgactgtcaggataaggcgctggtagaaagctataagcattatatttaccagcagttatctgtggcgggtaaggagtaaccactgtctggctatacacttcgccgccgccaatgaaagaggcaacttgaaagacgaagtgtataggtttatctcagtggcgtaatgcggtaagcacaacgcctatcgtcattcagaatatattcagttcgttctacttgtgcctgaagaatgtcccggaacattttcagctcagtacgacaaaaactctggcagatactggcagcggcacagatggggcagtggttttcgacaaataaaatagtgccatcttcctgaataaaatattgcgccatatatccctcctgacagcggattttaaccagacgctcaatcttttcttgtagatcggcagcgccttttagcgctgttttatatttttcagaaatttcctgttcgcgggattggatcactacatccagtgcggattcacctaattgctcacgaataatcgtaatcatctgaacggttaaatctgcgtgtgtatccggaaatttggcgttccctttgtcagttaaatgccaaagctggatagggcggccaactccccttgtttcagagcatccttcaaccagcccttctttagccagtttcacaaattgttgacgggctgcttcccctgtcgtgcctaagagcttaccggcatctgcggcttgcatagcgccttgtgtttttaacagcatcaataaccgttcactaacggattgtacggaaatagtgctattttccaagtcaatgcttgacatattgttgaacctgacagtaatttattccaagatttaccttgtttaatttaacgtaagatatttcacaactcaacctgagttcaggataataagcatgataataacgaaggaaaatcgctggagggatctgttttccagtaaaaacgcacccagtgcaatagtactttcgatcggtatcgggctgatggccgccaataccttaattgcgattacgctcctgccttctgccgtaaaggatatcggtggattaaatctctatgcctggaatacaacgctgtttgttgtggcatccattattggttctatactttcagcgagattactgcatacatcaggtgcgagaaatgcctatttggttgctgccctgatttttttaattggaagtttatggtgtgctttggcgccaacaatggaatccatgctagttgggagaaccattcagggacttggtggcggatttttattcgcactttcttattcgatgattaatctggtgtttgaggaatctctctggcctaaagcgatggcgttgatttccggtacctggggagtggcaactttaatcgggccagctattggtggcatttttgctgaaatgaatgcatggcgttatgcatttggcatgatgttacccgtgattttgctttatgccttatttagctatcgaattctacctccgaagcaaaaacagaagacaagcaaaatggctttgcccattacccagctgattctattatctgttgctgtgcttgctgtttcctcagggagtctgtcacaagatgtgaaaatgaatattctcggcattatgacggcggcagtactggtatttctgttagttctctatgaacgtaaggcttctgtgaagttactgcctgaaaatgcgctgagtctgaattcacctcatctcatcttattcgcgactatgatgttcttggtgattgggttatcgggagatgtttttgtaccctactttttgcaagttctgcacgagcagtctcctttagcctctggttatatggtcgcgatggcagcaattggctggactattggggaagtaatgagtgccagttggcagggggcgaaaatgcgttttgcgattgtaagcggccctgcttttatgctggtggggatgctgctgctgcttgcgatgctgccttataaatccataggtgaatggcaaatcatattaccaatcattttaggtttgggactatttggttttggtgtgggctttggctggcctcatttactgacccgtattttgcaggtttccagtgaggctgacagaaatattgccggttcatccattacaacggttcagttgtttgctactgcattcggctctgcactggccggaatggtgaccaatatcttcgggttttatcagccgggtggtctggaaggagcggcttctgcttcccactggctctttttactttttgctgttgcgcccatactggcactatttactgcatggaaatcagcaaagattaccgcagagagccgatagaaacaggttatcaccgcaggcacagcctgaaatccattacgtatatgattgctacattggctttcctcagaaaagccaatgtaggcgaaatagcgctatttcataacttcgcaccatattaaattcggcattattaggtaaatcatttaaataattacggtattagacgtctaaggaaagataaatataatatattgctgcgatatattagaaaaataacctaaggatatttgatgttcatgattttcagccaaccaacggatggttttagtaccagtaagacatccccccaaagatacagccactcaataataaaacatattgttatcctatttatgctgcttttgagcataagcagtgtatccgcaaaagaagttcgacaggaaacgaagctcgttgaagttccggttcttagtcagagtgttacagatatacccaatatcttgacgaagaatgaacatcaacgactgactcgccagctggaaaaactgcgttcggaatataaagtacaaatggcggttttgattgtaccaacgataggaagcgatagcgttgaaaccttttcttcccgcgtatttgctgagtggaagttaggtagtcaacagcgtaatgatggcattctgtttttggtggcatacgatgaccacaagatgcggattactattggttctggcctcataaagcagctgccggattcaaaggtagcaaatattctgagtaaggatgcaaaaccggccttcaaagagggtgactattacgaagggatacgaaccagtattgattccattggggtattgataaaaaacgcagggcaagaaaaagcaccgcagggtgtatcgaacattgctggcgataacgacaatattttagataacgtatcatcaggtgaagacttttcggctccgttgatcctctggctgcttggtatggtagttctgccattggcggtgttccgtacaggtggctggtttaaacgttttctcaaatgcgcctcaacagtcgctgttattacgtttgtactcagtctggtaggtgtatttcctgctcttcctctgggatattatctgctgattttcttcctgccagttattctggtgttaattgtgctctttttcggcgcatcattggtgggaggattatttaaacgcttctttggtggctcgggttctgcatctcctgttagtagttccgatatattcgtcgaaaatgcagagctttctgataataaagacattttcactggtggtggcggtaagagtgataataagggtgcctcagatagctggtgatttatttggttaggaatacagcattgatgaataactgtaatttatctactgttgggatatgaaatttttatttttgtgatcttagccaaaataagtagataaaagctcttttttttttgcttttttcgggaagctgtcaagagaatataaagggttatttttagtcagtcatattttatggctggctaaaatgaatttttttacattttcttttttacaaaagggcatggatatgaaaaaagtttttttgttgtctttgcttacatcaggattggtggtgggttcttttgcttatgctgattcacaaaacgcttccattggttatgcacaaagtaaagtaaaaaatttcaaagatattaaaggggtaaatctcaagtatcgatatgaatgggatgatcctatcagtgttattggctctgtgacctatatggcaggcaagggtggtttatctaataaatcagtgacaaaaggtttgaaaaaacatgaaggtgatattaaatacacctcattccttgttggcccggcttaccgaatacatcctcaggtgagtttgtatggcttagtgggtttggcttataccaatgctaagattaattttgagcatgataaagatagcggtgatataaccaagaaaaaaggctcgtttgcgtatggtgccggtgttgaaattaatcccattgatgatttcgtgatcaacctgggttatgaaggtactacgttcaaaatggcggatatgaacagccctataaatggatttaatcttggagtaggttacagattttaagcccgatattttccccgccatctggcggggaactattaatattgaggtatagtgtgcttcaattcaatcttaggggaatctggtaaataacgattagagctgcttagctgtcacgaatatgattaatattccgatttatttttccatatgacaggttaaaaccaccgtctttagacggtgactttgactttaatgttttgacctacgcgcgtttacgaggtgcgtggttcgacgactttcagtcgtcagcaccgaagtgcgctaacccacctacttcagtaggtggtagttaagttcatggcgtatcttgttcgcaaatatttctttttcctgtgatgtcattttctgctcatacttgctaaagaaatcatccggtgaatcaaacagacctaaatcctgtacaattccggcctgttgaatatacgtgctattatctccatgccattcaacaggagcattagctaaatcatcaatcgccacaccatagcctacaaagtttcctttatgagttgcgtattttttctgtagcgaagtaagatagcctttatctaaaatgataccttcaaagtttagccattgcccattaatatagacttcaacccatgtatgataaatctcctgcggagccatttcatatatttttccctgcataattccgtattgtagtgatttatcaatggtaaagccgtgtaagcgacagggaaggcctagcgcacgaaggagagccataaataaaatagatttggtattacactgaccataacccgcatgtaagatttttgatgctgtaagtgaatcatcctcattaaatccaaaagtaatatcatctttaacaaaattataaattgcttttattttttcagtctgagtcaggtttaaccagcctttctcggtaattaaatgctgaatatttgtggcataaaaatctaataaaggtgtgcatgaaagatactgtttcattacctattttctcctcgtttaaattacttaagactaaaaaatttatgaggagaaaactttcaaaaatccgctgatttttttcgcgaagcttggttttatacccatcaactttctggctgtggaggaaaggtgtgaagcactatcaaaaccacattgcatggcagcatctgttacttttttaccttcggcaattaaaaatagagcatgaataagctggtgaaaaagaatataactttttagatttcctcctgttttttcagaaaaaagatgtgataaacgacttggggaaagaggggtttttgctgatatatcaatgacactatgataggttttttgtgaaaaaattaggtgtcctaatatagcttttaaacggttatcacctattgtgtgattaagattgcaagtctgtgtcagtatctttttatgtagattatcccagtatatgagataagttttttcctgcaatgaagtgtattgagctgatattgccttacacacggatgccaatttattgtaatccaatagtatataattgatttctccattgattaactgatgttttaaacacaatcctaaaggagatgtgtggttaatcaatgtcagccaataaaacctgttattcaatgtaacatcatgaatgacatcgctattaattaaaatcgatttagtttgtaaagtttgcccagaaatagtaaccgttatgggtttgtcatctaaggaaatcagtaattgcagaaaagtgtgcttatgagcatgagtatcaatatctgttccgatgagtgttagatgatcttcagctgcaaatgctgttacaaatggaacagaagacatattttattactccttagtagagcgtatttatattatgggtattacccataaactataagtttattaccagaaaatgcggcacgaactttcagaaagaagccgttcgtgccgtgatattttcaggttaatccgctaataacgtggctcagattgcctactattaatgtaagaaaaacaaaacactcctattgccagaaccagacaataaacgataatcggccaggtagtggtattggagaaaagtgtaatagtgagtgttccaccaattcccaacaacacaccacccagacaggaatagaatgccgttaccgttccggccatatgatcaaagccctgtagtgcaccattaggtgcgacggcaattgctatagcgactccaactccgacaagccacatcgggataatgaaacccaatactgaattaggaatgaaagtttctccggctgataacaacaatgctcctgctgtcaggcaaaacatacccattcgtaatgtattcagtagcccccagcggacgataaaatttcccacacttcgcgctgccaccatcattgcgatagccaccgtggcaaacagcaaactgaaagtcatttgtgataatccttgccggttcatcattacccatggagcggttgaaaagaagacgaagaagctccccagacccgcactgtagcagaatgtgtacagccagaaattcatgctttttacaggaagaagtagctgcgaccattttaatgctgccgtcctttgttgccgggtttctgggcagaatatcccgtacacaataaccgtagctgccatcgcaattcccaataaaacaaaaattgcgcgccaacccagccagacatcaaccagtgttccgagcaaaggcgctatagccggaaccatggcaagcatagagccgagcaatccatagataacgttgatttctttgcggccagaataaatatcgcgcacagcggcgaacatcgctacgagacacgctgaagctccacaggcctgaataattctgaaacccaaaaaaatttctggtgatgaagtgatggcaaggccgaaagaagctaacgtgtaaacaacgccaccactaagtaaaaccgggcggcgaccgaatctgtctgacagtgggccaaagagaagctgaccgactccaaacaggatcatgtacatcgtcaacgtcagttggattgttcctgttccggcaccaagtgcatcagcgatgaaaggcattacgggcagatacatatccatcgccagcgatggcagtaaattaaatggagataacaataatattgtggcggtaagagaatattgccaggaaaaatcttttgtgtgcacgaatccatctcctaaagttaaggatttggcggcgtgctcatagaattgataggttcttgaggacgccgcaacaatcgaaaaaacgaggattgttgcggcttatctatctgttgtgtattcgttgaccattctcatcgggttatcctgttaatttgagagacaaagagtcttaaattacgatggatactttatagacgatgattcattttttctaactatttttatctaattgtgatgggagcggcatttatctgttcgtcatgatgtggttgtaaattccgctgcaataattcaacgcactcctgtgcaccacgcttaagcgcatttcctttcaggctcacaacatgtataggtaatactaatccattttttgtattacggaattccagttgtttcagtgatccatcaattaatttttctttaatgagagagtaaggaagatttccccatcccatacctgcttcaaccagaccgagtgccatcgaaaaattatccgtgcgccaatatttagttgcgacctgagtacgaagatcacttggttcacgatgatgactggcaataataatctgccgggtttggactaaatcctcaatataaagggaagtctgatgagataaagaggggtgggatgatgagattgttgcaataaatgattcatgaccaatgcaataaatttgttcctgtggattaacatgtaatccgccaaaaactaatgccaattgaatacgattctggtgcagtaaaggcaggatatcatcctgaggagcggtaataatctcaatattcattaatggataacgttgattaattgtatgtaaagcgaggaataatttttgtggattaactcccgtagatataccaatagtgagtgtactcccgactccttgcgtcagttcatgtgaaaaaacattaagctgtcgtaagttatcgacaatctcccgcgcgtaaggagccaacgtttttgctttctcagtcggtacgggttcccggctttttctatcaaataaggcaaatcccaattccgcttcaagattagcgattgccatgctaatcgcagaaggaacccggtgtagtgctctggctgcggctgaaaatgagcctttatctaatactgtcaggaacacgagcaagttgtcactggtgaatggcatatccaacctttcaataaaactgatagtagttaacttttattatcacgtttgttgatttaacttgccagtttcaaaataacagcacaaaaacaggtttcgaataaaatatgcagggcattaaacgtaaagtggttttcattactgcttatgaagttatcggctggatgatttcatcgctgacactcgctttcttatccggtaattcggcgggtgttacaggtccactggcgctggtcattacaaccattgcggtcagttggaattttatcttcaatacattgtttgaattctgggaatcacgtcagcagtcacgcatccggacattccggcgtagagtcgtacatgctgttttatttcagttaactttggttatcttcttaatcccgcttattgcatggtggctttcaatcagcttgcttcaggcgctcatactggatttcgcactgattattttcatccctatttatacgttcttttttaactgggcttttgacaaaattttcggattgcccaaatccgcgcttccacaggaagaaagcgtgcttcgttaggataacaaaagccagtaatactcagatattactggctttgtgaaatgttgtgagaggttatgaaacgttattcaatattttgaatctgctcacgcatctgctcaatcaacactttcaactcaatcgcagaatttgttacatcggaattaattgattttgatgccagcgtattcgactcgcggttaaattcctgcatcatgaaatccagccgacggccgacagcttctttctttttcagaatattacgtgtttctttgatatgcgcgtctaaacgatccagctcttccgccacatcaatacgctgagccaacaagataagctcttgctcaagacggttattttctaattgaatttgggcttcttccagcttagtttgtaaacgctctctttgccattgcaggatggccggcatctgttcacgaactttacccacttctactgttacggcatctaagcgcttctcgatcagcgctttaagtgcctgaccttcagtttcacggctttggataaaggcatccagtgccaaatcgagttctgccagcagttgtgcgctgatggcatccagatcctgttcttcggcagacattacacccggccagcgcaggatatcgacagggttgatttccccttcgttgctctgttgcttaatccagccagcggcttcaacgagctgttttgccagcttttcattaagaatcagtgtgccctgagtgcgggtatccagttcaaagcgcaggttacactccactttaccgcgagtcaggcgggaacgaatacgctcacggatgacgggttccagacttctgaattgctccggcagacgaatgtaagtttccaggtaacgttgattgacagaacgcagttcccaggccgcgtttccccagtctcccttgatatctcgccgcgcaaaagcggtcatgctacggatcataactcattcccaatttataaaatgatgaaagattataacgctccatgcagatgcaggataggcattcgccacgttaggccgtataatgcgcccccaataaagtattaacagcggagagaacactatgagccagataggaatgcgtccggcaggaagagcagtagagcaggttcgtcctattacaatcacccgtaattacactaaacatgcggaaggctcagttctggttgagtttggggataccaaggtgttatgtaatgcctccgttgaagaagggatcccccgtttcctgaaaggtcaggggcagggctggatcacagcagaatatggaatgttgccgcgggcgacaaatacccgcaatgcccgtgaagcagcaagaggcaagcagactggccgtacaatggaaatccagcgtctgattgcccgttcattgcgtgcggcagtcgatctgaaaaagctgggtgaatataccatcacattagactgtgatgttattcaggcagatggcggtacgcgtactgccgcgatttccggcgcatgtgtggctctggtagatgcactgaataaattggttgctgatggcaaactgaaagaaagcccgctgaaatcaatggtagcagctgtttctgttggtattgttgaaggtgaaggccgttgtgatttggagtatgtagaagactctgcggctgaaactgatatgaacgtcgtcatgatggatgatggccggatgattgaagttcagggcacggcagaaggtgaaccattcagccatgatgaactgctctcattgctttcccttgcaaaagggggattggaaactatttttgcggcgcagcgagatgcgctagaaaagtaaatagatcaggcggctgaagagtcgccttttttatgtctgtaataacagcaacaagaatgataataatgcacaaaaggagaaacccatgaaagcctatcagcgcgaatttattgaactggcactgaaaaagcaagtgctgaaatttggcgagtttacgctgaaatccggtcgtaagagcccatattttttcaatgcgggtctttttaatacagggcgtgatttggcattgattggtcgtttttatgctgcagcattacaggatagtggtatcccgtgtgatctgctgttcgggccagcttataaagggatcccaattgcaacgacaaccgctgtagcattggcggagcatcatgatattgatatgccttattgctttaatcgcaaagaagcgaaagatcatggggaaggcggaactctggtcggtagcccactgcaaggcagagtcgtagtggtagatgatgtgataacagccggaactgcgattcgtgaatcgatggaaatcatcaaacaacatggtgcaacgttatctggcgttattttgtgtctggatcgtcaggagcgcgggcgggaaacactttcagcaattcaggaagttgaacgtgattaccattgtcaggtcttctctatcattactttaaatgatttgatcacttatctgcgggaaaatccggaaatgcagtctcatttggaagctgtggaagcttaccgtcgcgagtatggtatctgattgataagttctgccgtaatagcaggctaaaaaaaatccctcgcccaatggtgggcggggtgagtagtagaaataacattccgtatataatatggctggaatgtcattactgagcgattgggtagtcaactcagctagccaaatcatgttaacacaaattaatgtaaaaaaacgcctgttatcaaatttctatcatgaaaagtggtaagcgtgatttattgtaattgcgttaatatcaaaggccagcgcacttcaaattctttcgttggtcgataacgaaattcagagcgaacgaagcgagagagcatcccttcacaaaaagccagcaattgtgatgccagtacggtttcatcataactgaaaccctgaccatcccgtattttcttctcttttaagatctggcgaagctgtacttcaatgcgttcaaacagctggttaatgcggctttgtagcttgtcctgctcaaacatcagagcatggcctgtcatgatacgggtcagccccgggtttttttctgcaaagcctaaaatcagcatcaggattaaccggagtcggggaatagtctctttttcatcctgtaggatgagattgatacgtgaaatcaaagagtcttcaatgaactcgatcaggctgtcaaacatccgggttttgcttggaaaatgacgataaagtgcggcttcagaaacaccgacgttggcggcaagttttgctgtggtaatacgctggctgccatcgctggattcaagcatatgtgccagtgcctgcaagatttcttcacgtctgtttttcttttttgtacgttctatttctgccatgtctggtaatacccctgctaagacagcaaaatatctatacctttcgcctttcaagctgcctctttgttggctgcattcattcaccccggtcacatagttatctatgctcccggggattactgagaggcttctgcctctcaccggaggccagcctttggctgggcaaattcgttcccgacgaatttgtcattcccttgcagccgcgatgcaacttgaaatccattgggtataaatcgcaactcaaaactgattgggtatacattttgcccatgcaaagatgggcaaaaatataaaagtgggttaatggtatcaggcgttaggaaaattattgacgaccggaatgaccaaaaccaccactgccacgttcactgctttcaaaatcttctaccaagttaaactcagcctgaacaacgggcacaattaccatttgtgcaatgcgttcacccggttcaatgacgaaagttttatctccgcggttccagacagaaaccatcagttgcccctgataatcagagtcaatcagcccgactagattacccagtactaccccgtgtttatgacccagaccagagcggggaaggatgaccgcagcgagttgttcatccgcgatatggatagccagccccgtgggaagaagttcagtctgaccgggagccagttccactgcattatccagacaagcacgtaaatctaaacccgcagaaccaggagtagcgtaagtcggtaaaggaaattcttgtccgatgcggggatcaaggattttaacgtcgatttttttcatcatagcgtttgaatatctcgtctaataagcggtggctgagttgtaatttatcacagtgtggtaaattaatgctgccatcatgccagaacagctgtaatgcgttggtatcactgttaaagccgtgttcagccagcgatacatcattcgcgcaaatcaggtccagattcttctgcctgagttttccgcgggcgtattcttccacattccgggtttcggctgcaaatccaacgacaaaggggcgatgtttttccattgccgcaacactcgctacgatgtcaggatttttaactaatgtataggtgatttcatcaccctgtttcttgagtttttcagttgcagtctgtttgaagcgataatcagagacggcagcacagccgatgaaaatatgctgtgaagcagccgtttcctgtacttgtttgtgcatttccagtgcgctggtgacatctatacgtttgacgtttagaggcgtcggcaaattaacagggccggtaatcaacgtgacttccgcaccacgttttgccgctgcctgagcgatagaaaagcccatttttccggagctatgattagtaataaaacggacaggatctaatgcctcacgagtcgggccggcagtaattgtgatttgaaggcccaccaaatctctgacagggtttaagtgctgagttgcccgctcgacaatctccgtcggttcaatcattcttcccggccctacatcaccacaggcctgactgccttcatccggaccccaaatcagcacattacgctctcttagtatgttgagattatgctgagttgcttgggcacggtacatttgctggttcattgcaggaacaactgccagaggtgctgctgaagccaggcaaatagtcgttactaaatcgtttgccataccagcacttaaacgggccagcagatcggcggtagcaggggcaagaatgatcaagtcagcccatttcgccagttcaatatgccccatagccgcttctgccgctgggtctaaaagatcatcagaaaccggatggcctgagacggcctgtaatgtcagaggagtaataaaagcttctgctgctggtgtcatcactacgcgcacttgtgcaccgcgatcgcgtaaacgacgtaccagctccgctgttttataagcagcaataccgccactgataccgagcacaatctgtttaccagaaagatgcttaccagaaagttcgttgccggaaagtcctgccattctgattgtccacctgtaagttacgattaccaagattctatcataagaaaataaggtactgagaatatggcgttgagaacgcctctgttttgtgatgactaagtgacaagtttgcgaagcgttacgcaaagcataagaatagctctggcggtcgttttttcatcatgagatattagcgatgtgagtatcggcagtatgcgccatgatggctgttcaccagacacaggataagtaaaaggagcagagaatggatatcacgatggtggaaaaaagcgatgaagtgaattcagatcttgctccccgggagaaactactggcatatggtgccgttgccctgacggatgcagagctgttagcgatatttttacgcacaggagccagaggtgtgcctgttgtacaaatggcagagcacctattgcaatcatttggttctctgtaccatctgctttcagctgattatgctgatttttgctcacataaaggcatgggattatgcaaatacgtgcagttacaggcagtttctgaactggcaaagcgtttcttctccagccaatttatccatgaagatgtgatgagcagtccggtcgcaactcaaaattatttgcaggatttattatcctggcaggatcgggagatttttgtcgtcctgtttttgacaaatcagcataaagtcatttgtcatgatgaaatgtttaaaggaacgataaacaaagttgaagtccacccgcgtgaaattgtaaaacaggcagttaaagtaaatgctgcatcaattatcctggcccataatcatccttccggtaacccggaacccagtctggcggacaaactggtaacagaaaaaatcattgaggcttgtgatttaatcggggttaaagttttagatcatattgttattggcaaacaatattgtgtttcatttgtagaaagaggctggatttaatacggtttttgtacgaaccgatcagatcttagctgttcgggacttgagcatcggcgaatgagggcgtatactacgccacctttgaggatcttgggcctggcgagaagagcctatctcagtgaattttttgctgagagattgtgagtcttttcagcaacgttttttatcagtaaagaaaatttgctgagatgggctcctaagcctgacgaggcggccatacccaatacaaagctcgagctgaattgatttttggagaatagacatgtcccgagtctgccaagttactggcaagcgtcctgtgagtggtaacaaccgctctcacgcattaaatgcgaccaagcgtcgttttctgcctaacctgcactctcaccgtttctgggttgagtctgagaagcgttttgtaactctgcgtgtaactgctaaaggtatgcgtgtgattgacaaaaagggtatcgatacagttcttgctgaactgcgtgcctgcggtgagaaatactaaggagctgaaaaatggctaaaggtattcgcgataaaattaagctggtttcttctgctggtactggtcacttctataccactacgaagaacaagcgtactatgcctgaaaaactggaaatgaaaaagtttgatccagttgttcgtcagcatgtaatgtacaaagaagctaaaattaaataattttagtggattgaaaagcccagctattgctgggtttttttatgcctgatgtcattgaaaccttcatatatttagacagatacggttactcgtgaacgtaaacagtcgttcagttatactacgtttttttgatatatgaatcgtcaggcatgactctgaaaatgactagaaaaaccttaaatatcttacacacagaatcatcatgtggttggggaggacaggagattcgtattctgacggaatctcagggtatgatgcgccgtgggcatcatgtggttatcgtttgctgtcttacttctacactctatcgtgaggcccaccattatggtgttcctgttgtggcgttgccgattgaaaaaaaacgcctctcatgttttacagcaatgcgccgctggttaaaggctgaaggccaccggtttgatgtcattaacacccacagttcgaccgattcctggctggtagctgcggcgagtgccacattaaagcgaatgcccccgatagttcggacccgacatgtttccactaatgtttcaacttccatagcgacccgctggctttatttaaaatcttgccgtcatattgtgacgacgggagaaaaattgcgccaatccctgcacacaaacaatcgctaccctttatcccatatgacatctgttcccaccggcattgatctgacccgttttcatcctgaaaataaacaggcgtgccgccaacgtattggaattgcagataaaccgacaattgggattgtggcaacaatgcgaacctggaaggggcaccgctatctgttggatagctggaaagctctccatcaacgttatccggagtggcaattactgtttgtcggcgatgggccacagcgaaaaaatcttgaaccatgggttaagcaggaaggcctgacggatagtgttatctttcttggcaatcggcaggatgtgccggactgtttaaactcaatggatatttttgcattgccttcttttggtaacgaaggagtgccgcaaggtattatgcaggcaatggcctgtggtttaccggtcatatcgacatcggttggcgcgatttctgaggctgtgattgatggtgaaactggctatattatcgagcctaagtgtgttgaacaattaactaataagttagaattactaataagaaatgcagaactacgtttacagatgggagatgcctcactgaaacgggcaatagctgaatttggtatggataatatgctggataaaatggaatctatatttattaccagtggcagaaaatagtaatttatgctcttatcattgctttatcaaatgcagcatgaattattatattaaagcaaaattgatagttaatttcaccaatacatattaaataaccttgacctcggcttttttgagtaatctctttaatggataattttataattcatcattatgcagcctaaaaatattttgatcatcaatattgcacgttttggcgatacattactcgtcacaccagtgattagagctttgaaactaaactggccggaagccaatattgatgtattggtgcataaaagaacaaaagagattcttgagaatattgatgaaatcaattcaataattgctttttcaaaaacaaaagcgaagtggagaggatggttttctcgtcatagctatgatttggcattggtatatagtaatgataagccattgttacaatatgccagaagaaaagcgaatgttgttgtttgtttttctgatcattcccgtcaaaatttaaatgaattatctgtagaaaaaccgcaagagcttatgcgggctcagcaggaaagagcgttattagcaaatgcccttgggatagagattcatgactggcgtttgaaatattgcgtgagtccgagtgaagcagagtatgcccactcttttttacatctccataggcttgaagataaattaaggattggcttccagttacaaagttttccagcgaaatcttaccgtgactggccggtagactctttttatgaactagctgaacgaatttattctcattacccgtcagcttccattttactactgggcagtcaggatagtgctgaagtggcagaacgcttgtctgagcaattaggcacacaaaggtgtatatctctggctggaaaaacgacgatgcgtcaaaacgcggcgattataagtcaactgagtttatatgttggtgttgatacgggaacaacgcatttggccggagcattggggataccaatggttgctatgtaccatagctttcatcccggtcgctttcttgctccacaacagcatgcaaaattggctgtcatcgagcatccggtggattatcgtcaggcaactcgcgaagatcatatgtcagatatatcggtggaacaggtctggcaatcagtgaaaagcatattggaagccgaagactaaaggataataaaaacgatgaaaatagggtttattgatgtcaccgtgacgatgtcctatggtggtattcagaccgcagtttgggagctagcgaaggcgttgactgacgcagggcatgagatccatattttcggaggtacaggggatattaaaccagaattgggcaatcgaaatattcgggtccatactttcccatttatccccagagaacgtgtaatcaatatcggtcgtcgctttcagcgaattgttgaacgttactcgtttgcgcgtcatgcccgtgaggcggtgattgctgaaaattttgactgggtcatactgacaaaaccttttgattttttctggcccagaatgatgccaactcattcccgtactaagttttgttatatgagcgggggaaccagcttttttaaaggtgatcggctgttagggaaaaaaatatcagcctgggcagcctgtagccattttaatggttggcagattcagcatcatttcaaacaattcccaaatgttatctacaatggagtagatattgataaatttaaacccgctcattctgatatcaggagcaagctggggatccatgaaaatacgtttttgctgacttttgctggccgcttagtgggctggaaaggtatgaaagttgctatcaaggcaatggccttgctgcgagataaggatgttaaattattaattattggcgcaggtgaagaactaaagcaacttgaaagaaaagttgctgagttaagattagaacaatcagtgattttccatcctcctgttagccatgaccaattacctgagttttatgccgcaggggatgccgggatatttccgagtattggcgatgaagcattcggtattactattgcagaggcaatggcatgcggacgccctgttattgccagttatatcggtggaatacctgaagtggtgggaaatgaaaaccagtctggtattctggtcgcaccgggtaatgagacggctattgccggagccgttaatcatctcctttctttaccggatagaggaaaagatatggggaaacgtgctcgtcagagaatagaatccctgtatacctgggagcattctgcaaaccgtttattagacactataaaaaaataatgaagattgcttatattgacccttaccctgtacctgatttccgagttgcttcactgcaaattttgcagaatgtggatgcttttgct

SEQ ID NO: 3246 - DNA, 26092 bp, Xenorhabdus sp.; identical to SEQ ID NO: 3245
  CDS (23961)..(24887)

SEQ ID NO: 3247 - DNA, 26092 bp, Xenorhabdus sp.; identical to SEQ ID NO: 3245
  CDS (22617)..(23741)

SEQ ID NO: 3248 - DNA, 26092 bp, Xenorhabdus sp.; identical to SEQ ID NO: 3245
  CDS (22052)..(22288)

SEQ ID NO: 3249 - DNA, 26092 bp, Xenorhabdus sp.; identical to SEQ ID NO: 3245
  CDS (21130)..(21789)

SEQ ID NO: 3250 - DNA, 26092 bp, Xenorhabdus sp.; identical to SEQ ID NO: 3245
  CDS (17387)..(18028)

SEQ ID NO: 3251 - DNA, 26092 bp, Xenorhabdus sp.; identical to SEQ ID NO: 3245
  CDS (16570)..(17301)

SEQ ID NO: 3252 - DNA, 26092 bp, Xenorhabdus sp.; identical to SEQ ID NO: 3245
  CDS (10180)..(10686)

SEQ ID NO: 3253 - DNA, 26092 bp, Xenorhabdus sp.; identical to SEQ ID NO: 3245
  CDS (8847)..(9902)

SEQ ID NO: 3254 - DNA, 26092 bp, Xenorhabdus sp.; identical to SEQ ID NO: 3245
  CDS (7222)..(8613)

SEQ ID NO: 3255 - DNA, 26092 bp, Xenorhabdus sp.; identical to SEQ ID NO: 3245
  CDS (4831)..(6378)

SEQ ID NO: 3256 - DNA, 26092 bp, Xenorhabdus sp.; identical to SEQ ID NO: 3245
  CDS (1275)..(2183)

SEQ ID NO: 3257 - DNA, 26092 bp, Xenorhabdus sp.; identical to SEQ ID NO: 3245
  CDS (280)..(1236)

SEQ ID NO: 3258 - DNA, 26092 bp, Xenorhabdus sp.; identical to SEQ ID NO: 3245
  CDS (1)..(261)

SEQ ID NO: 3259 - DNA, 32396 bp, Xenorhabdus sp.; identical to SEQ ID NO: 112
  CDS (1)..(495)

SEQ ID NO: 3260 - DNA, 32396 bp, Xenorhabdus sp.; identical to SEQ ID NO: 112
  CDS (576)..(1298)

SEQ ID NO: 3261 - DNA, 32396 bp, Xenorhabdus sp.; identical to SEQ ID NO: 112
  CDS (1421)..(2365)

SEQ ID NO: 3262 - DNA, 32396 bp, Xenorhabdus sp.; identical to SEQ ID NO: 112
  CDS (5578)..(5670)

SEQ ID NO: 3263 - DNA, 32396 bp, Xenorhabdus sp.; identical to SEQ ID NO: 112
  CDS (11153)..(11413)

SEQ ID NO: 3264 - DNA, 32396 bp, Xenorhabdus sp.; identical to SEQ ID NO: 112
  CDS (15700)..(16968)

SEQ ID NO: 3265 - DNA, 32396 bp, Xenorhabdus sp.; identical to SEQ ID NO: 112
  CDS (19730)..(20311)

SEQ ID NO: 3266 - DNA, 32396 bp, Xenorhabdus sp.; identical to SEQ ID NO: 112
  CDS (20389)..(21156)

SEQ ID NO: 3267 - DNA, 32396 bp, Xenorhabdus sp.; identical to SEQ ID NO: 112
  CDS (22299)..(23642)

SEQ ID NO: 3268 - DNA, 32396 bp, Xenorhabdus sp.; identical to SEQ ID NO: 112
  CDS (23646)..(24884)

SEQ ID NO: 3269 - DNA, 32396 bp, Xenorhabdus sp.; identical to SEQ ID NO: 112
  CDS (24898)..(25671)

SEQ ID NO: 3270 - DNA, 32396 bp, Xenorhabdus sp.; identical to SEQ ID NO: 112
  CDS (25916)..(26293)

SEQ ID NO: 3271 - DNA, 32396 bp, Xenorhabdus sp.; identical to SEQ ID NO: 112
  CDS (26302)..(26898)

SEQ ID NO: 3272 - DNA, 32396 bp, Xenorhabdus sp.; identical to SEQ ID NO: 112
  CDS (26920)..(28140)

SEQ ID NO: 3273 - DNA, 32396 bp, Xenorhabdus sp.; identical to SEQ ID NO: 112
  CDS (28275)..(29315)

SEQ ID NO: 3274 - DNA, 32396 bp, Xenorhabdus sp.; identical to SEQ ID NO: 112
  CDS (29378)..(29551)

SEQ ID NO: 3275 - DNA, 32396 bp, Xenorhabdus sp.; identical to SEQ ID NO: 273
  CDS (29085)..(29924)

SEQ ID NO: 3276 - DNA, 32396 bp, Xenorhabdus sp.; identical to SEQ ID NO: 273
  CDS (28208)..(28801)

SEQ ID NO: 3277 - DNA, 32396 bp, Xenorhabdus sp.; identical to SEQ ID NO: 273
  CDS (27625)..(28179)

SEQ ID NO: 3278 - DNA, 32396 bp, Xenorhabdus sp.; identical to SEQ ID NO: 273
  CDS (26022)..(26726)

SEQ ID NO: 3279 - DNA, 32396 bp, Xenorhabdus sp.; identical to SEQ ID NO: 273
  CDS (24469)..(24888)

SEQ ID NO: 3280 - DNA, 32396 bp, Xenorhabdus sp.; identical to SEQ ID NO: 273
  CDS (23906)..(24469)

SEQ ID NO: 3281 - DNA, 32396 bp, Xenorhabdus sp.; identical to SEQ ID NO: 273
  CDS (22838)..(23797)

SEQ ID NO: 3282 - DNA, 32396 bp, Xenorhabdus sp.; identical to SEQ ID NO: 273
  CDS (22079)..(22828)

SEQ ID NO: 3283 - DNA, 32396 bp, Xenorhabdus sp.; identical to SEQ ID NO: 273
  CDS (18908)..(19807)

SEQ ID NO: 3284 - DNA, 32396 bp, Xenorhabdus sp.; identical to SEQ ID NO: 273
  CDS (12869)..(15367)

SEQ ID NO: 3285 - DNA, 32396 bp, Xenorhabdus sp.; identical to SEQ ID NO: 273
  CDS (10530)..(11270)

SEQ ID NO: 3286 - DNA, 32396 bp, Xenorhabdus sp.; identical to SEQ ID NO: 273
  CDS (2241)..(2756)

SEQ ID NO: 3287 - DNA, 32396 bp, Xenorhabdus sp.; identical to SEQ ID NO: 273
  CDS (1)..(2109)

SEQ ID NO: 3288 - DNA, 30934 bp, Xenorhabdus sp.; identical to SEQ ID NO: 275
  CDS (29346)..(29543)

SEQ ID NO: 3289 - DNA, 30934 bp, Xenorhabdus sp.; identical to SEQ ID NO: 275
  CDS (3070)..(4080)

SEQ ID NO: 3290 - DNA, 30934 bp, Xenorhabdus sp.; identical to SEQ ID NO: 275
  CDS (4041)..(4730)

SEQ ID NO: 3291 - DNA, 30934 bp, Xenorhabdus sp.; identical to SEQ ID NO: 275
  CDS (11919)..(12521)

SEQ ID NO: 3292 - DNA, 30934 bp, Xenorhabdus sp.; identical to SEQ ID NO: 275
  CDS (20823)..(21026)

SEQ ID NO: 3293 - DNA, 30934 bp, Xenorhabdus sp.; identical to SEQ ID NO: 275
  CDS (23789)..(25789)

SEQ ID NO: 3294 - DNA, 30934 bp, Xenorhabdus sp.; identical to SEQ ID NO: 275
  CDS (25786)..(26595)

SEQ ID NO: 3295 - DNA, 30934 bp, Xenorhabdus sp.; identical to SEQ ID NO: 275
  CDS (27599)..(27817)

SEQ ID NO: 3296 - DNA, 30934 bp, Xenorhabdus sp.; identical to SEQ ID NO: 274
  CDS (30591)..(30932)

SEQ ID NO: 3297 - DNA, 30934 bp, Xenorhabdus sp.; identical to SEQ ID NO: 274
  CDS (30118)..(30594)

SEQ ID NO: 3298 - DNA, 30934 bp, Xenorhabdus sp.; identical to SEQ ID NO: 274
  CDS (29402)..(30079)

SEQ ID NO: 3299 - DNA, 30934 bp, Xenorhabdus sp.; identical to SEQ ID NO: 274
  CDS (28866)..(29381)

SEQ ID NO: 3300 - DNA, 30934 bp, Xenorhabdus sp.; identical to SEQ ID NO: 274
  CDS (28580)..(28687)

SEQ ID NO: 3301 - DNA, 30934 bp, Xenorhabdus sp.; identical to SEQ ID NO: 274
  CDS (25624)..(26136)

SEQ ID NO: 3302 - DNA, 30934 bp, Xenorhabdus sp.; identical to SEQ ID NO: 274
  CDS (25398)..(25607)

SEQ ID NO: 3303 - DNA, 30934 bp, Xenorhabdus sp.; identical to SEQ ID NO: 274
  CDS (24977)..(25321)

SEQ ID NO: 3304 - DNA, 30934 bp, Xenorhabdus sp.; identical to SEQ ID NO: 274
  CDS (22543)..(24543)

SEQ ID NO: 3305 - DNA, 30934 bp, Xenorhabdus sp.; identical to SEQ ID NO: 274
  CDS (22017)..(22529)

SEQ ID NO: 3306 - DNA, 30934 bp, Xenorhabdus sp.; identical to SEQ ID NO: 274
  CDS (20396)..(21559)

SEQ ID NO: 3307 - DNA, 30934 bp, Xenorhabdus sp.; identical to SEQ ID NO: 274
  CDS (17132)..(18292)

SEQ ID NO: 3308 - DNA, 30934 bp, Xenorhabdus sp.; identical to SEQ ID NO: 274
  CDS (16721)..(16975)

SEQ ID NO: 3309 - DNA, 30934 bp, Xenorhabdus sp.; identical to SEQ ID NO: 274
  CDS (16133)..(16699)

SEQ ID NO: 3310 - DNA, 30934 bp, Xenorhabdus sp.; identical to SEQ ID NO: 274
  CDS (14438)..(16033)

SEQ ID NO: 3311 - DNA, 30934 bp, Xenorhabdus sp.; identical to SEQ ID NO: 274
  CDS (13097)..(14434)

SEQ ID NO: 3312 - DNA, 30934 bp, Xenorhabdus sp.; identical to SEQ ID NO: 274
  CDS (12934)..(13086)

SEQ ID NO: 3313 - DNA, 30934 bp, Xenorhabdus sp.; identical to SEQ ID NO: 274
  CDS (11999)..(12697)

SEQ ID NO: 3314 - DNA, 30934 bp, Xenorhabdus sp.; identical to SEQ ID NO: 274
  CDS (542)..(694)

SEQ ID NO: 3315 - DNA, 31366 bp, Xenorhabdus sp.; identical to SEQ ID NO: 133
  CDS (416)..(616)

SEQ ID NO: 3316 - DNA, 31366 bp, Xenorhabdus sp.; identical to SEQ ID NO: 133
  CDS (618)..(872)

SEQ ID NO: 3317 - DNA, 31366 bp, Xenorhabdus sp.; identical to SEQ ID NO: 133
  CDS (899)..(1936)

SEQ ID NO: 3318 - DNA, 31366 bp, Xenorhabdus sp.; identical to SEQ ID NO: 133
  CDS (12789)..(13559)

SEQ ID NO: 3319 - DNA, 31366 bp, Xenorhabdus sp.; identical to SEQ ID NO: 133
  CDS (13810)..(15483)

SEQ ID NO: 3320 - DNA, 31366 bp, Xenorhabdus sp.; identical to SEQ ID NO: 133
  CDS (24451)..(31365)

SEQ ID NO: 3321 - DNA, 31366 bp, Xenorhabdus sp.
  CDS (17771)..(17911)
ccaagggccctaaagttccctttaattccagcctgcgggcaatctccagtgccagataactgccaacacagtgaccataaatggcaactttccctgaaacgtgttccactatctctctagcgcacaattcagcgagcatgttgtaatccatatcagtttcttcgtgcctgctaccaaatgcattaccgggggcagtgacgccatacactgaatagccggcatttttttgcgctaatgcctgtgccaatggctgatagaccgtcgcagcagcgcccgcataaggcacacaaaccagcgttatttgctcctcttcctgacttcggtgcaacaacgacaaaaaccccttttctgcatttgcagcttctgcgcttcccatgccggataaatagggcatcatttctgtgatcgtgggtgcctgataaaatgggattaaagacagcttattttcaggaaaggcatcctgaactcgggacagaagtgtgattgcagttaacgaatttcctcctatttcaaagaaattatcgttagtaccaatttgcgtccgatttagaacatctctccaaatatctgccagttgctgctcaatagcagaagatggtgcaataaactctttatcggatagtgggattgtctctaatgcagacagtgcttttctgtcgagttttccattacttgtaaccggcaattcatccaatatatttatctgtgcaggaatcataaaatccggtacacgctgtttcagaaaagcattcagttccttgatggaaagcgtcacgttttggtacaacacgacataagcactaatgaaattaccggtgtgcgcatcttcctttaaaagaacagcgcaggctttaactccatcacaacttttcaggcattcttcaatttctcccaattcaatacggaatcctctgaccttaacttgtgtatcaatcctgcccaaaaattcaatattgccatccactgaccatctggcaagatcgcctgtgcggtagactttttctgtcggatcacaggagaacggatgaggaatgaaacaattcgccgtcagttccggtaaatttaaatacccttttgccagaccggcaccgccgattaataattcccccggtgcgccaaccggcaaaagattcatacgatcatcgacaatatagagttgagtattggcaatgggtttgcctatcagcgtttttttatctttccgtttttccgcttcccaataactgacatcaatggcggcttcggttggaccatagagattatggagtttgacctgcaatttctgattgacacgctccagtacgctatacggcaatgcttctccgctggtaaaaatacgcgctaatgaaacacatttatcgctgcctcgcgtattgatgaaaacattcagcatagaaggaacaaaatggcaggttgtgatctgctgttctctaatcagcctgataagataatcaggatctttatggccttccggaacggcaaaaaccagtgtcgcaccagacattaatggccagaaaaattcccacacagagacatcaaagctatagggtgttttttgcaggacattatctgtgacgttcagccgatatttatcctgcatccagcgaagccggttgacgatagcggaatgcggcaacatgcaccctttgggcgttcctgtcgaacctgatgtatacaatacataacaaaggttatccggcgtgtttcccactgaattcggcaaaacatggtgagaatgcaattcggtgcgccgggcatttaaaaacacaagtttcccattgaagtgggtaaaaatcgatttgtgctgctcctgcgttaatacaactgaagccccggaatctttcaggatataagccaaacgctgggaaggataaccgggttcaagaggcacataagccccaccggcttttaagatacccaataaacccactatcatttccacggagcgctccatgcagataccgacccgtgttcctgcttcaacgcccagctcctgcaagcaacacgccagttggtcggcttttacattgagggcctgataagttaaggtgacatcttcaaatatcacggctactgcttccggtgtttttgctgcctgttgctcaaacagttcatgaacgcaacacgcttcccccagattaacggcggtacgattccattcttcaaagatttgcactgactctttttgatccatcagggaaaaatcaatgagtttccgtgcaggctgttcaataacttcctgcaataacctcactaagtgttcaaccacgctcagtgcggttgattgacgatataaagacgggttgtatttgacgtttagtgtgaaggtttctgctgcttcaacgacttctaacataaactcatattctccggtctgagaatattgcgttaaatgttctgctgatatccgcttacctaaagcctgagattccttctgcggcatagcttgttgatagacaaaagccatctgaaacagaggcgaatcatccatactctgagtcaaatttaaggttcttaccaacaccggaaaaggtaaagcatgggctaaaccatccagtacggtctgttgtaacgttctcagatactccggatagctaatatcctgcgaaagctggctgcggacaggaataggataaacataatagccgacctcttcccgctgatgttcttctgttctggcatctgtcggcataccaatgacaatatcgtcctgtcgggtaaaacgatggctaactaactgaaacaagctcaaaaaaacggatgacaggtaaactgaatgtgtgccggcgaaggtttttaactttgcggataaatgggaggataacgtccgagtcagtgtttcacctttatatttctcaacattcaggtatgaactgtccgccagtaatttggtggaaacaggcgcgtcagccagtgtcttcttccaataatctaaccgacgttttccttcgttactttgcaaaagtgcctgttcatgcattacaaagtcgtaccaattgtccttccctgtctcaacgacaggtggcttatccactgataattggtggtaaaagttgaataacgcagaaaccattggattaactgaaatagcatccacaacaatatgatgtgcgcacaataaaatgatggtttctttttcagacagatacagcaagttgacccgtaacagggcatcgctgtcaaaatcaaaaggctggctgatcttctccgacagataggcttcaagttctttctcagtcaatgacagttctgttgcaacattcacccttaatgcactttggggattattgaataaataaggaagcccttcctcttcgaataccgtcgtggccagtatgggatagcgcctgaccagtaaatctaacgcctgttgaaataaatacggatctatccggccattgacccgaaaacagaccggacagttataggcactattttgaggcgcgtgtttatggagaacccataagccctgttgaccttcggataacggataggtttccggttttcttgtctgcccgacagaaacaggaacattgttcgcctgagtctgtacggcctgaatgggttcctgaaattcggatgtcgctatgtcattcgtctgtatttcaccatactgtatttcaccatattgcgccgtcagataatctgacagctcagtcactgaatttttctccagtaggatcgcaatcggaagactcatacccgtctgtaattctaccatccgtacgaatttgaccgcctgagatgatgacattcccaatgcaaacaggctcatgctgccatcaatttgttctaaaggttgttgcaatatgcgggcaatcagagaaaacagaagttctttcatactgagagaactctcgcctgcgtcctgtgacggtggaaggttgcctgttgacaggtgatgatcaatcgctggctcactcggttgcgtggtcatgagcggcgagttctgatgcgattgataaaacggataaacaggcagtggcattttgggaagcggttcatccctgtgaaactgcctccagttctgccattggccttttacccacgcatctgcaattttatgattctgctctggattgaagaacaaactctcttgttcggctatgccagcatctgaaatgctaccttgataaatatcggttccggtgccatctgcaatccatcgtttcagctttttaagcagctcagatactgagctgacaggaatggctaaacgttgattaaagtgctcccgtcctgactgggtcacggcaaatagttgctgcagcggtatttcccggttatttttcaatgccgattcaaaaaaatgtacccaacattgtgcatagcgtcgcagactatccggtgatttcgcggacagaacaaacaattccggcaggctgatattcgagctattctgcaaagactgctctgaaggatggtagctttgcagcaggaggttggcataagagcctgtactgccaaagctattcaccatcgccagtttgggatgttgccgggttccctgccattgacgctgttcagtcacaatactgaccgggctgttatccagttttatcagtggactcagcgtcttatagggcatgacgggcaataaatacccatacttcatttgcaacaggactttcgttaattgtgatatccctgaggcagattcaaggtgcccgatattcggctttagcgtaccgacaaacagaggtgtatgacgttccgcaaaggcggtctgtatagcgcggatttctgaagcatcaccgaataccgtgccggctgctgcggcttcaatataatcgacagcgtctgcatcatagcctgttttctgtaatgtgctgttgagcaattcactctgctgttttgttgaaggaacaccatagcccgacactctgccactatgggcaatactgcctccttttatcaccccccaaatatgatcgttgtcggcttccgcctgagaaagtggttttaacaacacaacaccaaccccttctcccgggataattcccgctgcttcttctccaaacgcctgagcatcgcaacgttcagaaatcatgttaaatcgtttgaggttagtaaaatgggtggcgtgggcaaaaagattgatgccaccggctactgccacatcgcagtcaccctgtgcaatcgcctgacaggcaagatagatcgacgttagtgaagaagaacaactcgtatctacggcgaggcttggcccagtccaattgaaaaaccaggatacccggttcacgatggatgagaatgtagagcggctggctgactctactgatatcccggtttcctcggctgaaccgtcaggatcattccacatcacaccggagaaaacgcctacacgcggccccagactcagcaaattttcgccgttgtatcccgcaccgtccagcagctcgtaaacacttgtcaaaaaacaggcttcctgagccgatatccgttcccgttccgtcgttgaaatgccaaaaaagtcagcatcaaaatctgtaattgaatgggaaaatcctccccaatgttcagagcactccggtgatccccaacggttatcaggtactctggaaaaacaatttttctgatctttgaggttattccagaatgtttcaatatccggcgcatcagggtatttcccctgtacgccaataatggcaatgtcctgccccggcatctcagtactgctgttctcaggttcctgaaactgcgttttctccaccagcccaaacgccatgcctaaaagtgttctctggctatctttgagcttcagcacgccagctaaagcggtttcatcaacgccggataacaggcaggaaccaatcgggtagtgcgcctgtttttgtgcaagcagttggacaatggcaccgacttcaatcgctgcaaaaaagtcacttttttctttatacaaaggacgaataccatcgtactcaaccacaaaatataagcagcaatgcgcattgtcataatagggtctgttatagtaaaaatggctgttgtgaggcaattcatccgatgaaattttatccagcttgtgttcaaccggattatagtaataaaacccggttgaaaatcctcccactctgccgggttttatctcaacataaatctggatactgtaggttccgcccgccgatggatagagatatcgatgactgccgtcaataagcatggcgttgagtgcactcagccatcccaatacgctgtcttttggcattggcgcatcgtcaaatgttctgaaagtgcgtcgggtattatagtgatgctgaaactcctcagatgagagttttttggcacggacagtgtcaaaattgctatccaattgacgaatgttgaattgtctttctctgaatgcctgtttttctgttaacgatgaaagtacagacaattctttttcttcatccgccaccggcaaaacagattgcggttcacaccgagctaccggttgtccgctttgttgatcaatcagcacggccagcgtctctaacgtcggctttgcgagcaatgcctccagttcaatatctacatcaaactgtttcttcacagccaaaaccagctccatgacattcagcgaactaaagccatgctcaaataaatcctgatttggttttagcgctttgcctgccattaattgctcaagctgctgtaaagaaccgcctgttacgacaggttttccggtatcctgctgattgttctcaatctgcctgcaaatcaaatggctcaagcgggccattgtgggggtatgcaaaaactcatcaaggtcaagattaacgtcaaaacgttcccgaatacgaatcagcacctgcatgattgattttgatgtcatcccctgatcaaacaggtcatgattgaaatcaaccgaatgctcagccattaatatctcaatgaattcattgagatcactaacattacatttctcgcccatagaagttcccctgtttctcctcatcatgatggcattccgtccacggttgcagagttccgcacatcataatcagcaaggtctttcccctgatgcccaaaattgagcatttcatccgtaaaaaaccattttttgagacaagcacaatattgttgaaagacagaggaaaattcattccggccgctttccagtacatcccactggaggcgaagagaggatgtattgagtacagtaggaatattgtctaagacaacccccggcgtttgggaaatgctataggcaggttcaggaaaatcgggaccgtaggccagcaggcaagtgtaaactatcggaaaatgcagatcggggtaatgcgctgctatttccagttcatcaacgacgtcatgatgccgatcgttatccagctgcgcctgaacccggagaataagctgttctggggtttgatctgtctctgaaaaacttacccagctaagacgggtaaatacccccgttgtggtttcaggcaccccagcatatctgtcccaggaaaccactgcgatggtaatgggttcatccgatccggtttttaacttattccagtttaaaagcgtgaaaccgaaagctgccaataggatactgtcaacagaaacactcagcttttcagccagtgcctgtatctgacgataataagataatacctgtgtcaatggtgcgggaagagatgtctgatgggctaatggtgctaatccattaagcccctgtttcatccgggagaatttatcatgccagtaatccctcgctgttatgcagtttgcggtattctgttgatgcttataatgcaggacaacatcctgaaatgtgatgttctgtgtcgataatcgataactttctgatttatatttattaaacaattggctaagtatcagaaaaatacttttcccatcaatcagaacaaaatcaaaattgataaacagtcggtttttttgcccttcaagcgtacacacccgcaggcgataccccggatattctcctgctgaataacgtgtcaacaacatttcattgcgtattgcatgacatcgctgatgaaatattgcttctgtcccgatcacactatcggtcaggattgtataatccgctatgttatccaacaccttctgatgcaatgaagcgagataatgcgttctcaaaaccggatgataagcaacaacttcattccaggcacgggttaaccgggaaatatcaagcacatcaatatcaaactcaagatgacagcaacaggtttttccacccagttttacgggcatcatttgcccagcatataaggccttctgaatgccaagcagaggaaaaaagctgctctgtgctttttctttctctaaactctctaaatcctgccttttttgctcacctgaaacagaggtttctgaaatagactgcgcacggtcaatcagtttttgacgataaaggtcaaacaaagcaacgaccgaaccttgttccaataacgcatgggcgacataccagcggtagaccaaccgcccgttaacctcgaagacatgatgatctaacgctacttgaggcgttgtattcatcatatgttgaacagaccagccatcctcaggattgggttgttgaaatgcagcagagattaaatttgtaaaaaccaccgataagcatatatctgcacgtttagccggattctgtcgtaattttctgagtacattgaccgctcctacaaagctgtgactggcatctctatccagctgctgctggcaggcaatgatccgtgactgaaacgtattttccggttcccattctgaaacaaaaatattgctattggccaacaacccaaccagcccgctgatctgctgattgatggctaatcgattgaagttagtcagattaagactaaaacgtgactgttccgtaacctgatgaagtacttcacaaaaaatactcagcaacatcgcaccggttgaacaggacaacatgtcagcctgtgtctttatggctgaccacaattcagaaggcagttctgcacttaaacaatgcaccgtctgcgctacaggatattgtgccggaagatatttcagatcaggtcctggcgggatattctctaatttatcaacccaatactgcatgctctgctgaaaatgtttaccggtgcgaatctgttcaactaaagtgaggtatttcttcagagaataggttgcaggtaattcataatcaggatcttctgacatataacgtaactgttctaccagcaaaaagacactgacggcatcagcgatcacttcatccaagacgatttgtacaacggtatgttcagcatccaatatcaatgcgttgatttcgaaatacggccaacacgctaagtcaaacaccttacaatttagcgttgtccggctgtttgtcagataatcagttttttctgaatctgaatactccgataaatcaatgactggaaaggagtaataagcataatcttccagaacctgttgctgaaaattgttgttaacaactgtatgcagcgactcatgatgatcaactaaatgattccaggccgactcgatttgcttaatcggtatggcctgtgcaatatgaagttcaaaataaagtgtgctgcccacacgctgaccatacgtggagagcgcacgtccaatcacaaatgactcttgcagttcagaaagcgggaaggtatgcgctgcgttttcttctgttgaagagcgaaaaaattctgccgctgttaacagttgttcttctgttatccattcgctggtaatcaaatcatcaaccagcgatctcacatttcgttgttcataaaaaatcgtaaattggagagataccccgaaaacaacctgccaaaaatccagaaaacggacgatatgcaatgatgtcaggtgcaagtctgaaaatggagtattcgcagacgggactttatgctcgataatgttttccaatgtcttgataacaaattgttcagctttttcccgaaacgtcatcgtccgattggaaagaaaagcgaatccgtcctcaccgtataaataggctgtctgtacgctggccgataatgacggtactgtttcaatcgcttttaattcaattttatgacgttcaaatgggtaagttggcaggcttatacgttcaggcaactgctcccgatatacctgatgccattcgatgtttgcacctttgcaccaaacatagagtaattcacgttggttattttccaccagccagccattaattttttcctgccattcacgttcttcaaattgatcgatactgctgagtacgatgatattttcattgctgcattcacactgtttaagctgctgacataaatcctccaaactttgcaccagaaaacctacacgtaccggcatattttcccggcctatttgtaaggtcaacgccaaacgcatcagcaaaagttcagtttcgtgagtgctgttctcaaattgatacagtgatagaaagtcatacagctgtttcacgcgatcctgcaatgcgctaaccgttttcgctgaaagaagaatggcacagggaagatttatccctgtttctgacagttcaggcgatgtactctcttccagaataaggtgggcattggttccaccagcaccaaaacaagaaattccggcgattctcggtatgctcatcccttccctgccgggctgtttccattccattaatgttgaattaacagagaaaggtgtctgttcgaaaataatatcgggattcagcctttcaccataaagtgttggcgcaatcattttatgttgcatttgaagcaggactttaataacactgccaactccggccgcagcttcacaatgaccgaaattcggttttcccgaacctatcaagcatgcaggatgatgattatctgctcgtttttgaaaaacttttgttaatgcaccaacttcaatcagatcgccatatcgtgtgcctgtgctgtgtgcttcgaggtaactgatttcatccacgttgacttttgcttctgtcatggcctgctcaatcactacctgctgtgctttcggatccggagcaccaaatccatttgatcttccgttttggttcaccgcgcagccctggatcacgccataaatgtgcgcaccttcatttaaggcatcctctaatctttttaataccagaacaccaatcccttctcccggaatataaccatgactgccttcaccaaaactattaagctcaggcgatgaagacagcatttttctgcggctaagggttaagtatttattaggatgaagcgtcaaattaacgccgccgacgatagccgcgtgagtacgtccttgtttcagatcctgacaggcaagctgtatcgcaaccattgaagaggtacacatggcatccagcgtcatactaggcccgtgaaaatccaagaagtaagaaagccggttagcaatactggcctgactgccgactaatccaatcggttgtttcaggtcatcggatgttacgtcattcagttgatactcactgtacattgaaccgacataaaccccgactgcgtttatgccatttttttctctcttctcatcagcggccagtgtttcaggggtgtaaccggcatcttcaattgctttccacgcttcctgcaagaataaacgttcctgaggatccattgccgcggcttcactttcagagatatcgaaaaatgcgaaatcgaattcatcaacgccactcagaaagcctccccatttgctgaggtgcgtattttgactgtctccgcgataataattctgccaatcccaccgattctgtgggatctcactaatacagcgcttaccctgtttcagattgtcccagatttgagcaatattctctgattgcggatattttgcacttatcccgatgatggcaatgttcagccgattatcagggatattctgcccttgattggctaaatcagattcttttttctgatccaaagaaaggagggatttatctgcatggtgagtaactgtttgagccaaatactgagcgatatcggcaatgcatttgtattcataaaataaggttttaggcagcgaaccaaacgttttctccaaaatcgcaaccagttgtatggcaatcgctgaatcaataccatatttatctaaaggttcagaagtccgcaaccgtgtgggtgggatacctaattctttacctattatcgcttttagctgtccaattatgtcctcgggcctcggctgattttgcgcatgttctatctgtgaaatgtctgtttgcactacagtagaaggtgttacagatgcccgtaattcccgaatggaaaatcctttaatctcaacacaaatgtcaccgttattgtcacagataacgagatccattttcttgatgaacgagggtgatacaggcgatgctacgtttgtcatccatgcccatgcctcacctttaacctgtcggataaaccggatttcatcaacagcaaaaggaagcggtgtgattacgccctgtttgagatcttcttgtgtcagcaatcccagataagcagcctgtagcgcaccatccatcacggcaggacagtacataaacggttttgatttgaacggcatagattgatgggcgaactcgtacatcggggctttatcagctacaaaagccagccttgcgagtgctacggtctctccgtgactgtttttccctattgtgatttcctgaatagcacgatgtttcttgccaatctgaataccaagcagttcaagcacgctgtaacattgtgcggcggttaaccgacgttcctgacaagactgctgacactgtttaatatccagagaagtgctgttctgtaatgatgagaaactgatactgccgacggtcaaagaatcagggtgccggtgttcttcttcactcgtctctgttcctaaaacactatctcctgaagtcacatcaaaatgaatattgtttttttcttccggtgatgtctctgatttaatattcaccgttagcatcaatgcagtttctgcttctgtcttgatagccggcttcgcccaacctacgttgtgtaagctcaattgttttttagctgcatagtctggcaacaataacgtcgttgcatgccgtacaaattcaagatgaaccacacccggaagcatcatttgcccgttgaccacatgttcatgcaaataagactcagccgtgctgacccggaattgacaggatttcagcgcattatttgatagcgtagccgatgcatcaatgaaaaatggcggacgatggatagcgcctaaaaatgcgcgaaccggcaaaccggacaggcgtaccggatgtttatttccccataaacatgaccagtctggttcttcacctcttaaccaacgcagtatcagttccgtggttatttcatctgtaaggcaggaaggggatactgatcttaatgtgtcttcctgctgaatcgcctcggtattcttaataccaatatcgccattaagtacgccgtccagttgtgatgtcagctcagataagtgggatacttctaaaattacccgatattgccgtgcctcacgggactgcaacgtgaatgccaaacgcgctaaatcaacctcctgtttctgtaactgccgttcctgtaaatatcgttttatctgcacaatatgatcgcgtaacgaggcttccgagtgcgatgatagcgggactagcaccggcatcgttgcttgcttaacgctcgtattttcttgcctgataaattccttaaccacgacatgggtgttatacccacctccggcaaatgaattaataccggcaattctgggtaacgcctctccttcccgtatagtggagtcccatttttgatgatgatgattgagataaagtccggaaccctctaaccctaagctgtcatcaatctcgctgagtccctgagtgccgataatggtctgatgacgcaattgcagcagaacttttaccagtgccaccagaccggaaaccgcctcagtgtgtccgatagctccctttaccgtggagagatgaatatgctgatggggcaggaaaacttttttcagagcggtgatttctgtaaaatctcctgctctgacgccggatgcgttacactcaattacggagaaatcatctgccgatacccccgaattttgccaggctttactgatggttttagcctgctgttcaacattggcagaaatgagggaaaatgtccttccgctattatttgccgcgccaccagcgataatggcatagatatcatctccatcttgttgtgctttcgacaatgatttaacaatcacagagacgaccgcttctcccctgagttgccccttgcttcgcttgctaaacaattcaggtgctgccgcggacgacaaaattccatcctcacgcgcaataaaaccgtaaggatgcaggaaaaggctgcttgcactgacaatagcctgatcgacctgccctgagcgaatcaaatcacacgctcccagcaatgccgttgtgcctcccgtgcattctgtattaataaattgggtagggccttgaatatcaaggaatcgggctatcctacccgatgacatggcaggctcattaccagcccaatagtagaaattctcctctacgcccttatctctcagcagcttttcgtaatcattagctaaagctgaaacaaacagcgcagtacgatcgccgctcacgtcctgattagcatgaccgctgtcttcaatgctttgattaataatctcaagcaacaaacgatgctgaggatccatatactgagcaacggctggtgggatctggaaatactgttcatcaaaccggaaaatatcattaataaacccggcagaacgaatgattgttcccgcagacagccacggacgatcttcaggaaaagctgaaaaaccggacttttcttcaagcagatttctccagaactgatcaacagaatccgcctgcggaaaactccctgcaatcccaacaatcgccacttgctcattccgaacagattcagagaacggtggcatttttatctcggcttcatgtttcggctgagattttatctctaaaggtagcctgtttccccgaaaaagctgtttaagacgcgtttcatgctgaggaaaatcaatgcctaagaaaaacaagtaattctcaggatacgtttgaattttcgtgatgcggtgttcgtccatctccagctttaatacacaaaacatgccattcaggcgggataaaacaaagggagaggcttgggttaattccattcggacaaataacgttaaagtgttctcatcgcgaataaataactcatcaaatagtgtaactccctcctttcctattgccgttcgcaatgcgtaaataaaacttttccattcagcaattccatgaccggtgacattgccattatgaaataccagctccgggtgtagcaggctgtcaatgtggcgcaatgaaccctgattgaagacacaatcaacaagctgtttagccttctcactcattcggatggactgttcatcagaggctacatgcaaaccctccttttctttgttaaccaacacacgttgttgccaggcagggtaagacaaacatgcttcagaaagcggcatgccaaccaaaaaaagaaagtcctgcacctgttgccataattcaacgattttgccgtcattgatgcgtattgctatctgacaaaaatttgaatattcgccaccggaaataatctcatcatgccagcgatccgctttccaacggtgaaagagatgcagaatatcatcctgaataatcacgctttccgggataagttttaaattagccgtgttcagcctgactgactgaataaatgtctgaaacgcctgagcatcatttaactcgttactctgcatatggcacacacagttttgagcaaacagattattaaaggcgtcagaagacagatcatcttcccatgccgctttcaatcccagaacaaactctgcatacggatgttgtaatagccaagtcattttatcggtcatagaaatgccatccattacataatcatatgaataattgaggtttttcctgtcttactttgctgtcttttaagtaaggcagtcgtacctgatgttccattgactctaactgcatgagcttctggaatatcaaatcagtttgttgctgacgatcttcgggacgggcatgagtggctatctgtctcagaaaatcgaagtattccttatcaatggcggtattttcctgccaaagctcacgagccactttaccgctggattttccctctatttcatcaagcaggaagaaagacgtgatacgacttcttgcctgttcaaccacgccacttaaaaacttaagcgcatccacggagccaatatttgattccatgaaagcatcataaatcgtctgtgttttcgcaaaaccacggacatgcgtggtgtaatattcaccgtagagttccggtgactgaatgatttttggcgcgatagaggacatcagggtcgcgatacttaaatttgagccggaggtaaaccatgtactgatcccacttccgccaaccagtgcccagttcttaccggtaaatcgttcatatatgaaatgttgggtcgggaggctcactatttcccgacggcaggtgaaatgtgctgagtaatctaatccccgtctctggtaggcttttgtcagcaaggcaataatctcttctgctgtgcgatctctcacatcgtcaggcagcatactgataccaacggagacataatcacctagcggtattagccaggaaacgcctttcagctgatcgaactcttcatctgcactcagcaatgatgttgcgtgcatccagggaagctctttggaatcacaaagtttactacccgctttttgataataatgggtaaaaatcacctgtcggcggctgtccagctcggtataggaaagcccgattttgcgccctaataaacggacatggttggtgcaatcccaaacataagaaggttgaataatctgtccatcggacagatgaagtaatgaaactttgtcactgtcctcagaatattcaacatgttctactaaggcttcaatccaagtacattcagaagccgcaacagtctcttcatacagcgccttatcaaatccgagcctgtcgatatgaataaaatgttcaggaatatcttcttccatgaaaagcgaagccagcgattcgaaaaaatggaaccgtaacccggcaactaattcccccataaaaaatggcgtgaactctttgggatagaaatgtcgggacagatttttaaaacggcgggcaaattcaatactgactacctcggtcattgattcacccagttttggcatatcaccaatttccggcttaccgacgatgatatgcgggatcttctcctgactaagctgatagctgatgagcatacctgcaatacccccccctataatcaccgggatgttttgttctatgccccgggtcattcccgtcatataggcaagatcattcgtatttttagaggagcaggttttctgacagctgttttcatttccttgagaaagacacacctttcccgcagttaatgtttcttctgttaatgtgggtgaggataaggcggttagaaatcgcttcgctgctgatgtctgataattcataagataatcagcaaatttctccagcgtggtgaactcaaataacacaccgggatgtacctctttatccagcacaccggaaattttatccgtaaagataaccagcgatttagaatcaaaccccagatcctgaatatgtgcctcagtactaatatcaccgctctgctgcaatatttcttttgcgatggttttcaatgagtccaataaattatttttttcattaacttcactcatctttttacttccttttccaatatattgttgtgccgttatctcttggataacggcgtgaatttgcgtgtttctggttctaaaaatgggttccctataggaaccaatatcgctgttcgtcaaacgggtaaccgggaatgtcaacgtaaactccgtgcccctgcgcaaaagcccgccagtctatacaggcacctgtgacccaatcgtccgccagttgtttcaacacgggcaatgtggtggaaaatgcaacctgctttttggggaagcggctttttgaagaaacaacacccgtcacaaccacccccgctggcggcgttccgttttctcctgtgatcatccactccagcgttgcgatgagtttttctaaatcattgacaatgatcgccgtgcggaacggcatatccgcacgccccgtctgggcgctgtaagccagatttcttaacgtcgtggggttatcatgaccggctaatttttcttgatgcacataatccagccactgactcagatacacctttaaggttttctcagatttcgccgaaataggaataaggacgtgttctttcctttgggagaaaaccggcacttcgcgctgttcaggggtttccaaaatgacatgcgcattaactcccgtgattccaatcgagttcaatccggcccgtcttggctgtgttttgtctgaactggcctgttgccacagaaccggctcacgcggaaagaacaagggcgtgttctcaataaaaatcgaaggatgtaattgagagaaagaagcaatcggtggaatgacgccatgctgcatagcaagaatcaccttaatcagggaggccatgcctgaagcggcttccagatgaccaatattgcctttcactgcgctgatgacacaacgatgtgaatcggtctgattttctgaaaaaacctttttaaaagctgcaacttcactgacatcattaaattgagtcgcagaaccgtgggcttcaatatagtcaacagaacaagggatcgatccccgctgtctgataggcttttttgatattctcttcctgtttctcaacactcggtgccatcgacgaaaaagcactccgaccattatgagaaatcccgataccccggatgatggcccggacagggtcacgttccagatgtgcctgttccagaggcttaatcatgacggcacccacaccttcaccccggatatagccatctgccgtgtagtcaaaaggcgccatttttcctgactggctgagaatgcctccctgatcccggatataaaactccataaaatcaaggatgactttaacccccgcgacaaccgccacgtcacaatcaccctgtaggatcgcctgccgggctttttgcagcgcaacaaacacactggcgcaggcgttatcaaccacttcactcgggccggtgaaattgaagaaataggagatctgatttaccatcatgcccagactgaggcccgcctgtaacccgccacaaccttcgatgttgttaatcagagaatgatccttaatcagggatttgtagtctgtggaatcagcggcaacaaataacccaactttacgctgagtgaagtcttccaagtcataacccgcatgttcaacacatcgccagatacactgcataagcaggcgttgctgcggatctatctgttttgccgtttcggcatcaataccccaaaattcagcatcaaactgatcgatatccggtaaaaaaccgaataactgcatgcgttttaccgcatcttctttatcggaaggagtgagaatatggcgttgctgccatttctcctgcgtgatcccttgaatagaaatgtttttttggacaatattctgccagtacgcatgtgcattttttgcaccaggaaatgtacagtcatagcccacaatggcaaaagaaggcgtgctgacagcgtctggtatgtcggaagatgacgtgtcagaaggcaaaatgtcggaagggactggaatgctcggctctggcaacagttgtatcaggtgctctgccacacggtttaatgtgttgaactccagaaaactcgcctgtgacagagtgacgccaaaacgagaattaatatactcagccagctcaatgagtccgacagaatccatgccataatcgccaaactgccggtgaatatcgatggcttcgctacgcattcccagtagttctgataattttccggctgcaatatccgcaatggcggcagacaagttacctgactcacttttatctgactcactcggattaacagaatccatattcttatcattaaatgtgatatccgaatctttgtgatctgatacagacagcggtgtaacaggtaaagaatcgtcagataatctcaggtaatccttaatcttttgctcattccccttcatcacaccaaactgagagaacggtgagcgaatcgcaatttccagtatttccagtgcggtttttgtatccaacgggacgataccaaaggtatcaaacatgtgttttgctactctcggtgtcacgttcataccgccttcctgccaaagaggccaattaattgacaggctttttccgctcctttgcttctgctgaactaaatcttcacgatattcagcaaatgtatccagaaaggcgtttgccgccgcataatctatctggccgatatttcccagagaggcaagtgaggagaacatgacaaaaaatgccagtggttcgtgttgagtcacttcatccagcagacaagccgctgatgccttagtggcgatcacatggtcaatttcttcctctgttttattgatagtcagagcatcatggataacaccggcacaatggataacgccatgcagagcaccaaaacgctggcggataagcagcatggttttttccagtgcagcgtagttattcacatcgcatggcacatattcggcttttattccgcgttttcttagtgagtccagttgagcttctttatcagcatcaagaacagaacgccctgataacacaagctgtgcgcctgtttttgtaccgatatattgtgcaatctggtatcccaatcctcccagaccacccgtaatccaaatcgtcctgcattcatgagtaaacaacgaaggaagattcgttaagtctgtcggttctaccgctttttgacgccagacaaagcgctggtctttttcctgatagcacacagcagatgaaagttgatctaaagaaaggagttctttttctgcatgccggatgaaagtttcactatctgcattatccagtgccgcatccagaataagtttcgtctgtaccacaggaaattccatgctgagggttctgagtgcccccaataaagcgcggtaaggtaatccgttatttttccatggtgcaaaaaccgcaatgaatgtcggtaatccctgaccggaatggattcgctgctggcaataattagttaatcgcaaaacaagatcagataaagagcttgaatgcaggctatcagtatgaaggtcattttctgtacggagataatgtacgttatccacactagttaacaaagccagctctgtcagtgaggtttcattggcattcccaatgacaaataggtcagtatgcttgggcttcattgcatacgtcgtactctgactaatatcacatcgttcccaacccgatgtatatagcaccgtcgaggtcatctctttcgttgaatctatctcttccactgcaacagcaaaatcggctatctgagcttccggttcaggtatccagtatctttcccgggcaaaaggataagtcggtaaactgaggcgatttggccgtacaggaagggattgataatacccctgccaatcaatgtcatgcccctgagtccaggcgctggcgatttgctgtaactgctcgtattcttcttcctgcttatcttttcctgcataaacgggtgtcattagctgttttgctgatttagatttttctactcgtcccatccagaaatgcgctgagggtaagcaggacagggagaaaacctttaagctatcaatcagggcagaaagggaatcaaccataaaggtgacccgctcttccatttcttcccgccctgtctgtaaggtataggcaagactatgcagatattctgctttggacacctctgaataccatttcgcctgctctttaagatactgtgataagttttgcgccaattcacgatgctggtcgtgattttttgctgatagagggataacagcccattttggccagtcggtattattgatggagtttaagtcgttagcaggaatgtattcctgtacaaccaaatgagcattggttcctccggctccgaatgatgaaattcctgctgttctgggatgttctgattgctcttctttgttttgacctagctcacccaacagcggtcttttccaatctgcaagttcacgctgcacataaaacggagaggcgtcaaaatcaatattggggtttaattcacggctatgtaaagaaggcactaactgccggtgcttgatttgcatgagtactttggcgacacctgcaatacccgccgcactttcacagtgccccatattagattttactgagcctattgcacagaatgcgctttcctgtgtgtcgttatcctgtaaacattgctgaaatgcccggctgagacccgctatttcaataggatctcccagtgaagtccctgttccatgtgcttcaatatagctaatggcacgcggagacacccctgaagactggatcgcctgagaaatcacctcagcttgtgcgatagggttagggacagtgtaaccgttggttttaccaccgtgattaacggcgatacccttgataacaccataaatatggtcgccatctgcaatagccttcgtcaacggtttcagtaaaaccgctcccaccccttctgacggaacatatccggttcctccctcaccaaaactctggcatcgtccttcatcagacaaaaacttagactgacccagaatcaagtacttattaggatgaatagaaacattaacgccccccgccagcgccatctcaatatccccctgtctgagtgcctggcaggcaaggtaaatagacgtcagtgaggaagaacacatggtatcgaccgcaaggcttggcccattgatattaaagaaatgcgatacccgattggctattgagccgaaactgcccgtcacgatagactgctccagcacgttcccttttgccaattcttctatgctataaaactcatattctccatacatgacccccacatatacgcctgtctttttcggtagccgtgtccaatcacgggaacctagtgttctgtggctatatcccgcatcctcaattgtttcgtaggcgcattgtaaaaataaccgttcctgcggactcatcacacgcgcatcgcggggtgagaggttaaaaaacagtggatcaaattcatcaacaccatcaataaaaccgccccatttgccgtaggttttgcctcgtttagttttatccatgtcgaaataacgcgaatgatcccagcgctcaaaagggatttcggtaatgcaatcctgcccttctctcagaagctgccaaaaatcacgcatatttcttgcctgaggaaaacgtccggccagaccaacaatggcgatatcatctgactcggaagtggtattcgctacctcgcctgtctgagaaacaaaaaggttttctgttttgtctgttctaccgggaaacggttgtactgacaggcgagaatcttctgagattgatgatgtctgaacgtttttgttttgtgagtggttttgtgccccttccagtaaaacaaggcgatgatgcttaacaaaataagccgccagttcccggatggtgagatattcaaaaaacagggttttcggcaggacaccgaaatcctgttccagtgcttccgtcatcttgatggataaaatggaatctattccatatttttccatgccagcattttcatcaatttcggctaaaggaaggcttaccgccttgctcacaaccctcttaatcaaatccaccgcagtaggttcgagatcggatgatgcctgctcctgactggccagtgagttgacgttattttctgtagttgacgagaaagcaggttcataataaggacgaattcccagcatttctgctctgaaacgctctattgttccgccttccatcagcatcaattcaccactgaatctctcatgtagtgcctgatataaagactgaagcgccatatggcgaataaattccccctcatttgttccgttagattgaggcaggatcaatgacagtgtttgcttttgatattgtgctgattcaggactctgttgactgtgacgaacaaagttattgaccgcagcacaataggcagaaaacagaggatacccagagctacctaatacaccatcccgataggtcagaactgtaaagaaatcaagcgacaccccctgagtgactttctccagccgtgacagtccctgataacgttcaagtattgaagttaaggcttggttctctgtatgctgtgaatttgttgcaaagtgtgtccccacacagaaaaatacgccccgcaatgcgccaaaattttgctcaatacggctaacaagtgccgctaatgtgaccgtatcaagacaaataacactgtcgttaatcgttgtcgtctttgatgctattgtgatttggtattggttcttttcactttcactcaaaacaatggcaatagctgaatcggtatgcgttgtaatatctctggcaatcgcacgccccatgctgccatcctcatcgacaattaagtaaacagatttttctttccacggaggcgttaaattgtccacagaatcactttcaggcgtccaggcagtccaatgtggaacccagcgttcctccgattgccatagaacggtgtcatattttatttgtgaggtttcctctgacaatttctcaataagcccatcttcatcatcacaataaatcgtctggctaagcagattggcattgttctgataggctgtttttaatagcgcggtcacgatggcatattccggacgggcttccggtaataccaactgaataagtacgggttctgtgggggaatgctgaatcagatcatcaatttttttacagagtgtaataacgttttgttgcctttttaacggcgattcatcatgaagaattttgggcaatacaatatattcacatgtgtcggtatctgacctaaacaacagctcagattgaagactctctaattcacacaggaacacgatgcgttttgtggcagcgcgtaatgcagtatcagcaggcaacgcctgatttttccactgaggctgtaataaataaggtgcctcctctgccggtggcgcagactgcgcacccaatccccgacaactgaaccctttgaaccgaatacacaccttgccgttaatatcacaacaatcgacatcaactttcgggaaaggatccgaagcactgctgtctgagctataactgatccaggcccagtgtaattgggattcttcatcatgaaattcaatttcatcaagggcaaaagggattaaacatttaggtggaatgggccgattgagatcgccaaaacgcattaaaagcccgacggatgagagaagagccccatccattaaacagggatgcaaaacaaattgatctctggttggctccaaagattcaggcagtgacagttttgccaagacatgatccatccccacataaagttcttcaatgccctgatagtcaggtgccatgtataagcccagcgcgtaatacatgtcatagtattgcttaggagagtatgcgttttgcagatatctggattttaggttgtcaatatcatagacaggtgctggcgtgagtgcttttcgtgtcgctacgccggtgttatggatcgtctcttcttctgccccgctatatagttgataacctgcttcaccatttccatgattgataaaacgaatatgtacctgctgaggttcatcaatgacaccgataatctgcgcccagacgacatttttcagcgccagtccggttttttccttcacttctgacgaagaattcggtgttgagccgaaagagtgatgtgacgcaacgcgggccagctctaaatgcccgactcccggcaatacgcggataccgtgaatcacatgccccttcaggcagaattcttcaccggaaaatgtggtgctgaagcgctgttccgcaaaatcagaagtattttggtggacaaacggatggataaattggctggctcctttctgagacgagacctcctgtgacgataggctgcgaatttcacctttaggcacccaatagcaagttttcgcaaacggataggtaggtaaaggaatacgccgccattccgcatctccccaatactgcatccagtcaatatcaacaccggtaatccagcatctcgcaacagtttctaatgacgttaccggaaacccattatttgctgccacggcaagttcagcgcgttgagctgttaatacttcttcccgtacattttgggccaatattccctgatagattgttgagtattgtttttccggcgattcagtaaacgcttctaatacgcaccggagttgttctgttgacgaaaccagagttgcccaacgatgcgtaaacgcttctcttcctgtgctaagtgtccaagcaagttcatgcagattgaaattctcagtaaaatccggctcactgaccgtcttacacagattgactacctgttggtaaagctgttcatcactttttgcagacagacaaaccaataccggcttttctgttaccgtttccaccagagggcttattttggtggcagatgagttatcgggttcccgcaggacaatagccgcattgacgttgctgaacccataactgctgaaaaatatatgccggggtgttcctccctcagattgtggccagtcaaccgtctctgtcaggaactgaatcccctgagtatcggatggaatgccggcattcaacgtcgctttatccaatccgcgaatcaaagggatctggttatacctgaacgccatcaatcccttgatgatggcgtaaaacccggagctggcatggttatggccaatattgggtttgaccgtactcacatagcagggtgccgcgttctgcggacgggcgaaaacatccaccaaagcattcgcttcaatcgcatctcccatttgggatgcaacgccatgtgcttcgatataattaatctgctcaggcaaaaggttcgctctttttaatacggtctgaaacagattgatttgttgttctttattgggctgggcaaatgaattagttttaccaccagaattatggccgctggcctgcacgacaccataaacatgatggcgctgatttacttcatcgctgtttctttgcaaaagtaaagccgcgcatccttctgaagttctgtatcctgaagccttttcagaaaaactgtgaatatcctctccgctggtttcaaacggtgtggctgttgtttctcccgctttccagggatttaagaacagcgaaattccccctacgatagcgtagtcacaatcgccgtcttccagtgcctgacatgccatatccaaagcgacaaaagcacttgaacaggttgtatcaacaacaatagatgggccatggaagttgaaaaagaaagaaacccgatttgccagaaaacagggatcatttcctggcacaataaactcctgactttccttatgttcatctggaattctgtcgacataagaatttaaataccagccatcctgagcaacaaatactcccactttcttgcctgctagcgttgatgcggctaatcctgcatcctcaagaagttgccagcaggtttgtagaaataatctctgccgtgggtctgcaaacataattgcagaacccgagagagggaagatatgcctgtcaaagctatcaatatcttcaagaaacataccgcgtatcttttccttgatcccccacttaaccggcgtttggcgattattaagttgatagcgttcttcgtcgatcactcccatcaaagagccgccttcaaccaacgtctgccaataatgagacaatgacaaacctccacaaaattgtgcagctacgccaatgatagaatattccatcaataactctcctatttgtattctggcaaacaataaaaaatgatttcttttaaagaaaaccagcccattcgcacagagtaaaaatattaacccacgtgcaaacaatagatttaaaaataaaatttactgagataaaaattaattcaccatcaccaattaaattaaagatcaatgtattaattcatcagtgtaatatgctcacctagtattttcttggctaatggccctaccaccggttttggtccatattcaaaaccaacaataggtttacttgaaataaatttatcagaatatagtttttccatgcattgttgccaacgcacagggtgcgataattgtttaactaataaatcgatgagttgatcacggttattgcatggataataatccgctgttacattcgataatacctgagccttcagtgaataaatctcaacactttcaaggaagcttttaaattcgctggcaatgctttccattcttttcgaatgaaatgcaccattaacctgtaaaggatgaaaaatacctttcgcctttaatacactcttcctaaattgagataattcagattgagaacctgaaataataaattgtgttggggaattaaaattggatatcgttaaatcaggaaattcagagtccgctaataaaaattctacccgctctaatttaagaccaataacggcagccatcgctccctcagagcaaagagccatacatcgaccccgttcttgaacaatagatagcgctgtttcaaaactaaaagcacccgcggcaaacaaagcacaatattcacccagactatggcccacaaaaatttcagcttccgtcccatgtttctccaagccatctaaataatgaagaatattagtaacaaacagagcaggctgtgtgaattcagttttgttaagcacattgggttcattttcgcacaccttaacgagtgaataccctaatacttgttgtgcgagcctcatgtgatattcatatttatcaaacaggttgcgccccatgccttgaaactgggctccctgtccgggaaacattacgacagtacaggttttcattgttcacatcctgctttttaaaatgaaattattatctttttttcctcaacttataagtgagtgacatttcaatacatatactcaactcatttgttggtaaatcatcttccggatctaaaacaatagccctattctttgaataaattaattcgggaaaaagggttctgaatgtatcaaccagagtggtctggcaatgaaaaaagatagccacatgcgaatgaccgaaacgatctaatcgaatagtcgttcccgatcccgtttcaagagtcaggtagctgggttgaccccatttcagagtctcagtaattgaaccgactccctccgtttttgatgcgacatcaaatattaattctcttatcgttaataataatttttgatgctgctcaggataatgttcaaatactgagtggacttcttgactctgaaattctttcattagattgctaccttgttcgttaatttttgcgttgtggctatctcacacaacacagtctttagattaataataaaccttataatattatggtttctgaattttatcccaaagacatgtcacttttagcaatcagttcccaacccatcccatctctttataagagacatattttttacgtaattcactgtcaggtacaacaacatcattatcagacattttcttcccttccagcgtcagcctttccattctttgggattgaacaaactcatagagcggattctgatgctggtaaggcatttcaatcttccagcgggaagcgatagcaatggaaactggcggttgattattaattgcatgccaccaccacggtggattaattaacatatctcccggctctaatgtaattctcaatttagggattcggttataaagcggttgatgttcttctaaatatcttaccggtgcattatgtttgacaaatgaacctacaaaaatacctttattaaacatggaactatacatagctgcagaatatttaggatgaacaaatatccattctttacgcccataaatattcaggaagcaattcaactcatttgcacaatggtaaacagcacctgtccccgggccacctatgaaaagctgggcaattttgtggtatgaggcaaaatcacctaagaagtgatcaatgcggtcaataccaatttgttgatgcagaatcggatatttattaaatatatcacttaagttctcaagataggctcggctgatatccccctttaataccccattaatataatcacgtagagaggttccattttcttcaaacaatttttctgttgtcgaataccaaagttgaaaatctccgaaattatccctgaaatactctggcgtccaaagctgcccacaagggaaagatgaagcaaaccctttaatgacaataggacgaatatcttccgcatagatttgagccagtttctgccaagtcagctcgcctacctcataagtttctatttctgagtagccagattctaaagccggtaatgtaaatgccatattttgttcagcttgttttaactcgttctgaaacaaatctggttttgaaaaaaagtttcttaagaaaaagatacgttcatattccagacgttctttttcaggtagatccacatagtcataatttgaatatgatcttgtcatgagactttctcctcaagtatggaatgaatatagttagctgccttattaacactctgatacggtaaaatatcctttatggaaaggtgaatcagaaatttttcattaatatttgccactatttttgctaacgtaattgactccaaaccatagcctgaaaataaagcatccggttctaattcatcggctgacatatacatagcagtggtcacttccttactgagaaaatctttaatctcttctaagttaaccatatcagactctctcttccgggagttgagatataatttctttatacaacgggagtatttcatcagctgatttttctattcccgcaataactaaaaaattatttgtcgattcatatagcgaaattaatttcgatacagtctcaatattctgatcatccagaatactaacctgcattttattttcagagcacgacaaacctaacatcacggcttttgccatcatctcttttagtgcatttatgaatgaatcttcttttttatccataacttatattctccacagttatttctcgttagtaatataccctttaaattattttatttttcattcaacccggcattttccctctttggtataatgtaaagcggtgatgagtgatcgaacggatatttcggccagaaactccgtttactcatgggagaggtgattttttcatcaccgctttttttctttaaccacctatgcaatgtttccggcaatgcggccagtgtttcatcattctggctgttcccggaggtgtgtaactcgtccacgctttggcgtgccaaaaatgaaaaaaaatttatcgagcagctcctcataactgctgattttcactacctttcgtacttttcaatgt

SEQ ID NO: 3322 - DNA, 26334 bp, Xenorhabdus sp.
  CDS (2516)..(4024)
ataaatctatccctgaggttaaaattaccaatgtcattcccactgccataatggcattgacagaggtttgctggagaatattaaagagattattcagagtaaaaaaattggggctgaaagaggaaacaacagcaatcaatattaatagtgcaattagtgatttctgttccattaaccttgtttttgtaatccaccgtctggtggttagtttttcactagaatttatgtccattatcatttttaaccactatttgagcactgtgttgtattacttacagttaattcattctgaaataaattatcaggggtatattgtttaccaacagctgctgccatcaacgattcctgagataaattatccgaactaaattccccacttatactaccttcatacatcaccagaattcgatcactcattcctaccacttcaggcatatccgaagagactaaaatgatactcaatccatcttttttaaactgattaattaattcataaatctctttcttcgcccctacatcaacccctcttgtcggttcatcaaggatcaggacttttggacgagtcattaaaccacgggcaattgcaactttctgttgattaccgcctgaaagcagcccaactggttgttccattgatggagttttgatattgaataatttgatgaaatcagaaacagatttttgttcagcggagtggcataaacgacagggtgttcggctgaagtaacgtaaggctgtgagagacatattctcttttactgacatccccaatactaatccatcactcttgcgatcttctgatatatagacaatgccgttggatagtccctcctgtggattacgaattattaaggtgttaccatctaatctaatttcaccttcaattttcggtaatgcaccataaataaccttcattaattcagtacgaccggctcccatcaacccagatattccgagaatttctcctctatttagcgagaaactaacatttttaatcccagaaccagataaatttacgacctctaatcgttttttcccacgaagcaaacccaaacgagggtattgctcttccagctttcgccccaccatcatttctatcaatgagtcttctttcagtgtacaaactggttgctcaccaatgaattgaccatcacgaaatacggtaacatcatcgcaaatttcaaaaatttctttcaagcggtgagaaatatagacaacaccacatccctgggctttcaattctcgtataatttggaataaagactcagtttcagtatcggtcagggcatccgttggttcatccataatgatgactttagactggaaactgagtgccttagcaatttcaatcagttgctgattaccgatagataattcagacaccaagcgatgactattactactgatatttaactttttcagcagataattcgcttccttatacattcttttccaattgataattcccaactgattgacaaattcacgccccagaaaaatattttccgcgatagtcagttgtggaataaggttcagctcctgatgaataattccaatgccggcttcctgagatgctttaggatcggaaaaaaccacatcctttccaaggtaacgaattgagccagcatccttagtatagataccagtcagtaccttcatcatggtggattttcctgcaccattttctcctaccaatgccataactttcccaggataaactcgcaatgttgcacctgacaaagctttgacccctggaaaagatttatcgatcccacttaactccagcaatggttccatactaacctcagaagattacaccagaacaaagaagtacattggcataaggtgagcattcccccgtacggatcactgctttgctcttttctgttttttctttcagaatatgatggctgacatattctatcgtgattgtatttccctgttttatctcaatttctgtaatacatttaataatttgttcatgtacctgaggattatgttcaataatctcagccgccaaaatggtggcttcggcttcgacttgtacttcctgaacaactacatccaatacagataataaatcaggtattccctgggttaacgctaaatcaattctctgagtagagctaggtattggcaggccggcatcactaatcacaatctgatctgtatgccctaaacgagaaatgaccgcagaaatatcagaattcagtaaaacgccttttttcatttattatgtaaactccattagcgaaacgtttcgctaacaactaatcatattaagagatacatcaaaaacaacatgattaagacgaaaatgtgatcaacattaaaacgtttacttgaagtgtacattcaacaaaaaaaataaatttatttaataagttaagctgaatcgattttataagtgaacttttcataaacaacaaaaattcaacaaatattcatcaaaacctttgcatagatagttttttacctataaataaagaacagttactatttgagctatggtgttcacgatatgcaattggttgagaaaatatcccggctaagtcagtatctggaaagtgggctgtatgaaagacgacagaccatccggctttgtctgctggctgctttatgtggagaaagtgttttccttctcggacctccgggcatagccaaaagcctgatcgcgcgtcggataaaatttgcttttcagaatgcccgtcatttcgaatacctgatgacacgtttttccaccccggaagaaattttcggccctctctctattcaggcgttaaaaaatgaaggacgttaccagcgtcttactgaaggttatttgcctgaggctgaaattgtttttttggatgaaatctggaaagcagggcctgctattttgaatactctactgacagcaataaatgaaaaaaaattcaggaatggtaatcaagaagaacagttgccaatgaggttattgatcgccgcttctaatgaactacctgatgccaataatggcctggaagcactttatgatcgcattctgatccggctttggctggataatattcaggaaaagaaaagttttcatgctttactcacagatcactgcaatgaaaataccaatcctgtacccgatcactttcaaattaccaatgaagaacttgatcaatggcaggataaagtcagccacatctcccttccgatccctattttcgagttgatctatcaactgcgtcagcaaattaatgctatggaaaatacgcctcatacctcggatcgccgatggaaaaaatctattcgtttgttgcaggccagtgcttttttcagcggaagaaactctatatctcccctggatctcgttctactaaaagactgtctgtggcacgatctgaatactttaaaacttacccctcaacttctgcataatttactgacagaacaagcttatcaacaacgctctttaacccacaaaatggaagtgctataccaacagtggatgaaagccagacaagatgaaacccctcatccacctttacagctaaccacaaaattatcagtttttggtcaccatactcactatttgcttcctgaaaatataagtggtgaaaagctgacactatttctgtcaccttcattaattttacatgattttgctgttaattttatcgaagtagataaatctcatctggaaaaatcccttaaaaagaacagtgacactttatctgtccggttaaatggaattggttttccacaaaaaattccttttgaaattaacaaaaaaaatcaaattgaaatgctggatatcagccgaaatagtgcagtgttatgtctatctgaacaaaaacagataaccctgaaaaaagagcagatacagtggaaggaaaaactattatctattggcgatgaaatccaacaccagcaccaattgtttagccagaatcagccttgtttatttatcgagccacattggctggctgatattgagcaaagtttttcccaattaaccgaggaacttaagaaattgagatcaaaaatggggtaatgacatgctaactctgcctgcgctcgatcttctactcgccataaatgaaagcgatttgatcgaggaaatcatattaagattgttaaacactcctcaattgatcatcttctttgaaaattttcccggaataaaacaagcattgctgaaagaaataccagactggcggaaaacattgcagcaaaggatcgaggaaacccttattccttcacctctggctgaggaatttcatttatatcaacaagtaacaataatggaacctgctgagttttttcagaaattacctcaccttgttgaaaagatagaaaaaattcaatccccttttgctactgatgcttataaattatgtcagcgatcatttcagggcagcaaagccgggcacatattgtttattcaacgctggcgcgcatgcctgatccatcaaacgacgacaattcataagacattattggaacaagaaaaagatctgtttctgacagagatccagaaacgattagtaatagcagctcatcttgcacctatcttcaatgaaaatgatcaagctgctgggtgcctatgggatatgagcaaaggccagtttcagctgacagaacataacatatcactactaacacaatattctgaatttctcagtcaacaaccagaattggaaaaactggctaaactactgggccgtagccaaaccgccaaatcattacctaaagacagcccaattctggaaccatttacccaaactgaatatattcccgataccgtgccagagcaagtcagcggacttcaacaaagtgatgatattctgagaattctgcctacagagctggccatgttagggattgaagagctagagtatgagttttatcgtcgactagttgaaaaaaaactactgacctatcgcttacagggaaacagttggcaaacaaaaactgttttaaaacctgctattcatcatcacaacgaaaagcagcccagaggaccatttattgtctgtgtggatacttctggttcgatgggaggcttcaatgaacactgtgcaaaagcattttgcctggctttgatgcgtatcgcactggctgataaccgccagtgtcatatcatgctgttttccacggatatcattcattatgacttaacatcgcagaatgggctgactcaggcagtgaattttctggggcaaacattcaggggaggaactgatctggccttctgcctgaaaacggcaataggaaaaatggaaacatacatctggaaagatgctgacgctgttgtaatttcagatttcattgcccagcgtttatcgggtgatctaatccatcaggtacaaaatctgcaacagcaacaccgcttccatgcggtctccctgtccaattacgggaaacccggtatcatgcgaatatttgattacatctggcgctttgataccgggattacaagccgtttactaagaaagtggcagcactgaaaacttaatcctttcaaaaaacagaattacaggacaccttcgacagattcaatcacttctggtgaccaaacaccacactgaacctgaccaatatgtgccatttgcagcaacagcatcactaaacgggactgaccaataccaccaccgatagactgtggcatctcacctttcagcagagactggtgccagtcgtactgcaagcgatcttcatcaccggacagtgcaagctgacgctccagcgcttcagcatcaacccggatccccattgaagaaatttcaaaagcatcctgcaaaacagggttccagacaataatgtcaccgttcaggccaaggaaaccatcgctgtttgttgttgtccaatcgtcatagtccggtgcacgaacatcatgtgcctgaccatcagacagcttaccgccgattcccatcaggaaaacagcaccaaattcttttgcagccgcacgttcacgacctttggcatccaaatccgggtaacgtttcagaagctcttcactgtgcatgaagtgaatttgatctggcaggaacggtgccagaccaaattccttacttactgcttgttgtgtttcttttatcgcttcgtagattttacccactgtttgttttaaatagtcgagtgaacgacaaccttcacccactactttttcccaatcccactgatcaacaaagaccgaatggataggagtcaggcgatcctcatcaggacgcagagccttcatatgtgtatacaatccttgttctgcctgaaaaccaaagcggcctagtgtcttacgtttccatttagccagagaatgaaccacttcaaacgttgcatcaggcagtgtcttaaccttcacctgtaccgctttttcgtggcctgacaggttatcctgagtaccatcaccaagacgactcagaattggcccctgtacttcgattaaaccaagttgcttctctagcagacgtgaaaagtaagatttcacaaaactaatctgctgctgtttttcaataaaggatgttttcatgatgctgctctctaaattttttagtgaccctgtgtcctgttgatatatattaagcaacaaaacagagtataaattcaatatctgataataaaaatatatactaatgcagataaacgataatttttacactataaaaatgaatatcatttaaaaatagggattaaaaatggcagaaatttatcagatcgataatttagaccgagacatacttcatgctttaatggataacgcgcgtacaccttacgctgaactagccaaaaaattcgcagtcagccctggcacgatccatgttcgcgtagaaaaaatgaagcaggcgggaattatttcgggcactcgggttgatattagtgctaaacaactcggatttgacgtatgctgctttattggcattatcctgaaaagtgcgaaagactacccagcagcattacaaaaactagatatgctggatgaagtcgttgaagtttattacacaacagggcattacagtatttttatcaaagtcatgtgccgatctatcgaatctcttcaagatgtacttattaacaagatccaaactattgacgaaatacagtcaacggaaacactgatctcactgcaaaacccgatcatgaggactatcaaaccctgatcctgaaaaacctataaccatattatccacaggtagatcccgacagactcacaacgtacaatagttactctttaaatttagcaaggatcatgatgagcacgataaccttaatcagcggaagcacaatgggcagcgctgagtacgttgctgagcatatggcagagatcttggataatcttggtttttcaacagaggtactacatggcccttcactggatgatttgcctctgaatgggctatggattgtcgtcacatcaacacatggggcaggagatttacctgaaaatcttcagcctctcgccgatgagatcgcacagcagaaacctgatctgagtcttgtaacatttggcgctgtcggaataggaagttcagaatatgacacattttgtggtgcaataagatcattggaacaattattagaagatcagcaggcaaaaaggatcggcgatcgactggaaatagacatcctgcaacacgaaattccggaagatccagcagaagaatgggtcaaagaatgggcaaagttactctgatcagattaattttttagcgattaactgtggataacttagctaaaaagcaggggttaacccgtagttatccatttaataatcatatttcaatctaacgactgtgtataactagccatttagatcccagcttatactgagttggatcacggatcattcacagcaaatgatccttttcagcatcatgatctttctatggaaaatccacttatccacagatgatcgcgatcctaataaaagatctaataaagagatctttaaataaaaagatcttattttaaataatgacgatcaatcctacttggtctaacggccaaacttgagtagaattctctccccaatgcaaactagcattcttacaattgaaggttcgcacatgttttatccagaacattttgacgtcatcattatcggcggtggtcacgctggtactgaagcagcaatggcagccgcacgtatggggcgtcaaaccttattactgactcacaatattgatactttgggccagatgtcatgtaatccagccattggtgggatcggtaaagggcatctggtaaaagagatcgatgcacttggcggcctaatggcaaaagcaacggatctggctggtattcagttcagaacacttaatgccagcaaaggcccggcagttcgtgcaacacgagcccaagctgatcgtgtactgtatcgacaggctgtaagaactgcactggaaaatcagcctaacttaataatcttccagcaatcagttgaagatctcatcgttgaaaataacaccgtcacaggtgttgttactcgtatgggactgaaattcagggcaaaatctgttgttctgacagttggtactttccttgatggaaaaattcacattggtctggaaaattacagtggcggacgtgcaggtgatcctccagcgatcgctttatcacatcgtttacgtgaactgcctttgcgtgtttcccgactgaaaacaggtacaccacctcgtatcgatgcaagaaccattgatttcagccaacttgaacaacaatttggtgataacccaacacctgtattttctttcatgggaaacagggatcaacatccacaacagatcccgtgttacatcactcatactaacgaaaaaacccatgaagtgatccgtagtaatttggatcgcagtccgatgtatgcggggatcatcgaagggatcggcccacgctactgcccttctatcgaagataaggtgatgcgctttgccgatcgtaatgcgcatcagatcttccttgagccagaaggactcaccagcaacgaaatttatcctaatgggatttcaaccagtctgccatttgacgtacagatgcagatagtccactccatgaaaggcatggaaaacgcacggattatccgccctggttacgcgatcgaatatgacttcttcgatccacgggatttgaaacagacgctcgaaagcaaatttattaatggcttgttctttgcaggccagatcaatggtacaaccggttacgaagaagccgctgctcaagggttattagcaggtctaaatgctgcccgttatgccactgaagaagaaggttggttccctcgtcgtgatcaggcttatatcggtgtgctggttgatgatttatgcaccttaggaacaaaagagccttaccgcatgttcacatcacgtgcggaatatcgtttgatgctgcgtgaagataacgctgatctacgtttgacagaacaaggccgtgaactaggattagttgacgatctgcgttgggaacattactcccgtaaagttgaaatgatcgagcaagagcgccagcgtctgagtaatatctgggttcatccacactctgaaagtctggatgagatcaatcaagttctgaaaaccccattgtccaaagaagccaatggtgaagacttactccgtcgtccggaaatgaactacgaattgctcacatcaatgccacgtttttcaccggggctggctgaacctcaggcggcagatcaggttgagatccaggttaaatacgaaggttatattgcccgtcagctggaagagatcgaaaaacagctgcgtaacgaaaacacagtattgcctgttgatcttgattacaaacaagtcaacggactttcgaatgaagttgttgcaaaactgaatgaccataaaccaagtacaattggtcaggcttcacgtatttctggcattacaccggcagcgatctccatcttgctggtatggttgaaaaaacagggtttattgcgtcgtagtgcctaagaggacaaggttttgtttaacaaattggaatcgctgttagcgaagacagacattattttatcgtcggagcaaaaacagcaacttgttgcctacgttgatatgctcaacaaatggaacaaggcttacaatctgacatctgttcgtgatccggaacaaatgctggttcgccatattatggatagcattgtcgttaatccatttcttcagggaacccgctttattgatgttggaacagggcccggcttaccgggcattccactggcaattgtacggcctgactctcatttcaccttactggatagtttggggaaacgcgtccgttttctacgccaggttcaacatgagttagggctcactaacgttgagccagtacaaagcagagttgaggaattcactcctgaggtgctttttgatggagtgatcagcagggcttttgcatctttgcaggatatgctgtcatggtgccatcaccttcctaaagacactgatggacgcttttatgcgctgaaaggcatagtgccggaagaggagctgactcatttaccttcggggatcagtcttgatgcagtcattccgcttcaggttcctgagcaagaagggcagcgccatttggtggtacttaagtaaaacagattttgttgtttatcaataaaagtttaaataattagtgacgtcggccacagttatattgttacggacgttactaattatcttccctatcttttcatatttatttaccgacagatcatagaaaaataactttcattttatattgagcaaattgttctttctaagaagaggcatccattttctttataaataaattttagagaaagtgttcaaaataaacctttaagattttttgctgatatattgaataaaactttatagctataatattaattaattgattttatataggaaaaataaaaggcagccatcacaaatttaatgataaatggtattaatgttttgattgaatgtgatatgtatcacgtttgtttttgggctcgatagattaaacgttacaaaatactaaatagtatttgtgagcaatctaccatcaaagttagaaatttaaattattattcactttttcgctacttatggattgaattcatttcgtctgcccgtataatttgcacgtttttgtcacttgacactcttaagcaaagacagttttatacaacattcagcaaagcctgatatgtaatggtgtacttcagggagaaaacaaaagtcatgtctgtatccctttatagcggtaaaattgcactgaaactgttacttttgcagttaatgacttttgttattctcagtgcggctttttataccagaagtatcgaatggggcgtttctgcttttgccggtgggttagcattttggctgccaaatgtcatttttatgctgctcactcactttcaaaaggtaaaagaagagggtgtacctgtacgcattgcatggttcttcgctattggtgaaggggttaaagttatcacctcgatagctatgctgatagttgccttaggggtgttcaaggcggcatttgcaccacttggtgtggcctatttagcggtgctgattgtgcagatcatcgcacctgccgtaatgaacggttagtgtttttaacaataaaagggtaaaaagcatcatgtctgcatcaggagaagtttcaacttcagagtatataagtcatcacctgagacaccttcagttagacttgcgtacctttgagttggtcaatccccaagctagtggctatgaagcgacgttctggacgttgaacattgactcgctttttttctccgtcgtattagggatgttgtttctgtttgtattcaggaaggttgccgttaatgccactgctggcgtgccgggtaaattccagactgcagtagaaatgattatcggtttcgttgataacactgtacgtgatatgtatcacggaaagagcaaagtgattgcccctctggctttgactgtgttcgtctgggtgtttttgatgaacgcattggatttgctgccaatcgatttcattcctttaatcggtgaacatgtcttcggcctgcctgctctgcgtattgttccaacagcagatgttagtgtcactatgtcgatggcgcttggcgtctttgtcctcatcctattctatagcattaagatgaaaggaatcggtggttttgcgaaagagctggggttacagcctttcaatcatcctctgtttattcctattaacttaattttggaaggggttagcttgctgtctaaacctatatcactcggtctgcgactgtttggtaatatgtatgccggcgaactgatctttattcttattgcggctctcttaccgttttggtcacagtggatgctcagcttaccatgggcgattttccacatactgattattacgttacaagcctttattttcatggttctgacgattgtttatctgtcgatggcatctgaagagcattaattttatcaatcattaatagtgttttaactgaaacaaactggagactgtcatggatataaacatggatctgctgtacatagctgccgctattctgatgggtttggctgctatcggtgctgcgatcggtatcggcatccttgggggcaaattcttggaaggtgcagctcgtcagcctgatctgatccctctgctgcgtactcagttctttatcgttatgggtctggttgacgccatcccgatgatcgctgtgggcctgggcttgtatatgatgttcgctgtcggtaccaagtaacttacagaactgaaaattaagccgattcattaattgaaatagaggtattgtgccgtgaatattaacgcaacaatcctcggccaggccatcgcgtttgtcctgtttgttttgttctgtatgaagtatgtatggccaccaatcatggcggccatcgaaaagcgtcagaaagaaattgctgacggtttggcttcagcagagcgtgctaaaaagaacctggacttagcgcaagccaatgcgaccgaccaactgaaaaaagcgaaagcagacgcacacgctatcatcgaacaggctaataaacaaagagcccagattattgatgatgcaaggactgaagctgagctggaacgtagcaaaatagtagcgcaggctcatgctgaagttgaagctgaaagcaagcgtgttcgtgaagagctacgtaaacaggttgcgctgttggctatcgcaggtgccgagaagatcatcgaacgttccgtggatgaagctgctaacagcgacatcgttgataaactggtcgctgaactgtaaggagggaggggcatgtctgaatttgctactgtagctcgcccctacgccaaagcagcttttgactttgctgtggaacaccaatctctcgaacactggcagaacatgctggcgttcgttgcagaggtaacccgcaatgagcaggttggtgagctgctttccggttcattagcaccggaaacgttagccaatacctttatcactctatgtggtgatcaggtagatgagcatgctcgtaactttattcgtgtcatggcagaaaatggtcgcttgctggtattgccagaagtcttcctgcaatttatccaattgcgtgcatcactggaatcaacaattgatgttgaagtgatatctgcgtccgaactgaatgagcagcagcaggctaaaatttctgcggcgatggaaaaacgtctgtcacgcaaagtgaagctgaattgcaaaattgacaagtctgttattgccggcgtgattatccgtgcgggtgacatggtgatcgatggcagtattcgtggccgtctggatcgtttaacagacgtcttgcagtcttaaggggactggagcatatgcaactgaattccaccgaaatcagcgaactgatcaaacagcgtattgctcagttcaatgtggtgagcgaagctcacaatgaaggtacgattgtttccgttaacgacggtatcattcgtgtccacggtttagccgatgtcatgcagggtgagatgatcgcactgcctggcaaccgttatgcaattgcactgaacctggagcgagactccgtgggtgcggttgttatgggtccgtatgctgacttggccgaaggcatgaaagtcaaatgtactggccgtattttggaagtacctgttggtcgtggtttgctgggtcgtgttgttaacacactgggtgagccaatcgatggtaaaggcgctgttgagcatgatggtttctcacctgtagaagttattgctccgggcgttattgatcgtcaatccgttgaccagcctgtccagacaggttacaaatctgttgatgccatgatcccaatcggccgtggtcagcgtgagctggttatcggtgaccgtcagacaggtaaaactgcactggcgattgatgcgatcatcaaccaacgtgattccggtatcaaatgtatttacgtagcgattggtcagaaagcctctactattgctaacgtagttcgtaaactggaagagcatgacgcactgaaaaacactattgttgttgttgcatctgcttctgaatctgctgccctgcaatatctggcaccatattctggctgtgcaatgggtgaatacttccgtgatcgtggtgaagatgccctgattgtttacgatgacctgtctaaacaggctgttgcttaccgtcagatttctctgttgctgcgccgtccacctggacgtgaagcattccctggtgacgttttctatctgcactcccgtctgttggagcgtgcagcgcgtgttaacgctgaatatgttgaaaagtacaccaatggtgaagtgaaaggcaaaaccggttctctgacagcactgccaatcatcgaaacacaggcaggtgacgtttctgcattcgtaccgacaaacgttatttccattactgatggtcagatcttccttgaatctgctctgttcaacgcaggtattcgtccggcggttaacccagggatttccgtatcccgtgtaggtggtgctgctcagactaagattatcaagaaactgtctggtggtatccgtactgctctggctcagtaccgcgaactggcggcattctcccagtttgcatctgatctggatgatgcgactcgtaagcagctggatcacggtcagaaagtaactgagctgttgaaacagaaacagtatcagccaatgtctatcgcacaacaggctctgtctctgtttgctgctgagcgtggctatctggaagatgtcgaaatcgcgaaagtggtcagtttcgaatctgcgctgttggcgtatgctagccatgaacatgctgatcttctgaaagagattgaccagtctggcgattacaacggagagattgaagcgaagctgaaagctctgttggaatccttcaaggcgactcagtcctggtaacactattcggccctgtttgattctgtatatgaaaaaacacgggccgtctggttgaatacggagaagcagaaatggccggcgcaaaagagatacgtaccaaaatcgccagtgtgcagaacacgcagaaaatcactaaagcgatggaaatggtcgccgcgtccaaaatgcgtaaaacgcaggaccgcatggcggccagccgtccttatgcagataccattcgcagcgtgattggacaccttgcgttaggtaatctggagtacaaacacccataccttgaagagcgtgacgttaaacgcgttgggtacgtggttgtttctactgaccgtggtttatgtggcggtttgaacattaacttgttcaaaaaattgctgatagaaatgaaagactggtctgataaaaaagtccaggttgatttggcacttattggatcaaaagcggtttctttcttttcttctgttggtggcaacgttgttgcccaggtaacagggatgggagataacccatcattgtccgaattgatcgggccagtcagcgtcatgatgcaagcatatgacgaagggcgtctggataaactgtatatagtgacaaacaagttccacaatacaatgtctcaggttccgacaatcactcagttattgcctctgccagccggagacgatgaaacactgaagaagaagtcctgggattatctgtatgaaccagatcctaaggcgctgttggataccttgctgcgtcgctatatagaatcgcaagtttatcagggcgtcgttgaaaacctggctagtgaacaggccgcacgaatggtagcgatgaaagccgcgactgataacggtggcaacctgatcaaagagttgcagttggtttacaacaaagctcgtcaggccagcattactcaggaactcaccgaaatcgtttcgggtgcagctgcggtttaacagctaggtttacgaattacgtagaggattcaagatggctactggaaagattatccaggtaatcggcgccgtggtggacgtcgaattccctcaggacagcgtaccaaaagtatacgatgcccttgaggttaaaaacggtgaagaaaaactggtgctggaagttcagcaacagttaggcggcggtatcgttcgctgtatcgcaatgggtacttctgatggtctgcgccgtaatttggaagtgactgatttaggtcatccaatcgaagtccctgttggtgaagcgactctgggtcgtatcatgaacgtactgggtgacccgattgatatgaaaggtgacattggcgagcaagagcgctggtcaattcaccgtactgcaccaagctatgaagagttatctaactctcaggaactgctggaaaccggtatcaaagtaatggacctgatctgtccattcgctaaaggtggtaaagttggtctgttcggtggtgcgggtgtaggtaaaaccgttaacatgatggagctgatccgtaacatcgcgatcgagcactccggttactctgtatttgcgggtgtaggtgaacgtactcgtgaaggtaacgacttctatcatgaaatgacagactccaacgtactggacaaagtatctctggtatacggtcagatgaatgagccaccaggaaaccgtctgcgtgttgctctgaccggtctgaccatggcggaaaaattccgtgatgaaggccgtgacgttctgctgttcgtcgataacatttaccgttataccctggcaggtaccgaagtatcggcactgttgggtcgtatgccatctgcggtaggttatcagccaacgctggcggaagagatgggtgttctgcaagaacgtatcacctctaccaaaactggttcaatcacttccgtacaggctgtttacgttcctgcggatgacttgactgacccatcaccagcaacaacctttgctcacttggatgcaaccgttgtactgagccgtcagatcgcatctctgggtatctatccagcggttgacccactggattcaaccagccgtcagcttgatccactcgttgttggtcaagagcactatgacgtagctcgtggcgttcagtctatcctgcaacgttatcaggaactgaaagacatcatcgcgattctgggtatggacgaactgtcagaagatgacaaactggttgttgctcgtgctcgtaagatccagcgcttcctgtctcagccattcttcgttgcagaagtatttaccggttcaccaggtaaattcgtttctctgaaagacaccatccgtggcttcaaaggcatcctgaacggtgattatgaccacctgccagagcaggcgttctacatggttggtaccatcgaagaagctatagaaaaagctaagaagctttaatacggctgacgggaggttgatatggctgcaatgacgttctccctgaacgtagtcagcgctgaaaaactgatgtttgaagggctggtacagaaaattcaggtgactggtagtgaaggtgagttggggatttatcctcagcacaccccgctgcttactgccataaaaccgggcatgatacgtattgttaagcagtttggtgaagaagagtttatctacctgtcaggtggtattctggaagttcagccaaacggcgtgatcgtactggccgatacagcgatccgtggtaaggatttggatgaagccaaagtgcttgaagccaagcgcaaggcggaagaacatgtccgtaattcccacggcgatgttgattatgctcaggcatctgctgaattgtcgaaagcgattgcaaaacttcgtgtaatcgaactgacgaaaaagctgatgtaggattacctgataaatttcaaatattagctgataaggttaaatttgagagataaaaggtaaatacccaatggatttaaaattgcatagagacaattggaaagacagagggtaaggcagtagataaaaagccagttagtcatgctaactggcttttttgcattacgaaatatgtagcaatttatttcgtaaacaggtttacttttatacttaaaatcggaattgtcaggtttcttatgtctattacatccaacgcaactgtttccaagccagttacttccaaatctacgagtgcaaaaagtgttgtgatactggcggcgggaaaaggaacccgcatgtattctgacctccctaaagtcctgcacttactggcaggaaagccgatggttcagcatgtcattgatactgcaatggcattgggtaccctaaatgttcatctggtatatgggcatggcggcgacctgatgaaacaaactctttcaggccagaaaagcgctaatcaaaacctgaactgggtattgcaagcggaacagctaggtactggtcacgcgatgcagcaggctgctccacattttgccgatgatgaagatattctgatcctctacggagatgtaccactgattgctcaggatacgttagaacgtttgatcgaagctaaaccagaaggcggtattggcttattaaccgctattttggataacccgaccggatatggtcgtatcatccgtgaaaatggcgaagtcacagggatcatcgaacaaaaagatgcgactgacgagcagcgtaaaatcaacgaaatcaacaccggcattctggtcgcaaacggtggtgatttgaaacgctggttatctaaactggaaaacaataacgcacaaggtgaatactacctgacagacgttattgcacttgcacatcaggaaggcagtcagataaaagctgttcacccaagccgattaagtgaaatggaaggggttaacaaccgtcttcagctttctgcactggaacgtatttaccagtctgaacaagcagaaaaattattgctggcgggtgtaatgttactcgatccggctcgtttcgatctgcgcggaacattagagcatggccgcgatattaccattgataccaatgtcattattgaaggtcatgtcgtattggggaataacgttcaggtaggctctggctgtattctgaaaaattgcgttatcggtgatggtgcggtaatcagcccttatactgtaatagaagattctgaactcgcggctgaatgcaccgtcgggccttttgctcgcttgcgtccgggttctaaactggcggaaaaggcccatgtcggcaatttcgttgaaatgaaaaaatcttcccttggcaaaggttccaaagcagggcatctgacttatctgggtgattctgaaattggaagtaatgtaaatatcggtgcaggaaccattacctgtaactatgatggcgccaataaatttaagactatcattggtgatgacgtatttgtgggttctgacagccagcttgttgcccctgtaaacattgctaaaggtgtaactatcggcgcaggaaccaccgtaacaaaagatgttgctgaaaatgagctggttatcagccgtgttaagcaaactcatattagggactggaaacgtcctgttaagaaaaaataaaatatagataaataataataatccccatctctacaaagctcggggaccggcaaagccggaacacaatcaggttgtgagacataaaaagggcatttacagccctatttttaggaataaaaacacatgtgtggaatcgttggtgcagtagcacagcgtgatatagcagaaatattgatcgaaggtcttcgtcgtctggaataccgtggttatgactctgcgggtatggctgtcgttgacagcgaaaatcagatgactcgtctgcgtgaagtgggcaaagtacagatgctggctgatgaagctgataaacagcctgttatcggtggtacaggtattgctcatacccgttgggcgacacacggggagccaaacgaacgcaacgctcaccctcatgtttctgaacatattgcagttgtgcataacggcattattgaaaaccatgaagagctgcgtgaagaattgaaagcacgtggttatggtttctcttcagataccgatactgaaaccattgctcaccttgttcactgggaacagcaacagggtggctcattgctggaaatcgtacagcgtgttatcccacaattgcgcggtgcttatggcaccgtcattatggatagccgtcagccagacgtgctggtggctgcgcgttccggtagtccattagtgattggtctgggcgttggtgaaaacttcctggcatctgaccagctggcattactgccggtgactcgccgctttatctatctggaagaaggtgacgtcgctgaaattacccgccgcacagttcgtatttttggtgtgcagggcgaagccgttgaacgtgagcagatcgaatccaacgttcagtacgatgcaggtgacaaaggtgtttaccgtcactacatgcagaaagagatttacgaacagccaatggcgattaaaaacacactggaaggtcgtgtgagccacggtgaaattattctgtcagaactgggcgctaacgcagcagaattactgtctcaggttgaacacatccagatcgttgcctgcggaacgtcttttaatgccggtatggtttcccgctactggtttgaatcactggcgggtattccgtgtgatgtagaaatcgcctcagaattccgttaccgtaaaccagcttgtcgtaaaggcagcctgctgatcaccctgtctcaatccggtgaaacagcggacactctggcagcactgcgtttatccaaagaactgggttacctgacttccctgaccatctgtaacgttgcgggttcctctctggtacgcgaatcagactttgccctgatgaccaaagcgggcgcagaaatcggcgtagcatccaccaaagcatttaccactcagctaactgtattgctgatgctggtggcttacatgggacgcctgaaaggtgcggatgattctcttgaacagaatatcgttcatgccctacacgcgttaccaagccgcattgaaagcatgttgtcgaaagacaaagtgattgaagcattggcagaagacttctctgaaaaacaccacgcattattcctcggccgtggcgatcaatatccgatcgcggttgaaggtgcgctgaaactgaaagagatctcttacatccacgcagaagcttacgcagcgggtgaactgaaacacggcccactggcactgattgatgctgatatgccggttatcatcgttgcaccaaacaacgaactgctggaaaaactgaaatccaacatcgaagaagtccgcgcccgtggcggtcagctgtacgtcttcgccgatcaggatgcaggtttcaccgacagtgaaaacatgaagatcatctccctgccacacgtagaagaactgatcgccccgatcttctatacagtgccactgcaattgctgtcttaccacgttgcattgatcaaaggtacagatgtggatcagccaaggaacttggcgaagtctgttacggtggagtgatggtttaatcaccatatataataaaagttaattctttataaatccggtcatgcgaaaactgaccggattctattactcggattagcggcgtttaatagcaagtctgaatcaccaattagttgataaagaaagtacaatcccaaaatccagctgtgcagggttttggggtttaaatcctataccgcgtgagcgtattaaactgcaaactgaaaagtctgcgtcagcaatggcaaaatatctgcttttctggatgatggattttcaataggaacccatctagactcaatcgttataaatccccaaaactgtaaaaaacgtgcgataaagcgagattcaatcaccatggtgagtgactctgttggcgaaaagagcttattcggtatgaactgatcaagtaaagcagggaatgcggtagcgacttcgtcactcaattgatccacagaaccatggctttgtagacgccaaagcataaacagccagaaagttcgtatatcaatgtctccccaactgtctaagtagccccaattatactgtgtggttgctgcctccagcataggtaagaaaaaggcattaatgccatgggtttgatattgcttctgtgcatcttttttcacatagtagcgaccacttctacggtaaataatgccagtgatttctgccaatacccgagagtaatgcagtgcattaaatttatcttcattactgccggaaaattcatggatactaataggagtatcaaacttagccactggaaattcaggcaacaaatcacaggcttgtttcaccagttttaagggtaagttgcctttggtggtcgctttaaatgagccttcattctgcatcgcttcatctaagattaaccctaaatagcgcatcacagggctacttgataaatcaaccggcgtgttgattgttacccaagaaaattgaccgaatggcgcatgcatccaattgctcatttggtttggtgacaggccacaaaaatcagtattaggccgattattatgctcatttattttatgttgagtaacagcatttatctcatctagagtcaaatttgggttaatagcagcgacttgcgcaatatcatccaatacttccgcacgttgctttgaaacgctatccatacaacaacgtttgtattttttctcgctgccacagggacaaggatcgttccgaccaactttcattttaaacgctctattttatttttgctgatgtatgctttcggtactgcttattccattttcattaaacttattagttaattaaccccaattctggataagaaattgacgagaagcctgttcaaggagccgtgttttggtgcaagtcgaaacagctccggggaggaacaggctatgaacaacttagttgaaattttcatcgatgtcgatgacttttgtcgttttttcattccacaatgggaacagttttgtctcaataagggatatcgcctacgtcgtagaaaaggtcacatgtatcccagtgaaatcatgaccatcctgatcctctttcatctgtcgcattatcgtgattttaaaaatttttatctggagcatatttggcgatatcatcatcacgattttcccaccttgctcagttatactcgttttatcagtgtcgcgccttccgttttagtgcctctgtgcagctatctgactcaacctacggggatcgcctttattgactccacgcgtttgagcgtgtgccataatatccgtattccccgccataaggtatttgaagggacagcacagcgaggaaaaacctcaatggggtggttttacggtttcaaattacacctgattattaaccatcttggcgaaattctggccctcaaaatcacggctggaaatacggatgacaggaaagtggttcgggaattagcaaaagaattaatcggttccttgtatggcgacaaaggttatcttagtcaggaactggcaaacgatttagcacaaaacggtgtcactttcatcacgaaaaagcggagtaatattaaagcgagtgtgctggaagattgggataaaataatgttatcaaggcgttttattatcgagacggttaatgggcaattgaaaaatatctgtcaaatagaacattctcgtcatcgaagtataaaagggtttctgttgactgttttaacggggttaattgcttattgtcataaaaagaagaaaccatcactgaaagttttctactcagaagaagaagatattccagtgacagcttaaacagaattggggttatttagataagtgattggttttaaataatgtacagcgttgagtttgcggggttctgtcagaaataaaggctaaggattctgttttctacattaaaaaacccgcgtatgtgagcgggtttaggataatcaatcaacttatcaatctcgcgataaaccactggcaagaacttcatcgcaactaatcgtacctttacacagagaatggaattttttggaactaattccagcctgtttagccattgatttaatcaagtctcgtgaaaatggcgcatgagatttatccactgtaaccacccatttatgtccatctgcttttttgatccattgttcatgagaggttcccttctttggtttcatttcaaaacctaaatccgccagagcccttacaacttctctatacttgagtggtgttagcttataaaaaatcatgttgcgccacacctcttatcgggctagctcacactgttcatcaaacaacttaaccgaaccaatttcattatttggataaaatgattttcttacttttaatttaaaagcgatataccaatacttaagccacatagataggggggcttttcgattaataagctgttttgcatattcgcgttcagaggcagcctcttcaagataatcatttacctgagcttcaagtttgttaattgcctcgtcaatcgaatcagcttgcgctgctagtgacaaatctaagcaggcagcaataaatatattatcctgttgataagccatgcaacgtaatctcatttaggtcatctcctgtaggggtgttagcaacataattatcaaattgataaatatgtctaaggtgatgatagtttgttcaagccgcaatttcaacagcttaaactgttattgacttgtatgattaaccactaaaaaagattaacaaacaattaaatcacactcacctctaccgccttctgcttcacattccacgccgaattcgccggcatctggacacggacatccaagcgacagactcactccggctgttcaggccagacgatatcgggcgcagtggaacaatccacccggttgagcaggacgcggtattttttccatttgagcagcgcggctttctcttctttcgtcgccatatcgaggtcaacggcatcctgtaagggcgcaattttttcagtcgcaatccagagtaagtactgtttttcagattctgccacttgtctttcataggctgccagttcccccttgtcagtcacccattgctgaccattccaataatcaaagcgcgtcacgggagccaatagcgtataaccgtcaggaataattacttcctgacataacgcagagtggcgtgtggtgatgttataaatggtcttaccccgattatccggcaataattgccattccccctcaatcatgcatggccaataacccgctcgacttggtggcgctattctgacggcattactgggtgggtaggaattagcgtgggctgttccctccgatgtatacggacgatgtggtttactgtcatcaaaatagtaattgttcatttatacccccaaataaataatcggcaccagtgtcacttccagcacccgattttccggtgcagtcggtaccactttgtctgcactaaactcataggtcgcataaggacgactgaggtagacctgagaggcaaccatgtcatctttaaccgataactcaaaagcccctcccgctttagttaaccctctggctacctccgccccgattgaaaataatccactgatattccggataccatcctgtgcaacctgaccaggcgttaatcctgcgcgggggtaatgccaacgtccgtcgctgtgtttcatggacggtaaattaatgtttccgtcccgctcaaccacccgccagtctgccctgacttgtgaagacaatgaccgaatagcctttccctgaggggaattgatattgaaccggtcaccattcatcacataccaacccggttttaattcattttcacgtcttaatgaaaatttccaatcgcccacttccagtttttcaaatccggctaaatctgataataaagcaataacaccagaacgctccgggatagtcacagaccaaatattttgccacgggctttctcgctctcgtgccaaaatatatccgccctttttaccatccgtttcaaaaataagtgaaatgtccttattgactaactccagccccgaaaaaccattatcactgtctacgaccatgcgttgctggctggtaattgtaccggtggcctgaatgccaccgttaagccttcctcccgtttgagggtaagccccgagattgctcatctacgcccctttatgcggaacatccgccccatgcttcgttttt

SEQ ID NO: 3323 - DNA, 26334 bp, Xenorhabdus sp.; identical to SEQ ID NO: 3322
  CDS (5010)..(5480)

SEQ ID NO: 3324 - DNA, 26334 bp, Xenorhabdus sp.; identical to SEQ ID NO: 3322
  CDS (6666)..(7127)

SEQ ID NO: 3325 - DNA, 26334 bp, Xenorhabdus sp.; identical to SEQ ID NO: 3322
  CDS (7253)..(7660)

SEQ ID NO: 3326 - DNA, 26334 bp, Xenorhabdus sp.; identical to SEQ ID NO: 3322
  CDS (7998)..(9923)

SEQ ID NO: 3327 - DNA, 26334 bp, Xenorhabdus sp.; identical to SEQ ID NO: 3322
  CDS (10023)..(10550)

SEQ ID NO: 3328 - DNA, 26334 bp, Xenorhabdus sp.; identical to SEQ ID NO: 3322
  CDS (11166)..(11543)

SEQ ID NO: 3329 - DNA, 26334 bp, Xenorhabdus sp.; identical to SEQ ID NO: 3322
  CDS (11794)..(12399)

SEQ ID NO: 3330 - DNA, 26334 bp, Xenorhabdus sp.; identical to SEQ ID NO: 3322
  CDS (12461)..(12691)

SEQ ID NO: 3331 - DNA, 26334 bp, Xenorhabdus sp.; identical to SEQ ID NO: 3322
  CDS (12833)..(13216)

SEQ ID NO: 3332 - DNA, 26334 bp, Xenorhabdus sp.; identical to SEQ ID NO: 3322
  CDS (13319)..(13762)

SEQ ID NO: 3333 - DNA, 26334 bp, Xenorhabdus sp.; identical to SEQ ID NO: 3322
  CDS (13777)..(15318)

SEQ ID NO: 3334 - DNA, 26334 bp, Xenorhabdus sp.; identical to SEQ ID NO: 3322
  CDS (15390)..(16253)

SEQ ID NO: 3335 - DNA, 26334 bp, Xenorhabdus sp.; identical to SEQ ID NO: 3322
  CDS (16288)..(17670)

SEQ ID NO: 3336 - DNA, 26334 bp, Xenorhabdus sp.; identical to SEQ ID NO: 3322
  CDS (17701)..(18114)

SEQ ID NO: 3337 - DNA, 26334 bp, Xenorhabdus sp.; identical to SEQ ID NO: 3322
  CDS (18420)..(19778)

SEQ ID NO: 3338 - DNA, 26334 bp, Xenorhabdus sp.; identical to SEQ ID NO: 3322
  CDS (19902)..(21731)

SEQ ID NO: 3339 - DNA, 26334 bp, Xenorhabdus sp.; identical to SEQ ID NO: 3322
  CDS (23093)..(23968)

SEQ ID NO: 3340 - DNA, 26334 bp, Xenorhabdus sp.
  CDS (24538)..(26094)
aaaaacgaagcatggggcggatgttccgcataaaggggcgtagatgagcaatctcggggcttaccctcaaacgggaggaaggcttaacggtggcattcaggccaccggtacaattaccagccagcaacgcatggtcgtagacagtgataatggtttttcggggctggagttagtcaataaggacatttcacttatttttgaaacggatggtaaaaagggcggatatattttggcacgagagcgagaaagcccgtggcaaaatatttggtctgtgactatcccggagcgttctggtgttattgctttattatcagatttagccggatttgaaaaactggaagtgggcgattggaaattttcattaagacgtgaaaatgaattaaaaccgggttggtatgtgatgaatggtgaccggttcaatatcaattcccctcagggaaaggctattcggtcattgtcttcacaagtcagggcagactggcgggtggttgagcgggacggaaacattaatttaccgtccatgaaacacagcgacggacgttggcattacccccgcgcaggattaacgcctggtcaggttgcacaggatggtatccggaatatcagtggattattttcaatcggggcggaggtagccagagggttaactaaagcgggaggggcttttgagttatcggttaaagatgacatggttgcctctcaggtctacctcagtcgtccttatgcgacctatgagtttagtgcagacaaagtggtaccgactgcaccggaaaatcgggtgctggaagtgacactggtgccgattatttatttgggggtataaatgaacaattactattttgatgacagtaaaccacatcgtccgtatacatcggagggaacagcccacgctaattcctacccacccagtaatgccgtcagaatagcgccaccaagtcgagcgggttattggccatgcatgattgagggggaatggcaattattgccggataatcggggtaagaccatttataacatcaccacacgccactctgcgttatgtcaggaagtaattattcctgacggttatacgctattggctcccgtgacgcgctttgattattggaatggtcagcaatgggtgactgacaagggggaactggcagcctatgaaagacaagtggcagaatctgaaaaacagtacttactctggattgcgactgaaaaaattgcgcccttacaggatgccgttgacctcgatatggcgacgaaagaagagaaagccgcgctgctcaaatggaaaaaataccgcgtcctgctcaaccgggtggattgttccactgcgcccgatatcgtctggcctgaacagccggagtgagtctgtcgcttggatgtccgtgtccagatgccggcgaattcggcgtggaatgtgaagcagaaggcggtagaggtgagtgtgatttaattgtttgttaatcttttttagtggttaatcatacaagtcaataacagtttaagctgttgaaattgcggcttgaacaaactatcatcaccttagacatatttatcaatttgataattatgttgctaacacccctacaggagatgacctaaatgagattacgttgcatggcttatcaacaggataatatatttattgctgcctgcttagatttgtcactagcagcgcaagctgattcgattgacgaggcaattaacaaacttgaagctcaggtaaatgattatcttgaagaggctgcctctgaacgcgaatatgcaaaacagcttattaatcgaaaagcccccctatctatgtggcttaagtattggtatatcgcttttaaattaaaagtaagaaaatcattttatccaaataatgaaattggttcggttaagttgtttgatgaacagtgtgagctagcccgataagaggtgtggcgcaacatgattttttataagctaacaccactcaagtatagagaagttgtaagggctctggcggatttaggttttgaaatgaaaccaaagaagggaacctctcatgaacaatggatcaaaaaagcagatggacataaatgggtggttacagtggataaatctcatgcgccattttcacgagacttgattaaatcaatggctaaacaggctggaattagttccaaaaaattccattctctgtgtaaaggtacgattagttgcgatgaagttcttgccagtggtttatcgcgagattgataagttgattgattatcctaaacccgctcacatacgcgggttttttaatgtagaaaacagaatccttagcctttatttctgacagaaccccgcaaactcaacgctgtacattatttaaaaccaatcacttatctaaataaccccaattctgtttaagctgtcactggaatatcttcttcttctgagtagaaaactttcagtgatggtttcttctttttatgacaataagcaattaaccccgttaaaacagtcaacagaaacccttttatacttcgatgacgagaatgttctatttgacagatatttttcaattgcccattaaccgtctcgataataaaacgccttgataacattattttatcccaatcttccagcacactcgctttaatattactccgctttttcgtgatgaaagtgacaccgttttgtgctaaatcgtttgccagttcctgactaagataacctttgtcgccatacaaggaaccgattaattcttttgctaattcccgaaccactttcctgtcatccgtatttccagccgtgattttgagggccagaatttcgccaagatggttaataatcaggtgtaatttgaaaccgtaaaaccaccccattgaggtttttcctcgctgtgctgtcccttcaaataccttatggcggggaatacggatattatggcacacgctcaaacgcgtggagtcaataaaggcgatccccgtaggttgagtcagatagctgcacagaggcactaaaacggaaggcgcgacactgataaaacgagtataactgagcaaggtgggaaaatcgtgatgatgatatcgccaaatatgctccagataaaaatttttaaaatcacgataatgcgacagatgaaagaggatcaggatggtcatgatttcactgggatacatgtgaccttttctacgacgtaggcgatatcccttattgagacaaaactgttcccattgtggaatgaaaaaacgacaaaagtcatcgacatcgatgaaaatttcaactaagttgttcatagcctgttcctccccggagctgtttcgacttgcaccaaaacacggctccttgaacaggcttctcgtcaatttcttatccagaattggggttaattaactaataagtttaatgaaaatggaataagcagtaccgaaagcatacatcagcaaaaataaaatagagcgtttaaaatgaaagttggtcggaacgatccttgtccctgtggcagcgagaaaaaatacaaacgttgttgtatggatagcgtttcaaagcaacgtgcggaagtattggatgatattgcgcaagtcgctgctattaacccaaatttgactctagatgagataaatgctgttactcaacataaaataaatgagcataataatcggcctaatactgatttttgtggcctgtcaccaaaccaaatgagcaattggatgcatgcgccattcggtcaattttcttgggtaacaatcaacacgccggttgatttatcaagtagccctgtgatgcgctatttagggttaatcttagatgaagcgatgcagaatgaaggctcatttaaagcgaccaccaaaggcaacttacccttaaaactggtgaaacaagcctgtgatttgttgcctgaatttccagtggctaagtttgatactcctattagtatccatgaattttccggcagtaatgaagataaatttaatgcactgcattactctcgggtattggcagaaatcactggcattatttaccgtagaagtggtcgctactatgtgaaaaaagatgcacagaagcaatatcaaacccatggcattaatgcctttttcttacctatgctggaggcagcaaccacacagtataattggggctacttagacagttggggagacattgatatacgaactttctggctgtttatgctttggcgtctacaaagccatggttctgtggatcaattgagtgacgaagtcgctaccgcattccctgctttacttgatcagttcataccgaataagctcttttcgccaacagagtcactcaccatggtgattgaatctcgctttatcgcacgttttttacagttttggggatttataacgattgagtctagatgggttcctattgaaaatccatcatccagaaaagcagatattttgccattgctgacgcagacttttcagtttgcagtttaatacgctcacgcggtataggatttaaaccccaaaaccctgcacagctggattttgggattgtactttctttatcaactaattggtgattcagacttgctattaaacgccgctaatccgagtaatagaatccggtcagttttcgcatgaccggatttataaagaattaacttttattatatatggtgattaaaccatcactccaccgtaacagacttcgccaagttccttggctgatccacatctgtacctttgatcaatgcaacgtggtaagacagcaattgcagtggcactgtatagaagatcggggcgatcagttcttctacgtgtggcagggagatgatcttcatgttttcactgtcggtgaaacctgcatcctgatcggcgaagacgtacagctgaccgccacgggcgcggacttcttcgatgttggatttcagtttttccagcagttcgttgtttggtgcaacgatgataaccggcatatcagcatcaatcagtgccagtgggccgtgtttcagttcacccgctgcgtaagcttctgcgtggatgtaagagatctctttcagtttcagcgcaccttcaaccgcgatcggatattgatcgccacggccgaggaataatgcgtggtgtttttcagagaagtcttctgccaatgcttcaatcactttgtctttcgacaacatgctttcaatgcggcttggtaacgcgtgtagggcatgaacgatattctgttcaagagaatcatccgcacctttcaggcgtcccatgtaagccaccagcatcagcaatacagttagctgagtggtaaatgctttggtggatgctacgccgatttctgcgcccgctttggtcatcagggcaaagtctgattcgcgtaccagagaggaacccgcaacgttacagatggtcagggaagtcaggtaacccagttctttggataaacgcagtgctgccagagtgtccgctgtttcaccggattgagacagggtgatcagcaggctgcctttacgacaagctggtttacggtaacggaattctgaggcgatttctacatcacacggaatacccgccagtgattcaaaccagtagcgggaaaccataccggcattaaaagacgttccgcaggcaacgatctggatgtgttcaacctgagacagtaattctgctgcgttagcgcccagttctgacagaataatttcaccgtggctcacacgaccttccagtgtgtttttaatcgccattggctgttcgtaaatctctttctgcatgtagtgacggtaaacacctttgtcacctgcatcgtactgaacgttggattcgatctgctcacgttcaacggcttcgccctgcacaccaaaaatacgaactgtgcggcgggtaatttcagcgacgtcaccttcttccagatagataaagcggcgagtcaccggcagtaatgccagctggtcagatgccaggaagttttcaccaacgcccagaccaatcactaatggactaccggaacgcgcagccaccagcacgtctggctgacggctatccataatgacggtgccataagcaccgcgcaattgtgggataacacgctgtacgatttccagcaatgagccaccctgttgctgttcccagtgaacaaggtgagcaatggtttcagtatcggtatctgaagagaaaccataaccacgtgctttcaattcttcacgcagctcttcatggttttcaataatgccgttatgcacaactgcaatatgttcagaaacatgagggtgagcgttgcgttcgtttggctccccgtgtgtcgcccaacgggtatgagcaatacctgtaccaccgataacaggctgtttatcagcttcatcagccagcatctgtactttgcccacttcacgcagacgagtcatctgattttcgctgtcaacgacagccatacccgcagagtcataaccacggtattccagacgacgaagaccttcgatcaatatttctgctatatcacgctgtgctactgcaccaacgattccacacatgtgtttttattcctaaaaatagggctgtaaatgccctttttatgtctcacaacctgattgtgttccggctttgccggtccccgagctttgtagagatggggattattattatttatctatattttattttttcttaacaggacgtttccagtccctaatatgagtttgcttaacacggctgataaccagctcattttcagcaacatcttttgttacggtggttcctgcgccgatagttacacctttagcaatgtttacaggggcaacaagctggctgtcagaacccacaaatacgtcatcaccaatgatagtcttaaatttattggcgccatcatagttacaggtaatggttcctgcaccgatatttacattacttccaatttcagaatcacccagataagtcagatgccctgctttggaacctttgccaagggaagattttttcatttcaacgaaattgccgacatgggccttttccgccagtttagaacccggacgcaagcgagcaaaaggcccgacggtgcattcagccgcgagttcagaatcttctattacagtataagggctgattaccgcaccatcaccgataacgcaatttttcagaatacagccagagcctacctgaacgttattccccaatacgacatgaccttcaataatgacattggtatcaatggtaatatcgcggccatgctctaatgttccgcgcagatcgaaacgagccggatcgagtaacattacacccgccagcaataatttttctgcttgttcagactggtaaatacgttccagtgcagaaagctgaagacggttgttaaccccttccatttcacttaatcggcttgggtgaacagcttttatctgactgccttcctgatgtgcaagtgcaataacgtctgtcaggtagtattcaccttgtgcgttattgttttccagtttagataaccagcgtttcaaatcaccaccgtttgcgaccagaatgccggtgttgatttcgttgattttacgctgctcgtcagtcgcatctttttgttcgatgatccctgtgacttcgccattttcacggatgatacgaccatatccggtcgggttatccaaaatagcggttaataagccaataccgccttctggtttagcttcgatcaaacgttctaacgtatcctgagcaatcagtggtacatctccgtagaggatcagaatatcttcatcatcggcaaaatgtggagcagcctgctgcatcgcgtgaccagtacctagctgttccgcttgcaatacccagttcaggttttgattagcgcttttctggcctgaaagagtttgtttcatcaggtcgccgccatgcccatataccagatgaacatttagggtacccaatgccattgcagtatcaatgacatgctgaaccatcggctttcctgccagtaagtgcaggactttagggaggtcagaatacatgcgggttccttttcccgccgccagtatcacaacactttttgcactcgtagatttggaagtaactggcttggaaacagttgcgttggatgtaatagacataagaaacctgacaattccgattttaagtataaaagtaaacctgtttacgaaataaattgctacatatttcgtaatgcaaaaaagccagttagcatgactaactggctttttatctactgccttaccctctgtctttccaattgtctctatgcaattttaaatccattgggtatttaccttttatctctcaaatttaaccttatcagctaatatttgaaatttatcaggtaatcctacatcagctttttcgtcagttcgattacacgaagttttgcaatcgctttcgacaattcagcagatgcctgagcataatcaacatcgccgtgggaattacggacatgttcttccgccttgcgcttggcttcaagcactttggcttcatccaaatccttaccacggatcgctgtatcggccagtacgatcacgccgtttggctgaacttccagaataccacctgacaggtagataaactcttcttcaccaaactgcttaacaatacgtatcatgcccggttttatggcagtaagcagcggggtgtgctgaggataaatccccaactcaccttcactaccagtcacctgaattttctgtaccagcccttcaaacatcagtttttcagcgctgactacgttcagggagaacgtcattgcagccatatcaacctcccgtcagccgtattaaagcttcttagctttttctatagcttcttcgatggtaccaaccatgtagaacgcctgctctggcaggtggtcataatcaccgttcaggatgcctttgaagccacggatggtgtctttcagagaaacgaatttacctggtgaaccggtaaatacttctgcaacgaagaatggctgagacaggaagcgctggatcttacgagcacgagcaacaaccagtttgtcatcttctgacagttcgtccatacccagaatcgcgatgatgtctttcagttcctgataacgttgcaggatagactgaacgccacgagctacgtcatagtgctcttgaccaacaacgagtggatcaagctgacggctggttgaatccagtgggtcaaccgctggatagatacccagagatgcgatctgacggctcagtacaacggttgcatccaagtgagcaaaggttgttgctggtgatgggtcagtcaagtcatccgcaggaacgtaaacagcctgtacggaagtgattgaaccagttttggtagaggtgatacgttcttgcagaacacccatctcttccgccagcgttggctgataacctaccgcagatggcatacgacccaacagtgccgatacttcggtacctgccagggtataacggtaaatgttatcgacgaacagcagaacgtcacggccttcatcacggaatttttccgccatggtcagaccggtcagagcaacacgcagacggtttcctggtggctcattcatctgaccgtataccagagatactttgtccagtacgttggagtctgtcatttcatgatagaagtcgttaccttcacgagtacgttcacctacacccgcaaatacagagtaaccggagtgctcgatcgcgatgttacggatcagctccatcatgttaacggttttacctacacccgcaccaccgaacagaccaactttaccacctttagcgaatggacagatcaggtccattactttgataccggtttccagcagttcctgagagttagataactcttcatagcttggtgcagtacggtgaattgaccagcgctcttgctcgccaatgtcacctttcatatcaatcgggtcacccagtacgttcatgatacgacccagagtcgcttcaccaacagggacttcgattggatgacctaaatcagtcacttccaaattacggcgcagaccatcagaagtacccattgcgatacagcgaacgataccgccgcctaactgttgctgaacttccagcaccagtttttcttcaccgtttttaacctcaagggcatcgtatacttttggtacgctgtcctgagggaattcgacgtccaccacggcgccgattacctggataatctttccagtagccatcttgaatcctctacgtaattcgtaaacctagctgttaaaccgcagctgcacccgaaacgatttcggtgagttcctgagtaatgctggcctgacgagctttgttgtaaaccaactgcaactctttgatcaggttgccaccgttatcagtcgcggctttcatcgctaccattcgtgcggcctgttcactagccaggttttcaacgacgccctgataaacttgcgattctatatagcgacgcagcaaggtatccaacagcgccttaggatctggttcatacagataatcccaggacttcttcttcagtgtttcatcgtctccggctggcagaggcaataactgagtgattgtcggaacctgagacattgtattgtggaacttgtttgtcactatatacagtttatccagacgcccttcgtcatatgcttgcatcatgacgctgactggcccgatcaattcggacaatgatgggttatctcccatccctgttacctgggcaacaacgttgccaccaacagaagaaaagaaagaaaccgcttttgatccaataagtgccaaatcaacctggacttttttatcagaccagtctttcatttctatcagcaattttttgaacaagttaatgttcaaaccgccacataaaccacggtcagtagaaacaaccacgtacccaacgcgtttaacgtcacgctcttcaaggtatgggtgtttgtactccagattacctaacgcaaggtgtccaatcacgctgcgaatggtatctgcataaggacggctggccgccatgcggtcctgcgttttacgcattttggacgcggcgaccatttccatcgctttagtgattttctgcgtgttctgcacactggcgattttggtacgtatctcttttgcgccggccatttctgcttctccgtattcaaccagacggcccgtgttttttcatatacagaatcaaacagggccgaatagtgttaccaggactgagtcgccttgaaggattccaacagagctttcagcttcgcttcaatctctccgttgtaatcgccagactggtcaatctctttcagaagatcagcatgttcatggctagcatacgccaacagcgcagattcgaaactgaccactttcgcgatttcgacatcttccagatagccacgctcagcagcaaacagagacagagcctgttgtgcgatagacattggctgatactgtttctgtttcaacagctcagttactttctgaccgtgatccagctgcttacgagtcgcatcatccagatcagatgcaaactgggagaatgccgccagttcgcggtactgagccagagcagtacggataccaccagacagtttcttgataatcttagtctgagcagcaccacctacacgggatacggaaatccctgggttaaccgccggacgaatacctgcgttgaacagagcagattcaaggaagatctgaccatcagtaatggaaataacgtttgtcggtacgaatgcagaaacgtcacctgcctgtgtttcgatgattggcagtgctgtcagagaaccggttttgcctttcacttcaccattggtgtacttttcaacatattcagcgttaacacgcgctgcacgctccaacagacgggagtgcagatagaaaacgtcaccagggaatgcttcacgtccaggtggacggcgcagcaacagagaaatctgacggtaagcaacagcctgtttagacaggtcatcgtaaacaatcagggcatcttcaccacgatcacggaagtattcacccattgcacagccagaatatggtgccagatattgcagggcagcagattcagaagcagatgcaacaacaacaatagtgtttttcagtgcgtcatgctcttccagtttacgaactacgttagcaatagtagaggctttctgaccaatcgctacgtaaatacatttgataccggaatcacgttggttgatgatcgcatcaatcgccagtgcagttttacctgtctgacggtcaccgataaccagctcacgctgaccacggccgattgggatcatggcatcaacagatttgtaacctgtctggacaggctggtcaacggattgacgatcaataacgcccggagcaataacttctacaggtgagaaaccatcatgctcaacagcgcctttaccatcgattggctcacccagtgtgttaacaacacgacccagcaaaccacgaccaacaggtacttccaaaatacggccagtacatttgactttcatgccttcggccaagtcagcatacggacccataacaaccgcacccacggagtctcgctccaggttcagtgcaattgcataacggttgccaggcagtgcgatcatctcaccctgcatgacatcggctaaaccgtggacacgaatgataccgtcgttaacggaaacaatcgtaccttcattgtgagcttcgctcaccacattgaactgagcaatacgctgtttgatcagttcgctgatttcggtggaattcagttgcatatgctccagtccccttaagactgcaagacgtctgttaaacgatccagacggccacgaatactgccatcgatcaccatgtcacccgcacggataatcacgccggcaataacagacttgtcaattttgcaattcagcttcactttgcgtgacagacgtttttccatcgccgcagaaattttagcctgctgctgctcattcagttcggacgcagatatcacttcaacatcaattgttgattccagtgatgcacgcaattggataaattgcaggaagacttctggcaataccagcaagcgaccattttctgccatgacacgaataaagttacgagcatgctcatctacctgatcaccacatagagtgataaaggtattggctaacgtttccggtgctaatgaaccggaaagcagctcaccaacctgctcattgcgggttacctctgcaacgaacgccagcatgttctgccagtgttcgagagattggtgttccacagcaaagtcaaaagctgctttggcgtaggggcgagctacagtagcaaattcagacatgcccctccctccttacagttcagcgaccagtttatcaacgatgtcgctgttagcagcttcatccacggaacgttcgatgatcttctcggcacctgcgatagccaacagcgcaacctgtttacgtagctcttcacgaacacgcttgctttcagcttcaacttcagcatgagcctgcgctactattttgctacgttccagctcagcttcagtccttgcatcatcaataatctgggctctttgtttattagcctgttcgatgatagcgtgtgcgtctgctttcgcttttttcagttggtcggtcgcattggcttgcgctaagtccaggttctttttagcacgctctgctgaagccaaaccgtcagcaatttctttctgacgcttttcgatggccgccatgattggtggccatacatacttcatacagaacaaaacaaacaggacaaacgcgatggcctggccgaggattgttgcgttaatattcacggcacaatacctctatttcaattaatgaatcggcttaattttcagttctgtaagttacttggtaccgacagcgaacatcatatacaagcccaggcccacagcgatcatcgggatggcgtcaaccagacccataacgataaagaactgagtacgcagcagagggatcagatcaggctgacgagctgcaccttccaagaatttgcccccaaggatgccgataccgatcgcagcaccgatagcagccaaacccatcagaatagcggcagctatgtacagcagatccatgtttatatccatgacagtctccagtttgtttcagttaaaacactattaatgattgataaaattaatgctcttcagatgccatcgacagataaacaatcgtcagaaccatgaaaataaaggcttgtaacgtaataatcagtatgtggaaaatcgcccatggtaagctgagcatccactgtgaccaaaacggtaagagagccgcaataagaataaagatcagttcgccggcatacatattaccaaacagtcgcagaccgagtgatataggtttagacagcaagctaaccccttccaaaattaagttaataggaataaacagaggatgattgaaaggctgtaaccccagctctttcgcaaaaccaccgattcctttcatcttaatgctatagaataggatgaggacaaagacgccaagcgccatcgacatagtgacactaacatctgctgttggaacaatacgcagagcaggcaggccgaagacatgttcaccgattaaaggaatgaaatcgattggcagcaaatccaatgcgttcatcaaaaacacccagacgaacacagtcaaagccagaggggcaatcactttgctctttccgtgatacatatcacgtacagtgttatcaacgaaaccgataatcatttctactgcagtctggaatttacccggcacgccagcagtggcattaacggcaaccttcctgaatacaaacagaaacaacatccctaatacgacggagaaaaaaagcgagtcaatgttcaacgtccagaacgtcgcttcatagccactagcttggggattgaccaactcaaaggtacgcaagtctaactgaaggtgtctcaggtgatgacttatatactctgaagttgaaacttctcctgatgcagacatgatgctttttacccttttattgttaaaaacactaaccgttcattacggcaggtgcgatgatctgcacaatcagcaccgctaaataggccacaccaagtggtgcaaatgccgccttgaacacccctaaggcaactatcagcatagctatcgaggtgataactttaaccccttcaccaatagcgaagaaccatgcaatgcgtacaggtacaccctcttcttttaccttttgaaagtgagtgagcagcataaaaatgacatttggcagccaaaatgctaacccaccggcaaaagcagaaacgccccattcgatacttctggtataaaaagccgcactgagaataacaaaagtcattaactgcaaaagtaacagtttcagtgcaattttaccgctataaagggatacagacatgacttttgttttctccctgaagtacaccattacatatcaggctttgctgaatgttgtataaaactgtctttgcttaagagtgtcaagtgacaaaaacgtgcaaattatacgggcagacgaaatgaattcaatccataagtagcgaaaaagtgaataataatttaaatttctaactttgatggtagattgctcacaaatactatttagtattttgtaacgtttaatctatcgagcccaaaaacaaacgtgatacatatcacattcaatcaaaacattaataccatttatcattaaatttgtgatggctgccttttatttttcctatataaaatcaattaattaatattatagctataaagttttattcaatatatcagcaaaaaatcttaaaggtttattttgaacactttctctaaaatttatttataaagaaaatggatgcctcttcttagaaagaacaatttgctcaatataaaatgaaagttatttttctatgatctgtcggtaaataaatatgaaaagatagggaagataattagtaacgtccgtaacaatataactgtggccgacgtcactaattatttaaacttttattgataaacaacaaaatctgttttacttaagtaccaccaaatggcgctgcccttcttgctcaggaacctgaagcggaatgactgcatcaagactgatccccgaaggtaaatgagtcagctcctcttccggcactatgcctttcagcgcataaaagcgtccatcagtgtctttaggaaggtgatggcaccatgacagcatatcctgcaaagatgcaaaagccctgctgatcactccatcaaaaagcacctcaggagtgaattcctcaactctgctttgtactggctcaacgttagtgagccctaactcatgttgaacctggcgtagaaaacggacgcgtttccccaaactatccagtaaggtgaaatgagagtcaggccgtacaattgccagtggaatgcccggtaagccgggccctgttccaacatcaataaagcgggttccctgaagaaatggattaacgacaatgctatccataatatggcgaaccagcatttgttccggatcacgaacagatgtcagattgtaagccttgttccatttgttgagcatatcaacgtaggcaacaagttgctgtttttgctccgacgataaaataatgtctgtcttcgctaacagcgattccaatttgttaaacaaaaccttgtcctcttaggcactacgacgcaataaaccctgttttttcaaccataccagcaagatggagatcgctgccggtgtaatgccagaaatacgtgaagcctgaccaattgtacttggtttatggtcattcagttttgcaacaacttcattcgaaagtccgttgacttgtttgtaatcaagatcaacaggcaatactgtgttttcgttacgcagctgtttttcgatctcttccagctgacgggcaatataaccttcgtatttaacctggatctcaacctgatctgccgcctgaggttcagccagccccggtgaaaaacgtggcattgatgtgagcaattcgtagttcatttccggacgacggagtaagtcttcaccattggcttctttggacaatggggttttcagaacttgattgatctcatccagactttcagagtgtggatgaacccagatattactcagacgctggcgctcttgctcgatcatttcaactttacgggagtaatgttcccaacgcagatcgtcaactaatcctagttcacggccttgttctgtcaaacgtagatcagcgttatcttcacgcagcatcaaacgatattccgcacgtgatgtgaacatgcggtaaggctcttttgttcctaaggtgcataaatcatcaaccagcacaccgatataagcctgatcacgacgagggaaccaaccttcttcttcagtggcataacgggcagcatttagacctgctaataacccttgagcagcggcttcttcgtaaccggttgtaccattgatctggcctgcaaagaacaagccattaataaatttgctttcgagcgtctgtttcaaatcccgtggatcgaagaagtcatattcgatcgcgtaaccagggcggataatccgtgcgttttccatgcctttcatggagtggactatctgcatctgtacgtcaaatggcagactggttgaaatcccattaggataaatttcgttgctggtgagtccttctggctcaaggaagatctgatgcgcattacgatcggcaaagcgcatcaccttatcttcgatagaagggcagtagcgtgggccgatcccttcgatgatccccgcatacatcggactgcgatccaaattactacggatcacttcatgggttttttcgttagtatgagtgatgtaacacgggatctgttgtggatgttgatccctgtttcccatgaaagaaaatacaggtgttgggttatcaccaaattgttgttcaagttggctgaaatcaatggttcttgcatcgatacgaggtggtgtacctgttttcagtcgggaaacacgcaaaggcagttcacgtaaacgatgtgataaagcgatcgctggaggatcacctgcacgtccgccactgtaattttccagaccaatgtgaatttttccatcaaggaaagtaccaactgtcagaacaacagattttgccctgaatttcagtcccatacgagtaacaacacctgtgacggtgttattttcaacgatgagatcttcaactgattgctggaagattattaagttaggctgattttccagtgcagttcttacagcctgtcgatacagtacacgatcagcttgggctcgtgttgcacgaactgccgggcctttgctggcattaagtgttctgaactgaataccagccagatccgttgcttttgccattaggccgccaagtgcatcgatctcttttaccagatgccctttaccgatcccaccaatggctggattacatgacatctggcccaaagtatcaatattgtgagtcagtaataaggtttgacgccccatacgtgcggctgccattgctgcttcagtaccagcgtgaccaccgccgataatgatgacgtcaaaatgttctggataaaacatgtgcgaaccttcaattgtaagaatgctagtttgcattggggagagaattctactcaagtttggccgttagaccaagtaggattgatcgtcattatttaaaataagatctttttatttaaagatctctttattagatcttttattaggatcgcgatcatctgtggataagtggattttccatagaaagatcatgatgctgaaaaggatcatttgctgtgaatgatccgtgatccaactcagtataagctgggatctaaatggctagttatacacagtcgttagattgaaatatgattattaaatggataactacgggttaacccctgctttttagctaagttatccacagttaatcgctaaaaaattaatctgatcagagtaactttgcccattctttgacccattcttctgctggatcttccggaatttcgtgttgcaggatgtctatttccagtcgatcgccgatcctttttgcctgctgatcttctaataattgttccaatgatcttattgcaccacaaaatgtgtcatattctgaacttcctattccgacagcgccaaatgttacaagactcagatcaggtttctgctgtgcgatctcatcggcgagaggctgaagattttcaggtaaatctcctgccccatgtgttgatgtgacgacaatccatagcccattcagaggcaaatcatccagtgaagggccatgtagtacctctgttgaaaaaccaagattatccaagatctctgccatatgctcagcaacgtactcagcgctgcccattgtgcttccgctgattaaggttatcgtgctcatcatgatccttgctaaatttaaagagtaactattgtacgttgtgagtctgtcgggatctacctgtggataatatggttataggtttttcaggatcagggtttgatagtcctcatgatcgggttttgcagtgagatcagtgtttccgttgactgtatttcgtcaatagtttggatcttgttaataagtacatcttgaagagattcgatagatcggcacatgactttgataaaaatactgtaatgccctgttgtgtaataaacttcaacgacttcatccagcatatctagtttttgtaatgctgctgggtagtctttcgcacttttcaggataatgccaataaagcagcatacgtcaaatccgagttgtttagcactaatatcaacccgagtgcccgaaataattcccgcctgcttcattttttctacgcgaacatggatcgtgccagggctgactgcgaattttttggctagttcagcgtaaggtgtacgcgcgttatccattaaagcatgaagtatgtctcggtctaaattatcgatctgataaatttctgccatttttaatccctatttttaaatgatattcatttttatagtgtaaaaattatcgtttatctgcattagtatatatttttattatcagatattgaatttatactctgttttgttgcttaatatatatcaacaggacacagggtcactaaaaaatttagagagcagcatcatgaaaacatcctttattgaaaaacagcagcagattagttttgtgaaatcttacttttcacgtctgctagagaagcaacttggtttaatcgaagtacaggggccaattctgagtcgtcttggtgatggtactcaggataacctgtcaggccacgaaaaagcggtacaggtgaaggttaagacactgcctgatgcaacgtttgaagtggttcattctctggctaaatggaaacgtaagacactaggccgctttggttttcaggcagaacaaggattgtatacacatatgaaggctctgcgtcctgatgaggatcgcctgactcctatccattcggtctttgttgatcagtgggattgggaaaaagtagtgggtgaaggttgtcgttcactcgactatttaaaacaaacagtgggtaaaatctacgaagcgataaaagaaacacaacaagcagtaagtaaggaatttggtctggcaccgttcctgccagatcaaattcacttcatgcacagtgaagagcttctgaaacgttacccggatttggatgccaaaggtcgtgaacgtgcggctgcaaaagaatttggtgctgttttcctgatgggaatcggcggtaagctgtctgatggtcaggcacatgatgttcgtgcaccggactatgacgattggacaacaacaaacagcgatggtttccttggcctgaacggtgacattattgtctggaaccctgttttgcaggatgcttttgaaatttcttcaatggggatccgggttgatgctgaagcgctggagcgtcagcttgcactgtccggtgatgaagatcgcttgcagtacgactggcaccagtctctgctgaaaggtgagatgccacagtctatcggtggtggtattggtcagtcccgtttagtgatgctgttgctgcaaatggcacatattggtcaggttcagtgtggtgtttggtcaccagaagtgattgaatctgtcgaaggtgtcctgtaattctgttttttgaaaggattaagttttcagtgctgccactttcttagtaaacggcttgtaatcccggtatcaaagcgccagatgtaatcaaatattcgcatgataccgggtttcccgtaattggacagggagaccgcatggaagcggtgttgctgttgcagattttgtacctgatggattagatcacccgataaacgctgggcaatgaaatctgaaattacaacagcgtcagcatctttccagatgtatgtttccatttttcctattgccgttttcaggcagaaggccagatcagttcctcccctgaatgtttgccccagaaaattcactgcctgagtcagcccattctgcgatgttaagtcataatgaatgatatccgtggaaaacagcatgatatgacactggcggttatcagccagtgcgatacgcatcaaagccaggcaaaatgcttttgcacagtgttcattgaagcctcccatcgaaccagaagtatccacacagacaataaatggtcctctgggctgcttttcgttgtgatgatgaatagcaggttttaaaacagtttttgtttgccaactgtttccctgtaagcgataggtcagtagttttttttcaactagtcgacgataaaactcatactctagctcttcaatccctaacatggccagctctgtaggcagaattctcagaatatcatcactttgttgaagtccgctgacttgctctggcacggtatcgggaatatattcagtttgggtaaatggttccagaattgggctgtctttaggtaatgatttggcggtttggctacggcccagtagtttagccagtttttccaattctggttgttgactgagaaattcagaatattgtgttagtagtgatatgttatgttctgtcagctgaaactggcctttgctcatatcccataggcacccagcagcttgatcattttcattgaagataggtgcaagatgagctgctattactaatcgtttctggatctctgtcagaaacagatctttttcttgttccaataatgtcttatgaattgtcgtcgtttgatggatcaggcatgcgcgccagcgttgaataaacaatatgtgcccggctttgctgccctgaaatgatcgctgacataatttataagcatcagtagcaaaaggggattgaattttttctatcttttcaacaaggtgaggtaatttctgaaaaaactcagcaggttccattattgttacttgttgatataaatgaaattcctcagccagaggtgaaggaataagggtttcctcgatcctttgctgcaatgttttccgccagtctggtatttctttcagcaatgcttgttttattccgggaaaattttcaaagaagatgatcaattgaggagtgtttaacaatcttaatatgatttcctcgatcaaatcgctttcatttatggcgagtagaagatcgagcgcaggcagagttagcatgtcattaccccatttttgatctcaatttcttaagttcctcggttaattgggaaaaactttgctcaatatcagccagccaatgtggctcgataaataaacaaggctgattctggctaaacaattggtgctggtgttggatttcatcgccaatagataatagtttttccttccactgtatctgctcttttttcagggttatctgtttttgttcagatagacataacactgcactatttcggctgatatccagcatttcaatttgattttttttgttaatttcaaaaggaattttttgtggaaaaccaattccatttaaccggacagataaagtgtcactgttctttttaagggatttttccagatgagatttatctacttcgataaaattaacagcaaaatcatgtaaaattaatgaaggtgacagaaatagtgtcagcttttcaccacttatattttcaggaagcaaatagtgagtatggtgaccaaaaactgataattttgtggttagctgtaaaggtggatgaggggtttcatcttgtctggctttcatccactgttggtatagcacttccattttgtgggttaaagagcgttgttgataagcttgttctgtcagtaaattatgcagaagttgaggggtaagttttaaagtattcagatcgtgccacagacagtcttttagtagaacgagatccaggggagatatagagtttcttccgctgaaaaaagcactggcctgcaacaaacgaatagattttttccatcggcgatccgaggtatgaggcgtattttccatagcattaatttgctgacgcagttgatagatcaactcgaaaatagggatcggaagggagatgtggctgactttatcctgccattgatcaagttcttcattggtaatttgaaagtgatcgggtacaggattggtattttcattgcagtgatctgtgagtaaagcatgaaaacttttcttttcctgaatattatccagccaaagccggatcagaatgcgatcataaagtgcttccaggccattattggcatcaggtagttcattagaagcggcgatcaataacctcattggcaactgttcttcttgattaccattcctgaattttttttcatttattgctgtcagtagagtattcaaaatagcaggccctgctttccagatttcatccaaaaaaacaatttcagcctcaggcaaataaccttcagtaagacgctggtaacgtccttcattttttaacgcctgaatagagagagggccgaaaatttcttccggggtggaaaaacgtgtcatcaggtattcgaaatgacgggcattctgaaaagcaaattttatccgacgcgcgatcaggcttttggctatgcccggaggtccgagaaggaaaacactttctccacataaagcagccagcagacaaagccggatggtctgtcgtctttcatacagcccactttccagatactgacttagccgggatattttctcaaccaattgcatatcgtgaacaccatagctcaaatagtaactgttctttatttataggtaaaaaactatctatgcaaaggttttgatgaatatttgttgaatttttgttgtttatgaaaagttcacttataaaatcgattcagcttaacttattaaataaatttattttttttgttgaatgtacacttcaagtaaacgttttaatgttgatcacattttcgtcttaatcatgttgtttttgatgtatctcttaatatgattagttgttagcgaaacgtttcgctaatggagtttacataataaatgaaaaaaggcgttttactgaattctgatatttctgcggtcatttctcgtttagggcatacagatcagattgtgattagtgatgccggcctgccaatacctagctctactcagagaattgatttagcgttaacccagggaatacctgatttattatctgtattggatgtagttgttcaggaagtacaagtcgaagccgaagccaccattttggcggctgagattattgaacataatcctcaggtacatgaacaaattattaaatgtattacagaaattgagataaaacagggaaatacaatcacgatagaatatgtcagccatcatattctgaaagaaaaaacagaaaagagcaaagcagtgatccgtacgggggaatgctcaccttatgccaatgtacttctttgttctggtgtaatcttctgaggttagtatggaaccattgctggagttaagtgggatcgataaatcttttccaggggtcaaagctttgtcaggtgcaacattgcgagtttatcctgggaaagttatggcattggtaggagaaaatggtgcaggaaaatccaccatgatgaaggtactgactggtatctatactaaggatgctggctcaattcgttaccttggaaaggatgtggttttttccgatcctaaagcatctcaggaagccggcattggaattattcatcaggagctgaaccttattccacaactgactatcgcggaaaatatttttctggggcgtgaatttgtcaatcagttgggaattatcaattggaaaagaatgtataaggaagcgaattatctgctgaaaaagttaaatatcagtagtaatagtcatcgcttggtgtctgaattatctatcggtaatcagcaactgattgaaattgctaaggcactcagtttccagtctaaagtcatcattatggatgaaccaacggatgccctgaccgatactgaaactgagtctttattccaaattatacgagaattgaaagcccagggatgtggtgttgtctatatttctcaccgcttgaaagaaatttttgaaatttgcgatgatgttaccgtatttcgtgatggtcaattcattggtgagcaaccagtttgtacactgaaagaagactcattgatagaaatgatggtggggcgaaagctggaagagcaataccctcgtttgggtttgcttcgtgggaaaaaacgattagaggtcgtaaatttatctggttctgggattaaaaatgttagtttctcgctaaatagaggagaaattctcggaatatctgggttgatgggagccggtcgtactgaattaatgaaggttatttatggtgcattaccgaaaattgaaggtgaaattagattagatggtaacaccttaataattcgtaatccacaggagggactatccaacggcattgtctatatatcagaagatcgcaagagtgatggattagtattggggatgtcagtaaaagagaatatgtctctcacagccttacgttacttcagccgaacaccctgtcgtttatgccactccgctgaacaaaaatctgtttctgatttcatcaaattattcaatatcaaaactccatcaatggaacaaccagttgggctgctttcaggcggtaatcaacagaaagttgcaattgcccgtggtttaatgactcgtccaaaagtcctgatccttgatgaaccgacaagaggggttgatgtaggggcgaagaaagagatttatgaattaattaatcagtttaaaaaagatggattgagtatcattttagtctcttcggatatgcctgaagtggtaggaatgagtgatcgaattctggtgatgtatgaaggtagtataagtggggaatttagttcggataatttatctcaggaatcgttgatggcagcagctgttggtaaacaatatacccctgataatttatttcagaatgaattaactgtaagtaatacaacacagtgctcaaatagtggttaaaaatgataatggacataaattctagtgaaaaactaaccaccagacggtggattacaaaaacaaggttaatggaacagaaatcactaattgcactattaatattgattgctgttgtttcctctttcagccccaatttttttactctgaataatctctttaatattctccagcaaacctctgtcaatgccattatggcagtgggaatgacattggtaattttaacctcagggatagatttat

SEQ ID NO: 3341 - DNA, 26334 bp, Xenorhabdus sp.; identical to SEQ ID NO: 3340
  CDS (24105)..(24530)

SEQ ID NO: 3342 - DNA, 26334 bp, Xenorhabdus sp.; identical to SEQ ID NO: 3340
  CDS (19836)..(20828)

SEQ ID NO: 3343 - DNA, 26334 bp, Xenorhabdus sp.; identical to SEQ ID NO: 3340
  CDS (3477)..(4409)

SEQ ID NO: 3344 - DNA, 26334 bp, Xenorhabdus sp.; identical to SEQ ID NO: 3340
  CDS (1996)..(2214)

SEQ ID NO: 3345 - DNA, 26334 bp, Xenorhabdus sp.; identical to SEQ ID NO: 3340
  CDS (1609)..(1908)

SEQ ID NO: 3346 - DNA, 26334 bp, Xenorhabdus sp.; identical to SEQ ID NO: 3340
  CDS (959)..(1357)

SEQ ID NO: 3347 - DNA, 26334 bp, Xenorhabdus sp.; identical to SEQ ID NO: 3340
  CDS (44)..(823)

SEQ ID NO: 3348 - DNA, 27473 bp, Xenorhabdus sp.
  CDS (2815)..(4764)
  unsure (1)..(27473): unsure at all n locations
attctactttattgtatctggtattgaaagagtggtgcattacctgttgtaacttagttcagttatttcggcgtaaaaataccgataacctgctcctgatctctgacatgggccgttacagattcatcggtttgccgctgaagatgcccacaactgacatattccacaacatccactttattttcgtgcggatagccaaagtatcctgtgactgacactttggacaaacggctcctgcaatanaaacgcttacgactgacagacatactttcccccattacttcatatactgcgatgttattattgttaattatttcatatcatcactcatcccagccttccggctggcgacgttcattaagcatttcccgttcaaataactcttccaattcccgacgggcttctttgacacgggatatatgcgccacatcaccctgtagatgaggcatcagctcacgcaacatgcgcatatccagacgcctaaaatgttgctgggcacgataggcacaatgaggatgaatacccagccctatcatggtttttctcccgacttccagcgcacttgaaaatgtttcccggctaaaatcctgtacaccactttgcaacagttcatgggcttcaaagcgccctcttgcacgtgccgtgatgtgcaggtgagaaaaatgttgctggcataatcggacaatagtcatggtatcttccggctcattacaggtaatgacaatcgctttagctctgtcagctcccgcagaacgcagcagctccagctcacttgcatcaccataatacaccttataaccataacggcgcagtgtactgattgcactgacatcgcgctccagcacagtgatacggattttatttgccattaaaagccgcccgacaacctgcccgaaacgaccaaaacccaccacaataacctgtggagcgttatcttccacaaaaggtgtttcattgctttctggttgtctattgtaacgaccggttaatatccgatcgactaatgtcatcaccagcggtgttgtcatcatcgataatgtcaccaccaccaacaaaaatgacatctggttcttatctaacaccttctctccaagagcagctgaaaataaaacaaaggcgaattctcccccctgactcaacactccggaaagctgcatacccaatgaatttcccaatccagaaattcggccaataacatacaatatggagctttttgtcagcaccagtgccaaaacagcaagcaatacatctggcaaatggctcaacagcacaccaatattcaatgacataccaacagaaataaaaaacagccccagtaacaatcccttgaaaggttcaatggaaatttccagctcatggcgatactcactatcagcaagcaacacccccgcaataaacgtccccagagccatcgaaaaacccagtgtttccataaaaaccgcagcaccaagaacaaccagcaacgcagcggcggtaaacacctctctgacaccggatttcaccaccaaacgaaataaaggacgtaataaatagcgaccacccaacaacataccggcaaaggcaataattttaaggccgatacgataccagtcaccggaagccgtaccacccgccagtatcgggatcaaagctaaagccggaattaacgcaatatcctgaaacaacaaaatagaaaaaccaagttgcccgccttcgttatttgccatgcctttttcccgcattaattgcagcgccatcgcggttgacgacatagcaagccccactccgccgataacagcagcctgccatgagaaatttgtcagacaaagaaatgaggccagaactagcgcagtcagcacaacctgaaccgtaccggcaccaaagatagaacgcctgagttgccagagttttgctggattcagttcaagaccaatgatgaacatcagaaaaacgacaccaagctcagagaaatggaggatctcaccgacatccttgataagcccggctccccaggggccaagtgcgatcccggcaagaagataccccagaacggctccgattctgaatttctgagccagaggaacagcgacaacagcagcaaacagaaacaatattccggcgcttaacagcgctgaagtctccatgattaaagtcctcccaaagacagtggcgctttaagccattcccaatatgcattagcatgactgacaagcacttcaggtggctgacgtctggcccagtataggatcatcggggatagccagtgcatatggcacattgaagccaccaattcgaaaggccggagaatttcttccatcgaataacggttgtgcccactgctgcaaaaagcaccttcaggctctcccgtagtgatgacagagcgccagtatttatttctcagcatcggctcggtgccgccaataaaatcacggcttaacacgcgatccatccactctttcaataaagcagggcagctataagtataaagaggatgctgaaacacaatgatctgatgttcacttaagagcttctgctctgccggaacatcaataaaaaagtcaggataacagccatacagatcgtgaacagtgacgttttccagctcccgaaccgtctggagcaacaccttattaaccacagaaccctgcggttccggatggatatacaacagcaataccctgggcggtaaaacatgagatgacaatatcatcaatcccccctcaggacgtgtcaggtcacctattttccgctaccatgcacgccagactatcgaaacaacgaaacgaacagatacaatgtaattattaacttaacatactctatacagacaacatcatgattgttttttcttctctgcaaatccgccgaggcgtccgtgttctgctggacaatgccagcgcaaccatcaatcccggccaaaaagttgggctggtgggtaaaaatggctgtggtaaatcaaccctgctttcattactgaaaggtgaacttcaggctgaaaatggttctgtgacatttcccggtaattgggcactggcatgggtaaatcaggaaactcccgctctggaaatttcagcgcttgaatatgtgatcgacggtgatcgcgaattccgccaactggaacaaaagctgaaaatagccaatgaacagaatgacggccacgctatcgcccaccttcacggccaactggatactattcaggcgtggacaatccgctcccgcgcttccagcttgctgcatgggctgggattttctcaggcacaactggaacagcctgtccgttcattttccggtggatggcgtatgcgcctcaatctggctcaggcactgatttgtcgttctgatctgctactgctggatgaaccaactaaccaccttgatctggacgcagtaatctggcttgaaaagtggctgaaaagctacacaggcactttgattctgatctcccatgacagggatttcctcgacccgatcatcgataaaattctgcatatcgaacaacaaaatttattcgaatatacgggtaactactcttcctttgaacggcaacgcgtagccaaacttgcccaacaacaggctctgtaccaaagccagcaagaaaaagtggcgcatttgcaaagctatattgatcgtttccgcgcgcaggccaccaaagcaaaacaggcacaaagccggatcaaaatgctggaacgcatggaactgattgcgccagcccatgttgataaccccttccgtttcagcttccgaaagccggacagcctgccaaacccgctactgaacatggaaaaaatcagtgccggatacggtgacaagaccgtgctggactcgatcaaattaaatctggttcccggttcacgcattggtctgctcggtcgtaacggggcaggtaaatcaaccctcatcaaattactggcaggtgagcttgaaccacagcaaggagagatcgctttagccaaaggtatcaaactgggatactttgcccagcaccagttggaattcctgcgtgcggatgaatcgcctttacagcacttagccagactcgcaccacaggaatcagaacagcagctgagggattatcttggcggttttggtttcaaaggagaccaagtaactgacccgagcgcccgtttttccggcggggaaaaagcgcgtctggtacttgccctgattgtctggcaacgcccgaaccttctgctattggatgaacccaccaaccaccttgatctggacatgagacaggcactgactgaagctttgatcgatttcgatggcgctctcgtagtggtatcccatgacagacacttgctgcgttctaccactgatgagctctatctggtacatgatggcaaagtggaagctttcacaggggatcttgaagactaccaacaatggctgacagaattacagcgtcaacagttgcgtgaaagtcaggaagaaaaaaacgcgaccggtaccgattcatctaccaataacgcccagaatttcagtgcgcaggagcgtaaagatcaaaaaagacgtgaagcagaattccgcagccaaacacaaccattacgtaagcggctgaccgttcttgaaaagcagatggaaaaattaagtacagagctggaaaagatagaagaaaagctgtcagataacacaatctatgaaaatgatcgcaaaacggaattaaccgagtgcttgtatcaacagaataacactaaatccaaactggaagatattgaagtagagtggttagatattcaggagaaaattgaaaaaatgacagaaacgtttaactcgaatcaataagcttattctgaatctttattctcgcgcaatcataatcgggcattttaacctaatgcccgattatgatatttcaagtctaaaaacatactattgtctaacctatacaagaaattgccctactgattataaaaacttaaaatcatatgattgagaaatatctttcacacatcgattaacaaaaatatttatagtcattatcaaaatctcacgatcttattatttataatctgctttggaaaagcattaacattaaagaaatgattcactgactatttagactgttattttaaagattgatcacccatgcagaaaagctttcagcatcaccaatcagctcctcatctattgtcttactccatacgacacctaagtctattttcttatctgtttcaaaaagttccagagaattcatataataatccggaattgcacttatcattctcttaggcacacatgtgtaagtaccattttttgtaatcatctccatcatcaacatgatatcatttgtttttaataacaaattcatattatcactactataaataggaaaaacattcagacaatcattcaaatcagtattttcttttttttcgctcgccatcgtcagagaattcttactaccatactggctatttcctattctgaatttagatatcagcgggctctttttcttaaaaatataaactaatttttcagtaaatattttttttacgtcaaacgattttgccgctgccagaggcataacggccacatggagcatacccgcattcagtaaattaacctgctgctcaactgacaaaccggtcatcagagccagtacaatattaccttttttctctgcaagctgattctcgatttgagaataattatggataggaaaacacgagccgacatataagtgccgggtcacttccttttttgaatcaaactgcacctggcttttaaactgttcataatgcgttaaaaattttctggcattctccagcgttttctgaccaaaatctgttaattttgttccgtttggtcctcttctgaatagttcagcccccagaatatcttccagaccgtgtatttttttcgtcaaagcaggctgagaaaggtaaagcctctctgatgccttgtgataattaagagtctcagccaaaacgatgaaagcttcaagattgcgtatatccatgttctttcgcccaatggttgttaataactacaaaacattacagattcatggtgatagcattttaacttagcgctttgccaaaggtcttatcggaactactggtaaaaacgttgactaatgaaatgttagttaataaggatacaattagcaaaagatttaccacgacttcttaatcacagtaatttataataacattggtaatataagtgaagaattcaacactacaaaaagataatttcacctcctcaaaataattaaatcatttatacataaaaccacgtttttcacttcaatcattacaattattgacaattgcaaaaacaataaccttcacatcaaataacttaagaacatcaaaccaaaaattgattaaatcaaacattactttagtaaaataccatataatcaaatcacaagtgaatagattaacaacaaaaacacataaaagaatataatcctgatttactcgcataatgaaaaaataaatgggggttaatttttacttgcaatgaaattgctataattttatcagtaaggtattacaaataactttcagacgaaaattaaagcatattaaggaaagggaaataatttagaaacgatggtagggtaactatataaaaaccaaaaatttaaaattagactaattattgacatctattttaaggctattattaattatgcaactttaatttgatttcaacgatatatatttgatgaaatagaatatcatctttatttgaaaaaaaacaaatacagatgattatggaaaattttaaaacattaattaatcacaaatgcaatgaccacttgaaaatatttcaaaaaataatccctctgttattagcacccataaatatgggtgctaacttaagcaattatctattattcagattaatgtaacgttatatttcttctattttattacaaaaagatatttttttatcctaaccattagggtaatcaggacaattagttgagcagtccggacaatcataactatggtcagggcaaccagggcctgaacatccttgatacgctgagccacaagtgataattcttccctgccaaggatcagaaagatagtttggctgtggcttagcataaaatgtgaactgaatagaaccatatccaaattgaggcccaccattaatccgacaatctccccgtttaaatgcaccagtcacgtcataataaggaatagaaaaagtaacatgatcactatctggagacatatatattgggccataggtgccatcacgaccgagacaggcatctatctccatccttaacgtaacactagaatctgaaggtgctaaacgattcttattaaccactacaaataacgcggctctactcatatcgccagccgaaccatctactactttattatttttataattagataaagtataacaattaataacattattagccgtttcgttaccacaaacaggctgatactgttctagtatattatcaggattcacaccaaaactggaatatacaacgatgggggtatcactgacactatcaattattttcacatatactggaggagatggaataggttcgctaggttgagctacgctggttactgtataataagcataatattcaccaacaggaactaggcttgcttgagtcgagatatcgtaatcagacatattggtacgataaactactaaactaccaccatcaatcgtaccaccaccatgagcaggtctaaaatgagcagtaagagtatcatacatagaaatatgtgcaaaaacaggcacatccatgtcaatagtaggaggctgtaatttacctttatctataattccattatgttcttggggtagaattggtttttgaagaataatattagccataattcacttttccttattttattaattaaatcacattaaacatctaaacccctatcaataaccatattagactttaattaaaatacataaaaaaacaaaagaaaaccaatgaaataaagttatcacatgaatagatttaattatcagcagaaaaaacaaaataataaccacatacatatagcatcgtatttaaaaatatttcacccagtttaataataacactcttactttattatttacgaacagtatatgttatctaacattacagactatttaatcatagtctgtacaatcagtagcaccatccggtactgtattaatacttccatgccatacttttccatagttccgatcacctttctcatcgacataataatcaaactctattgctcctaatttaccactaacatatccgtctcgatgtgcaattatactatgaggaaccccgattcttgctattgcactatccccaccaggtacatcaggatctgatggtattgttcctggtagtgtgctcactaaaggtgggcttccgtcagatgtaataaatactctcaattgcaccgcacttcctaaaagcggctttgtgctatcattaaggcgattggttcctttaatatctacaaatagtgcagcatgattttcattatgtaaataatgacatattgtctcacaattaataaagtgatcagatgatattaaattcccttcactatcataaacaacgcatggatcataattcctctcttttaccggaggtggttgattatttgctcctccaatataatatacatccaatttttctgacggtgttgaactattataaagagcacttattacccaataagaaagctctgatttttttcttattggaaagatatcataaggaatattctgagaaattcctgctatatcaccatcagatgctacagtaatatatttatcaacataaattccatcaacaaaaagtaggatattatccccctctaagatatgcttatattttggtatatctaatgtaaaatctggtgtcttagacactaaagatgttccagggttatatccttcgattatagggctagaaaatttaccaccagactctgcatcatgtatttggataataaaaatcccattcgttgattgaactgcattagtcgctttcaatagcaccgactctatctgaaagaataatgaattatgtcccttgggataaacgtaaaactctacatagccattcttatctgcattaatataaaatcctctttgagtagatgaaatttgatgaatatctactttagttttcctatctttctcatatatattaactttatcaaagctaaattgaactgtttctaagatagcaataggcacaccggataatatagtatcatgatagtcttttacaattgtaattccctttgaataattacctgaatccggatcatcagaagcattcttatattttaaaaatccttttttaaaataaatagataaagagtcaggatatatctccctagcagtatacttcacttccttctgagaaaaacctacggcctcagtagaagggatgatgttaaaatcaatcaaatctcccactgaaattgagctacttactcttaatttaactctgaattttttaattttatcatctgacgaggctattttttccacgcctccctgtggcgtcgcattataattaagcattgatatcgatacataagctttatcagatatctcatcatctgattgcaatgtaataatcagatcaaactcttgtccaataaccacatcagaaccgcattttgtagaaactagaatttttttactcatttatacccctaatttaaatagtttaaaaaacaaaaaaccatgagcataaaaatttattttttaacactctaaagaccactggaagtattatcctgaaaactcagaaaaataaaatcaacttcctgaatatgttagttaatatcattatatttataaatatttagattgtggtgcaacagtactaatttttgcttcccaatattgactatatgctcgaattccttgagtatctacataatactcaaaatagatcagaggtggttctttactctcaggataaggctctatatcaacaagcatttcatatggtattttaataatcgtagtagattcacgtttattatcattatcaggcgtaaaactaatcatttcagccggaaatttggcatgtatggttttactgaatgaattaacataaatgaccagaaccacctcatctccaaattgaggtttactgctattactgacatcattagttccaacaattttaacaaataaagcagtacctccattatttgaatgattataaatagagtttatattaactatatctccagaattgataatactgtcatcatcatttgaatcaaatggaggtacagcataactatcataaataatagggcaagcaaacggccttgaaaaatcaggtgatgggcgattatcgcctccgcctccatatactattggcaatactgatgaatattgactctcacctgaactttttataataacgtaatataaatttgattccgaatccaacgggagaaaatcatcataatacaaactaaaaaaaccaggctcttcacctacattataagcaggtgaaatatgtcctaacttatcagtaaaaaatattacaatatctgtacttgagtgcaaaccataactatcaatcccagcattaaatgtttgctgagatcctgttgccattaatttcccatcaacaatacttgatatggttggagggctaagaaaattatctatattttgagattttggtgtaataatatacacattctcaccaggataataaacttgtgtatatggcagcttaaagccgatctgaagaattaatggcgtattctccatagggtaaacccgaaaactaaacttaccatttccatcattagtaatattaatgaaatctccaacaggatttaaaatactaggataagagctatcattaggatctgtagtaattattacgtcatctaacatttgagatctgatagatgaataaatctgtatatcactattttctgccgggcttccatcctctccagttaaataaacagaataatgtataaaatatttacctcccgtttctggattattatcatattgtggtgtttcacaaacccatttatcaattacccatttaactgaaataaattctgtagtatctaattgcatttccatgtcattacctcttgtttttttgaaaacttagtttgattagtatgttttattaattatcatcattagaaagaaaggtatcaatcatacttttccagtagaaactataatttttttcattcgtatatttgtcaatcgtatagtactcaaaataaacccatgcatcctttccatcagaataagaagcaacacctgtcaattcagggtgatgtattttaattatagaagtacataaatgctttccatcttcatcaggaatatctgacaaattatgagtacatgtatgaataaattttttagttcttgacctgacataaacgtttacattaatttcttcgccagcctgaggatatttctttgtatgatcatatttatcatttgtcgcaataatttttaaatataaatcaacaccattattgttaacgtaattagaaattgtttctaaaacaatgtaatcgttctctaatcgaagatatctattctcattcgcaagtaagggatcattctgatagtctgcatagctagaataaacagaaactttattataagttcgagtaacattatccggtggcataataggagaaccaccaacgtacctaaccattatcgttccagagtatttgctattccctagttctgatgaaattatgtagtataattcagattgttcattttccggaaatacatcatatggtagtttgaaagtataattttctgcttgccctattgattgggaaggataaataaacccagtaggatcaggatttccatttttatctttattaaaaaatagcacaacgtctgaaatagaataatcaccactagggtctatttgtacatgaaatttttgcttatcataacctccccttaaaatctgtccattagcctctaatatgattggaactctcaaaaatagtgcatcatcatcaggtggaggagtaaggatatatacagtatctgcaggatatgaagaatttgtacttaaagagtgacttagtaattttaatgttgcatattcatgagctttgggataaacacgaaaactcacctttccttcattatttgtataaacaataataaatgtcttaccatcaaccgtaataggtgttattaattccttattatttgaactgtcattagtaatgatgattttatttattatatcatcttgaaaaacagaatgaacattaataggtgtatttttcattggttcattatcatgaccaattattcttgtataatataaaacatagtgatcactattattatccagttgattaataacttcaggtgaaatacaaatgtttttatttatcattaattgaacagagggttcttttactttcttagcattatagtaaattattttatcaaatatatttgatatctgtatactataagatacattattttctccatgatgtatcacatcatcactttcaattaacatgtaaactcttgtataaatagatttttgatcttcacatataattgaaggggttataatatttgttttttttataccagttaagttttctacatttattttatgactgctatccaacttcatatttgaagagaaaattatatctatataaatctcctgagaaacggcaacatcagctccattgataacagataaattaagattatattcaggattttttattgtatttattggcattattttcccttatttaaaatttacaatataaatcagagcgagtaaatggctgtcaaattctctcaaaatcacattaataaacaagaattctcgctctgataaattagattgatctcacatattaaccgatatcagtctcaatatttttctttaatactttactatattttttttcattgcttgacttatcaaccgtataatattcaatctctaaccatcctgatgttccatcaagaaaagcagatatattttgcaattttggatctggaataggtattatcaaagaatatgaatttttaccatcatcactgatccctactgtattcacaattaattgtgatgctgctgttgcattataatctgaagtcgctggtatattaccaatataaggtgtaggcccatttttgtgcaatgagtgtatataaagattaagataaactgtatcgcctacaagaggaagtggattacttggatcaaaatcttcagtttcagtacctgttatttttatataaacatcaattccttgattgttaacattattatcaatatcacctccatttatataatcagtaataaggaaatcatcactcattaacctaggatctttcttaatattcgcatagctactataaattttcggctctggatatatacgatcaacatcattatatggggcatcatttgactttcctaaaaactgaagatttgtaccctgagaatatttactttcccctaagtctgtagcaactatataaaataaatatatccattcatttacttttagattgctgtaaggtattggaaatgtataggctggattactaccttgcgtaagagttttcacgggcaatactaaactatccaatacaggtgttccattatcatttatttgtgtaaagaaaagtatgttatctgctggtgacatatctccataactattaatctgtgcactaaatgaagatcttccttcatttcctgttaaaatatctccattcgcagcaggtacagatggtgaccacaatagttttctactatcctctggaggcaggccaattataaatgtactagctgttatataacgagaagtccttataccaaataaataactttctaaagataatgctgcgtgtacattctcacgagcataagcacgaaaatctgcgataccactgtcattgctataaatcgtaaaatatggttgcggaccattatctgtcattatatgaatgggattataccctcccccttcttttttattttctgtaattatcactttacccaatgaatcattcgcaatggtagaagatacttgaatcggagtattttttaatacattaatgtcattcttaatacttttacccaacaattttgcctgataaataatataattatcaggagtatctccaggaggagagttatcaagaggtgttatacatacctttttatctgagtctaattgtattgagtatgaaactaatccatatacattatagacaatggtttgtaattttgtattcgatatatagatatcatatgatgtcgagaattcttttcctgctgcaggttttccaatattatttttctcatcaataatgcaataaattcttttcttgagttgttttttatctcttgataaaacggatggattactatcatctattaatttaaacccagttttgttctttatagtgatctcagcatcatcgttaatattctgtgcagccgttataataatatcaacataaaattcctgttcaaaaaccacatctgcattattaacaactgatgtaaatactgttggtgctgttgatcctgctggttcttgaaatttgatttttcgcataaacaatacctctatttatctttttagaataactaattataattctataataaatatacccttcgcaagcggcaaagagtcaatccccagaggttaaaacaatcagatgaaagcactcaatctagatgttctatttccgaaaacaaattagaataaactttcgatattatttccaatgaataatagttatcacaccaaataattataactttacaaaacaaacgcacctcatatttctttagaaaaaaccaaactagaataaaaataaactttgctttaatttgcgaaattcattaataattaagctagacaccatatgatattaatattcggcacagattacatatgcatcatctacagaagtatcagaagaacacccagagtcactaagaaaacatcccttagctgcatcatatatagtaaaatcactcggctccacggttccaccttgtgacttacgcaccttaattcgggcagattcaggcgtcaccttcgaataaccttgaagtaaaccccacgcaaaagcatcaggaaattcagtggataatcctgatgttgagccagtagaaataatgtcagccctaccaggcgaaatcaaaggtgaaccatcaaccgttatcatctcgcagtaatggttatcattgataggatatgcctcagggtattgatgagatactgataaaaaatatcgccctaaggttacagagtattcataaacataatttgcaccactagcttttgtgaaatttgctgtaatttttgcagttccagtactatcaaactttattattcctttttccttatctgcaaaagatacaatagaactccaagcagttggttctggatcaatatcatactttaatgtgtcacctggctttttattaacaaggggcttatcaagatactctcttaaatcaccacgtaaactattaaaaaaattatatggcccaccctctttagcaaatactggtgtagctccaccgccttgactaaaaagccttaattttactggcctaggaaggtttttaaagctaactaaatttttctcatccgtacttttattatccttgtaatcagagttttttatctctaactccatttttatattatcaattccagcattacttcttagagttgaatataaatatccatccttagttgtttttttagattcaaaaattggattgggaacgtcggaagtatcaatatcaccatgactaccactgcggctccatatcacactatgaaattcgtgatatgggagtggctctgttgtatttttcttaataattttcgctctatacgcatatgcacttttaccatcagcggttaatttcttatcaggattataagatccctccgtaaaattaccgttggcatcataagtaccataaacctcaatacttgcaatttcaaaatctacaggtggatcaacaaaattcacatcagttatacattgctgagactcagacacgttaacaatattaacgcacactttaataccagttacagccggtttatcttctgcactttgtaatttcgctcttaatttaccctcagaatcgacctgtactgctccgaaaggtagcaaagatagacccgaattttctggctctgtaatactccattcaaagttaatctcttgccccatatatggctttccatcaataccagacaccattgatataagtgcatagcttcctcctgaaggagctgtattgtttttattatttagtataaatgggtcaaatatcggtttactaattgttggccacttaaattctactggtggtgcttcctctgtatttccccccgttgaggctgtaacaatcacatctgatgcagcaacttcgcttttaagttttattgtggctgtaccatcagcacctattactgttttaacagattcaacaggaggagtcggacaggtcccattttcagcagggttaagacagactccgttgatattttttttcaacttccaagttaccgtgcctttctcagggttactatcagaattagtcacttttgctgtatatttacaggtatcaaaaactaataattcattattacaatcatgtttcacaataatattttctaatttgaaagatactgcccgtgcgtctacaggagctaagccttcaatagccagtgaaaccatgacatcatcgactttcactgcacttgttaatttggcctgtaatttcccggtttcatctgtttctacatcgccttttggggcatccaaagtcagtccggttacaggattttttatatcccattcaacaccagatatttttgtttttttctgcaaaggatgattttcattatctacgacttgcgccgtataagtataaaattgcttaccatccgcagttatgattttctctggtgtgacggtaatctctttaatacggtagcttttgggtttggcatcaaaaaccaccactttttttcctataattttcttaggctgaccatccatcgctacacaaacagcaactgcgccaacatatcccgtactcattaatgtgacacgatcactctctgcaatatgtccatcatccattatttttatttgcttgaatgaactattgggcttaaattccaatttatccgtaatttctttatttttacagatattatcgtccaacgttaatgatgctgttgaggttcctgttgctaccgctaacgctgatgcacccactggtatcgcgaaccattcaacattatggatggttgcattcttaatcacattcaggttgttaggagtatcgaaagtaataataggattaaaagtatacccttgatctcctgacgccgatagcggacctggaggcgtgaaattaacgccatcgccttttttaatctcaaaaggtctgacaataactttcatttgttgaggttttgttttttgatcattttttaattcagcagacaaattgagcgaataactattattttcattttcatccgataaatactcagggaatttaatataaatcctcccagaatttaaatagatatcccctccattctttataaattcctcttttgcatttcccttttcaatattaatctgttgaatagctgtattggcagataactctttcgtaatgtcatgtatttcacgactataacccacaataattcccggtacagaaagctcagacttcggcacctcccgatgttcaagcactatattattattcctttccaccaaatcataacgactgcctgccagtgttcgcattgatgcaacgttatccggggataactgtgcactcagtggtacaccaaatctgagattaaagtttgtcagtaattgggtttcactctgccccctctctccttgtttataatccacgcccattgttatcaatggaattggtgtatacgtcacgcccatttttgccagacttggatttttttgcttggtctttcgattaaataacgttacgttatcgccgaagtattgctcataagaaaatttgcctcccagattagggtaggcagataggaagaattctccgttaatgtcgtagccattggcgggtcgttcgtgatgctcttcgaaattccgcgagatttgccagtcacttaagcggtaatagccgttggtggaaaatttaatataatctccccaaagttctcctcctaatcctacccgcctgtttttacccgtaatgtcatagtcataaaaagtattcagaccatacatccagttcggagaaaaataacgccctcccaaaccgagattaactgtattccggctatctttgttgcgataacctaattgagaaaaaaacagccaggcggcttgattatcataaataggcaatagcagatctattgagttattttctagcctgccttttctgtcaaaaccaaagttaatttttgctgtaccagattgggatagccatttttgagcttcggaagagatagtactgttaactttacccaaagcataagatttggcttgttctgctaattctgaagaagatgacgatagaatattccctgccatctgaatattacgtccaatagcatctgcatgttcatattctggtttattacttgtgattcctgttccgtcttttttatcggcttctggagttagaagttttttacttgattcagttactcgagtgtctacattatctatcttggatgtgcttgttttttcattagttacatatccctcagcaaatgcattcataatggtagaagggataagtaacgtataaaagatcgtgaaaaaaacaataattttaccaatatatgatggcatatataagaacccaagtagatgttattattagcaaccgttttttgatactaaattactagagtaagacagcttacccaatttatatattaggaaatattttatactcctccaataacttttggttatcggttgataatgaaaatttattgtactaactttagtttttatctggctttttatgagcactcaatccatcattagaaaacaaaaaacacaggtctcaaaagcacctgtgttcttgttaccaataaatatatatcttataatttacacaatagcttacctgtatgctcaggattagtatctattttatcttctccattaattctatcttctactccatactcatcgatttttggcacaaaataatataaaatgaatttttgatctccatcattaattactttcattttatcatcatgaggtaaaactccgaaaccggtaaacatataatattcattttttagtgaaaaacttcctttaccggcaacatcttctttagtcattgatcttgatttacgtgatgctgaatcaagattttcacaagtatgattcaactccttattatatttatcatcacccaactttacatcaccattattcccaacttccggaacaaaaacatatcgctgagggttgaacttatattcataagaatattttgctcctgtatcgaattcagtaacagttgcggttacagttgcttttttagatggactaaacccttcaatagggaaagtaatttctggtccttgtgtcgtcataactatttttacaagatcagatggggatttatattcaacataatcattgtgtctagcaataggttcgggcatatcttctaagctagagactttttttgtaaaaatgatttttaagcctttataaacgttataaggcttattcggcccttcaacatacgtgaaatgttgattgtctgaagttaacatcaagtctgcaatttgcggcaccgctttaaaactcacatctctttgtgcatcaattttatgcacttttttgtcatcagtggtaagcgccaatgaaactctgactttatccactccgacatcacttaccaatgaagtagttaaatatccgttactatctgtagtaattttagaatctttaagtttcacattattcggtattttttggcctggatgactctctgtaatactccatgtgacattatcaaaactgtggttacgtagcggttgtccacttttggggtcaataactaaaattttgtaggtatacgcatcattaccatttccaaagagagtatcttctggtggagagacctctaattgacctttgaacggcttaccttcaggatcaaaaggttcaacttcaatagtcatttttgcggttttagatagcttcccattctttaattccactgttgcatagatagggtaactatttacacctttatcgatatattttggtaacttaatattgatcggattaccattgctcggcagctctcccccatttttactgaaatcccctcctgcacgccatgtaactggtttagttgcactatttgaaattacatcagcagttactgatatatcactaccactttttccatgcttgatattcggtaagctaatttccagcctcggtttttcccggtgatccaacacaatgttgttatttctttccaccaaatcatagcggctgcctgccagtgtccgcattgatgcaacactatccggtgataactgaacactcagcgggacaccaaatctatagtttaaattggcctgaaagcgggcatcgctgtgcttgttactgccatgccggtaatctatgcccatcgttatcagcgggattggcgtataagttatgcctactttggcaaagccggggtttttctgcttggtatcacggttgaacagagtcacgttatcaccgaagtatttttcgtaacccagtttactgccgatatgcgggtaagcaggcaggaagaattcaccattgatatcaaaaccattggcagggcgctcttcccagtctttatcatcccgtgactgatgccatttactcaggcgaatataggtattagctgataatttaaggtaatcagcccatgcttctgcccctaatcccagccggttattttttcccgtaatatcctgatcaaagaaagtattaaaaccatacatccagcccgaagtgaaataacggctgccaaaaccgaggttaaccgtatttcggctgtctttattgcgataacccaactgagaaaaaaccagccagtctattttgttatcataaagtggaaataacaggtctaatgaactgttatgcagtttaccttttctgtcgagagataaattaactctggctgtaccaaattgtgacagccattcttgtacctcactatttattactccgtttactcttcccaaagcgtaagatttcgcctgttctgtaagttgagatgacgaggatgataataaaccacctatcgtctgaatattttgtgcaattacgccagctttatctttttctgttacatctaaattattttcatcgctcgtactcggaaaaagtggttttactgttaggttttgatgatcttcactcactgaaaatgtattcatcgagacaaacggtaataaaaaagaaaaaattaatattaaaaatcgcagggatttattaacaaaaataaacttcatagatacgttcctcaagagaatgcaaaatttcatctgcacattcacattaaattatcagttgaaataaaagctttttgcacaatcaacataaagtaggaaacttctttattattaagtaatgaaagatttttatcaggcaataaataaaagtaatcactgttatttatcaaaaggtaatcaattctattatcttaaaaatattgttctctattacgattggtcattcgagaaaagaaataatccgggaagtgagctttatgattatgagagctatattgtaggatcaatgcaataatccataatcgctctcacaccgtatagtagatagttggaacaaaccatgaaaatcaacctcaataatctgataactgaaggccgcaatcctgccagtactcatattgatgagttatcgacactggatatgctgcgtgtcatcaacgatgaagataaaaaagttgctcttgctgttgagcagacgttacctcaaattgctctcgtcgtggataaagtggcagaggctttccgtcgtggcgggagattgatttactgcggtgcaggtacgtcggggcgattaggaattctggatgccagtgaatgcccaccaacctatggcaccagaccagaacaggttgtcggtttaatcgctggcgggcataaggctattctgaaagcggtagaaaatgcggaagataaccggcaactgggcacagatgatcttaaagaactacactttagtgaaaaagatgtactggtcggtattgccgccagtggccagactccctatgtgttaggtgcgatggagtatgcggtatcaataggagcaactgttgcctgtattagttgcaaccctgacagcccgataacccagctggctgatatcgcaattacaccgattgtcggaccggaggttgtcaccggttcttcccgtatgaaagcaggtacagcgcaaaagctggtactgaatatgattacaactggtgccatgatccgtatcggcaaggtatatagtaatttgatggtggatattgaagccactaatgctaagttaatcgaacggcaaaaaaatattgtgatggcagctaccggatgcaacagagaaacggcagaacaagccctgagtgcctgtaacggtcactgcaaaactgcaattgtgatgattctatcggggatcagtgccgaagaagcccgaatgttattaacagaacatcaggggttcatccggcctgcgatttcaacagtccggtagtgattaccttttccctatataggtatagatggtaagggtgctaaatggctaaaattaatccgaatatgttgcctgaaatactcagcgccattggcggggcaagtaatgtcatacaatgcggcaattgcatgacccgcctgaggttaacattacgtgatgattcaatcgtcgataaagcaaaactgaaactgatccccggcgttctgggtgtagtcgaaagtaatgagcagcttcagattgttcttggccccggcaaagcccagacagccgcagagatgatgaatgagttattaagttctgccgggcacccggccccggaacaccattcagcagatttgaaagatattgcttcttccaataaaaaacacctcaaagagaagcaaaccagctcaatccataagtttcttgctaagttcgccactatttttacacccttgatcccgggttttattgctgtcgggctgttactggggatcgccactttactggagcaaatttttattcagggcgttgcacaacctaatgctgtgctggttgaaatgatcggctatatgaagattttcagtaaagggatgttcactttcttcagcattttgattggctataatgcgcagaaggcattcggtggttcaggtattaatggtgcgattatcgctgctctgtttattctgggttataacccagatgccaccagtggcttttattccggtatcagtaatttctttggcttcgctatcgacccgcggggaaatattatcggggtattgattgcctgtattctgggagcctgggttgagaagcagatacgcaaaattatacccgctgatttggatatgatcctgacttccgccatcacgctactgattatgggtgcagtgacttttatcgtgattatgccgatcgggagttacctgtttacggcaatgtcatggcttttcaccaatctgaatggcaatccgttcgggacggctgttttagccggattgttcctgatagccgtgatgtttggtgtgcatcagggctttataccggtttattttgctctggtggaaacacagggctttaactccttgtttccggttctggcgatggcaggagccgggcaggttggttctgctctcgcgttatatgccagagcgaaaaaagattcattgctgcgtattcaaatcaaaggcgccattattccgggttttctgggaattggtgaacctttaatctatggcgtgactctgccccgcatcaagccttttgtaacggcctgttttggtggtgcaatcggcggcttctttatcgggctgattgcctggctaggtgtacctgtcggcctgaatacggtatttggcccctccggtatagtcgcgttgcctttgatgacatccctgacaggaatattcacgggcatggcggtatatggtgcggggctgattgttgcgtatatcagcggctttgtgctgacgttcttcttcggcagcaaaaatattgatttaagctgattcagctaatccagatcaatggcacacaggctgctgtcaaaagccccatcacgatattgaaagtaaaccatgctgtacggccttttaacaggcgaccaatcatgacaccgaaattcagccataccaagcctgtggctatattactgagtatcatcactacgctgatgacccaaatagagtggatatataaatctccggctaagctgtaactgctgacagatcctaatcccatcatccatgctttggggttcagaaactgtaataaccagccctgatagcctttaagaggtgttccgagggattgtgcatccaactgtttatactgtgttgttactgttttccaggccagccagagtaaatacaggctacccagcactttcaaacctgtgtgtacagccggatagaccagcaataacgccgcaacaccaaacgcagataatagcaggatggtctgcattccaattatcattcccagaaaaagtattaacgagcggcggaatccaaaattggcacccgatgttgtcattaacatattattcggaccgggtgtaatcgctgaaataaacataaatgtgctgagtgaaaatagtaggctggcggtcatgagttgtgatatctcttaattattgtcattttctttcaaagaaagaagcagtatgttatttagcgcacaaggtgagttatgcccgttttcgaagtgtgtaattcaacttggaagatgcagggtatatatggagaacaaaatgattatcccgtggaaacaaatagaacctgatactttacgtaacttaatcgagagttttgtcttacgggaaggcactgattatggtgaatcggaaaaaacactggagcaaaaagtacaggatgtaaaacgccagcttgagcggaacgaagtcattctggtctggtctgaattgcacgaaactgtcaatatcatgcctaaggagcagtttcgcccgtaagctgattctttttatacccttttcggctcaatagcatttcattcaatttttgtatgttctattggcattgttttattggtactgctttattggctcaaaattgctggttacgagaaagatcatcccaactgtttttttactgataaggagtctgttcttatgtctgccaaacaccctgtcattgccataaccggttccagtggagccggaacgacaaccaccagtgtggcattccgcaagattttccaacaactgggtattaccgctgctcttatcgaaggggatagctttcaccgttatacccgtcccgaaatggacgcagaaatacgtaaagcaaaagaacaagggcggcatatcagctatttcggcccggaagcgaatgatttccagatgctggaaaaagcattttctgattatggcgaaacaggcgcaggccgctggcggaagtacctgcatacgtatgatgaagcggttccctacaatcaggtaccgggcacgtttaccccgtgggagccactaccatcaaacaccgatatgctattttatgaaggattacacggtggtgttgtcactccacagcataatgtcgccagctgcgtggatctgctgattggtgttgttcccatcgttaaccttgagtggatacagaagctcattcgtgataccagcgaacgcggacattcaagggaagctgtgatggattctgtggtacgttcaatggacgattatatccgctatattacgccccagttttcccgcactcatatcaatttccagcgtgttcctactgtcgatacctccaacccattctctgccaaagcaattccctccttagacgaaagctttatcgttattcgtttccgcggtctgagccaaatcgattttccttatttactggcaatgcttcagggttcgtttatttccagtataaatactatcgttgttccgggtggtaaaatggggctggcgatggagttaattatggctccgttagttcagcaattacttgaaggcaaaaaaatatcctgaatattgcccgctatttatttatcgataatgcaggtaacaaaaaataatgttacctgtgataaaacatcaattattcactcatttataaatgaaaatgtagtaaatcaggcttttcaaatagaattctggctatttgttaactggttttatatgctgaagcgatacaggaggagacataatccttttcctgtgttacaaacagtgctacacgtgaaacgggcaagttttatgggctcggagcaatgcatcgacatgctgctaccctgagatttccatataaaattcctgcttgtcagtttttcagcaagttaatatgttaatctattgactttataaagccagcctgatgagaaacgatccgtttctctgaccataaaggcggaaataacaacagaggataaagcgaatggttctcggcaagccacaaacagaccctactcttgaatggtttttgtcacactgccatattcacaaatatccatccaagagcacgcttattcatcaaggtgagaaggcagaaacgctttactatattgttaaaggttcagttgctgttctaataaaagatgaagaaggtaaagaaatgatcctctcttatttaaatcagggggattttattggtgaacttggattgtttgaagaagggcaagagcgtacagcatgggtgcgagctaaaagcgcctgcgaagtggctgaaatttcctataagaaatttcgccagttaattcaggttaatcctgatattttaatgcgtttatctgctcaaatggcaagccgtttacaaacaacatcagaaaaagtaggaaaccttgcatttttggatgttacaggccgtattgcccaaacattgctgaatctggctaaacagcctgatgcaatgactcatcctgatggtatgcaaatcaaaattacacgtcaggaaatcgggcagattgtcggttgctcccgtgaaacagtcggtcgcattctgaaaatgctggaagatcaaaacctgatctctgcgcacggcaaaactattgtcgtttacggaacacgttagttcctgaaatcgcgcttgaattaggccagtgcatcccatcgcgcactggctttttgtttttcatcactcagctcccttcattcccctgctaagaaatgaaacccgcagacgcataactcaacaaccaccgac

SEQ ID NO: 3349 - DNA, 27473 bp, Xenorhabdus sp.; identical to SEQ ID NO: 3348
  CDS (21913)..(22818)
  unsure (1)..(27473): unsure at all n locations

SEQ ID NO: 3350 - DNA, 27473 bp, Xenorhabdus sp.; identical to SEQ ID NO: 3348
  CDS (22863)..(24311)
  unsure (1)..(27473): unsure at all n locations

SEQ ID NO: 3351 - DNA, 27473 bp, Xenorhabdus sp.; identical to SEQ ID NO: 3348
  CDS (25055)..(25273)
  unsure (1)..(27473): unsure at all n locations

SEQ ID NO: 3352 - DNA, 27473 bp, Xenorhabdus sp.; identical to SEQ ID NO: 3348
  CDS (25433)..(26302)
  unsure (1)..(27473): unsure at all n locations

SEQ ID NO: 3353 - DNA, 27473 bp, Xenorhabdus sp.; identical to SEQ ID NO: 3348
  CDS (26709)..(27341)
  unsure (1)..(27473): unsure at all n locations

SEQ ID NO: 3354 - DNA, 27473 bp, Xenorhabdus sp.
  CDS (27208)..(27411)
  unsure (1)..(27473): unsure at all n locations
gtcggtggttgttgagttatgcgtctgcgggtttcatttcttagcaggggaatgaagggagctgagtgatgaaaaacaaaaagccagtgcgcgatgggatgcactggcctaattcaagcgcgatttcaggaactaacgtgttccgtaaacgacaatagttttgccgtgcgcagagatcaggttttgatcttccagcattttcagaatgcgaccgactgtttcacgggagcaaccgacaatctgcccgatttcctgacgtgtaattttgatttgcataccatcaggatgagtcattgcatcaggctgtttagccagattcagcaatgtttgggcaatacggcctgtaacatccaaaaatgcaaggtttcctactttttctgatgttgtttgtaaacggcttgccatttgagcagataaacgcattaaaatatcaggattaacctgaattaactggcgaaatttcttataggaaatttcagccacttcgcaggcgcttttagctcgcacccatgctgtacgctcttgcccttcttcaaacaatccaagttcaccaataaaatccccctgatttaaataagagaggatcatttctttaccttcttcatcttttattagaacagcaactgaacctttaacaatatagtaaagcgtttctgccttctcaccttgatgaataagcgtgctcttggatggatatttgtgaatatggcagtgtgacaaaaaccattcaagagtagggtctgtttgtggcttgccgagaaccattcgctttatcctctgttgttatttccgcctttatggtcagagaaacggatcgtttctcatcaggctggctttataaagtcaatagattaacatattaacttgctgaaaaactgacaagcaggaattttatatggaaatctcagggtagcagcatgtcgatgcattgctccgagcccataaaacttgcccgtttcacgtgtagcactgtttgtaacacaggaaaaggattatgtctcctcctgtatcgcttcagcatataaaaccagttaacaaatagccagaattctatttgaaaagcctgatttactacattttcatttataaatgagtgaataattgatgttttatcacaggtaacattattttttgttacctgcattatcgataaataaatagcgggcaatattcaggatatttttttgccttcaagtaattgctgaactaacggagccataattaactccatcgccagccccattttaccacccggaacaacgatagtatttatactggaaataaacgaaccctgaagcattgccagtaaataaggaaaatcgatttggctcagaccgcggaaacgaataacgataaagctttcgtctaaggagggaattgctttggcagagaatgggttggaggtatcgacagtaggaacacgctggaaattgatatgagtgcgggaaaactggggcgtaatatagcggatataatcgtccattgaacgtaccacagaatccatcacagcttcccttgaatgtccgcgttcgctggtatcacgaatgagcttctgtatccactcaaggttaacgatgggaacaacaccaatcagcagatccacgcagctggcgacattatgctgtggagtgacaacaccaccgtgtaatccttcataaaatagcatatcggtgtttgatggtagtggctcccacggggtaaacgtgcccggtacctgattgtagggaaccgcttcatcatacgtatgcaggtacttccgccagcggcctgcgcctgtttcgccataatcagaaaatgctttttccagcatctggaaatcattcgcttccgggccgaaatagctgatatgccgcccttgttcttttgctttacgtatttctgcgtccatttcgggacgggtataacggtgaaagctatccccttcgataagagcagcggtaatacccagttgttggaaaatcttgcggaatgccacactggtggttgtcgttccggctccactggaaccggttatggcaatgacagggtgtttggcagacataagaacagactccttatcagtaaaaaaacagttgggatgatctttctcgtaaccagcaattttgagccaataaagcagtaccaataaaacaatgccaatagaacatacaaaaattgaatgaaatgctattgagccgaaaagggtataaaaagaatcagcttacgggcgaaactgctccttaggcatgatattgacagtttcgtgcaattcagaccagaccagaatgacttcgttccgctcaagctggcgttttacatcctgtactttttgctccagtgttttttccgattcaccataatcagtgccttcccgtaagacaaaactctcgattaagttacgtaaagtatcaggttctatttgtttccacgggataatcattttgttctccatatataccctgcatcttccaagttgaattacacacttcgaaaacgggcataactcaccttgtgcgctaaataacatactgcttctttctttgaaagaaaatgacaataattaagagatatcacaactcatgaccgccagcctactattttcactcagcacatttatgtttatttcagcgattacacccggtccgaataatatgttaatgacaacatcgggtgccaattttggattccgccgctcgttaatactttttctgggaatgataattggaatgcagaccatcctgctattatctgcgtttggtgttgcggcgttattgctggtctatccggctgtacacacaggtttgaaagtgctgggtagcctgtatttactctggctggcctggaaaacagtaacaacacagtataaacagttggatgcacaatccctcggaacacctcttaaaggctatcagggctggttattacagtttctgaaccccaaagcatggatgatgggattaggatctgtcagcagttacagcttagccggagatttatatatccactctatttgggtcatcagcgtagtgatgatactcagtaatatagccacaggcttggtatggctgaatttcggtgtcatgattggtcgcctgttaaaaggccgtacagcatggtttactttcaatatcgtgatggggcttttgacagcagcctgtgtgccattgatctggattagctgaatcagcttaaatcaatatttttgctgccgaagaagaacgtcagcacaaagccgctgatatacgcaacaatcagccccgcaccatataccgccatgcccgtgaatattcctgtcagggatgtcatcaaaggcaacgcgactataccggaggggccaaataccgtattcaggccgacaggtacacctagccaggcaatcagcccgataaagaagccgccgattgcaccaccaaaacaggccgttacaaaaggcttgatgcggggcagagtcacgccatagattaaaggttcaccaattcccagaaaacccggaataatggcgcctttgatttgaatacgcagcaatgaatcttttttcgctctggcatataacgcgagagcagaaccaacctgcccggctcctgccatcgccagaaccggaaacaaggagttaaagccctgtgtttccaccagagcaaaataaaccggtataaagccctgatgcacaccaaacatcacggctatcaggaacaatccggctaaaacagccgtcccgaacggattgccattcagattggtgaaaagccatgacattgccgtaaacaggtaactcccgatcggcataatcacgataaaagtcactgcacccataatcagtagcgtgatggcggaagtcaggatcatatccaaatcagcgggtataattttgcgtatctgcttctcaacccaggctcccagaatacaggcaatcaataccccgataatatttccccgcgggtcgatagcgaagccaaagaaattactgataccggaataaaagccactggtggcatctgggttataacccagaataaacagagcagcgataatcgcaccattaatacctgaaccaccgaatgccttctgcgcattatagccaatcaaaatgctgaagaaagtgaacatccctttactgaaaatcttcatatagccgatcatttcaaccagcacagcattaggttgtgcaacgccctgaataaaaatttgctccagtaaagtggcgatccccagtaacagcccgacagcaataaaacccgggatcaagggtgtaaaaatagtggcgaacttagcaagaaacttatggattgagctggtttgcttctctttgaggtgttttttattggaagaagcaatatctttcaaatctgctgaatggtgttccggggccgggtgcccggcagaacttaataactcattcatcatctctgcggctgtctgggctttgccggggccaagaacaatctgaagctgctcattactttcgactacacccagaacgccggggatcagtttcagttttgctttatcgacgattgaatcatcacgtaatgttaacctcaggcgggtcatgcaattgccgcattgtatgacattacttgccccgccaatggcgctgagtatttcaggcaacatattcggattaattttagccatttagcacccttaccatctatacctatatagggaaaaggtaatcactaccggactgttgaaatcgcaggccggatgaacccctgatgttctgttaataacattcgggcttcttcggcactgatccccgatagaatcatcacaattgcagttttgcagtgaccgttacaggcactcagggcttgttctgccgtttctctgttgcatccggtagctgccatcacaatatttttttgccgttcgattaacttagcattagtggcttcaatatccaccatcaaattactatataccttgccgatacggatcatggcaccagttgtaatcatattcagtaccagcttttgcgctgtacctgctttcatacgggaagaaccggtgacaacctccggtccgacaatcggtgtaattgcgatatcagccagctgggttatcgggctgtcagggttgcaactaatacaggcaacagttgctcctattgataccgcatactccatcgcacctaacacatagggagtctggccactggcggcaataccgaccagtacatctttttcactaaagtgtagttctttaagatcatctgtgcccagttgccggttatcttccgcattttctaccgctttcagaatagccttatgcccgccagcgattaaaccgacaacctgttctggtctggtgccataggttggtgggcattcactggcatccagaattcctaatcgccccgacgtacctgcaccgcagtaaatcaatctcccgccacgacggaaagcctctgccactttatccacgacgagagcaatttgaggtaacgtctgctcaacagcaagagcaacttttttatcttcatcgttgatgacacgcagcatatccagtgtcgataactcatcaatatgagtactggcaggattgcggccttcagttatcagattattgaggttgattttcatggtttgttccaactatctactatacggtgtgagagcgattatggattattgcattgatcctacaatatagctctcataatcataaagctcacttcccggattatttcttttctcgaatgaccaatcgtaatagagaacaatatttttaagataatagaattgattaccttttgataaataacagtgattacttttatttattgcctgataaaaatctttcattacttaataataaagaagtttcctactttatgttgattgtgcaaaaagcttttatttcaactgataatttaatgtgaatgtgcagatgaaattttgcattctcttgaggaacgtatctatgaagtttatttttgttaataaatccctgcgatttttaatattaattttttcttttttattaccgtttgtctcgatgaatacattttcagtgagtgaagatcatcaaaacctaacagtaaaaccactttttccgagtacgagcgatgaaaataatttagatgtaacagaaaaagataaagctggcgtaattgcacaaaatattcagacgataggtggtttattatcatcctcgtcatctcaacttacagaacaggcgaaatcttacgctttgggaagagtaaacggagtaataaatagtgaggtacaagaatggctgtcacaatttggtacagccagagttaatttatctctcgacagaaaaggtaaactgcataacagttcattagacctgttatttccactttatgataacaaaatagactggctggttttttctcagttgggttatcgcaataaagacagccgaaatacggttaacctcggttttggcagccgttatttcacttcgggctggatgtatggttttaatactttctttgatcaggatattacgggaaaaaataaccggctgggattaggggcagaagcatgggctgattaccttaaattatcagctaatacctatattcgcctgagtaaatggcatcagtcacgggatgataaagactgggaagagcgccctgccaatggttttgatatcaatggtgaattcttcctgcctgcttacccgcatatcggcagtaaactgggttacgaaaaatacttcggtgataacgtgactctgttcaaccgtgataccaagcagaaaaaccccggctttgccaaagtaggcataacttatacgccaatcccgctgataacgatgggcatagattaccggcatggcagtaacaagcacagcgatgcccgctttcaggccaatttaaactatagatttggtgtcccgctgagtgttcagttatcaccggatagtgttgcatcaatgcggacactggcaggcagccgctatgatttggtggaaagaaataacaacattgtgttggatcaccgggaaaaaccgaggctggaaattagcttaccgaatatcaagcatggaaaaagtggtagtgatatatcagtaactgctgatgtaatttcaaatagtgcaactaaaccagttacatggcgtgcaggaggggatttcagtaaaaatgggggagagctgccgagcaatggtaatccgatcaatattaagttaccaaaatatatcgataaaggtgtaaatagttaccctatctatgcaacagtggaattaaagaatgggaagctatctaaaaccgcaaaaatgactattgaagttgaaccttttgatcctgaaggtaagccgttcaaaggtcaattagaggtctctccaccagaagatactctctttggaaatggtaatgatgcgtatacctacaaaattttagttattgaccccaaaagtggacaaccgctacgtaaccacagttttgataatgtcacatggagtattacagagagtcatccaggccaaaaaataccgaataatgtgaaacttaaagattctaaaattactacagatagtaacggatatttaactacttcattggtaagtgatgtcggagtggataaagtcagagtttcattggcgcttaccactgatgacaaaaaagtgcataaaattgatgcacaaagagatgtgagttttaaagcggtgccgcaaattgcagacttgatgttaacttcagacaatcaacatttcacgtatgttgaagggccgaataagccttataacgtttataaaggcttaaaaatcatttttacaaaaaaagtctctagcttagaagatatgcccgaacctattgctagacacaatgattatgttgaatataaatccccatctgatcttgtaaaaatagttatgacgacacaaggaccagaaattactttccctattgaagggtttagtccatctaaaaaagcaactgtaaccgcaactgttactgaattcgatacaggagcaaaatattcttatgaatataagttcaaccctcagcgatatgtttttgttccggaagttgggaataatggtgatgtaaagttgggtgatgataaatataataaggagttgaatcatacttgtgaaaatcttgattcagcatcacgtaaatcaagatcaatgactaaagaagatgttgccggtaaaggaagtttttcactaaaaaatgaatattatatgtttaccggtttcggagttttacctcatgatgataaaatgaaagtaattaatgatggagatcaaaaattcattttatattattttgtgccaaaaatcgatgagtatggagtagaagatagaattaatggagaagataaaatagatactaatcctgagcatacaggtaagctattgtgtaaattataagatatatatttattggtaacaagaacacaggtgcttttgagacctgtgttttttgttttctaatgatggattgagtgctcataaaaagccagataaaaactaaagttagtacaataaattttcattatcaaccgataaccaaaagttattggaggagtataaaatatttcctaatatataaattgggtaagctgtcttactctagtaatttagtatcaaaaaacggttgctaataataacatctacttgggttcttatatatgccatcatatattggtaaaattattgtttttttcacgatcttttatacgttacttatcccttctaccattatgaatgcatttgctgagggatatgtaactaatgaaaaaacaagcacatccaagatagataatgtagacactcgagtaactgaatcaagtaaaaaacttctaactccagaagccgataaaaaagacggaacaggaatcacaagtaataaaccagaatatgaacatgcagatgctattggacgtaatattcagatggcagggaatattctatcgtcatcttcttcagaattagcagaacaagccaaatcttatgctttgggtaaagttaacagtactatctcttccgaagctcaaaaatggctatcccaatctggtacagcaaaaattaactttggttttgacagaaaaggcaggctagaaaataactcaatagatctgctattgcctatttatgataatcaagccgcctggctgtttttttctcaattaggttatcgcaacaaagatagccggaatacagttaatctcggtttgggagggcgttatttttctccgaactggatgtatggtctgaatactttttatgactatgacattacgggtaaaaacaggcgggtaggattaggaggagaactttggggagattatattaaattttccaccaacggctattaccgcttaagtgactggcaaatctcgcggaatttcgaagagcatcacgaacgacccgccaatggctacgacattaacggagaattcttcctatctgcctaccctaatctgggaggcaaattttcttatgagcaatacttcggcgataacgtaacgttatttaatcgaaagaccaagcaaaaaaatccaagtctggcaaaaatgggcgtgacgtatacaccaattccattgataacaatgggcgtggattataaacaaggagagagggggcagagtgaaacccaattactgacaaactttaatctcagatttggtgtaccactgagtgcacagttatccccggataacgttgcatcaatgcgaacactggcaggcagtcgttatgatttggtggaaaggaataataatatagtgcttgaacatcgggaggtgccgaagtctgagctttctgtaccgggaattattgtgggttatagtcgtgaaatacatgacattacgaaagagttatctgccaatacagctattcaacagattaatattgaaaagggaaatgcaaaagaggaatttataaagaatggaggggatatctatttaaattctgggaggatttatattaaattccctgagtatttatcggatgaaaatgaaaataatagttattcgctcaatttgtctgctgaattaaaaaatgatcaaaaaacaaaacctcaacaaatgaaagttattgtcagaccttttgagattaaaaaaggcgatggcgttaatttcacgcctccaggtccgctatcggcgtcaggagatcaagggtatacttttaatcctattattactttcgatactcctaacaacctgaatgtgattaagaatgcaaccatccataatgttgaatggttcgcgataccagtgggtgcatcagcgttagcggtagcaacaggaacctcaacagcatcattaacgttggacgataatatctgtaaaaataaagaaattacggataaattggaatttaagcccaatagttcattcaagcaaataaaaataatggatgatggacatattgcagagagtgatcgtgtcacattaatgagtacgggatatgttggcgcagttgctgtttgtgtagcgatggatggtcagcctaagaaaattataggaaaaaaagtggtggtttttgatgccaaacccaaaagctaccgtattaaagagattaccgtcacaccagagaaaatcataactgcggatggtaagcaattttatacttatacggcgcaagtcgtagataatgaaaatcatcctttgcagaaaaaaacaaaaatatctggtgttgaatgggatataaaaaatcctgtaaccggactgactttggatgccccaaaaggcgatgtagaaacagatgaaaccgggaaattacaggccaaattaacaagtgcagtgaaagtcgatgatgtcatggtttcactggctattgaaggcttagctcctgtagacgcacgggcagtatctttcaaattagaaaatattattgtgaaacatgattgtaataatgaattattagtttttgatacctgtaaatatacagcaaaagtgactaattctgatagtaaccctgagaaaggcacggtaacttggaagttgaaaaaaaatatcaacggagtctgtcttaaccctgctgaaaatgggacctgtccgactcctcctgttgaatctgttaaaacagtaataggtgctgatggtacagccacaataaaacttaaaagcgaagttgctgcatcagatgtgattgttacagcctcaacggggggaaatacagaggaagcaccaccagtagaatttaagtggccaacaattagtaaaccgatatttgacccatttatactaaataataaaaacaatacagctccttcaggaggaagctatgcacttatatcaatggtgtctggtattgatggaaagccatatatggggcaagagattaactttgaatggagtattacagagccagaaaattcgggtctatctttgctacctttcggagcagtacaggtcgattctgagggtaaattaagagcgaaattacaaagtgcagaagataaaccggctgtaactggtattaaagtgtgcgttaatattgttaacgtgtctgagtctcagcaatgtataactgatgtgaattttgttgatccacctgtagattttgaaattgcaagtattgaggtttatggtacttatgatgccaacggtaattttacggagggatcttataatcctgataagaaattaaccgctgatggtaaaagtgcatatgcgtatagagcgaaaattattaagaaaaatacaacagagccactcccatatcacgaatttcatagtgtgatatggagccgcagtggtagtcatggtgatattgatacttccgacgttcccaatccaatttttgaatctaaaaaaacaactaaggatggatatttatattcaactctaagaagtaatgctggaattgataatataaaaatggagttagagataaaaaactctgattacaaggataataaaagtacggatgagaaaaatttagttagctttaaaaaccttcctaggccagtaaaattaaggctttttagtcaaggcggtggagctacaccagtatttgctaaagagggtgggccatataatttttttaatagtttacgtggtgatttaagagagtatcttgataagccccttgttaataaaaagccaggtgacacattaaagtatgatattgatccagaaccaactgcttggagttctattgtatcttttgcagataaggaaaaaggaataataaagtttgatagtactggaactgcaaaaattacagcaaatttcacaaaagctagtggtgcaaattatgtttatgaatactctgtaaccttagggcgatattttttatcagtatctcatcaataccctgaggcatatcctatcaatgataaccattactgcgagatgataacggttgatggttcacctttgatttcgcctggtagggctgacattatttctactggctcaacatcaggattatccactgaatttcctgatgcttttgcgtggggtttacttcaaggttattcgaaggtgacgcctgaatctgcccgaattaaggtgcgtaagtcacaaggtggaaccgtggagccgagtgattttactatatatgatgcagctaagggatgttttcttagtgactctgggtgttcttctgatacttctgtagatgatgcatatgtaatctgtgccgaatattaatatcatatggtgtctagcttaattattaatgaatttcgcaaattaaagcaaagtttatttttattctagtttggttttttctaaagaaatatgaggtgcgtttgttttgtaaagttataattatttggtgtgataactattattcattggaaataatatcgaaagtttattctaatttgttttcggaaatagaacatctagattgagtgctttcatctgattgttttaacctctggggattgactctttgccgcttgcgaagggtatatttattatagaattataattagttattctaaaaagataaatagaggtattgtttatgcgaaaaatcaaatttcaagaaccagcaggatcaacagcaccaacagtatttacatcagttgttaataatgcagatgtggtttttgaacaggaattttatgttgatattattataacggctgcacagaatattaacgatgatgctgagatcactataaagaacaaaactgggtttaaattaatagatgatagtaatccatccgttttatcaagagataaaaaacaactcaagaaaagaatttattgcattattgatgagaaaaataatattggaaaacctgcagcaggaaaagaattctcgacatcatatgatatctatatatcgaatacaaaattacaaaccattgtctataatgtatatggattagtttcatactcaatacaattagactcagataaaaaggtatgtataacacctcttgataactctcctcctggagatactcctgataattatattatttatcaggcaaaattgttgggtaaaagtattaagaatgacattaatgtattaaaaaatactccgattcaagtatcttctaccattgcgaatgattcattgggtaaagtgataattacagaaaataaaaaagaagggggagggtataatcccattcatataatgacagataatggtccgcaaccatattttacgatttatagcaatgacagtggtatcgcagattttcgtgcttatgctcgtgagaatgtacacgcagcattatctttagaaagttatttatttggtataaggacttctcgttatataacagctagtacatttataattggcctgcctccagaggatagtagaaaactattgtggtcaccatctgtacctgctgcgaatggagatattttaacaggaaatgaaggaagatcttcatttagtgcacagattaatagttatggagatatgtcaccagcagataacatacttttctttacacaaataaatgataatggaacacctgtattggatagtttagtattgcccgtgaaaactcttacgcaaggtagtaatccagcctatacatttccaataccttacagcaatctaaaagtaaatgaatggatatatttattttatatagttgctacagacttaggggaaagtaaatattctcagggtacaaatcttcagtttttaggaaagtcaaatgatgccccatataatgatgttgatcgtatatatccagagccgaaaatttatagtagctatgcgaatattaagaaagatcctaggttaatgagtgatgatttccttattactgattatataaatggaggtgatattgataataatgttaacaatcaaggaattgatgtttatataaaaataacaggtactgaaactgaagattttgatccaagtaatccacttcctcttgtaggcgatacagtttatcttaatctttatatacactcattgcacaaaaatgggcctacaccttatattggtaatataccagcgacttcagattataatgcaacagcagcatcacaattaattgtgaatacagtagggatcagtgatgatggtaaaaattcatattctttgataatacctattccagatccaaaattgcaaaatatatctgcttttcttgatggaacatcaggatggttagagattgaatattatacggttgataagtcaagcaatgaaaaaaaatatagtaaagtattaaagaaaaatattgagactgatatcggttaatatgtgagatcaatctaatttatcagagcgagaattcttgtttattaatgtgattttgagagaatttgacagccatttactcgctctgatttatattgtaaattttaaataagggaaaataatgccaataaatacaataaaaaatcctgaatataatcttaatttatctgttatcaatggagctgatgttgccgtttctcaggagatttatatagatataattttctcttcaaatatgaagttggatagcagtcataaaataaatgtagaaaacttaactggtataaaaaaaacaaatattataaccccttcaattatatgtgaagatcaaaaatctatttatacaagagtttacatgttaattgaaagtgatgatgtgatacatcatggagaaaataatgtatcttatagtatacagatatcaaatatatttgataaaataatttactataatgctaagaaagtaaaagaaccctctgttcaattaatgataaataaaaacatttgtatttcacctgaagttattaatcaactggataataatagtgatcactatgttttatattatacaagaataattggtcatgataatgaaccaatgaaaaatacacctattaatgttcattctgtttttcaagatgatataataaataaaatcatcattactaatgacagttcaaataataaggaattaataacacctattacggttgatggtaagacatttattattgtttatacaaataatgaaggaaaggtgagttttcgtgtttatcccaaagctcatgaatatgcaacattaaaattactaagtcactctttaagtacaaattcttcatatcctgcagatactgtatatatccttactcctccacctgatgatgatgcactatttttgagagttccaatcatattagaggctaatggacagattttaaggggaggttatgataagcaaaaatttcatgtacaaatagaccctagtggtgattattctatttcagacgttgtgctattttttaataaagataaaaatggaaatcctgatcctactgggtttatttatccttcccaatcaatagggcaagcagaaaattatactttcaaactaccatatgatgtatttccggaaaatgaacaatctgaattatactacataatttcatcagaactagggaatagcaaatactctggaacgataatggttaggtacgttggtggttctcctattatgccaccggataatgttactcgaacttataataaagtttctgtttattctagctatgcagactatcagaatgatcccttacttgcgaatgagaatagatatcttcgattagagaacgattacattgttttagaaacaatttctaattacgttaacaataatggtgttgatttatatttaaaaattattgcgacaaatgataaatatgatcatacaaagaaatatcctcaggctggcgaagaaattaatgtaaacgtttatgtcaggtcaagaactaaaaaatttattcatacatgtactcataatttgtcagatattcctgatgaagatggaaagcatttatgtacttctataattaaaatacatcaccctgaattgacaggtgttgcttcttattctgatggaaaggatgcatgggtttattttgagtactatacgattgacaaatatacgaatgaaaaaaattatagtttctactggaaaagtatgattgatacctttctttctaatgatgataattaataaaacatactaatcaaactaagttttcaaaaaaacaagaggtaatgacatggaaatgcaattagatactacagaatttatttcagttaaatgggtaattgataaatgggtttgtgaaacaccacaatatgataataatccagaaacgggaggtaaatattttatacattattctgtttatttaactggagaggatggaagcccggcagaaaatagtgatatacagatttattcatctatcagatctcaaatgttagatgacgtaataattactacagatcctaatgatagctcttatcctagtattttaaatcctgttggagatttcattaatattactaatgatggaaatggtaagtttagttttcgggtttaccctatggagaatacgccattaattcttcagatcggctttaagctgccatatacacaagtttattatcctggtgagaatgtgtatattattacaccaaaatctcaaaatatagataattttcttagccctccaaccatatcaagtattgttgatgggaaattaatggcaacaggatctcagcaaacatttaatgctgggattgatagttatggtttgcactcaagtacagatattgtaatattttttactgataagttaggacatatttcacctgcttataatgtaggtgaagagcctggtttttttagtttgtattatgatgattttctcccgttggattcggaatcaaatttatattacgttattataaaaagttcaggtgagagtcaatattcatcagtattgccaatagtatatggaggcggaggcgataatcgcccatcacctgatttttcaaggccgtttgcttgccctattatttatgatagttatgctgtacctccatttgattcaaatgatgatgacagtattatcaattctggagatatagttaatataaactctatttataatcattcaaataatggaggtactgctttatttgttaaaattgttggaactaatgatgtcagtaatagcagtaaacctcaatttggagatgaggtggttctggtcatttatgttaattcattcagtaaaaccatacatgccaaatttccggctgaaatgattagttttacgcctgataatgataataaacgtgaatctactacgattattaaaataccatatgaaatgcttgttgatatagagccttatcctgagagtaaagaaccacctctgatctattttgagtattatgtagatactcaaggaattcgagcatatagtcaatattgggaagcaaaaattagtactgttgcaccacaatctaaatatttataaatataatgatattaactaacatattcaggaagttgattttatttttctgagttttcaggataatacttccagtggtctttagagtgttaaaaaataaatttttatgctcatggttttttgttttttaaactatttaaattaggggtataaatgagtaaaaaaattctagtttctacaaaatgcggttctgatgtggttattggacaagagtttgatctgattattacattgcaatcagatgatgagatatctgataaagcttatgtatcgatatcaatgcttaattataatgcgacgccacagggaggcgtggaaaaaatagcctcgtcagatgataaaattaaaaaattcagagttaaattaagagtaagtagctcaatttcagtgggagatttgattgattttaacatcatcccttctactgaggccgtaggtttttctcagaaggaagtgaagtatactgctagggagatatatcctgactctttatctatttattttaaaaaaggatttttaaaatataagaatgcttctgatgatccggattcaggtaattattcaaagggaattacaattgtaaaagactatcatgatactatattatccggtgtgcctattgctatcttagaaacagttcaatttagctttgataaagttaatatatatgagaaagataggaaaactaaagtagatattcatcaaatttcatctactcaaagaggattttatattaatgcagataagaatggctatgtagagttttacgtttatcccaagggacataattcattattctttcagatagagtcggtgctattgaaagcgactaatgcagttcaatcaacgaatgggatttttattatccaaatacatgatgcagagtctggtggtaaattttctagccctataatcgaaggatataaccctggaacatctttagtgtctaagacaccagattttacattagatataccaaaatataagcatatcttagagggggataatatcctactttttgttgatggaatttatgttgataaatatattactgtagcatctgatggtgatatagcaggaatttctcagaatattccttatgatatctttccaataagaaaaaaatcagagctttcttattgggtaataagtgctctttataatagttcaacaccgtcagaaaaattggatgtatattatattggaggagcaaataatcaaccacctccggtaaaagagaggaattatgatccatgcgttgtttatgatagtgaagggaatttaatatcatctgatcactttattaattgtgagacaatatgtcattatttacataatgaaaatcatgctgcactatttgtagatattaaaggaaccaatcgccttaatgatagcacaaagccgcttttaggaagtgcggtgcaattgagagtatttattacatctgacggaagcccacctttagtgagcacactaccaggaacaataccatcagatcctgatgtacctggtggggatagtgcaatagcaagaatcggggttcctcatagtataattgcacatcgagacggatatgttagtggtaaattaggagcaatagagtttgattattatgtcgatgagaaaggtgatcggaactatggaaaagtatggcatggaagtattaatacagtaccggatggtgctactgattgtacagactatgattaaatagtctgtaatgttagataacatatactgttcgtaaataataaagtaagagtgttattattaaactgggtgaaatatttttaaatacgatgctatatgtatgtggttattattttgttttttctgctgataattaaatctattcatgtgataactttatttcattggttttcttttgtttttttatgtattttaattaaagtctaatatggttattgataggggtttagatgtttaatgtgatttaattaataaaataaggaaaagtgaattatggctaatattattcttcaaaaaccaattctaccccaagaacataatggaattatagataaaggtaaattacagcctcctactattgacatggatgtgcctgtttttgcacatatttctatgtatgatactcttactgctcattttagacctgctcatggtggtggtacgattgatggtggtagtttagtagtttatcgtaccaatatgtctgattacgatatctcgactcaagcaagcctagttcctgttggtgaatattatgcttattatacagtaaccagcgtagctcaacctagcgaacctattccatctcctccagtatatgtgaaaataattgatagtgtcagtgatacccccatcgttgtatattccagttttggtgtgaatcctgataatatactagaacagtatcagcctgtttgtggtaacgaaacggctaataatgttattaattgttatactttatctaattataaaaataataaagtagtagatggttcggctggcgatatgagtagagccgcgttatttgtagtggttaataagaatcgtttagcaccttcagattctagtgttacgttaaggatggagatagatgcctgtctcggtcgtgatggcacctatggcccaatatatatgtctccagatagtgatcatgttactttttctattccttattatgacgtgactggtgcatttaaacggggagattgtcggattaatggtgggcctcaatttggatatggttctattcagttcacattttatgctaagccacagccaaactatctttctgatccttggcagggaagaattatcacttgtggctcagcgtatcaaggatgttcaggccctggttgccctgaccatagttatgattgtccggactgctcaactaattgtcctgattaccctaatggttaggataaaaaaatatctttttgtaataaaatagaagaaatataacgttacattaatctgaataatagataattgcttaagttagcacccatatttatgggtgctaataacagagggattattttttgaaatattttcaagtggtcattgcatttgtgattaattaatgttttaaaattttccataatcatctgtatttgttttttttcaaataaagatgatattctatttcatcaaatatatatcgttgaaatcaaattaaagttgcataattaataatagccttaaaatagatgtcaataattagtctaattttaaatttttggtttttatatagttaccctaccatcgtttctaaattatttccctttccttaatatgctttaattttcgtctgaaagttatttgtaataccttactgataaaattatagcaatttcattgcaagtaaaaattaacccccatttattttttcattatgcgagtaaatcaggattatattcttttatgtgtttttgttgttaatctattcacttgtgatttgattatatggtattttactaaagtaatgtttgatttaatcaatttttggtttgatgttcttaagttatttgatgtgaaggttattgtttttgcaattgtcaataattgtaatgattgaagtgaaaaacgtggttttatgtataaatgatttaattattttgaggaggtgaaattatctttttgtagtgttgaattcttcacttatattaccaatgttattataaattactgtgattaagaagtcgtggtaaatcttttgctaattgtatccttattaactaacatttcattagtcaacgtttttaccagtagttccgataagacctttggcaaagcgctaagttaaaatgctatcaccatgaatctgtaatgttttgtagttattaacaaccattgggcgaaagaacatggatatacgcaatcttgaagctttcatcgttttggctgagactcttaattatcacaaggcatcagagaggctttacctttctcagcctgctttgacgaaaaaaatacacggtctggaagatattctgggggctgaactattcagaagaggaccaaacggaacaaaattaacagattttggtcagaaaacgctggagaatgccagaaaatttttaacgcattatgaacagtttaaaagccaggtgcagtttgattcaaaaaaggaagtgacccggcacttatatgtcggctcgtgttttcctatccataattattctcaaatcgagaatcagcttgcagagaaaaaaggtaatattgtactggctctgatgaccggtttgtcagttgagcagcaggttaatttactgaatgcgggtatgctccatgtggccgttatgcctctggcagcggcaaaatcgtttgacgtaaaaaaaatatttactgaaaaattagtttatatttttaagaaaaagagcccgctgatatctaaattcagaataggaaatagccagtatggtagtaagaattctctgacgatggcgagcgaaaaaaaagaaaatactgatttgaatgattgtctgaatgtttttcctatttatagtagtgataatatgaatttgttattaaaaacaaatgatatcatgttgatgatggagatgattacaaaaaatggtacttacacatgtgtgcctaagagaatgataagtgcaattccggattattatatgaattctctggaactttttgaaacagataagaaaatagacttaggtgtcgtatggagtaagacaatagatgaggagctgattggtgatgctgaaagcttttctgcatgggtgatcaatctttaaaataacagtctaaatagtcagtgaatcatttctttaatgttaatgcttttccaaagcagattataaataataagatcgtgagattttgataatgactataaatatttttgttaatcgatgtgtgaaagatatttctcaatcatatgattttaagtttttataatcagtagggcaatttcttgtataggttagacaatagtatgtttttagacttgaaatatcataatcgggcattaggttaaaatgcccgattatgattgcgcgagaataaagattcagaataagcttattgattcgagttaaacgtttctgtcattttttcaattttctcctgaatatctaaccactctacttcaatatcttccagtttggatttagtgttattctgttgatacaagcactcggttaattccgttttgcgatcattttcatagattgtgttatctgacagcttttcttctatcttttccagctctgtacttaatttttccatctgcttttcaagaacggtcagccgcttacgtaatggttgtgtttggctgcggaattctgcttcacgtcttttttgatctttacgctcctgcgcactgaaattctgggcgttattggtagatgaatcggtaccggtcgcgtttttttcttcctgactttcacgcaactgttgacgctgtaattctgtcagccattgttggtagtcttcaagatcccctgtgaaagcttccactttgccatcatgtaccagatagagctcatcagtggtagaacgcagcaagtgtctgtcatgggataccactacgagagcgccatcgaaatcgatcaaagcttcagtcagtgcctgtctcatgtccagatcaaggtggttggtgggttcatccaatagcagaaggttcgggcgttgccagacaatcagggcaagtaccagacgcgctttttccccgccggaaaaacgggcgctcgggtcagttacttggtctcctttgaaaccaaaaccgccaagataatccctcagctgctgttctgattcctgtggtgcgagtctggctaagtgctgtaaaggcgattcatccgcacgcaggaattccaactggtgctgggcaaagtatcccagtttgatacctttggctaaagcgatctctccttgctgtggttcaagctcacctgccagtaatttgatgagggttgatttacctgccccgttacgaccgagcagaccaatgcgtgaaccgggaaccagatttaatttgatcgagtccagcacggtcttgtcaccgtatccggcactgattttttccatgttcagtagcgggtttggcaggctgtccggctttcggaagctgaaacggaaggggttatcaacatgggctggcgcaatcagttccatgcgttccagcattttgatccggctttgtgcctgttttgctttggtggcctgcgcgcggaaacgatcaatatagctttgcaaatgcgccactttttcttgctggctttggtacagagcctgttgttgggcaagtttggctacgcgttgccgttcaaaggaagagtagttacccgtatattcgaataaattttgttgttcgatatgcagaattttatcgatgatcgggtcgaggaaatccctgtcatgggagatcagaatcaaagtgcctgtgtagcttttcagccacttttcaagccagattactgcgtccagatcaaggtggttagttggttcatccagcagtagcagatcagaacgacaaatcagtgcctgagccagattgaggcgcatacgccatccaccggaaaatgaacggacaggctgttccagttgtgcctgagaaaatcccagcccatgcagcaagctggaagcgcgggagcggattgtccacgcctgaatagtatccagttggccgtgaaggtgggcgatagcgtggccgtcattctgttcattggctattttcagcttttgttccagttggcggaattcgcgatcaccgtcgatcacatattcaagcgctgaaatttccagagcgggagtttcctgatttacccatgccagtgcccaattaccgggaaatgtcacagaaccattttcagcctgaagttcacctttcagtaatgaaagcagggttgatttaccacagccatttttacccaccagcccaactttttggccgggattgatggttgcgctggcattgtccagcagaacacggacgcctcggcggatttgcagagaagaaaaaacaatcatgatgttgtctgtatagagtatgttaagttaataattacattgtatctgttcgtttcgttgtttcgatagtctggcgtgcatggtagcggaaaataggtgacctgacacgtcctgaggggggattgatgatattgtcatctcatgttttaccgcccagggtattgctgttgtatatccatccggaaccgcagggttctgtggttaataaggtgttgctccagacggttcgggagctggaaaacgtcactgttcacgatctgtatggctgttatcctgacttttttattgatgttccggcagagcagaagctcttaagtgaacatcagatcattgtgtttcagcatcctctttatacttatagctgccctgctttattgaaagagtggatggatcgcgtgttaagccgtgattttattggcggcaccgagccgatgctgagaaataaatactggcgctctgtcatcactacgggagagcctgaaggtgctttttgcagcagtgggcacaaccgttattcgatggaagaaattctccggcctttcgaattggtggcttcaatgtgccatatgcactggctatccccgatgatcctatactgggccagacgtcagccacctgaagtgcttgtcagtcatgctaatgcatattgggaatggcttaaagcgccactgtctttgggaggactttaatcatggagacttcagcgctgttaagcgccggaatattgtttctgtttgctgctgttgtcgctgttcctctggctcagaaattcagaatcggagccgttctggggtatcttcttgccgggatcgcacttggcccctggggagccgggcttatcaaggatgtcggtgagatcctccatttctctgagcttggtgtcgtttttctgatgttcatcattggtcttgaactgaatccagcaaaactctggcaactcaggcgttctatctttggtgccggtacggttcaggttgtgctgactgcgctagttctggcctcatttctttgtctgacaaatttctcatggcaggctgctgttatcggcggagtggggcttgctatgtcgtcaaccgcgatggcgctgcaattaatgcgggaaaaaggcatggcaaataacgaaggcgggcaacttggtttttctattttgttgtttcaggatattgcgttaattccggctttagctttgatcccgatactggcgggtggtacggcttccggtgactggtatcgtatcggccttaaaattattgcctttgccggtatgttgttgggtggtcgctatttattacgtcctttatttcgtttggtggtgaaatccggtgtcagagaggtgtttaccgccgctgcgttgctggttgttcttggtgctgcggtttttatggaaacactgggtttttcgatggctctggggacgtttattgcgggggtgttgcttgctgatagtgagtatcgccatgagctggaaatttccattgaacctttcaagggattgttactggggctgttttttatttctgttggtatgtcattgaatattggtgtgctgttgagccatttgccagatgtattgcttgctgttttggcactggtgctgacaaaaagctccatattgtatgttattggccgaatttctggattgggaaattcattgggtatgcagctttccggagtgttgagtcaggggggagaattcgcctttgttttattttcagctgctcttggagagaaggtgttagataagaaccagatgtcatttttgttggtggtggtgacattatcgatgatgacaacaccgctggtgatgacattagtcgatcggatattaaccggtcgttacaatagacaaccagaaagcaatgaaacaccttttgtggaagataacgctccacaggttattgtggtgggttttggtcgtttcgggcaggttgtcgggcggcttttaatggcaaataaaatccgtatcactgtgctggagcgcgatgtcagtgcaatcagtacactgcgccgttatggttataaggtgtattatggtgatgcaagtgagctggagctgctgcgttctgcgggagctgacagagctaaagcgattgtcattacctgtaatgagccggaagataccatgactattgtccgattatgccagcaacatttttctcacctgcacatcacggcacgtgcaagagggcgctttgaagcccatgaactgttgcaaagtggtgtacaggattttagccgggaaacattttcaagtgcgctggaagtcgggagaaaaaccatgatagggctgggtattcatcctcattgtgcctatcgtgcccagcaacattttaggcgtctggatatgcgcatgttgcgtgagctgatgcctcatctacagggtgatgtggcgcatatatcccgtgtcaaagaagcccgtcgggaattggaagagttatttgaacgggaaatgcttaatgaacgtcgccagccggaaggctgggatgagtgatgatatgaaataattaacaataataacatcgcagtatatgaagtaatgggggaaagtatgtctgtcagtcgtaagcgtttntattgcaggagccgtttgtccaaagtgtcagtcacaggatactttggctatccgcacgaaaataaagtggatgttgtggaatatgtcagttgtgggcatcttcagcggcaaaccgatgaatctgtaacggcccatgtcagagatcaggagcaggttatcggtatttttacgccgaaataactgaactaagttacaacaggtaatgcaccactctttcaataccagatacaataaagtagaat

SEQ ID NO: 3355 - DNA, 27473 bp, Xenorhabdus sp.; identical to SEQ ID NO: 3354
  CDS (25351)..(27150)
  unsure (1)..(27473): unsure at all n locations

SEQ ID NO: 3356 - DNA, 27473 bp, Xenorhabdus sp.; identical to SEQ ID NO: 3354
  CDS (24809)..(25348)
  unsure (1)..(27473): unsure at all n locations

SEQ ID NO: 3357 - DNA, 27473 bp, Xenorhabdus sp.; identical to SEQ ID NO: 3354
  CDS (21959)..(22423)
  unsure (1)..(27473): unsure at all n locations

SEQ ID NO: 3358 - DNA, 27473 bp, Xenorhabdus sp.; identical to SEQ ID NO: 3354
  CDS (19749)..(20585)
  unsure (1)..(27473): unsure at all n locations

SEQ ID NO: 3359 - DNA, 27473 bp, Xenorhabdus sp.; identical to SEQ ID NO: 3354
  CDS (17460)..(17678)
  unsure (1)..(27473): unsure at all n locations

SEQ ID NO: 3360 - DNA, 27473 bp, Xenorhabdus sp.; identical to SEQ ID NO: 3354
  CDS (8661)..(12560)
  unsure (1)..(27473): unsure at all n locations

SEQ ID NO: 3361 - DNA, 27473 bp, Xenorhabdus sp.; identical to SEQ ID NO: 3354
  CDS (5977)..(8328)
  unsure (1)..(27473): unsure at all n locations

SEQ ID NO: 3362 - DNA, 27473 bp, Xenorhabdus sp.; identical to SEQ ID NO: 3354
  CDS (2559)..(3161)
  unsure (1)..(27473): unsure at all n locations

SEQ ID NO: 3363 - DNA, 29759 bp, Xenorhabdus sp.; identical to SEQ ID NO: 113
  CDS (1)..(1185)

SEQ ID NO: 3364 - DNA, 29759 bp, Xenorhabdus sp.; identical to SEQ ID NO: 113
  CDS (3787)..(4377)

SEQ ID NO: 3365 - DNA, 29759 bp, Xenorhabdus sp.; identical to SEQ ID NO: 113
  CDS (4448)..(5101)

SEQ ID NO: 3366 - DNA, 29759 bp, Xenorhabdus sp.; identical to SEQ ID NO: 113
  CDS (5131)..(6066)

SEQ ID NO: 3367 - DNA, 29759 bp, Xenorhabdus sp.; identical to SEQ ID NO: 113
  CDS (6066)..(6530)

SEQ ID NO: 3368 - DNA, 29759 bp, Xenorhabdus sp.; identical to SEQ ID NO: 113
  CDS (6889)..(8682)

SEQ ID NO: 3369 - DNA, 29759 bp, Xenorhabdus sp.; identical to SEQ ID NO: 113
  CDS (8707)..(9681)

SEQ ID NO: 3370 - DNA, 29759 bp, Xenorhabdus sp.; identical to SEQ ID NO: 113
  CDS (10017)..(10697)

SEQ ID NO: 3371 - DNA, 29759 bp, Xenorhabdus sp.; identical to SEQ ID NO: 113
  CDS (10958)..(11599)

SEQ ID NO: 3372 - DNA, 29759 bp, Xenorhabdus sp.; identical to SEQ ID NO: 113
  CDS (11608)..(12339)

SEQ ID NO: 3373 - DNA, 29759 bp, Xenorhabdus sp.; identical to SEQ ID NO: 113
  CDS (12410)..(13141)

SEQ ID NO: 3374 - DNA, 29759 bp, Xenorhabdus sp.; identical to SEQ ID NO: 113
  CDS (13941)..(14153)

SEQ ID NO: 3375 - DNA, 29759 bp, Xenorhabdus sp.; identical to SEQ ID NO: 113
  CDS (14668)..(15468)

SEQ ID NO: 3376 - DNA, 29759 bp, Xenorhabdus sp.; identical to SEQ ID NO: 113
  CDS (16147)..(16725)

SEQ ID NO: 3377 - DNA, 29759 bp, Xenorhabdus sp.; identical to SEQ ID NO: 113
  CDS (16785)..(17291)

SEQ ID NO: 3378 - DNA, 29759 bp, Xenorhabdus sp.; identical to SEQ ID NO: 113
  CDS (19043)..(22930)

SEQ ID NO: 3379 - DNA, 29759 bp, Xenorhabdus sp.; identical to SEQ ID NO: 113
  CDS (23167)..(23505)

SEQ ID NO: 3380 - DNA, 29759 bp, Xenorhabdus sp.; identical to SEQ ID NO: 113
  CDS (24217)..(25710)

SEQ ID NO: 3381 - DNA, 29759 bp, Xenorhabdus sp.; identical to SEQ ID NO: 113
  CDS (25746)..(26606)

SEQ ID NO: 3382 - DNA, 29759 bp, Xenorhabdus sp.; identical to SEQ ID NO: 113
  CDS (26603)..(27940)

SEQ ID NO: 3383 - DNA, 29759 bp, Xenorhabdus sp.; identical to SEQ ID NO: 113
  CDS (28048)..(29670)

SEQ ID NO: 3384 - DNA, 29759 bp, Xenorhabdus sp.
  CDS (27147)..(28490)
tgtgctctaaaggccagagcttcacgcacatcatcgagcttgaaaggtttgataattgcatcaatctttttcatgaagtattcctgttattaccagttcttacgcccgaaaccagacgtaatcggatagcgcctgtctttaccaaaatcacgctgtgtaatacgcgggccaatcggagcctgacgacgtttatactcattgatgtccaccaaccggatcaccttacggacaatcgcttcgtcaaaaccttctgctacaaaatcagccacggatttatctttttctacatatccctcgaggatagcatccagcatgtcatacggtggcaggctgtcctgatcgagctgatcgggagccagttccgcagatggcggacgatcgataacacgctgaggaatagcaggagataatgtattacgatatgtggacaatgcaaataccattgtttttggcacatctttcaaagcattgaagccaccagccatatcaccgtataaagtggaataacctaccgctgattcacttttattactggttgtcagtaccagacggcggcgcttgtttgacattgccatcagaatgacagcccggcaacgagcctgtaagttttcttctgtcgtgtctttttctgtaccggcaaacatcggctccaactgcgccataaatgcgtcaaacattggttcgatagagacaatatcaaattcaacaccgagcaattcagcctgttctctggcatcatgaatactcatttcagaggtatagcggaatggcatcatcaccgcctgtacatgctctttacccaaagcatccaccgcaatcgccagtgtcaggccggaatcaattcctccggataatccaagtaacgcacctttaaaaccatttttctgtacataatcccgcacagaaagaactaaggctttataaatttgccccagtggcggcaatggagggataggatttgccatcggctcaattgtcatatcactcaaacgacactgctcgacctgctcttcaaaagctgccatgcgatgtgtgatttcaccattcatatcaaagatttttgaacaaccatcaaaaatcagttgatcctgcccaccaacctgattcagatagatgattggcaaatggatacgctggcagtgtgatttgataagcgcactgcggatatttggtttttcgtgattataaggagaagcattcattgataggataatatcggctccagcctgtttcaaagcatcaaccggagcatcaaaccataggtcttcacaaatcaacaaacccaagttataccctttaaagggtataacacaatttcgctcgcccgcatcgaaatagcgttcttcatcaaaaacgccataattaggcagttgttgcttgaaataacgcgcaacggtttcacctttccagaacagcgaaagtgcgttgtatatttttccgttctgttgccacggatgaccaactaaaataccaacctgagagcttgcctcttgtaagcgtactaactgttcgcggcaacgctgatggaaatcagaacggaacaggagatcctctgggaaataacccgacagtgataactcagagaacatgacgagatcagcgcctttttcctgctgttcctgtactgtatgcaacatacgctcgctgttgccttcgatatcccctaccagccagtttaattgggcaagggcaatattaagagtacgactcatagaatgcggctctcctgggccattattcacttctctgtctggttcagacagttcaatacggctttaaaaacgtttcaattatttatgggatttaaattacaggaaggttattccttaaaatcattggcatccagttcatggcgagccaataatttataaaattctgttcggttacgccctgctacacgggcggcgtgagtgacattacctttagtcatttgtagtaatttacgtaagtaattcagttcaaactggctacgcgcctcgacaaatgtcggtaatgccgtgttttcaccttctaatgcctgcatgactaaggcatcactgatcactggggcagttgtcagcgccacgcattgttcaataacattgaccaactggcgaacattccccggccagcttgctgccatcagacatttcatcgcattggtggagaaactgcgcacaaaaggcttatgacgtttggctgattcccgcagcaaatggtttgccagtaaaggaatatcttcggcccgttcattcagggtagggattttcaggttgacgacattcaatcggtaataaagatcttctcggaattcattgcgttgcatcgccttcggcaaatcccggtgagttgccgaaataatcctgacatcaatatctaaatcacgattacttcccagagggcggatcttacgctcctgtaataccctcaagagcttaacctgaagcgccaatggcatatcgccgatttcatcaagaaacagcgttcctccctgagccgccagaaaaagcccttcccggctactgactgctccggtaaatgcgcctttcgcatggccgaacagttcagactccagtagctgttcaggtaaagcaccacagttaatcgcaataaagggtttctttgcccggggacttgcacgatgaatagcctgagccaacacttctttaccggttccgctgtgcccgttaatcaaaacgctgacatcagactgcgccaccatttttgcctgttccagcaaacgcagcatcagagggctgcgggtgacaatttgctcactccatttaccatctatggcaggtgttgataattccagagcatcatcaatggctttataaagtgcatcacgatcaacaggcttagtcagaaaactaaatacaccctgctgtgttgcggcaacagcatcaggaatagaaccatgagcagtgagaataatcaccggcatacccggatgctgtttttgaatttcagcaaataaggccatgccatccatctcatccatgcgtaagtcactgatgactaaatctactttttcttttaataggatgcgtagtgcttcatgcccactttccactgtcgtgacacgaaatccttcactgatcagacgcattcccaataatttcagtaagctaggatcatcatcaaccagaaggagatgagcaggattgcgtgcggtcattgtacttcagctcctttttcttctgaaaaattatcttctgtctttgtttctgattttctttccggaagtcgtttcgaatggctttccgggtgggactcgttgattttattaccactttcatcaacagggtattctgtttcaactgacgccgaagagacattctggctttgcttgcgggatgaaagctggcgttcaatatcggtcagattttctaacttacgggatattgaatgtaattcatattccagccgggttcgtgcctctttcagccgatcaattttgttctcactatctgattgtaatcgctgatattttgacttttgctctgccagactaatttttaaatattgttggtcacgccatagttgtaataatggttgcaacgaaggcggaaattgtgagctatatcgattcaggttttctatgatactgcgccgttcagcaactgaaggtattgaatggttgataagaatactctgtttgaaaacctgtgaccaatcatctgccatgaactgcttgactttgtcacgggcttccgttggagacagtttctccgtgcagtcgatcagtcttagccagtaaaggctattttccattgcagctgtttttgtgatattccatatcacatcacaccctttagggtgataatcgatgacacgctgctccggcataatggcttcagaaatttttgtcagctcaccagaagtggaatttgaaacacaccctgccagtaaatagggaacaaacagtaacatcatagtacggaaacaccgggacacagcccgttcagataaatgcggcattaccgctttttttttcactgtccgagtcacaatattctgctgctccgtcttcatcataaagtggtgagtaaacctgttgtgcatattatttaatcattctctgcggttagcggcagttcaatccggaaacatacatcagcaaagtcggattctatcagatgaagttttccccccatccgtttaatacaatcctgcgcaatactcaaaccaagaccacttcctttgaccgcacctttgcgctgaagttttccttgataaaatggttcgaaaatcatgctcttctctaactcagggataggtgttcccgtattggcaatatcgatctgaatatttttatccacttgccgaccggaaatccaaatgttaccggattcagcgccatagtgcactgcattggagtagagattatcaataactctcattaataatttaggttcagcccaacaatcatcagcatccaactgaatttctgtatgaatattttttgtccgtgcaggtaattgatgtgacaagacaacgctatcaattatctcttttaacgacacaacctgttgttcggcagggacatcaacaattttacgattatattcgagtaattgttcgataagttgctgtaaatgtttactgctactgtccagaatggtgaccacttctttttgatctgtcgttaatggcccggcaatttcatccgctaataattccgtcccttcacgcatactggcaagaggcgttttcagttcgtgggagatatgccgtaaaaactcatggcgctgggattcaagccaggacaggcgttcacttagccaaataatccgcaatgccagtgagcgtaactctctggggcccttgaaggactcaatcttgttttcaagtgcctgccctgcacctaaccgattaatcatacgctcaatgcctttgaccggcccaataatcattcgtgtaaacagggcaattaaaaacgcacttaacagaaataagattaaactttgccagccaaaaaactgccccttatccgcaatttctttttgtaattgctcaccgcggataaagataatattgcgtgtttcctgtactaactgattattagcgtttgagaattgttcaagtaatttagcggcagcagcctctggtacactgttgcgacaagtaatcttattcagcccggacaggagctgattaaacttatccttatactctttattggccagcatcgccatctgattattcagcatcgttgtgtactgctgatattggcgttgatagagtttttccagccggacatctcccaaaacacaatactggcgataactgcgttccatctcgagggcgacaccaatcatagcttcactgcgccgggcgtcagataaggttgtacggtttatttctgccgcctgagtactcagttggtctaggctttgatatgcctgatatgccagaactaatagcggtaataacaccagccagaaagccattacaactaattgacgcaatgatcggggaaataaacgcctttttttcagagaaatcatcttaaaacctgcaattacgttgatgctaaccgatataaggtggtagaaagccagccagatgatggattttatcgccgtttttcagaaaaaatagttttagaaaaaaatagtctcaaataatgggttataacaaatgggctggcaagaacaagaataatgcaggcggatatatcaacacgatgggcaaaatgaatctgcagtaatgacggcgggatagtattttttctactatcccgccagcgaggagcctataaaaatataggtggtgcctcactccacgtgtcgcccgttgcttgataaggcccgaaagcgaatatcataaattggacggtaggcaccttactttggcatcattccgggcttatgtggcatttttccaccctactctgtgggccgacataaaaaattgaatgagcaactgccccttattaagcacattgcgtgccaacttttaaagtttctattaattaattgattttattatataaaaataaaaaacactttaatatttatactttgttatatgtatttttgatgcagggtatgtatttctgtcgctaatttatgacacttcatgatttaaattaatttaattaattaaatcataatattaagtgtctctgttttgagacagccaaaatgactattgtctctttttagagacaccattttaaaaagattaatttaattaactcataaaacaacgtaagttaaccaaataaaaacatttacacaacacttcgtgtgttatgaaaaatctttgcattaatctaaaatggcttcagcttcaatttctattagccattcaggtaaagataaccctgttacaatgacccaagaagaagcgggaggctctgaagggaaatactgctgtaataaagatgatatgaccaactgattttcatgcgattcagctccctgcttgatatagatacgcaacattgtaatatcgcttaactcaccaccagcttctcggatcactgagtgcaaattttctaacgcaagtttagtttgagcaggtaatcctcccggaatcgtttcctcatctttattaatccctacctgaccagacaaaaatagatgtcgggttcctgttttaatcactgcctgactgaaaccatattgaacagaattaaatacagtttcaggatttatcgtttttttagtcatagagatatgccttgacagtcagagtaaaaaatcgcaaataaaacgataaatcaaaaagataaaaactacatgcagaaaaaacattatctgtgataacgacatgagaaataaaggctctgatacatattcagagccttatgatgaaaagtgaaaattggataattaagttattaacctaactgcttgcgggcattacggaagatgcgcatccacgggccatcttctccccactcctcagggtgccaggagttactcactgtacggaataccctttcagggtgcggcatcattgcagtaactcggccatcgaggctggtgacagaagtaatcccaccaacagagccattagggttggcagggtaattttctgtcggctgaccatagttatctacgaatcgcagggctatttgctgatgtttttccagttcagccagactttgactacttctgaattccacctgaccttcaccatgagccacagcaattggcaggcgagaacccgccattccctgtagaaacaacgatggactttctgtcacttcaaccagactaaaacgggcttcataacgttcagagtaattgcggacaaaacgaggccagtattctgtgcccgggatcaattcgtgtaaattcgagatcatctggcagccattacataccccaagagatagggtatccggtcgggaaaagaagtgggcaaaatcatcacgcacccgtgaattaaacagaatggatttagcccagccttcaccagcaccaagaacatcaccatatgagaagccaccacaggcaaccagtgtctggaactgctccaatgtcactcgtccactcagcaaatcgctcatatggacatccacggcttcaaaaccagcgcgatggaacgctgccgccatttcgacgtgggaattcactccctgttcacgcaacacagcaacacgtgggcgtacctgtttggatatgtaacaggcggcaatgtcttctgccggatcaaaggttaatttcacattcaggcccggatcactcaaatcctgttttgattggtgttcctgatctgcacattcggggttatcacgaagacgctgcatctgccaggttgtttctgcccaccataaacgcagagtgctccggttctggcgataaacttccatattattactggaaatgacaaaatcatcccccactttggcttgacctaaataatgtacgcaatcgcctaatccatagtcagccagtagattttcaacctgttccctgtcagtttcacgaacctgaatcaccgcgcataattcttcactgaataaagcagccagaatatcttcatcaaaagcactgatattggcgtgcaggccgcagtgccccgcaaatgccatttctgccagtgttaccagcaggccaccgtcagagcggtcgtgataagccagcaatttacgttctgcaatcagttgctgaatagctttaaagaaatcggcaagttgttcagtactgcgaatatccgcagtcttatcgccaagctggcgatagacctgagccagtgccgttcctcctaatgcattttgtcccaatcccaaatcgatcagaattaatgcgttatcatcatccgttgataattcaggtgtcacggtataacgcacatcttctacccgtgcaaatgcagtgatgactaatgaaagcggagacgtcatctcacgcttttcaccatcttgtgtccaacgggttttcatcgacatagaatctttgccgacaggaatagtcaggcctaatgccgggcataattcttcgccaaccgctttcactgcttcatataatccggcatcttcccctgcgtgacctgaagctgacatccagttagcagagagcttcactcgcttcaaatcctgtacataagctgaggcgatatttgtcagtgcttctccgacagccatacgggccgaagcagcaaagtccagcagggcaactggagcacgttcccccatcgacatcgcttcaccataatagctatccagactcgctgtcgtcaccgcacaatccgaaaccgggatctgccaggggccgaccatctggtctcttgctaccataccggttattgagcggtcaccaatggtgatcaggaaagttttctctgctactgcgggtaaatgcagaacacgtttgaccgcctctgccaaatcaataccctgacgctccaacccttttccttgtgctttcagtgaatttacatttttcagcatctttggtgtcttaccaagaagcacatccaatggcatatcaattggctgattatcgaaatggcggtcattcaacaacagatgacgctcttctgtcgcttcaccaatcacagcatacggtgctcgttcccgctggcaaatatcctcgaacagagcaagctgttccggcgctacagctaagacataacgttcctgagattcattgcaccatacctgtaatggactcatgcccggttcatcgttgaggatattacgcagttcaaaacggcctcctcgcccgccgtcgctgactaattccggcattgcatttgacagcccaccagcaccaacatcgtggatgaacagaatcgggttgtcattgccaagctgccagcagcgatcaatcacctcctgacaacggcgttccatttctgcgttatcacgctgcacggaggcaaaatccagttctgcatcagactgaccagatgtcattgaagaagccgctccgccaccaaggccgatattcatgcttgggccacccagcacaatcagcctggcaccaacagagatctcccctttctggatgtgctcttcacgaatattgccgattcctccggccagcatgattggcttatgataaccacgcaattcagtaccgttatgggatgtcacttcttcttcatacgttctgaaataccctaataacgcaggacggccaaattcattattgaatgcagcgcctcccaaagggccttccagcatgatatccagtgcactgacaattcgctcgggtttaccaaactcttcttcccacggttgttcaaatccgggaattttcaggttagaaacagaaaaaccaaccagcccggctttaggtttggctccccggcctgtagcaccttcatcacggatttctccgcccgaacctgtcgccgctcccggccacggagaaatggctgttgggtggttatgtgtttcaactttcatcaatatatgagcgggttcctgatgatagtcgtacaccccattttcaggattagggaaaaaacgccctgcctgagaaccttccataacagcagcgttatctttataagcagaaaaaacatgatccggcgtctgttcaaatgtatttttaatcatcttaaacagagatttttcctgttcctgaccatcaatcacccaatccgcattgaaaattttgtgacggcaatgttcagaatttgcctgtgcgaacatgtagagttcaacatcagtcggattacgctctaatttctggaaagcacgcagcaagtagtcaatttcatccgccgctaatgccagccccaattcaatattggcagattccaatgctgcacgtcctgattgcagaatatcaacctgtttcaatggtgctggctgttggtgagaaaacagcacttccgcctgctcaaactgagtaaacacgcgttccatcatacgatcgtgcagtaacgccgacagtgcctgccactgcatatcattcatttcaccgcactggatataataggcaatccctctttccagacgggcaatctgtttcagcccacagttatgaactatctctgtcgcttttgaagaccacggtgatatcgtacctggccggggagtgactaaaaatagttgacctttgggttcatgttcagctaaagaaggaccatattttaatagtctgtttaatttttcctgttcttctgccgtaagaggtaaatttatttccgcgaaatggacatattccgcataaatttctgtcacaggaagctgttgagcctggcactgggaatggagcttagtaatacgaaacgctgataaagcgggcgagccacgcagaatttccatagtaataggttctctcatcttagaagcaaagcctgactgatgccttaggggaaacgccgacattatagaggaatgttttcctcgacgaaaccgtttgcgtgagcgttaattcatctatcaacacatacaatggacttttaaaacggctccaataaagttgcaggcttcaattttgttgcgcaaaattcctaagtactggaaatttaaccatgctattatctgacatttcatactgagcctaaccgtactgacgagagataactgtttgagcaatatcaagataaattattttgtcatcgtcattatcgcactcctgtctgccacaattattggcctcaacatcagttggcctaataaacagcaggagcagataaacaggatcttggcgcggggcgaacttagggttagtaccatcagttcccctctgatttcacttaatgataaaaatgaacctgtaggatttgattatgatttagccaaacggtttgccgattatctgggtgtcaagctgagcattaagtttcgttctaacattaaccagctttttgacgacttagataatgacaaagctgattttttagccgcaggtcttatctacaataaagaaagacttaaccagacgcgaactggcccggcctattactctgtatctcagcagttggtttatcgtaaaggtacggtacgtccacgctcatttgcagacctgactggctcactggttgtgagtgcaggttcagcccatgtcagtgagctgaagcaattgaaagaaaaatcttatccggatttaaactgggaagaatcatcacatagtaattctcaggaattacttgagcaggtttctgagggtaaaattgattataccatcagtgattctatcagccttgccctgcaacagcggatccaccctaatctggcgatcgctttcgatgtcagtgaagacaaaccgctgacctggtatttaaaacgtaatgatgactatagcctctattcagcaatgctggattttttcaacatgctgaccgaaaacggtataacctcacggctggaagataaatacttcagccatattggttcattcgattacttcgatactatttcatttattcgtgcaatcaacaaactgctgccgacatatcagcctatttttgaaaaatacgctggttctctggactggcggttagttgcagctatcgcatggcaggaatcacactgggatccactggcaacctcccccaccggagttcgcggcatgatgatgctgacccgtccgacagcagaatgggcaggaatcaaagaccgccttgatccggaagaaagtgtaaaaggaggaatggcatatttacattacctgatggaacgtttgccagagaccattcctgaagatgagagaatttggttcgcattggcggcttataatatagggtatgggcatattcttgatgcccgcaaattaacaactatgcaaaaaggagatcctaatctctggatggatgttaaatcgcgaattcccctgttagctcagaaaaaatactataccaatactacatatggctatgctcggggctatgaagcctaccgctacgtcggaaatattcgtcgttattatcaaagtctggaaggatatctgagagccagaaacaaccgtaacaagacagaaactcctgacatgcaggctgagccggcaactgccagtaattctcatcctccagcagaagcccccgcgtccgctcaggttatacagtaaacgtttatcactcttccatctgctgctttttcagccgctttaattccttatgctgctccctacgttgtttgaaaaatgcactcaacatagcggagcattcctgctccagcacaccaccagtaatttcaatccgatggttcattccgggatgacgcaggatatcgatcaaagacccggctgctcccgttttcatatcacttgcaccgtaaaccagccgctgtatacggctgtggatcatcgctcccgcgcacatgatacatggctccagagtaacatacagtgttgtctccagcaggcgatagttttgtaattgagtgcctccacgccgtaatgcaataatttctgcatgggccgttggatcatgatctgttatgggatggttataaccttcagcaataattttattatccgctaccagcagtgcccctacagggatttccccttttgcctgtgcctgcatggccaaatccatggcctgacgcatccagtattcatcactatatatttctgtcactacatgttctcttgctggttatatcctgttaattatacatttatttaattaatacggatttactcagcctgaatttcgtcaaagaactcattcagaaactgttccatgcgctttgttctttcccgagccatttgtttgccagtttccgtttgaaaacccgcttctatcttgaataatttggtataaaaatggtcaacggcataagcgcgatcatcatattcacgctgctttgccaaaggatcataagcattatataaacctgaacgcatacgccctgctgtataaaaacaacgggcaacacccatcatacctatggaatcgagccgatcagcatcctgtacaatttgagcttccagtgtctccggagtcaatcccgcagagaaactatgcgtctcaattgcatggccgaccgcagcaatatcttcttcactccagccaagatcttttaatatcagagtggctttttccgctgccatacgggaggctaaatgccggtttgggtcatttttctcaacactaacacaatcatgtaataaaacagctgcaaaaactaacctcaaattaccacattcagcttcacagattttctgggcatttttccaaacccggtataaatgagccacatcgtgcgcaccatcatccccttctattgcaactggtaaaatttgctgagctaaatcatcaaacggtgaaaaagataacattgccaaaacctcttaatgggtaaaagggtatcttaacaaaagcattcggaacattttattagatttcaaaaggaagacaccaaggaaaacttgccagatataatatcctttcctaacatagcgatgtaattgcatgatcgcataacattatttaattatttgttttaaataaattatttcaagataaaaataggcaaatactatgctgacagggctaaaccatctgacactggcagtctctcatctcgagcatagtctcgatttttatattaatctgcttggatttaccccacacgcccgctggcaaaatggggcttatttaactctgggagatctgtggctctgtctttcccgtgacgaagcaaaaccagcacaggattatacgcatatcgcctttaatatcgaagctcagcatttttctgctttcagagaaaaattgctcagtgctggagtaaaacaatggaaagagaaccgaagtgagggagattcaatctacctgttggatccggacggtcatcagcttgaaatccatgtgggatcgctgacaagccgtcttgatgcgctacgcataaagccttatgaaggattagagtggtattgaaactttcgttattaatatccactactagattgttgtctccataaatgagctgcaacaagagccttccagggagaaaaacctgccagccatttctctgtttgctcagcatctaccttgttttcctgtttcagcaaatactggagattacgcctcacagcaacatcgccatgcaaagagccattcagataatttaatccccttagcagggtataattgaccgtccagataccgattcccttaatcgctaaaagatttttggtaagccggctgatttcagcttcatcagtttcaatagacaaatccaattcaccagaatcgattagctgacagacattcaatagcgccttcgctttacccatagaaaaaccacactgatacaaatcctgctccgtgaattgcatgacttctttatgagtcggatggcacattaatcctgaagtatgtttaattccaaaagcttgaataaatcgtcggcgaatggaaactgctgcacttacacttatctgctggcctataatcgcccagctcaatgcttcaaaaggcgatgccgattgataaatgcgcaaacccgcctgccgcgtgatgagttctccaatcactgggttttcctgatatttttcttcaaatatttcaacaggttgaaataatccaagcatgtgattagctaaaacagacaaagcatctttggaataagatgcgctgtcaccatcaatatcaagctgtacctgagccctatttttctccattgaaatggtcagtaatgccgggtttccgtgccagataatgccttttttaacctgatccagctgcacaatttcagaaacacacttttcatcccgctgatgaaacgccaaaaaatctagcgcgagataattatctggtaagataatctccgaaaaaaagcttggtttcattacaaaaactccatcataaattttcataatagatcggaatggcgctactgatgaccaaacaatatatctattgtgatatgtgtgaacttatcaagtccacaaataatcaaggataaataagttttagtaaagattctgaatagattcttagaaacaatgagtattataaagcgctcattatatatattttacagggcatgaaagctgactattgatggtgtaaccaactgataatacaagaaattcactaaataaatgagcagatacaaaaaaccgtgaagcgcatcaacgctacacggtttgaagtgaaaaacagttattcattaaaccctgtatttgcgggatttaattatctggatgtatacctatttgaataggtagcataactgttttgcaaaaaatagatgttgccttagaggatcactacattggcagcagctgggcctttcataccattttcaatggtaaaagaaacttcttggccttcatctaagcttttaaagctattactttggatagcagaatagtgaacaaacacatctttgctgccatcttttggagagataaaaccgaagcctttatcgttgttaaaccattttactgtgccagtcattgtattagacatacgaattcctttgaattgttttattaattgccatgaggcaagatgatatttttgatttgatttatacgtacttatgggaactaaattagaaggaattcgctatgaagggatatcaaagataacgctcactgctgaactgcttgaaacttgcttatcataaataggtttgtacttccaaaccagtggcgatattatatccacatcttcacggtgatagcaaactttattttctgtctcactttagtttacaataataatttgcgtaatatattgaaatggcactactaattaccaaacgctgcatcaattgtgatatgtgtgaacctgaatgccctaatcaggctatcacgatgggtgctgaaatctatgaaatagctccggagcgctgtactgagtgcatagggcattatgaaaaacctacctgccagtctgtatgcccgataacaaacacgattattatcgaccccgagcataaagagacagaagagcaactctgggataaatttgtgctcttacatcatgctgacaaaatctgagttcagattattcatggtattcaaaatggcttttctgctgatacctcgtccacatagaacgaggtcataatatttttttaaatttccaatatcaccgttcacctgccagtgtgatatgcatagatttcacattcagttggctcgataatattcttgcttcgccatgaagtttttacgttttgccaggcgttcgccagaacgcccgacaatctcctctatacggagaatttcaacaatatctgtacccagtccgataatggccattaacggcgggcttcacgcaacaatgttttcatatcagaaacagcagcagacaaaccactgaataatgcccgcccgataatggcatggccgatattcaattcataaatttccggcaatgcagcgatacgctgtacattgtgataagtcagcccgtggcctgcgttgacttttatacctttagcggcggcataagttacagcttctttaatacgctgaaactctttttcctgttgcgcatcattttctgcatcagcatacgcaccagtatggatttcaatataaggcgctcccacttcagccgcagcatcaatctgttgatgatctgcatcaataaacagggaaacaagaatacctgcatctgataaacgcttaactgctgcgccgacatgagctttctgcccgaagacatccaatcccccttctgttgtgacttcctcacgtttttcagggactaaacaacaaaaagcaggtttgatttggcaggctatttctaccatctcatcagtcacagccatttccagattcatacgtgtctggatggtttttgctaataactgaacatctctgtctgtaatgtggcgacgatcttcacgtaagtgaactgttatcccatcagcaccagcctgttcagcaacaaatgcagcctgtacaggatcaggatattgcgttccacgggcattacgtactgttgcaatatggtcaatgttgatgcctaacaatacctcagccatttttagctcctgcaattatatattagataaaacaacgtactcactctccattattgagagcgatcccatcttaatttttttggttcgtgttacctgtatttctgcgcacaaattgatgaaataattcacggctctttaacggttttcccccgagataaggctgtaaggcaatgcgagtaaatcgcttggccgccttcagtgtagccggatcaggaaattcacgtgcagccagcgcctttagttcattgccagtaaagctgtagtgatcaacaaccagactggcaataaatcctttttcttctcgatagcggtatgtcattgtgtctgtgacaggttcaccgctgcccgcacaatggaggtaatccacgccataccccatgttatttagcactgataattcaaaacggcgcagggcgtattcaggcgtgtattcacttgcggccaacacctgcaagcattggagataatcaaagaaaaggacaggataagcggttccctgttcaaggactctggataagagttcattaacatacaggccgctgtataacacgctaccggttaaaggaagagctaacgagatgggttccgcatcccgtaatgttttgatttcaccccgcccactccagcgaaccagtagcggggtaaaaggctgaagacaacctttcagattggaacggcggctacgtgctccctttgctaaaacacgcactcgcccttcatgttcagtaaaaaaatccagtaacaaactggtttcactgtaagggcgcccatgaagcacgaaggctctctgccagccgtccacgattaaccttataaatcgtcaatatagccaaggctacgcagagcacgttcatcatccgcccagccagctttcactttgacccaaagttctaaatgaactttaacatcaaacagcttttccatatcctgacgggcttctgttccgattgttttgattttgctgcctttgttaccaatgaccatttttttctggccatcacgctctaccagaatcaggccgtggatcgtataacctccacgctcattagtgacaaattgttcaatttcaactgtaacggaataaggtaattcttcacccagaaaacgcatcagtttttcacggataatttcggatgccatgaaacgctgtgaacgatcagtaatgtaatcttcggggaaatgatgttccgcttccggcatgcgctcacgcacaattttagcgatggtatcaacatttgtgcctttttctgcgctgatcggcacaacatcgatgaaattcatctgctggctgagaaaaccgatatgcggcagtaaaatggttttatccgtaacgttgtccactttattgataaccagcataaccgggcaacgcaggtcacgcagtttattcacaaccatttcgtcatccggtgtccagtgagtaccttccacaacaaaaatgaccagttccacatcaccgattgaactgcttgcagcacggttcatcaggcggttaattgctcgcttttcttcgacatgaaggcccggggtatcaacataaatagtctgataaaccccttccgtatggatccccataatacgatggcgtgtcgtctgaggtttacgggaagtaatggagactttttgacccagtaactgattcaataaagtcgatttaccgacgttgggtcgtccgactattgcaacgaatccgcaatagtttttttctttgctcattcaagctccagttgttttaatgcttgttccgcagccgcctgttctgccttgcgacggctggaacctattcctctgacaggctgctcaaatccactgacctgacagtgaattgtaaattcctgatcgtgtgcttccccacgaacctgaacaaccagatatgatggcaacggcagatggcgcccttgcaaatattcctgtaaacgcgttttgggatctttttgtttatcacccggactaatttcattcagacgactttcgtaccaattcagtacaatttgttcaacagtctgaatatcgctgtccaaaaaaataccgccaatcagggcttcaatgctatccgctaaaatagattcacggcgatgaccaccactttttaactcgcccggccctaaacgcagacattcacccagttcaaattctctggcaagttccgccagtgtattacctcgcaccaatgtggcgcgcatccggctcatgtcgccttcgtcaacccggggaaaacggtgataaagcgcgttagcaatgacaaagctcaggattgagtcgccaagaaattccaaacgttcattatgcttactgctggcactacggtgagttaacgcctgaagcaataaatcattctgcttaaaggtatatcccagcttacgctgtaacctgttcattattatggagttcatgtgctaccaattcagttagaatccgtcaaataaaagcacacgcaacagacctgtgaggctatacacttcgtctttcaagttgcctctttgttggctgcgctcgctcaccccagtcacataattatctatgctcatggggatttactcccttgccgccgcgacgcatcttgaaatccattgtgtataccggatttctgccttaatgatatgccttacaaaactgttgcgtttgcactagcttcctaaaaagttaatcatttcaggaagccagtcatctcgtttgagagaatattctacactgagagataaattaatgcttcgctaatatataaatattagtgaattccacctattcggctgaaacgtacccatggccagtcaggccactcaccttcttgtttattgaagctgatccagatagcggttgcccgtccgaccagattcttctccggaacaaatccccaaaaacggctatcagagctattatcacgattatcgcccatcatgaaatactctcctttaggtacaacccaggtacctaccggttggccttcctgaacaaactccggctcacgttgtggcggaagcgttaaaatatggtgcgaaacatcacccaacgtttcaacccgctccccttgacgcaatgtgcgagggcctaatgtttgcccaacaggaatctgatgcacttcattagtaatcgtaccgtctttctttatcttttctgagatagtccagtcactaagatacacatccccataagtaattgggagaatgtctttacagtgctgagcgtaaccacagccgggataaatctgaagctctttatcccaatagttgtaaacaatcttatccccgggtaagccaatcacccgttttacaaaatctatacttgggttgacgggatatttgaaaacagcaatatcaccgcgtttaggctcaccggttttaatcagggtggtttgtgtgatcggatctttcaaaccataggcaaatttttctactaaaatgaagtccccgatcaacagggtaggcatcatagaaccggaagggatctggaaaggttcatacacaaatgaacgcaggatccagacaatggctaacaccggaaaaacagatgcaaatgtctcagcccatgtaggcttgtttatttctttaattgcagcttcctgagattcgttgcccgctgcctgtttctgagcctgagccagttttctcttacgctcaggggcgagtttaaagcgatctatacaccagataatcccggtgattaacgttgcaaacgttaagatcaaggcaaaagtattagccatttagactccttacgaccttgttaattaatcttttccaacatgcagaattgctaagaaggcttcctgaggcagttcaacgttaccaacctgcttcatgcgttttttaccttctttctgtttctgcaacagctttttcttacggctgacatcaccgccataacatttcgccagtacgtttttacgtaactgtttaacggtagaacgagcgataatgtgagtaccgatggctgcctgaattgcgatatcaaattgctggcgagggattaattccttcattttttccaccagctctcgaccacggtattgcgagttatcacggtgagtgatcaacgccagagcatcgacacgctcaccgttaatcaacacatccacacgtaccatgtcagaatgttggaaacgaacaaaattatagtccagcgacgcataaccacgtgaggtagatttcaggcggtcaaagaaatccagcaccacttcagccattgggatttcgtatgtcagcgcaacctgattaccgtgataaaccatattggtctgaacaccacgtttttctatacagagtgtaatgacattaccgagatattcctgtggcaacagcatgtgacattctgcaataggttcacgcagttctttaatattgtttaatggcggtaacttggatgggctatccacataaatgatttcatcactggtggtctcaacttcataaacaaccgttggtgcagtagtgatcaaatccaggttatattcacgttccagacgttcctgaatgatctccatgtgcagcaagccgaggaaaccacaacggaagccaaagcccaaagcagtagagctttctggttcatagaacaaagaggcatcgttcaggctcagtttgcccaaagcatcacggaatgcttcatagtcgtcagagctgacagggaacaatcccgcataaacctgaggtttgacctttttgaaacccggtaatgctttttctgccggatgacgcgctgtggttaacgtatcgccgacaggtgcaccaaggatatctttgatcgcacagaccaaccagcccacttcgccgcaatttaatacgtcacggtcaatgcgctttggtgtgaaaatacctaaacgatcagcgttatatacctgacctgtgctcatcaccttgattttgtcgcctttacgcagcgtaccattcttaacacgtacaagtgagacaacacccagataattatcgaaccatgagtcgataatcaatgcctgtaatggtgcttcaggatcaccttccggtgctggaatttccttaaccagacgctcaatgacatcctgtacacccacaccggtttttgcagaacaacgaacggcatctgttgcatcaataccgacgatatcttcaatttcttctgctacgcgctctggctctgcggcaggcaggtcaattttgttcagaaccggaacaacttccagatccatgtcaagcgcggtatagcagttagccagcgtctgagcttcaacgccctgccctgcatcaacgaccagcagagcaccttcacaggcagccaaagagcgggaaacttcataggagaagtcaacatgccccggcgtgtcgataaagtttaattgataaacgtttccgtcatgtgccttataatcaagggtcacactctgcgccttaatagtgataccacgctcacgttcaagatccattgaatccagtacttgcgctgccatttcgcggtctgacaacccaccacagatttgaataatccggtcagatagcgtggacttaccatggtcaatgtgggcgataatggagaaatttcttatttgcttcattattaaatcttttttgccttaatatttctgaatcattcgcctatggacacactgatggacataaagcgacgtttattagatacgggtttggccactggcctgaaaagccgtattctacatgtcaacacagtgaaaacctagtcatgcctacggttttcaacctatacccttcatctttcaagccgcctctttattggctaagctcattcaccccagtcacataattgtctatgctcctggggattcattctcttgctgccgcgatgcaacttgaaatctattgggtataacccatacagtatgaccagaaagtgaaaatattcgtaataaatcgtgaaagcgattatggtaaaacagattattcctgatgtagaaccttaatcgtatcgggaggtaaaccaatttgtaacacaacgggttggtatgcctgctgattatcccaatatgcagcaattttacgggcaaaagcaaaaccggccagaccaccagcaataccacctacacatacccataactgctcagtagtccagtattgactgagcaacccgcctaaaaacagacctaatagtggggttaaataaactagcatagcggaacgtaataaactactttccggaataccaacttcgactttttgccccggttgaagtggttgagcaatctccaactccagttggtggatattttccggccccagtttttccagcaaatacgacccacaggctgtttttgcctgacagctgccacaccccgaagaggagccgtaacgcaataccgcccggccttgctgccaacggacaaccgttgcccattctttaaccatcagttatcccccgtaaatgtgacacttccggcaatctgtttaattgtggcgaaaggtaattcgccaataacagaaatgctgtgtctgccattcgacacagtataaactgttcttcgcccctgtcgatacagtggctcatcagcggcttttgcgccagcatttaccacatttacagaaaaactgaataccccatcactgtacatgatggattccaataattctgtctttgataaccgattccgattacgggaaacttcccgaaaaccttcaggcagcttactaaccttccagttaaatgccactttttcagcttttggaataactaacatcggtggcaatttcaaattcacaatggcgttcaattcctgcttgatatcgtcattcacccttgaggatataacacggaactgttcaacaaccaccattttttcctgatcaaataactcaatcagcaaaggcagataacttttcttgtctatcaataaattataattataacgatcgttatctttggatgttatacgcacgaaatagacaggacgatcgccaacgtgagtcgagcctgcatcaataaaattatagaatttctgtatctgagaaaaatcagcaaaaatgatcggaggcaggtagtctacaatatgattaccacgcaggctaaatgaatccaaacctgattcgtaatagcttatctgatggccacgctgaataatctcacggcgcgtgttatccatttgaataagttgtgcgatgggctgattatcaataataacgtgtcgataacgcagaggaataataaattgctggctcaggttaataaaagcaagttcataaggcaaggtctgtacggaatgccccataccctgtaacaaagcctcggtgctatttttttgctgaaccgaggcttttgataaattcaggaagctcccgaataataaaatgaaaaaaacagtatatttcatttttattacttatttgagattacaggtctttgttctcccgaatgtattgcgttaacctctggcaacccttgttcattttctgcattaatacgccggaaaagttcgtactgctgcaacattgcatcaatacgcttattactttcccgcacctgcgtactcaagtcgccaccaaaagcatcatgttcagcgggaaccgataacccaacaggtgaagcagaacccatcaccggtaatgtattgaagaccgggttatcaagctgagcatcagtgtcagacccattatattgctgaacaccgatgataactgccattgacacacaagccgcaacaccaacctgagttatctgactagcccagggccgggtcactaacgggcggagtttatgccagaacggcaatttctgccacgtatcaggttttggctgagattccggaatagctgctggattgatatggacaggttctttttcaagcgcctgtgccacttgactagcgatatccaaatgtaacacctcacctacatcaccacgtaatgtatcccggatgaggtgatatctttcccactgtttctgcatttcagcatcttcagagattaaacgaacgatttcactatcaagagcttctccatccattaatgcggaaagtttctctctttgcatgccagtacccttcaatattattttgttccactactactgtttccactgctgctggtgcttccactactgcttactgctggatcaggggttgaactttattgtcgatggcttcccttgcacgaaagattcgcgaacgaacagtacccacaggacaatccataatgacggctatttcctcatagctcaggccatcaagttcccgaagcgtaatggctatccgcaaatcttctggcagtgattcaatggtacgaaataccactttctttaattcttctgacaacattaagttctcagggttcgaaatttcttttaatgaacttgacgtatcgtaattttctgcatcattagcatccaaatcattggatggtggacgacgcccctgagctaccaaataatttttcgcagtattaacggcaatacggtacaaccacgtataaaaagcactatcaccccgaaaagaagacagtgcccgataagttttaataaatacctcttgtgcaacatcaggaacatcgccttgaggtacgtaacgggcaattaagcttgccactttgtgctggtatctgattaccagcaaattaaacgctttttggtcgcctttttgtactcgctcgaccagcatttgatccgttaactgctcgctcatccgaggctcactctcctgaggtaaaactccacatttacactgacattacaccagtcatgacactttgctactcgaacaagcatcacctttgagtgttcattacatgtgaagttcaactttgattgtaattttgtgttacaaccaccgattattctgcattgcactttttatttatagtacaaatcatagcctctattcagtggctcactcgattttagattatggaaaacagaaagatttatcccaatcttacgtaaaaaaatttaaggtttttatgaacgataaccctatcaataataaagataaaaatctttcactaactgctgaaactcgtttgaatatgtgccatcagtagcacggatcatcagttcactaacctgtatttcctgcctctgccgggataatcccaacaataaacgatgtaacggcttatccagcctatcacgaatattgagccgataatggggaaaccaaccacattctatcgccattttttcgaagatctttccaatcccataaggaagtaccacacaaaataacccgttaggggtaatcaattgttcaacacagtccaataacccctgatgagtcagtgcttcggtataacgcgcctgattgcgcgcctcattacgacaggcaatggcaggttcgaaatagggaggattactcacaatcaagtcataccggctttcgcttctcacagcaaaatcatgaatatcctgccggtataccctgatgcggtcaggccacggggattgatcgatattttcaatagcctgcattgctgcatcttcgtccagctctacggcatcaataactgtatcgtttccggatctctgggctatcatcagtgcaatcagtccactgccacacccgatatccagacagttttttctattatctaccggtgcccatgtccccaatagcacgccatcagtcccgacttgcatggcacatttatcatgtccgacaaaaaattgtttgaatgtgaaaccaccgcgacgcaaagcgggtttgtgtattaacgtcatgaattatatctgttgaaaaccaaagttcttcatagcataaatcttatgacccgaggataaaagccacacgcacacctgatacttttaacactggtgcatgttatagggtgaagaatgagcctaacctgtttataatcatcggcccaaacagaggtatatgatgactgcgacaaacttttccgacttcgaacttgatgaatgcctgcttgatgcattaaatgataaaggctatgaacgcccgaccgcaattcaggcggcagccattcctgcggccatggacgggcgggatgtattaggttctgcaccaacggggacaggcaaaacagctgcctacctgctaccggctatacagcatttgctggatttcccacgtaagaaatcagggccaccacgtattttgattttaacaccaacccgtgaactggcgatgcaggttgcagagcaggccagagagatggctgcacatactcatctggatattgccacgattactggtggtgtagcctacatgaatcatgcagaagtgttcagtgagaatcaggacattgtcgtcgcaactacagggcgtctgctgcaatatatcaaagaagaaaactttgactgccgtgcagtagaaaccctcatccttgatgaagccgatcgcatgttggatatgggttttgccaatgatgttgagacgattgccggagaaacccgctggcgtaaacaaaccatgctattttccgcaacgcttgaaggcgaaagtatccgtgattttgcggtgcgcctgctgacagatcctgttgagatcgatgcagaaccttcccgtcgtgagcgtaagaaaatccagcaattttattatcgtgctgataatctggcacacaaaacagccttgttatgccatttgctgaagcaagaagacgttacaaaatcgattgtttttgtacgtaaacgggagcgtgttcgcgaattggttgaatggctgcatcaggcaggtattcagtccagttttcttgaaggcgaaatggtacaggctaaacgaacagacgccgtgaagcgcctgaatgatggccgggttaaggtgctggttgcaaccgatgttgcttcccgtgggctggatatcgaaaatatcagccacgtttttaactttgatttaccacgcacagcagatgtttacctgcacaggattggccggactgcccgcgctggccgcaaaggaaccgcaattgcgctgattgaatcccatgaccatccattacttggaaaaatcagtcgctatcttcaggaaccactgaaagtgcgggttgttgacgaacttcgtccacaaaccaaagcaccaagtgagaataaaagctataagccatccaaaaaagtgctggcaaagcgtaaagaaaagaaaaaaacagaagaatcgaagaaaaatcgggtgaaagtgcgtcatcgtgacagcaaaaacatcggaaagcgccgcgctccttcaggaaaccctaaaccagaattgccagaatctactgacaattaacctatcttggtataagcgggctatttgcccgcttgttatcgatattgttctcaacgcattaattcttaattaaaagacaaacaattaagctgaataatatttttccaccctttccttacttaattgcggctgtaaattagtatgctgataggattggctgaataaaacacccagttcatcatcactcatatctaccgcccatgtttgcagtgatgacgctttatttgaagcgataatattatctttgatatcgttacccgcagcagccatcatcacactttctttcccatattctttattatcttctttccctggccacggcctatgaataaccattaattcctgcacagcttccaaaaaatgagccttgaatgaatgtaacgcatagctatagcgcacaatcgaatcgatgaaattttccggcttgtattcatattcaagaagaatctgacttcccatgggctgaggaattggtaatgctttttgcagattatctaaccagtcatgttcaacaatataattccggattaatccctgctctgccatttcacgaccagctcccggtgaccatcccatccgtttcagtgtccagtctgaaacaccggcagaattaaaagtaaccgcaggctttcctgttgtcagagcagccattgatgccagccctcctcccattgagtgcccggtaaaaataacattctcaccaaatgcttttaatgctgattttgccagatctaccgcctgattatattgtgcttcattgtatccaagcccctgacgaatactcgccataaaatcttttatttcgtttgagccggtaaatgacacaatatataaccccttatttcgataaaccccagcctgaaaccctgtagaacgatcatccaaagtatcagggtcaatacccgctttaattagctcttcatctgacatgcgtacatagtcaccaatgccaaaactatttcggcgataaacatcacgggtgacctgagccagtgcataatcaataaattttgaatgttttcctgcaatatcattagcttttaattcaggtgtatccataactcggttttgagaagccgttatcaatgattgatagagcgaatcagcttgtttagtattttctgaacgggaagttattgcgggagaaagttgtttatttttatccagaagtgtactgtcagcagaggttgactgaagagttgcatgatttcgctgtaaagggatagcccctaacttactcaataaactgatatttgtcgccaaagtcat

SEQ ID NO: 3385 - DNA, 29759 bp, Xenorhabdus sp.; identical to SEQ ID NO: 3384
  CDS (13882)..(14280)

SEQ ID NO: 3386 - DNA, 29759 bp, Xenorhabdus sp.; identical to SEQ ID NO: 3384
  CDS (11241)..(12461)

SEQ ID NO: 3387 - DNA, 29835 bp, Xenorhabdus sp.; identical to SEQ ID NO: 433
  CDS (2002)..(2553)

SEQ ID NO: 3388 - DNA, 29835 bp, Xenorhabdus sp.; identical to SEQ ID NO: 433
  CDS (12928)..(13830)

SEQ ID NO: 3389 - DNA, 29835 bp, Xenorhabdus sp.; identical to SEQ ID NO: 433
  CDS (14103)..(14381)

SEQ ID NO: 3390 - DNA, 29835 bp, Xenorhabdus sp.; identical to SEQ ID NO: 433
  CDS (15069)..(16019)

SEQ ID NO: 3391 - DNA, 29835 bp, Xenorhabdus sp.; identical to SEQ ID NO: 433
  CDS (16383)..(16943)

SEQ ID NO: 3392 - DNA, 29835 bp, Xenorhabdus sp.; identical to SEQ ID NO: 433
  CDS (16989)..(18077)

SEQ ID NO: 3393 - DNA, 29835 bp, Xenorhabdus sp.; identical to SEQ ID NO: 433
  CDS (18251)..(19201)

SEQ ID NO: 3394 - DNA, 29835 bp, Xenorhabdus sp.; identical to SEQ ID NO: 433
  CDS (19286)..(20104)

SEQ ID NO: 3395 - DNA, 29835 bp, Xenorhabdus sp.; identical to SEQ ID NO: 433
  CDS (20162)..(20836)

SEQ ID NO: 3396 - DNA, 29835 bp, Xenorhabdus sp.; identical to SEQ ID NO: 433
  CDS (20851)..(21555)

SEQ ID NO: 3397 - DNA, 29835 bp, Xenorhabdus sp.; identical to SEQ ID NO: 433
  CDS (21596)..(22594)

SEQ ID NO: 3398 - DNA, 29835 bp, Xenorhabdus sp.; identical to SEQ ID NO: 433
  CDS (24978)..(26933)

SEQ ID NO: 3399 - DNA, 29835 bp, Xenorhabdus sp.; identical to SEQ ID NO: 433
  CDS (27462)..(29096)

SEQ ID NO: 3400 - DNA, 29835 bp, Xenorhabdus sp.
  CDS (28119)..(29834)
cctctaagtcatatcgacggcggtgtttggcacctcgatgtcggctcatcacatcctggggctgaagtaggtcccaagggtacggctgttcgccgtttaaagtggtacgcgagctgggtttagaacgtcgtgagacagttcggtccctatctgccgtgggcgttggaagattgaaaggggctgctcctagtacgagaggaccggagtggacgcaccactggtgttcgggttgtcatgccaatggcactgcccggtagctaagtgcggaagagataaccgctgaaagcatctaagcgggaaacttgccttgagatgagtcttcccttgtccctagaggacactgaaggaacgttcgagacgaggacgtagataggctgggtgtgtaagcgttgcgagacgttgagctaaccagtactaatgaaccgtgcggcttaacctgacaacaccgaaggtgttttgcggggattgagagcaagacgataaaagtttcagatgaagagtgaccggaaaacagaaagtagccggtgacacagcttgttcgggattgaaaacaggatttgtctggcggcaatagcgcggtggtcccacctgaccccatgccgaactcagcagtgaaacgccgtagcgccgatggtagtgtggggtctccccatgtgagagtaggacactgccagacatcactttgacagagaagccatccttaaccggatggcttttttgcatttcaaatccgaagaaattaatgtgcttttccttgttcaattccaattcctgtctgtgaacgcaagaattgtctgcgaaacatttcgcgttcctgctggccttgttctgatgtatcagtgatagaaaagaaccacgcactggcaaatgccacaatcatggaaaataaagctggatattcgtagggataaatgggtttttcatgtccaagaatactaacccagattgttgggcctaggatcattagaacaacggctattattaaccccaaccacccgccaatgagtgcacctcgtgttgtcagtttgttccagtacattgacagcaaaataatcgggaaattacagcttgctgcaatagagaaagccagaccgaccataaaggcaatattttgtttttcgaataaaatacctaacccaatagcgataatccccagaaaaacaaccgtaattttcgaaattcttaattcatcccgttcattagcctgaccttgtttaatcacatttgcatagaggtcatgagaaactgctgaggcacctgcaagtgttaatcccgcaactacagctaaaatggtggcaaaggcgacagcagagatgaacccgaggaagaaatcaccacccacggcagtcgcaaggtgaacagcagccatattagttccaccgagcaatgcgccagtaccatctttaaatgcagcattagggctgactaacagtattgcgccaaacccgataataaatgtcagaatatagaaatagccgataaatccggtggcatagaaaacacttttacgagcttctttggcatcattaacggtaaagaatcgcataatgatatgtggtaaacctgcggtaccaaacattaacgctaatcctaaagaaagcgcagatattggatcagaaactaatcccccgggactcataattttttggccatttgagtgaacggcaatagcttctttaaacagagtattgaaattgaaatttacggctttcatgaccatcaacgccataaatgtggcaccggccaataacaggattgctttaataatctgcacccatgttgttgccagcattccgccaaacagcacatatagaaccattaaaatacccactaaaactacagcgatgtagtaattcagcccaaataacaactcgatgagttttcctgctccaaccatctgtgcaatcaggtataaagcaacaacaaccagtgagcctaccgctgataatgtacggattgggcgctgttttagtcggtaagaagcaacatcagcgaatgtgtagcgacccagatttcttaatcgttctgcgattaggaacaaaataatcggccagccgacaaggaaaccaatagaataaataaggccatcataaccagaggtataaaccagtgctgaaatccccaagaatgatgctgcagacatataatcgcctgcaatcgccataccgttttggaagccagtgatccgcccgcctgcggtatagtaatcagaacgtgaaattgtccgttttgatgcccaataagtgatgtagagtgtgaacccgacaaataacaggaacatgataattgcctgaatatttaaaggttgtttttctacattacctgaaatggcatctgcttgagtgaggatggggtagagggaagaaaataacgcaattgttgataggacaagttttctcattttctcacctcattgagaatagctgaggttaaacgatcaaattcaccgttcgctctgatgacgtaagtccccgttaatataaaagaaataaaaataataccgacacccacgggaataccacgagtcatgctggagccctcataaagaggagtgccaagccatccaggagcaaaagcgatgaggaaaataaaaccaacatagagtattaacataatggcagataacaaccatgcaaagcgcccacgcttttcaattaactctttaaagtgagggttgttttcgatttcttgataaatatcggtactcatcaggcgatctccttttaggtattaaaggacgaaccttaaacaacattaagggttgccagatacggacagcaacattcgagagaatgcatgactatctgccacgtccctgaacagttctgtatttttgatgatgtttaccaagccgccttgcggcggcgtgcatgtgtactatatgtgccttatagcatgtacattaaggcatcattatggattgcttttcttccaataatttttccacaacgccgggatcagccagagtggaagtatcacctaagttgccagtatcaccggaagcaattttgcgtaaaatacgccgcataatttttcctgaacgtgtttttggcagagaatcagtccagtgcaggatgtccggagtcgcaattgggccgatttctttgcgaacccagcttctgacttctgcatacaaatcaggagaaggttcttcaccatgaattaatgtgacataagcataaattgcctgccctttaatacggtgtggtatcccgacaacagccgcttccgcaattttgggatgagcaaccaatgtagattcaatttctgcggttcccaatcggtggcctgaaatattcagcacatcatcaacacgaccagtaatccagtaataaccatcttcatcacgtctggcgccatcaccgctgaaataaacgcctttgaaggtagaaaaataggtttgctcaaaacggtcatgatcaccaaacaatgtacgagcctgccccggccatgaatcggtaatgacaagattaccttcactctcgccgcttaaggtttctccggtattatcgactattgcaggacttacgccgaagaatggcaatgtggctgatccagctttgagatcggttgctccgggcaacggcgtgatcatgaatccacctgtttctgtttgccaccatgtatcgacaataggacatttactgttgcctattttcttgtagtaccattcccaggcttctggattgatgggttcacccactgaccccatgatgcgtaatgatgtgcgtttggtgccttcaatggctttatccccttctgccattaacgctcgaatggctgttggtgcggtatagaggatattgacctgatgtttatctacaacctgacagagacgattcacatcgggatagtttggcacaccttcaaacattaaggttgttgcaccacaggagagcgggccataaagcaagtaactatggccggttacccagcctacatcagctgtacaccagtaaacttcgccagggtggtaatcaaacgtatatttgaatgtcaaagatgcatagaccagataaccaccggtggtatgtagaacacctttaggcttacccgttgaaccggatgtataaagaataaataacggatcttcggcattcatctcttcagcagggcaatctgaactaatctctttggttaattcatgccaccagagatcgcgtccggtatgccagtttgttgcattatcagtacgtttgaagacgacaacattagtcacatttgtcacagccggattgcttagagcttcatcgacattttttttcagaggaacaactcggccagctcgtaaaccttcattggctgtgatgattaacttcgcatttgaatcgataattcgaccggaaattgcatcaggagaaaagccgccgaaaattacggagtgaatcgcgccaacccgggcacaagccagcatggcgacagcagcttctggcaccattggcatataaatagcgacaacatcgccttttttgaccccgagttttttcaagacattggcgaactggcagacatcatggtatagctcctgatacgtaacatgtctggattcagccggattgtccccttcccaaataatggcagtctgatggcctcgctcctgtaaatggcgatcaaggcagttcgcacttaggttaagtgtgccatcttcaaaccatcggatactgatatgcccagggtcgaaagaggtatttttcacctttgtataaggttttatccaatcgacaattttacctttctctccccagaaccccttaggatcctgtagtgaacgttggtactcttgcaaatattgttgtttgtttatcagggctgtttctgcgatgtcagcaggaatagggtgcttaattatttgagtcatatttttatctccttgcaattgttaatactatgtcaaaacaaggttaactaaagtgtaagaagaatttttgtttcttttttgcgcggaagatcacgcaatagagataatgaatgttatgaagggaacatttaatgcggtgtctttatgtaaaatataccgttattcataatctcatttttgggaaaattaactaactattggattatattcggttatttattcttatttatagattaaacacaaaaggaaaggaaaccacagtgataatatggaattgataatcattttcattaccgtttgattcactataataatcctgttgcttacaaggtgtgatcttcatccccaataaataaagggtgtatgtattttaaacaactggagatttaatatgagtcattcattaccttccttgccttattcttatgatgctctggaacctcactttgatgaacaaacgatgcttattcatcataccaaacaccatcaaacttacgttgcaaataccaatacagcactggaaaatttccctgaactcgctggtctggacattgatgatctggttcagcagcttgacaagatcccggctgataaacgtacttttatgcgtaataacgcagggggtcattcaaatcacagcatgttctggaaggggctgaaattagatacaacgttatctggtgctttaaaagcagcgatagaacgggattttggcagtattgatgctttcaaaacaaaattcgaacaggcagcagcaacccgttttggttctggctgggcttggctggtactgaaagaagacggaaaacttgatgttgtttctactgcaaatcaggatagcccattgatgggacaagaaatttccggtacttccggttatcccattttagggctagatgtatgggaacatgcttactaccttaaatatcaaaatcgccgccctgattatattaaggcattttggcatgtcgtaaattgggatgaagcagcaaggcgttacgaagaaaaaattaaataatagctattatcttcatctttcaaaaagtgctgatcataaccgtggtcagcatttttattggtcataattttcgctatcattcgattttttcttgtttcgcgattaaaggcacataatgaaaaagaacgctgtcataacgattacaacccttatagtatcctctctactaatgtctggctgtgcacagcccaaaacaagtgccgaacgtaatgccaagcattttgtttatgcttctaatgatgattttgaccccaatttcagaactaaaatctacgatagtatcgagctttcagtaccattttttgaacaattctggcagttgggtaaaaaggatagagaagcaggagtgtcccctgaagaggcgcagcaacgggtaatttatttaaaaggtgatgaattcttgaattcaattcggagaacatcacattttgagggtagagtttatgagagcagcgaaggcccttcactaaagtggcgtaaggcaatgtctgaagctatatctgctacttatttggatggttatgaaggtcggaattaaccgcttgttttactgactgtctgttcattatttgtttattgaggagaaatggaaatgtattacccgcagatatatagaggaaaaataatctcctccgagaaattgggttcctctgcaatcaataagctgctggtaaatggcagtttacagcttacttctttgggactggaaggtgatgaacaggctgaagcccgctttcatggcgggccagatcgtgcactttgccattatccgatggaacattatctattttggaaaaggcaatttcctgaattaatggaattatttgtaccacctttatttggtgaaaatatatcaacggaagggatgacagaagagagcgtttatatcggagacattttccagtggggagaggcaattattcaggtaactcagccccgttcgccttgttataaacttaatatcattaccggtattgagaattttgctgccatcatgcaggacagaggctattgcggatggttatatcgtgtgatctcttcaggtgtaacctgtgcgggtgaaccaataaaacttctcagtcggaatagtgatgtttctgtgaaagaagccatttccattgctttccatagcctatttgatgaagaacaatatcgtcgtttaatgggagctgccgggctatctgccagctggaatctcacgatgcagaagcggatattacttggaaaaatagagagttttagtcaccgcttatttggaaaataagtaactttctatttttaaacagatattcaattggttgttacttaagccatgtatatatgccaaagggtcagcgttaataaccctttgacatgtaaccactattacggatgggtaataaacccaattgcttcataaaccttattcagggtttcctgagcacgagcctgtgcttttgctgcaccttctgccatgacttggttaagcagagcttcatcattacggaaatggtgataacgttcctgcaagtcaaccagcatttcacacactgcgtctgcaactgcacctttcaggtggccgtacatttttccttcgaactctgcttccaattcagggatggttttgcctgttacacctgacaggatatccagcagattggaaacacccggtttgttttccaaatcatagcggacaagaggtggctcttcggaatcggtgactgcacgtttgattttcttggcaacagatttcgggtcttccaacagagcaatgacattattgcggttatcatcagacttcgacattttcttgctcggctcttgtaatgacatgacacgagcgccttctttcggaatgaaaggttccgggatcgtgaaaatctcaccgtaaagagcattaaaacgttgtgccaaatcacgagtcaattcaaggtgctgtttctgatcaatacctacagggatctgattagcctgataaagcaaaatgtcagcagccatcaagacaggatagttaaacagacccgcgttaatattttcagggaaacgggcggacttatccttaaactgtgtcatgcggctgagttcgccgaaataggtataacaattcagtgcccaggctagctggttatgctgaggcacgtgtgattgtacgaaaatagtgcttttctttggatcgataccacaggcaaggtaaagtgccagcgtatccagcgtgcgttttttcagttcttcaggatcctgacgtacggtaatactgtgctggttaacaatacaatagatgcaatcatattcatcctgcatctgaacccactgacgtaacgctcccatgtagttaccgatggtcaattcaccggaaggttgtgcgccgctgaatacaataggtttctgtgtttttggtttcgttgctgtgggttcgttcattttattacgcttcctgtaagttcaaagttggtaatccaattgttggtagtaaatccggaaaattgtctagtacataatccgggtgatttagtgctatcgattccccatagttatatccataggttaagccaacacaagggcagcctgccgcctgtgcagccaaaatatcattacgggaatcaccaacaaaaagcaattcgtctttatttaaaccaaacatgcccattgtcagatacagtggtgccgggtgaggttttttctgtttaacatcgtctcctcccagtaccagtgaaaagtattgactgataccaagagattccagtaatggagcaataaaaggtgtcggcttattagtaataatcgccatcggcaggttgtgttttgccagctcagccagagtttctttgacatgaggaaacagtttgctgcccgtcgtgacggtagtttcatagaatttatcgaacagactgcgggtttcactgaacagttcaggggaaaactctccgacagcccatttcagggcacgttcaaccatgatgtccgagccattacccacccacacagcaacgcgttctttgcctgctgcgggcagacctttggtgagcaaggcctgatccagagcatctgccagcccaccggcgctgtctaccagcgttccatccagatcgaatgcaatggcctgaattgcttgtactacattttttttcatcatgttgcctgtcgttatgccactgttgataactcactgcgcatttcatcaatgactgctttatagtcaggctgactgaaaatagcagagcctgcaacgaacatatctgcaccagcctgagctgccgcagcgatgttgttggctttgataccaccatcaatttcgagacggatatcatagccgctttcatcgataattttacggacatgacgcaatttatgtagggtttccggaatgaaagactggccgccgaaaccggggttaactgacattaataaaataacgtcgagtttatccagtacataatccagatagctgagaggtgttgccggattgaataccagaccagctttacagccatgatctttaatcagctgtagtgtccggtgaatatgttcactcgcttcgggatggaaagtgatataggttgcaccggccttagcaaaatcggggataatgcgatctacaggcttcaccatcagatgaacatcgatgggagcggtaataccgtaatcgcgcagtgcctgacaaaccatcgggccaattgtcaggtttggtacgtaatggttatccataacgtcaaaatgcacaacattagcaccggctgccagcacttttgcggtatcttcacccagacgggcaaaatctgcagatagaatggatggggcaatcagaaaatctttcttcattattctcttctccaattcattgtttatccccgttatttcaggggcaggaaacctcaatcacttctggcagtataacgccaaaagttcatcaactttactgcgggcaagaatatttctacttattgtccggcgggctttaacaatgtaaagggaagcatgatgataccattcacgtgtcatcggcgtgtcatggttggatatgagcaccggaataccatgttgagacgaaagattataggcaagccgcgccagattttcttggtctgtcaggttaaaactatttgtatggtaggctgtaaaatttgcggttgctgaaaggggagcatatggcgggtcgcagtaaaccactgagccttttgggacattagttaatgcgacttcataatgctggcagataaaagtagccttcttagatttttcagcgaaccaatatagctcatcttccggaaaataaggttttttatagcgtccgaaaggaacattaaactcgccgcgtaaattatagcgacacagaccgttatagcagtgacggttaagatacagaaacaacacgctgcgatggaatggatctttgcttttgttaaactcttctctcaggcgatagaaggtttcagacgtattgtatgctggtgaaaataagggacggacatgatcaataaactcatccgcacgaaattttaccgtatcgtacagattgatcagatcactattgatatctgataagagataagaatcataatcggtattcaggaataccgagcctgcgccaacaaatggctcaactaagcgatcgccctctggcagatgacgtttaatatcatccaccaaggggtattttccaccggcccattttaagaaagcgcgtttttttttcatgccgtcaataaagtattcaataatttcagagccgcagattgtactctgtttaggacagcatatcagcgcctaatcaaaatagttttattttttcagatcttgatgaacctgttgtagttttcttacccagggtttttgtgtccgaacgtctacagggagtgaggcaatcgcttttttggcgtcagaagcggaattgtagctaccgtagatcaaaataaaccatgtcttatcattacgtttagtttcataaactttgtaatgggaaaggttattctttttcgcaaaagcaatcaaggtatccgggcgactggcgctgcttaactggagtgtaaaccgatttgccggtactttcagtaggtcttcaccgatacttgccgtactttgcttatttgtctgatggtcagtcgttgcaggtttcgtggctaccttatgttgtttttcggttttttgttgttcaaccggtgttactgtcgtttgctttacacggctctgttgtggtgtcggttgtgaggatggctggttttcctgttccgtatttttttgtaccacattgttgatattgctctgttgctgatttaaagcatcagaaatgtcaccgggtaattcgatacgttggttatagccacccgttccgctggtcggggaaatactctggctaggggtactgctgattggcggcatgccgatttcatgtggatggtcagtggcagaagttgcagatgtggatggtgcttcctgtgtgctattttgctcattgtcggaagatgatgaagtgccggataggttgatacttttctcgactgaatttgatgactgttgcttttcatgttctgttggtgatttcagggcagaactgatagcgataatgagcagtaaaagcacaaggataccaaccccaatcatcatttgttgacgggatattgccagttttggattctgcttctgggggcgtgatcgctgagggggacgatcagatgtatcgggtttaaactcgttttctgttttttgtttattttctgattttaattcgtccatatgccctcccagctgagataatattaccaattgctatgtgactaataacggagtgataggtttggcggcctgacctaactgaaactgttcacattatacccattatttgaaaaatctatcggatatatctatcaatgtagctattttatagcaaacagccagaaaagtagggatcattcactacaacgtcggatggcatctaatatgatatcggtgctgatatcagaacgaagttctgctttcccgatagctgtgggtaataccagacgaagcttgcccgcagtgacttttttatcgcgcatcatatgaggtaagtaattttcaggaggcatttctgaggggccatgtacaggcagttttgctctttccagcagactgatgatgcgctgtgtatcctgaccggagaatgagccaacaagttcagaagcccgtgcagccatgaccatcccagctgcaactgcttgcccgtgcagccagactccgtatcccatttcagcttcaatcgcatgcccgaaagtatggccgagatttaataaagcccgcatacctgagcgttcatgctcatcggccgctacaacaagggctttcagctcacagcaacgacggatgcagtaagccatagcctgatgatcgagatccaataatttttcaatattgctttcaagccagtcgaaaaattcaccgtccaggatcacgccatatttgatcacttcagctagccctgcatatagctcttgggctggcagagtatttaagcaattgagatcaataaccacagaggcgggctggtaaaacgccccgatcatgtttttaccgagggggtggttgactccggtttttccaccaacagaagagtcaacctgagaaagtagagtggtgggcacctgaatgaaacgggtgccgcgctgatagctggcagcagcaaaacccgtcatatcaccgatgacaccaccaccgagagcgataagcgttgtgtcccgagcatgattattttccagtaaggccgaaaatatatcattgagcacaaaaagtgatttgtattgttcaccgtcaggtaagataacttcattcacccgaaggcccatattcagcaatgtggatttcacctgttcaagatacaggggagccagtgtttcattggtcactatcatgacctgctgaccagattgcaggggcctgaatgcttcactgctcgaaaacagcccttgggcgatggtaattggatagcttctttcacctaacgtaacaatcacttgttccatatcagctttcgccttattttttgcaacggattgaatctgcggaaattaatttttttccaataattcaataatttgattagctacaactttggcgctttgctcatctgtacgtatagtcaggtcagcaatttcctcatacagaggattgcgctcatcagccagattttctaaaacttcacgtgctggtgcatcaacttgaagtaaagggcgttttttgtcgcgctgggtacgagctaactgtttttcgatagttgtttctaaatagacgacaacaccacgggcagacagacgattgcgggtttcttttgacttaacagacccccccccagttgccaatacaatgccttgtttctcagtcagttcgttaattattttttcttcgcgttcacggaagccttcttcgccttccacatcgaatacccagcccacgtcagctccggtacgtcgctcaatttcttgatcggagtcgtaaaactccatattgagttgctgagctaactgacgaccaatagtgcttttgccggcacccataggcccaaccagaaagatattgcgtttctctgccatgtttttggtattactaagactatttgttaatgataacccgccccgccaatcagattagccgcgggacctaaactgaaacctcatgagtgaaatgtgagatcagatggaaaaattatctcagcacatcagcctatattgcaactatataaatcagcacgaaccgattgaatcgggttcatgctttttttctggctgactgtaaccctacccatgaatattttggtaggcttttgctggtaatgagagacctgctcactcaattagataatccttgtatgctaaattgctctcagcgtcaaatccataaacaggtcagaccaaggaaaatggctgataatcgggcgataaaatcacatataccgcatttaactaactgataagtatattcatatttttgtgtgattaaatatcagtcaattgaggtgtaataaaaattacgagctcccttcggctatgtcgttctccctgttggttaaataatgctcccaatataggaatttctgacaagtagggcactttttgcagactggcgccttttttctgttgaaaaataccgcccagaataagtgtttcaccatttctaacggtaacttgtgtcattatttcttgtttatcaatcgccagattttcatttccgccctgattaatgggaaggccgggcgcattctggctgatcttgagtattaaccggatttttccgttctttaaaatatgtggagtgacttccatccccaatacagcctctttaaactgaatcgatgttttatccttattctgtacgatataaggaatatcagaaccctgtttaatactggcaggttgctgatgtgaggctgtcagtcgtggactggcaatgatatccagttgattttcttgttctaatgcactgagttccatttccagcagagtggcatggatacgggctgcattcagcactaaacgatggctctggctacccgcaggctgatgcaggttcaggcggttaaaccccagagcccgatttagtggatcggcggtcataccccagtgaatacctaattcatgcagtgcttctctactgctggtgacgatatgcgctgtaatttgtacttgttgttgtggtgtgtccacttctttcagccagtttttgatgcgagtaatagcatcaaatttatcttctaatatcagactgtttgttaaagcatcatgttctacttttccccattttgtcagcaaggcaggggtatttttttgcaattgttctgttatttttccggcatcggcgtattgcagggtaataacctgatattcgatttcctgatcatcctgttctgactgatggaactccgttgcttcatttgccgtattttcattgatagggtcgtgtggcggctggaaaggatctcttacatttatggaaaaagccgcttcttccggttcagtatcttcagcacaactgaaaaaggataaaaacaagagtaccagtaaggtgtaaacacaattcttcattgctgcttttcctcataatttatattttcctcatgactcatatctgccagtaccatgcggacggtcaggctattatcgtcgggagtgatagtgaggtgtttaatcagcaataagggccgtaactgctgaatttcactcagaaagcggagtaattgctcataggtcagtgacaatatgatatgccataaaacctgatgaccttctttgtggcttttccattccatcagttggctgccggaacgggttaaaggctggtggagccgtttaagtaccgtcgttttcggggatgatgttatgtgactatttgagtcgagattagcggttatctgttggagctgctggtgaagttcggttaagtccggtagttcggaaaaacgggtttgagataatgtaatatcatttttctgctctgctattttggagcgaaaagaatgaatggcatctttattgccctgccagacaaaaaaatagaaccccaaaataagaggaacgatcaccaattgctgtaataaaaataattgccatgcagggcgaaataaccacaccagataattatttttcattattgttccccattaaccactcagcatcaatggtaaatacccggagagagtcttcaggtgtcgttgtcatttttttcagttggacattgataagtgaaatattgcctgtcaggttatccaataaatcagaaacatcttcataactctggctattagcagcaaaaaccaattggccggaatcatcactgaatgtggttaaccagcttttttccggtaataagtgaggaagctgacgaaatagctgtaaatatcgctgattctgctccatgaataactgttttttccctaatttttgagccagttgttgttgctgatgaacagcctgttctgtttcactgatagtttgttttaattgcgcaagttggtggctattttcagtaaattggttctgatattgtccaatttgttgtttttgctctattgaaatgattaccagagcggcaatccacaggaacagttgcaacccgagaaacagcccccatttatgacatcgacgtttaagccttgcctgtcgccagggtagaaaattcacctgatgcatcattggtcatccggtcgtagtgctaatcctgccgctatcatgaaagcacttatgttttccggtattgggggctggtaatggcaaaatgctgacagtaggtgccagacctgaacagattctgctggcgccggctgctgctttacccgaataaggctggtgggttgttcattactgtaataaatcgggtaattttccccatccggagtaatgggaagctggttaatgacctgtgtcagactggcatgtgactgggttgatatcagcccataactgaaaggcaggctcgccggggccagccatagccagtcagtttttcgttgatgaaccagccagctgttaccggaaattccggcaagttcggctacatagcgtaatgcacagggggcaatatcgatggcatcgggtgataaaccgacttctgcgagcaggctgagccagaaattaaggtctttttggcgggtagcacttatacagatttgttgcccatgtacccgataatcgagagccagatcagtggtggggaattgcttttcggcattagcacggacaaaccaaccgagttccggctcctgtaatgagatgtgctgaggcagaggaatttgtttctgtaatgtttgttgaacaggtagtgccagccttaatttaaccttgttaggtaatatttgccgccactgcgttaaaattttgcgtaatttttctggatactgtagccatccccctgagataggggtgtttggtaccttatttaataagggagtttcactaaataaagatgtttcattaaataaagagtagtgccagcagtgccggaattgccagccatgacggcgtttagtggcggcaagcgcacgaatgtaatgattatggatatccaggccgatataccatgtagctgggtacatatagtgatttccttatcagtgattagtaattaatgaaaggtcatattcatcgtgttgtatagcctttatactacgtactaatcgtttataaactgcctcattaacatggcgtgagaaatttcaggtgaagttcataaagtattttttgatccttgtcgttttttgcattttcttgggaactgcctcgatttttggtttgtacaaatatatcgagccacagttacctgatgtcgcgacgttaaaggatgtccgattacagacaccgatgcaggtgttcagtgctgatggcgaactcatcgctcaatatggcgaaaaacgccgcataccgcttaccctatccgaaatgcctccgttgttggtaaaagcctttattgccacagaggatagccgtttttatgaacaccacggtgttgatccgataggtattattcgtgctgcctccattatgatgacttcgggacacgcttctcagggagcgagtaccatcacacagcagcttgcgagaaacttttttcttaccccggaaagaactttgatacgtaaggcgaaagaagtatttctggcgattagaattgagcagatgttaaccaaggatgaaattcttgagctgtatctcaacaagatccatctcggttatcgtgcgtatggtgtcggcgctgccgcgcacgtttatttcggcaaaaacgtgaatgaattgacactaagtgaaatggcgatgattgccggattgccgaaagcgccttcaactttaaacccgctgtattcttatgagcgtgcgaccaatcgccgtaatgtggtgctgggtcgtatgctggaagagggctacattactcagcggcagtattatcaggccagaagtgagaaattagttgccagttaccacactccgcagattgcgttttctgcaccttatctgactgaaatggtcaggcaggatctgattaaccgttatggcgaaagtgcgtatacggatggttataaggtctataccacggtgacacgcaaaatccagctggctgctgtcgatgccgttcgtactaatgtgattgactatgatatgcgtcatggttatcgcggtgctcaggaagtgttatggaaggcaggtcagcttgcatggagccagcctaaaattatcgataagctgaaaacattaccgaaatatggccccctgttacctgcggttgtcatgaaatctaatgccacccaggctgaagtgatgctgacagatggcagcaaagctgaactgacgatggcgggagtccgctgggcacgtcagttcaaaactgacagcctgcaagggccggcaccacagagtgtggatagcgtaatccgggctggtgagcagatttgggtcagaaaggtcaataacgtctggtggctggctcaattaccggaagtgaatgcggcgttgatctccattaacccaataaatggtgcggtagaagcgttggttggtggtttcaattttgaattaagtcaatttaaccgcgtgactcaatcattgcgtcaggttggctccaatatcaagccattcctgtataccgctgcgatggataaagggctgacgctggcatcattgctgaatgatgcacctatcagccgttgggatgccggcgcaggtacggactggcgtccgaaaaactcgcctccgacctatgatggcccggttcgtttgcgtcagggactggggcagtccaagaacgtagtgatggtgcgagctatgcgtgcgatgggtgtcgattatgcggctgactatctgaaacgctttggcttaccgggagagaatgttgtccgcacagaatcactggcgctgggctcaccttctttcacaccaatgcagttagtacgcggctatgcagtgatggcgaacggtggctatctggttgatccttacttcattaacaaaattgaggatgatgcagggaaaattctgtacgaagcgaagcctaaggttgcctgcccacaatgtactgatattccggtgatctacggggatacaacgcgctctattgagctgtctgaagattcgattgagaacgtagctcattccgatgtttcccaaaaccccgtgttactaccacagccggatctggaaagtgtcgcgcctaatctgtacgttgatgatcagcaatatgctccgcatgttatcagtacaccgctggcatttttaatccatgatgccctgaaaaccaacatctttggtgaaccgggctggatgggaacgggttggcgcgccgcccgcgatttgaaacgtcgtgatatcggcggtaaaaccgggacaaccaatagttcgaaagatgcatggttctctggttacgggccggatatggtggcaacagtctggattggttttgatgagcacagcagaagtctgggacgtactccggctctgaaaggagaaggtggagcgaaaacggctcagccaatctgggatgacttcatgaaaatggcattagaaggagtgcctgaaaaactgatggaggctcctcaaggcattgtgtctgtcacgattgatcgggctacgggtaagctctctagcggtggaaaaaatacccgttcagaatattttattgagggcactcaaccgacagaatattccgtaccagaggcgggtacgactgtcatcgagaatggtgaaagccaagaactgttctgatcagttttagatgcttgtattgcaggtattaaaccgagataaaaaggctctgtcaggaaactgacggagccttttgttataggttatttatcaatttttatagcataagggctatttatttattttatctttcaccgcttttgcgaatggtttgccgccatccacagcggtgtagtgaatatgaatattgatatctttcaaccgccacacaggaacaagccccggataataaaatatgttatcgatcacatcctgatcagggaattccagtgtccaggtggaaatagcgcctgtaccttcgaacggcaggtaacggtcatcatcaaacatcagggtatatagccaattctctttcgccacactgccatcatcctcactcaaggaagagagggcgatttgctgttgagcgcgcagattattaaccacatttttgctgttaccggctttcctgtttggatcatagagccagttaactccttccatatctggatgggttaaggtagaactactggtttgggtcaggatcgcactaatctctgatgacaggacagagccaagattcagagtatccagagagattgaaacggaaatccgtttaatctgacgcagataatggccgggataattgtcatcaaacagttttgaattcagggtaaagctgatggattgtttattatcgatctgttttcttaacccgccgctcgtcagtagtgaactgagggagaccgttttcttaatattcaaacggcgctcattgcgctgtaaccatgtgttttccatttgaagcagatccagctgtaatgattccccagccagtagcccacgataagagtcgttccatgccgtcgttttgataaagccctgacgtttgtaatctccgacttcatagcgccagctactttctgccatcagacacatggagagaactgcgtcataagccggagcatacagggcagcaagacgccccatcagccattggtaggtgggaacgatcaggaatccggtggtcataaattcatacagctcgcgggctgtggattgctgagcctgagcttctttcagagcaatctgggcactcttaattaacagatcctgctctttcaactgcatctcaatgatattgatttcgctttgagcctgcttgtattcaatttcccaatcctgacggcgacgttggtaatctgcgccgtcctgcaacctttcggcggcaatatctaatccttccgcagtgagttgtgcgatgatagccgccgtggtgactggtgctgaatatttagcccctcccattgccataccaaaaatgttggggacaacttccagtgcggcaccagtaacgtagaaaggagcggcagccagtttggcaacttctgacatggttttcatgctgatggcggagatttccaaagaagaaaggttttcttcatacaggttgtgataatgatcatatctctcctgagccattttcttgctttcttccagtgttgccttacccatttgggtcatctggacagcctcttgttgcagttcaatggcaaattcagacaacctaatcaattgcgattgttccagtacctcttgctctgcattgacttcgctttctgtcgcctgaagtaatcggtgtcccatctcagttagttgtttcacggcgtcacaggcgcgttttaacatgattgggaagcgatatggcggaatttgctgctgcatgttgctgagggtgctggtggcataccctgtatttctctgcgttaaattatctggattggcagcactggcataaagtgacaacgatgatgctttgccatcaattgtcagcccatgacgcaggttatacagcctatttttcagtgtttgctggagttcgatgagttgggtattgaaaggagatataaataagctatcaatagcccgcacattcggtttaaagctcgtttttatcttgtccagagtgacaggatgccagcgcgttgcatctatgccttctggtaatgccccgagcaattgctgcgcctgttggtaaagtaaaccggcctcgttgaggctgtctctggtcagttgccgataaaggtaatctccctcctgcatccaaagtttgatgaggtaatggaatagggatttctgataatagacaggctggctgtaagcgactgtatccggatcgatctcgttgaatgatgatggaagattactgccactttcaataattgggcgagaattccacatccgaatgccgccataagggtcaaacagatagttgataaaccaacggcgtgaatcgtagaaacgttgttcgtcaccgagtcgggctgaaaccagatatggaagatggaagaacagttcccagaaatattgtccattagccccgttaaaatcgactttggttagtgatgatttgtcatctaaggcgggttcgggtaatgattgggagtcccatgccagaactcgttctatagattgagtagcccttgcaactagctgcttgccaaatagtgtgtttaatctgatggcggtggaattgaatcctaatgttttgatatcgagatattgtgcctgttgtttgcttcgctgcaatgtgatggaggggattttgtcgctttccccgatagtgacctcgtatacattctcgacaaatcttgaggtgtcttctggattattttgatccaacataaaaattgaacctaatataaaataatattttttagtgtttggcttaagagaaaattgtatttctcccgttgacgcctggccattaagatatacttcttggccaaatagtgatttttcttgtggataagttcccataacaaaaaaagattttgcaaacttttcatttttagtctggtattgcttactggcgatagaagtgttgtttccctcaattgagattgagagtttcttgtcatttttagcatcccattgaatactttgttggaatacttttccgctaacccatgaaagatcacaacttttaataattttattttctttccactcattgggtaataactggaaaagttttgtttcgccataacttatagtgaatacttctgttgggatgttttgccctttccattgaaaattaaaggtcttaagacctgtgtcactggccgatatttgagcttcaatatgaatgtcatcagtattgattacccattggagttctttggtagggagtttattggaattaactgacgcagcctgattattagtgtcaaacttgattagcgagttcttacccattaatagaagtttggttttcgttggatctaatctgacatctaaagtcagtattggagatctaaatggcttaagattaaagaagttatgtttggtttttgtctcaatttctttaacagttacaaatttctctgtaccagcataatgatgttgtaaggtatcaggattgttaaacagtttataccacgtttcgacaatcttcctttcatcatcaagcgtctttttatctactaataataaatctcgtagctccagataataatctttgttttttacccatgtgctgctgtctttttctttggtgtcgtataacagaactcccatccagggatcttcttcacgttgtacgtctaccattgcgattagagcgggcttgtatttttcatccttcaaataatggttttcattatcagggatccgcttaccgtctttagttggatattcaccgttagcatcggtgccatccagacggaataattcgttgggcgcactccattccccattgctttgcttgaaagtaaattttacgttgatagcacggtaatctgtgggtttttgatctgctcccattagcggtgtggcttcacgttcaacccagatagcatattggcgaccagaaatcacaatgggccggattgccagtaaggtgcctgataaagacagagtgattttttcccattcactccatgccagtgggctaatgatgttattgctgtcacgcaaactgatatcaagcgttcgccagtaatactccactggttcagaattgtttttgccaataaagtggtagcgatcactcgtgggatctgtgccatcaatatagccgctgatgagttgaagattgctgatccgttcaaattcggtgagataacgcagaatagctgtttgcagcatatcgttatttaaacgggactggcccaaatcattttctaaatcattaaatgcctttgttttacgtaacctgcgtgtcgggtcaataaagttttccgggaagtttctttgccgctgccagacctgccagtggctatattgactcagatagcgattccagtattcaattctttcatcagtgatgggaatggcatcatatccagtctccagatgagagaagaggcggaataaatagcgttgcaaactggcaatagcgaaagctacccggctggtatcaacttctgcggctacctgtatatcagtcagaaaatagtttgaaaggtcttcaatggtgacgatatctgacaatgaatcatcagaaggtgcccagcgtcgtaaaaggtaatctaccagtgcatcacgccagagttcattgagtaagccttccggttgggattgatcttcggggttaatagcggcaaataaagcactactgacctgatgccagtgatcataaccggatgcggtgctcagtttagccgcatctaatagcggctgaactgatatttcgcttttctctgctagtgcttttagccgcatcacgttactgatgccgacaatattttgtgccactttcggcgtaaagtattgtgttacccgaaggatttctttatctgaccagcctatcaattcagccagattagcggccgcctgttctacgctccagacgtctgtggcaggtgagttttgaccgatttggttggcctgacgcagataataaataacatcgtcttccgttttattctcaggtaataaattcagccagtcgctatagcggctcaggcgatgaaggaaggtcagatcaagagcgcggagtttgccatctttttgcagtttgaaccaatccggatggtcaatcagggtttctatgcttttttctgtcagtttgaatatattacaaatcgtggagtaacggctgagatcgtaccatgcagcaacagctttatctttgtgttgttgatcacctaaattgcgggacagtgctatggtattacgcagaaaatcagcttgtttgttgtttgtccagcgtaatagcggtagggaaagcgtattatcgatgtcaaatacatgattaacggcgttaataatcagatcttgctgagcaacaaacgcattgataagtaatgtaaccagattttgtgtccagatatctccctgttgtttccatgcggcttcctgagccagatctttgagtattttattcacttcattgaacagtgctttttcaccaccatcattggttgaaataacactgtccagaacaataccgaattgtgtatccaccaatttggcgagcgctgtcatccaaatgacggatgtgtttttcgcctgaaaaccctgcatggcagaagcgattttatcttcactcagtaatgcattgtttgcactgggaataatggatctgatttttttaatccaatcaatattttcaatatctgcggtaacattaccgccagactgataaggtatcagcagcaggttaagggacaggggagatagcttatgttgccttatccattgcgcggcattcattacagcgatcagaatatcgagaatatcaatggctttagcatcgttagccaataccggaatacctgccagttgttgcagatagttcgggttatctcggttcaataataacaacagccccagactttcttttactgacatacccagcaggcgcggtaaggcaaccagacggtacagggcggaaaccacatccagcgaacgtttgggtttgctcagattctgtgcctgcataacgaaagaaagcaatatttggcaggttgcatcatcaatattcaatccccggcataactgattgacagttaatgcatcaatgccttcggtcgcagcgggatcaaattctttatcatccagaaccagcacaaatgaggaagatgcctgttgtgacaatcccggagcattgaaaagctgatcaaagaaagagagtttgttctcaagagagtagggggttacttggccgataaaagcggcaaattgctctgcactgacgttatattcctgctgaaaatgcagaaatacccccaacgtgcgcagagttgcttctgttattaaaaactcagtctgtttttctgctttacttgctgttaccaacaatagatccagctcttcatagctgagttttaatgctttctggatatgaaggaaacgctgaatacggtcaaagttatcgttactggcccctttaatccggataacatcttttgccgtgtctttatcttttgttttttccagatagagagcgggagctttacctgcgttgatataggaagccgcatagttggcaccggagggaaattgtttatccgcattatccggtttagtgacgttaccggagtaggtgacgatactgtgagttttagtttcttcggctattccgttaaccgcaaacaacaattccgcttcctgagaagtcaggccggtttgttgagtgaatacagtaagacgctccagagatcctgcggctttggctgtatctccttttaggccgtaatatttttcgaagaaatctttttggctgctttgcgatgtttccagtaatagcgcctgaagtttcggtgccagtgtgctgcttatcatcatggctgtttgcagcgagtcagcactcagattgtcatcgataaaattgggatacttgctgtctgcccgttggatcaaatccagtaatgggatctctttttttgccaatacggttgtagtttgctttagcggaaaatggaatggcaatgaaagtgggtaatgaatatcagccagagaatgcgtcaaaggctgattattattgatatgatttttgactttttcagccagagcttcaatgacgagtggtaacaggctgctggtctgattgaggttagtgctatcgagcaataatttttcgatatcagcccgccgttggctgagaaaacgggcactttctttgtctgcatctttttcaaacatctgaatctgttggtacagctcaaccagataggctaacggcccgtcattggcttcgggtaaacccggaaaacaataaagatcctgattatcgttaaagagtgtcttataactaatctgtgaatttatattatttgccatacatgattacctttgaaatagaaattcgattaaaagaaaacagcacttctattcttcgtaacacctttctcataacattaagttatgtttctggcgctattgaaacggttacactatggcctgttattgtgagctatccagcctaaaatatatttcggatctgatcatttattaaaaagttattttatttcaatggagttttaaaaagttgagtttattgaatgaatcataaagggattatcaggggaatattgagattgcgggtattaatttttaaataataataaatatgtttatttattatttttaataaagtgaatgcttttgtgtatgctccgtatagtgaaaaaatgggtattaaagatggttgtctccaatacccctttttcataaagttatatcattaatttctattattcagataagcaatcagcgctgctgtaaacgtggttttaacatgtttcattcaggtatcgctgtgcaaaaaataaagcgctgacatttctggcttcgttgaaatcaggatgttccagtagtgacatcatgtcagctataggccagcggatctgtaccagtggctccggttcatctccttccagatcttcggggtataaatcctgtgcaatcacgatgttcattttgctggaaaaataagaaggcgccatcgtcaattttgtcaacagctccagttttctggcacctaatcccacctcttcctttaattcacgattagccgcttcaagaatactctcccctgcatcaatcgcgcctttaggaaaacccaattcatattgttcaatacctactgcgtactcacgtatcagaagtaagtcatcaccaattaccggaataatgagaaccgcttcatgattggtaggtttcattcgttcataaatacgtctggcaccattactgaattcaagatcaacggactggatgttgaataaacgagaatgggcaatatcacttatattcaatattttaggctttttcagttcaatcatgcttgcccctgatggttgttgcgtatttaaactttgctttaatatggctgattatgttagtaaatgatagcgattatcgcttgtatgtatttttgttatggtcctactttgcagaaaatgctgttttttgtgaattggtgtgagaaaatttatataacatgttgtaaataaaattaaaaatagaagtcgagaataggaataacctgatctgtgggtttctttcgattgttattttgtcagtttcttacagctgtcatgggcgtggagaacaaatgagctcactggtcattatattggctatttttatgattagcctgactataatggcttcctttctgactttcagatggaggcggtctgataacgcgcgttatatgtcattgaagactaacacagtcagtcgtaagttgagtgcagtcgaatttcaaattattgaatcttatttgaaaaatatcctacctcagacgaaattagacagaagctacgtatccggctatccggtatttcccatcagggataataacgtttataccatcagtcatactatcacccgtttttctgctgtttccggggaaacgcagcactggcgttactatctcgatgaaacagaaatctattttccagccttgcttgaacctttcgttaatcagcgaaatacaatcgatattgttaaaacatcttcaattccgctggtcattgcggtaaatggtcacagtctgacagattatcagcaagacctgctggtgacaccgagcatcaaaaaagcagagcacgcttcaattcagaaaaacggtaattcgaatgccaatctgctgtacctgcgtaaagaaaccccggaagagtatcgcctgcgccactcaacaggtattcaggaaggtgtgctgatgtgtactggcttatcgttgtggtttctggcgctttttgttccttcgccattattgccgtggctgatgctggtttctgtgctgtttattcttgccagtttctggccgtttttcaggttaccttctgcacgtaattatttgaatataagctgtttcagcggaattctgaaacgctggggagtattcagtgaatttgagcaggaaaacaaaaagaacatctctcttggaggcgttgatctcatttatcctgttcattgggagccgtatgttgcgcatgaacttgataaaaatactgatgtagaaatgtactccaatggccaagttgtccgccaggggcagcatctttcattgaatgaggaggaaaggctctacccttatcagcgttaccagaagaatcagatgctggtggtattttctatcttagccatgcttgtactgtatctttatcagccggttagtctatcgatgcgattaagtttcgcgtggctgcatggcaataacaccacagtcattactgatgccggtgagttatcgaatatgccactacgacaaggggatgtgctgagggttaaaggtacgggaatgtgttacatgccaccaaaatcagggacactttcttccccggatgatttttcttttttaccgtttgattgctttggtgtctattggaacaatggtagttcattacccattccggaatcggagattattaataaagcttcggcgttactgacaacagtgaatgagcaattgcgtcctatggatcatgcccggaaatataatcccggcctgaatgaagtgattgctaagtcgggaatgatattactcgacaattttcctcagattattttgaagacgaatgcgctttgcttcaaggaaggcgattgtaaccggctgaaaaatgcactcgtcaatttaagtaatgccaaaagttgggatgatctcctaagtcaggctgaaaaagggaaactgaatggaactaaggttctgctacgttctgtcagtgcggatgcattaggaaagttagttgattccactgcagctttatttgtccagcgggaaacggatagatacagtattctcctgaacagtcctccaccggggggcgaatttaatc

SEQ ID NO: 3401 - DNA, 29835 bp, Xenorhabdus sp.; identical to SEQ ID NO: 3400
  CDS (17024)..(19564)

SEQ ID NO: 3402 - DNA, 29835 bp, Xenorhabdus sp.; identical to SEQ ID NO: 3400
  CDS (6466)..(7140)

SEQ ID NO: 3403 - DNA, 29835 bp, Xenorhabdus sp.; identical to SEQ ID NO: 3400
  CDS (5250)..(5876)

SEQ ID NO: 3404 - DNA, 32325 bp, Xenorhabdus sp.; identical to SEQ ID NO: 419
  CDS (1184)..(2095)

SEQ ID NO: 3405 - DNA, 32325 bp, Xenorhabdus sp.; identical to SEQ ID NO: 419
  CDS (3895)..(5349)

SEQ ID NO: 3406 - DNA, 32325 bp, Xenorhabdus sp.; identical to SEQ ID NO: 419
  CDS (5591)..(6400)

SEQ ID NO: 3407 - DNA, 32325 bp, Xenorhabdus sp.; identical to SEQ ID NO: 419
  CDS (7340)..(8701)

SEQ ID NO: 3408 - DNA, 32325 bp, Xenorhabdus sp.; identical to SEQ ID NO: 419
  CDS (16660)..(17580)

SEQ ID NO: 3409 - DNA, 32325 bp, Xenorhabdus sp.; identical to SEQ ID NO: 419
  CDS (17761)..(18798)

SEQ ID NO: 3410 - DNA, 32325 bp, Xenorhabdus sp.; identical to SEQ ID NO: 419
  CDS (18916)..(19974)

SEQ ID NO: 3411 - DNA, 32325 bp, Xenorhabdus sp.; identical to SEQ ID NO: 419
  CDS (20274)..(20777)

SEQ ID NO: 3412 - DNA, 32325 bp, Xenorhabdus sp.; identical to SEQ ID NO: 419
  CDS (21420)..(21644)

SEQ ID NO: 3413 - DNA, 32325 bp, Xenorhabdus sp.; identical to SEQ ID NO: 419
  CDS (21757)..(22188)

SEQ ID NO: 3414 - DNA, 32325 bp, Xenorhabdus sp.; identical to SEQ ID NO: 419
  CDS (26121)..(26861)

SEQ ID NO: 3415 - DNA, 32325 bp, Xenorhabdus sp.; identical to SEQ ID NO: 419
  CDS (26909)..(28120)

SEQ ID NO: 3416 - DNA, 32325 bp, Xenorhabdus sp.; identical to SEQ ID NO: 419
  CDS (28993)..(31293)

SEQ ID NO: 3417 - DNA, 32325 bp, Xenorhabdus sp.
  CDS (31293)..(32303)
caattttagaaccagggtcagtttgtattcaccatgatcatccgtcttaaccaacactggttctttcgtctatttgactggcatggctcagtcttatcaaaaattaccttccgtttaatgctgaatatactcatgtctatcatcgcagttgtgagttatcagtggtatgaacaccttggcattcatttgaccgtcgccccgttcagcctgctggggatcgctatcgccatttttctcggctttcgtaataacaccagttacagccgttttgtcgaagccagagcactctggggatcgttattggttactcagcgctcgttgttacgccagattaagagtatccagccagatgaaactcatttgcatcagcaattttctgttttgcttatcgcgtttagctggtgtttaaaacatcagttacgtggcacagatccaaaagaagatttatatcgccttctgcccacagaaatatatgctgaaattattcgcagcccgatgccaactaatcggttattactgaaaatgagccttctcctcggtgcatggaggaaagggggggtattaagtgatatcacctatgaaatgatggataagaacctcaatgagctttcccatattctgggtggctgtgagcgtatcgccagtactcccgtgcctttcgcctatacgctgatactccagcgaacggtttatcttttttgtaccctactgccttttgctctggttaccgatttgcactgtatgacaccgtttgtttcagtgtttatttcctatgcttttttatcatgggatgcgctggctgaagagttagaagatccattcggaacttcacctaatgatttacccctcaatgcaatttgtaccgtcattgaacgccatctgatggaaatgaatgatcagacgtcattaccggctttattgcaacctaatgaaaaattcaatttgctctgattattcaccttcatttgattaaaggcgaacagcaggctcggttttaatgtctttcccaaaaaacgagcctgaatcaatgtattatatgagacgctgagattctgcatccttcagtgcagtcagcgataacttcaccggaacagatttggatgtgggtgtacctgtaccatgaccaaagctgtccatcggtactaacggattggtttcagggtaataagcggcaaggttaccacgcggaatagtgtaaggaactaatttaaatccacatactttgcgttcaataccgtcgtgccagattgtctcgatatcaaccagatctccttcctgatagcccgactgggcaatatcttccgggttcataaataagacttcccgttgaccataaacgccacgatagcggtcatctaaaccatagatggttgtgttgtattgatcatgggagcgcaaggtttgcaaagcaaagggaacgtcttctccagcaatttggggaaacagtgtgtctggcagtggggcatggctaaattcagcttttttactcggggtctgaaaacgcagttccgctgctgcattaccaagatagaagccgcccggatgttcacattttttattaaagtcagcaaaaccgggaatagttgcgctaatgtgatcacggattttgttgtaatctccggctaattccagccagttaatggttggggtattgcctaaaacagcatcagccatgcccgcaacaatcgcagtttcagaacgctgtgtatcagatagtggtttatttattccttcggaagcgtgcaccatgctaaaagaatcttctaccgtaacaaactgcgcaccactgagctgaatatcctgttctgtacgccccagtgccggtaggataagagcatcttttttaccggtaacaagatgactgcgatttaatttcgtactgatatgaacagtcaaatcacaatgccggagtgcttcttctgtacgtgggctgtccggcgcagcagcagcgagatttccacccagcgcaatcagtaccttcacttcatcacgtaacattgcctccagcgcttgcaccacattatgaccatgagcacggggaggttcaaaaccaaagtgatttgccagactatcaaggaaagcctgagacggttgctcattaatccccatcgtccggtttccctgtacgttactgtgaccacgcaccgggcatacaccagcaccgggtttacctaactgcccaaacagtaattgcaggtttgtgatctcacggactgtatcaatagagtgtttatgctgagtaatacccattgcccaggtgcaaatcacacgttcagcgtgctggtaaatatcggcagcctcgcgtagctgttgctgcgtcagacctgattgttcctctataaatacccattcagtagcagccacttcctgtaaataagcctccacaccttcggtatgagccgaaataaagtcttgagcaaaaatacccgctgctccggcagctatacgagagttatgaacttccagcaacgctttgaccatcccccgcacagcagccatatctccgcctaatttaggctgataataacggtggctgatattgcctgccattggagtaacaacttcgaggggtttttgtggatcagcaaagcgctctaggccacgttcacgcaatgtattaaaggtgacaattctagctccgtgttctgctgcgtgccgcaggctatgcagcatccgtgggtgatttgttccgggattctgcccaaagacaaaaatggcatctgcatgatcaaaatcattcagacgaatcgttcctttacccactcccagacttttcagcagcccgtaaccgctggcttcatgacacatatttgagcaatcaggaaagttattagtccccagtacccggccaaatagctgatacagccatgaggcttcattactggcccgaccggaagtatacagttccaactggttcgggttttccatcccattaatgtgtctggcgatcaaagaaaaagcctgctcccagctaataggctcatagtgatcggtctcatggttatagcgcatcggttcaataacgcgcccttgatattctagaaagtaatcgctttgttcgtagagtttgctgacactatgtgtggcaaaaaactcccggtctacatgccgccgggttgcttcccaggtaactgctttcgcgccattttcacaaaagctgaaaaggcttttgttatcatcaccccatgcacatcccgggcaatcaaagcctctgggtttgttcatgcgcatcagattaaccatgttctttaatacttgtttactatcaaagacaaaacgtgttgttgcctccaatgacccccagcctcccgccgcagcgtgatagggttttatttttgatttgaatttcataacaatctctatttttaacctggtggtcaaagaattggccacggattggcagatgaatcaggaacgccgaacagatttattgtgatacttattccgttcctatacaacgagaaaaccgaattatcttcctgttgatacagtgacctgccatgtgatggatatcacattgtcagatggcatatttgagttggtgaaaataaatgcaatgataagacgttggcaagataaagtattgttcatttttaattcaattgtgggcgttttttatactttatcaaagagacacttgaaagacgaagtgtatattaggaaagataatagcgtggtgtcatatgtactatcgtgatgaatttggttttttgcttttaaataaaaaagataaattagactattacagtcagcaaaatacttttattaaaaataaagccactgccctgactgtttataatgaaatgacaaagaaaacaccattatggatacgtttgtcttttgcaataagagataaaatatcaagcctcgcgggtgttgaaaaaatcaatgggttctctggcggtcatttagaagaaaacgtgcgtgaaggaagctctattgattttttcaagattatccatatcagtgatgatgaattatgcctgctatcggaagatatacacttaactgttttagtctccctgaatgttttatcaagtaataatcagggaaaaggctataaagtcactgtcacagcatccgttattacccataatttctttgggaaaatgtatatgatcccggtctctcttgcacatagtcttattgtgaactgtatgctcaggaagatgatactttcctgacggactgaatttcatcggttatcacatattctccaccataaagtaaacaaacgtgccaacataattaccaattacataaccaactgtaccaatgaccataatcggcccgactagggaattccagccacggctgattgccattgctgccgctgtggttggcccgccaatattggcattacaggcaagaatattttcttccagactgaatttaaatactttccctgctgagaaagtgatcaacaggttaatcatggcaataataaaaacaaagacaaacagcaatggcgcattactgataatagcgtggacagatgccggtatgccgataacaacaaaaaacatgtaaatagcgtaagtgcctaattcctgcgtgccattaagattgctgaaggtttttttgaatatcgataccagaataaatgtcactgtagtaagaagcaggtatttatctgatattaaactgaaaatcagctcctgatagatgctgtcaggctgcccgaacagtgcctttaaccatgatgaaagatggaatgacagcgctacgataaaaattgaccatgccagtgccaaggcgatatctttcagagcaatatttttcggtttccagtaagcagcagctaaagtctgcgatttatccagttccggattattgtcaatcgcatcagaataagggcttccccagaatttccttgccactgaccagccggatataaccatcaggataataaaataagccgccatcatcatatgatcagcgacaatagtagatgccgtcatactttcagatggtgctaatttggctgccattgcggcaaagttaaccccaccccccgtataagatgcggacatcatcccactgattttatccagctcagggatatatcccctgagtaaatgaaaggcaacaactgtaccaatcatcgtcgcgacagaggaaatcaaaaataatataaataaccgccagctgccggtaatcagattatgtaaattggttttaaataacagcagcggaatggctaaaggaacaatatattcccagacgacatcataagcaggtgcttcagtcggaataatatgtaagttagaagccaaaatagcgatgaccagagcaataaccgcacccggtattttagttgcccacttatatttttgttccagcataattgcagccgctaccgcaatcataataaaagcccatagcattaatgaattatcagcgtcaattaaggtatttttcattatgtaatttaacctcttattctgttcaggccgataatattctatattgtgctgcctgattccctgatgccttccactgcaccataaacagcctgatcatttttatagaatgcccataaagcattaccataatcgtaatgccaccactcagtcggcagattagtaaagccagcctgaagcataacgtgatgcagtatccgacggtataatactgccggcatgtttgtatccgatgcttgttctaaggctgcggtgtaagacagatcatctacttcatcaaattctgtgcccataaacaatgcgttaccggagacaatatcaaacagcgtcacatccactgaaccccctgtcagatggggactcaccggattttgctcagtcggggccggtgccacaaactgttccagtaattctttttgttcttcaatggataagtagctgtactgctgcgcaatggtagcccgtgttttctcctgcaatgcaagctgagtttcccgtgaacgccaaccatccaaaactaaaagccctaaatgagcaggcaataattgggaggcctgtattaatttttcagccacattttttcttactgcacaatattcaacagcgccattgatacccgcaaggaaataaaccggtttcagttttattttatccgtttcataaatgacttctaaaggctcattacattcattaataaatattttattaatgctttcccagtcaaaaagcttttttgtactaattttctgctcagtaaaagaatgcagcatattaaccttcatattcttctatgttttcacttagttatattttaataagatttattaattatttaaataaaagagactttaatcattaattttatttatttgaaaataacaagatatttacagactagcaacaaagtcaaaagctatcaaattttaattttctttctgttgaacaggttaaataccttttaaaattgtgccggttacacaagatgcaatgccaaatcttatatgacaaaatatgtgtaggcatcccctaatatccggaggaagaataccagacggtattcacaacacaacatgactcaagagcatccacaagaccatcagctgcaagtagaagccattaaatgcggcacagttatcgaccatattccggctcaggtcggttttaaattattgtctctcttcaaactcacagaaactgatcagcgtattactattggcctgaatttgccttccaatcacttagggaagaaagatctgatcaaactcgaaaataccttcctgacagcccagcaagcaaaccagctcgctatgtatgcaccacatgcaaccgtcaataacattgaaaattatgttgtcgtgaagaaaatgccaatcaacctgccagaacagattgatggtatccttgtctgccctaatggtaactgtatcagccataatgagcctgtagaaagcagcttccatgtcatggaaacggcaaatgacgtcatcgttcgctgtaagtactgtgagaaagagtttgatcgtcaggctgttatcaacaacgattaagatctctcagttgatgccgggctgagtgacactataataaagccttctcaatatctttcattctgacgttaaacaggagttcccctaatgtcacgttccattcataccgaaaatgcaccagccgcaattggcccttatgttcagggtgttgatctgggcagcatggttattacttccggtcaaatccctgttgatccaaaaacaggggctgtttctgaagatattaccgcacaaactcgccagtcactggaaaacgttaaagccattattgagcagtctggcctgaaagttgccaatattgtgaaaacaactgtgtttgttaaagacctgaatgacttcactgttgtaaatgccgcttatgaagcgttcttcaccgaacataacgcgccattccctgcccgttcatgtgttgaagtagctcgtctgccaaaagatgtaaaaatcgaaatcgaagcgattgcagtacgtagctaattcatagcgttatcaaccctgataggctcaatattggggttggttgctctctttgtgtctatctctttgcggaacaactttccctttctttgtttcagatcaatttattgagcggtatattcgcttcaatattccacatattgtgcttaaatataaaataatcactacatatagtgcttatgcacaaggttatccacacaaagttaaaaactagccattatgcaactgtcgttgtgataggcactgcaatagtcgttacgatttatctgttggataacatactgaggaatcctattgtgaaaacggttgtgatgcagcgtaatgaccatctggttaacgtcggggaaaatactcttcacggatggcatgatcgtctggatcaggaaatacgcgggctgatcgagcaaagtgatcttcctttactcaatgaaaatgcgaataaagatgccagagtgatccctactcagcgtgatttgctggcggggatcgttgccagacagtatgccaaacagcatatgctgccgagtgatgtcgttctggcacatgagaaaggcgaaattcactaccatgatctggattatgctccgtttttcccgatgtttaactgcatgttggtcgatttagaagggatgctgacccgcggctttaagatgggaaatgcggaaattgagccgccaaggtctatctccacagcaactgctgtcacagcccaaattattgctcaggtcgccagtcatatttatggcggcacaaccattgaccgtattgatgaagtgcttgctccctttgttaaagccagctatcacaagcacctgatgattgctgaagagtggcaaatcgcagataagaaagcttacgcagaatcccgcacggaaaaggaatgttacgatgcattccagtctctggaatatgaagtgaatacgctgcataccgccaatgggcaaacgccgtttgtgacatttggatttgggttgggaacatcaaaagaatcccgtttaattcagacggctattttacgtaatcgcctcgctggtctgggtaaaaaccgcaaaacggcagtattcccgaaactggtttttgccattcgtgatgggctgaatcaccggtttggtgatcccaactatgacatcaaattattagcgctggaatgtgccagcaagcgtatgtatcccgatattcttaattacgatcaggtgattaaagtcaccggctcatttaaaaccccgatgggttgccgaagttttctgggcgtttatgaagagaatggtcatcaaattcatgccggccgcaataatctgggggttatcagcctgaatcttccccgcattgcaattgaagcaaagggtgatgaaatgcgcttctggcagttattagatcaacgcttgctgattgccagaaaagcattaatgacgcgcattgaacggctggaaagtaccaaagcacgggtcgcccctattctttatatggaaggagcctgtggagtaagactaaaagaagatgacagtgttgccgaaatcttcaaacatgggcgggcttctatttcgttagggtatatcggtatccatgaaacgattaatgcgttatatggtgaccatactcatctatttgataatgaacagcgccgccaaaaagcactcgctatcgttaaacatctgcgtaaagccgttgatgaatggaaacagcaaactggctatggcttcagcttatacagtacgccgagcgagagtttatgtgaccgtttttgtcgtcttgatgtcgctgagttcggcgtaatcagtggagttacagataaaggctattacacaaacagcttccatctggatgtagagaagaaggtcaatccttacgataaactggattttgaagcaccataccctccgttggcgaatggtggttttatctgctacggcgaatatcccaacttacaacataatttaaaggcactggaagatgtgtgggattacagttatttccgtgttccttattatggaaccaataccccgattgatgaatgctatcaatgcggttttaccggagagttttcctgtaccagtaaaggcttcacctgccctgcttgtggtaatcatgattcagcccaggtttccgtgataagacgggtttgcggatatcttggcagccctgatgcgcgcccatttaatacaggtaaacaggaagaggtaaaacgccgtattaaacatctcaataatgggcatattggctaatatcatgaattatcatcaatattatccagtcgatgtggtcaacggccccggaacccgctgcactctgtttgtcgcgggctgctcccatcagtgtcgtggctgctataaccagacgacgtggcggactgattccggtcgtcctttcactatggcagttgaaaatcagctcattgctgatctgaatgatcatcgcatcaggcgacaaggactgtcattatccggtggtgatccgcttcatcccgataatacagctgcgattctccggctggtcaaacgggtcaaaagagagtgcccggataaagatatctggctatggacaggctatgttctcgacgaattaagtggacttcaacaggaaattgtcagccatattaatgtgttagttgacgggaaatttgaacaggaacaacaggatccgatgctgatctggcggggaagccgtaatcaggtaattcattatctacgctgagattaacgctgccagtataattttttgccaaaaccaagcgaattatccaccattttgatctcattaaggttcaattgccagataggtgtttttgctgttatcgcaacaggaaactggtggcaataagccgctctggcaatggtttcatctttacccgtcagcgcaacaacctcaccacgaaactgaatccctttgatctgggaaatattgtgcgtttgctctgcgatcgttcccgcaacgatggcattttcctgcattattttaccgtgacgcgtatcagcttcggtcataaaccaaagaaccattttttcagcgtcaaagagatagaaacaactggcacaccagagatcctgaggtgaagaagtacaaagtgtgaagacatgttgattggtaatatactgagatattattaatttttctttatccgattccatctatttatataccgttatatttctgtcttttaatcagaacacgttagataacttccagttacgtgttctgatatttatctaataaataactatagtctgggataactataagttatttatagatttcagcaacaccatacaatttatttttgccggttgcagaaataatacgaaaagattgggctccagctttatcagcttttttggataatgcctcagtcaggctatccagcgtttccgctcctgctacagaaaccacaccaatcttctctccatcagcacttttgacttcggttgcggcaaatgaaccaaatgaaatagcacttaatgacaacacggcagcaataaatttcacgtttttcatctttaaatcctctgactacttgtaaatataggagttaccctttgtgatgcggatcaatttatacgcttatcagaaaaatgataattagcaattactgctattcttattcaataattttgaattgaaaaaatgattacctacagtgaatagacatataatttaatataatccataagttataattgtagaaaggtagtcattaagatgatagctaatcaatgcattaatctttattgttattaatacattggaaataacttaagaaaaataatgaatattaaagaaactaattggtatctttacctgataaaaacgcggaatggttcattatatactggaattacgacagatgtttctcgccgtctggctcagcataccgccggaaaaggagcaaaagcgctgaaaggaaaagggccattaacgttggtctatcatagtgcagtgccggacaggaatacggctttgagactggaatatcgggtaaaacaactgagtaagcagcaaaaagaaaggctggtgactgcccagcctgtctgtatagttacctacctatcataggttctgttaactgagttttgttaacttacatgctgccatcagaataccggtaacatgtcatacgccagcaaaatgacgggaatacgtgaccagaccatggcaatcatccagcgagacatctgctagtgtgtaaacctgaaaatatcgttcacagccaggccactggcaaagtagttgatactcttcagcaagcctgaaaccaaatctctgataatattcaggctcaccaagtacaacaactgccccatagccgaattcattcaggctgtccaagccttcatataccagcttctcgccaatcccctgacgacggtacgattcggccaccgccaatggcgctaacccaacccagttatgatcctgtccattgacatcaaccggtgtaaaaccaacatagccaatcacgtggccttcatcgtcagtcgcaacaacacccagtgtcaacaagccatcttctcttagcttgtggactaactcagcttctgccgatgtctcaaaggattcccgcaacaagcgatcaatccccatagcatcaaccggaatttcgaccctgattaacatgacgataacgcgcgatcgtgctgatcagcgccctctttctgttccattttgataaattcagctaactataataaatcaaaatggagagtggatttaacctaatacaaaccagttcctttttcatgaaaaggggtttgttattctgccaaaatactgagatatttcctgatgctatctcaaaaatccatcataaaaattgacattgagatgcagtaaatcagcacctgaaacctttacacggaacctgccccaaatcaatatattttcactatctacctgacgataattcgagattattattatttccctctcaggcgtttcataaatcctctcagctcccgtaattcaccattacgtagcattccaaccaagatccccaggatcatatagataacccctaggagtaagatcatcgcgatatcccccagcatactttgcaaaggcatattcatttggttcatccctgcgataattttggttgcccatgtggatggtaaagcggatgagattacccttacccaatcaggcattgcctgtatgggccagattgtgccggaaatataaaacaccggtgtagtaataaatgccagtgtcagataaatcatttccacgctgcgtaagcactctgtaaccagtttgcccagccccagtaccgccagcaggaatggaaaagtcattaatagcaattgataaattggcgcatcctgcctgtatcccagaacccaaggccatagcacaaaaaagatgacggataaaaacaaccagataggcaacagtgcggacagcgctcccagatagacaggcagcgggggcttgcctttaggggttacacgtatggctatacttacacgtacgctggcaatcagtagggagtgctgcaaaagcatgactaataatccgggaaaaacaatggcggcataactcacccccggattgaataatccgattgtttctcctttgatcggttgcagcagaacctttatctgttctgtgctgaaccccgacttcaaaagtaattttgtattgtattctgacagtaacttttggtaagccagtatcaaatcctgttgaatctccccgttagccagacggttagtcgcatcaccataaaccggaactgtcacatttttcccgcctaaaagacgcttctcgaaatctgtcgggataatgataatggcaaatatttcccgatgcagcatgtcagcacgggcatccgcgagactggcataatttttggtttctacttttgctgtcgcatcaacgtgacggatcagcgcacggctcatatggctattatcctgatcaatgaccgcgacgggcagatcccataatgtgggtttaacgtaaaccagactcataatgcacagagaaacaatcaacatcagccacatgggtttttccaacattgacaacaataccgtgcggaaagtctgccagtacattttccagttattcattttccggcttcccctgcattataggctctccccggactgactaagccgtttccacaggcgattgcgaaccagtaaggcacaaaccaaagggtaaattgccagtaacatgcaaacgtaaatgatgatttttaatgacacttcccgtaaaaaaatatcgaacatagcatttagggcatgggttaacggttccagatttgaaataagccttgctggccacaccattgataattcaggcatcaccataccggaaaacgacatagcgatactcaccagcatcccaatcagggtataagccgttattgcactgttagtaaaagtaaacagtaacaggccaatgctttgagctgcaatcacatagaaaaatcccaccacaggcatatagagcgggttgcctgcgactttggcatcagaaaatgccaccagcaccatgatttctaccatcaacaacagggtgaaagtgactgtatgcggggctagtttccctattaaagccggtacaaaagatttctcgctcaggaggtgtttacctctcgccatggtataaatcgtaccggttacaacaaaaagctgtaataagtggatggttgcagcgaattgctgatagtaaatatagctgccactggcattgaacagactgtcataagacatagtcgctctggcaagcggagggagttgacggccaatttcagatgcgatgacactgcgatatttggcattcgtttctgccatcagcccactgaaatccacagatgcataacgacccgcaccataaaacaacgcattgtaatacatcctcaccgttggctgtttcccactcagcgcatctttttccagatcaaagggaagatagagaagagcataatcctctgcgctacccagacgctctaatgactcagccagaccaccatcataagttttgatatcggcatggggtgctgcattcagattacggatcagcgatcgtgataaggaactgtgatcattatccactgccgaaacaggcaggtttaacagcgtcccttccgaaaaggtggcactgattaagataaacagcaccaacggaaacagccaactcagccaatgaaaaacagggctacgggatgcaaccttcagctccttattaaaggcctgcttaaagatattccattcatgagcatgccacctaaaactattccatccgaagctgctccacttaacaccaaaccatccaccttttctgttcatcagcctgccaccttagcgaccccagagccataacgcactcataccggggcgcagaccatcaatcggttgcgatgggtataaacgtacttcaaatgttctcagatcgaagtcccctgtcgcacgggttgcacgttttgtcgcgtaatctcccattggcgcgatataacgcacttctgcctcaatctctttattatccagcgctggtacacgcagtttaactttgtcacctttgcgcactttcgccagaatatcttcacgcaggttatagacgaagtaggtttcgggaatacgcacgagggttgccaatgggctgccggcattaaaaagctgaccgacttctgccggaagtggcccgatttcaccagcaacaggggctgttacttgtaaatcattactctggatttttaattcctgtaatttttcttccgcttcattcagtgcagcctgatactgttgcctcagttcaatacgatcgccattttttcccgcatccagctctgctttcgccgccaacattttctgataggcgatatcgcgggcatttcgggcattatccagttcactggcagatgaatagcctttgactgaaatatggctcagccgctcaaattcacgctttgcattgttatagccaaattctgcctgcaaaaatgcagcttccagactacggatatcctcttcccgtgtaccactgatggataaatcgagttttgctttggcctgatcacgggctgcctgagcggcggcaacttttgcagccaattcagggccatcaagactaatcagcaattgccctgctttaacatcgtcacctctcctaacgtgaagcgcggctacacgtccggatgctttggatgtaatgatgacttcaggagcgtctacctctccctgtagcaataaatcctgatgatgtgaacgaaaaagtacagccattgcagtcagaaaaataatcagcaatattgtgaaaagtgttcttttcttcattatgttttgtaagctccaaacaactacccgaacaaaactcgtcggagatttacggcattaagtttattagctgcacccatgcaacgacatggtcttaatctgtcgttttaacccttaatctctatgatccgtttcttatcgaatgacgattagttgcctagtgtgacactattttcacaaatcctttttagaaattcgtgcgcttcatcattgacaaaagttaaatactttgctcagtcatttataacattatatacctaatcaatttttaggggcggtatggaagagaattaatcaattttcagagtcgaattgccttacttaataccttttatgattaaaattaatttattaattaatattttattataaataaaagaatcgctcttattttctttacatctaaatacatttcgataataaatcaaagtagcaatacttaataaaatgaaaatgcaaacaaaaaccagtaataattagcaatagatatttaattgtcaaaaacttcattatatttagaattatcgcattccttcatcagataattttccatcatgtaaataagcaccctgaaacgctatggatcaattaatataatctataaaatcatagtgttgaaaaataatgaaacaggtataaattacttcttaattattctatttctggctctctttttttattttaaacgtctaatatagaaagtggtgttgaccaaaaaataaatttatgctggaataaaaaaccacatatattatatatgccagataaataatccgagcgttaattagctaacagaatttttgctagctcatttgtgatgccttaaataaggtaatgtcactttgccattcttttataccgtcatcacctgacgcttttactgttacaggtctaatatttatgtataaaaaatttgatgagccgtgggtaaaaaatcagcaaaccgtgctgaaacgagtagcctgggtaaacattattgcccagttttcgtttccactggctggcgcatttgctcccactatcgccatggctgaaacactgacgacttctcaatatgctcctttgatagcaatactgacagagtcttatattctgaagccaggagaaactatttacacaattgccaaacgctatagtttcacgattgatcaacttaaagaaataaatcagttatacgcctccaataagccattttcagaacttagtgcaggtgatgagattaacgtacccaaacctcgccctaataagtatttaccattcaattatttttcatcggcacaattcgtatcaaaaccgattgaatcaggacagatggaatcagggcaagttgaatcagggcgatcccccgaaaccgatgatacaggcagcgctctggcaaattccgccactcgcatcggagaaatactgagcagcgataacgtaggtaacagtgcaatcaatcagttaagtaatctggctgtcggcgaagccaatcaacaattccagaattggctgggacattacggtacagcgcgggtacaggctaatattgatcgacgtggtcatctggatggcagccagcttgatatgctgctgcctctgtatgatagcgagagtaaaatgaattttactcagtttggcctgcgccgtattgataaacgcaacaccattaatttcggtatcgggcaacgacaattttttgatggctggatgttggggtacaacgcttttctggatcacgatttcaccggaaataatacccggtttggcctcggtgcagaatatacacgcaattatctgaaactgggtatgaacggttatttacgtttaagtaactggagagaatcacgcttcctgaaagattatgatgagcgtcctgctaatgggttcgatctgagagcacagggttatatccccgctctgccgcagcttggtggtaagctggtatatgaacaatatttcggtaatgaagtcggattaatcaataaagatcaccgcgggaaaaacccggctgcgtttaccgcaggcattaactatacccctatcccactactgacttttggtatcgatcgcaaacaggatatgtccggcaatggagatacgcagttcaatttagaaatgaattatgaaatcggtactccgtggtcaaaacaaattaatcctgatgccgttggtttcagtcatactctacagggtagccgctatgatctcgttgatcgtaataaccaaatcgttctggaataccgtaaacgtgaagttatccgcctgacattagatagcctgatttccggtcatgccggtgaaataaaaccgattcatattagtgtaaacagcaaatatggattgaaaacaattcagtgggatgcagccaacctgctcgccaatgggggtaaaattgaacgccagagcgacaagctttacctgctgacactacctaaatatcaccatagtggtaacaatgcttataccataagcgcgattgcttatgatgaacacgataatgcttccaaacgggcagaaactcaggttcaggtgctacaagcagaggcaagtgttaataaatcgacattcacagcaagagatcacgagctttccgctgatggtcattccagcaccattcttaaattggtgctaaaagatggcaatggcaacccgattcctgattctgccgaagatctcaaattcgtcagcagcgaattaagtggagcaggtgaaacgccaacgattggaaaaatcaaagaaactcaaccgggcacctatgaagcattactcactgctggcgaaaaaataggtgtactgacagtgacagctaaattcaaaaagctgactttcacaccaatcgagatcacgttcttccatcctgataaacccatcattaaaaatgtcagaatgtcaggccaactggaaatgggccatactcttaaagcgtcctataccttcaatgccaacaatggagaaagtacagacaagtcacgttatgtgtggggggataaaggaaatgttgatattactaaaggctcaacaattactgaatcaggtaaaatccccgcttatacactgacactggaagatgcaggcaaagtcaaggcactcattgttcaggcacaaaatgggcttaatattaccggaaatacaaaaacgattgataccagtatgggccaggaacagggtaattatacctatggcggaacagaaggcggcaagatcaagggcattgcagataatctgaaagtcgccgtcaatactggcaaagctaaaaaaggcgaaacaatcactctgagtgtgcagacattcaatcacggccaacccgtaaggaatgttccgatagaggtaaaagccactgaagcactgaatcgtcagaatattcatcaggcagtgacactacaggtcaatggtaatgccggtcactatcagggagtcactggtgataatggcacattatcccttcccctcacagatccaaatggtctgggtgtcaaaacaacgttacaagtagcaggatatggcgtttcagcaccgcaaactaggcatgtcacctttaccgttgcaaccagccctgattctcaatatgcaaatttctggggacatatggccaatacagcaacaggggcgaatggacgtgtctttagccgacctctgctacaagcagaactggatgctatggggatgcaaggaatgactacatataccgaaaatggtgaacactggccgcgccgtatttatcggggagccgtgtggtattgccataaaatacataaagaattaccgacaaaagaagatctgctcaacctataccaaatccaccagaagaatgaaatgcatgatttgtacggatggccacaattccgttcttatcgctcttcaacatcaggaatagatgaagacggtaaaaatgcccattttgccgtcaatattgatgacggaacagcacatgttatcaacgaaacagtgaccgattacgttatctgtatataatccttctgctcatttccggagtaaaaatccgccctgagcagggcggattaacttctttccatccaaaactacgttaattcccgctattctattgacgatgttaaattcaaactttgataataactgtataaatttatttataattatcaaatccactgtgaaaaaacatgtacgaatttaacctcgtgttattacttcttcagcagatgtgtatttatctggtaattgcctggctgttgagtaaaacaccgctgttcatccctctactgcaagtgagtgttcgcttacctcataagctcatgtgttatgtcatcttttccatcttctgcgtgatgggaacctattttggcctgaatgtgaatgattctatcgccaatacccgcgctatcggtgccgtactcggtggtttacttggtggaccgactgttggggcaatggtcggattcaccggaggattacatcgctattctctgggtggcatgaccgcattcagctgtatggtatcaacaatcatagaaggtgtacttggcggccttgttcatatttatttaatgaagcgcggcaggatcaataaattactgaatttatggactgcggctattgtgactttttttgcagaatgtgcccaaatgggaattattctgctgtttactaaccccttcagtgaagcactccagttagtaaaaaatattgccgctccgatgatcatcgccaacagtatcggcgctgctatgtttatccgtatcttgctggacaggcgggctatctttgaaaaatataccagcgccttttctgctcaggctttgaaaattgcggtgtgtaccgaagggatattactgaagggatttaatgaaattaacagtatgcgtgtggcaaaagtcatctatcaggaactagaaatcggtgctgtggcaattacagatcgggataagttactggcgtttattgggattggctcagaccatcatctgccgggtactcccattgcctctgagcaatcacatcgcgcaatagccaataatgaggtcgtctatgccgatggcaatgaaatcccttattgttgttccctaaaccccacttgtaagctgggttcagcattggttattcctctgcggggtgagaatcagcaagtcatcggcacaatcaaattgtacgaagccaaaaaccgcttattcagttcaatcaaccgaacgttaggggaagggattgccagcctgctttcagcccaaatccttgccgggcagtatgaacggaataaacaatctttgctgcaatcagaagtgaagctgcttcacgcgcaagtaaatcctcactttttatttaatgccctgaatacattgcaggccgtaatacgacgtgatagccaacaggcaggccagctcgtacagtacctttcaacatttttccgcaagaatctgaaacgtccggaagacattgccacactgcaaaatgagatagagcatgtgaatgcttacttacagattgagaaagcgcgcttctgtgaacgcctccagataaccatagatatcccggaatcactgcgctacgccagattacccgcattttccctacaaccgatggtcgaaaatgcaattaaacatggcacatcacagttactggatacaggaagaattacgattagagcctaccagcaaaccaatctgttattggttgaaattgaagataatgcagggctgtattgcccacaaaaattgggggatgggcttgggatgagtctggtagataaacggctgcgacttcgctacggtgagcactatggtgtgcgtgttgattgccagccggaagagtttacccgtgtcattttgtgtttaccactggaagaagaagcggataagaaagcataaatatgaatgtattgattgttgatgatgagccactggcccgggaaaatctacgctgcctgctggcagaagaaacggatattcaaatcattggtgaatgtgccaatgcagtagaagcaattggtgctattcatcgcttgaaaccggatgtggttttccttgatattcagatgccccgcattaccgggctggaaatggtaggtatgctcgacccggagcaccgcccctatatcgtttttctcacggcttttgatgaatatgcaatacaagcgtttgaggaacacgcctttgattatctgctaaagccgctggaaaaagagcggttgagcaaaacattacagcgactgcgttcaggctatcaaaaacagcatctggcagacttacagccagaaaatgagcagctgaaatatattccctgcacagggcacagccggatatggctgatgcaactggatgaagtgttatacatcacctcacgcatgagtggtgtctatgtgatgaacaccgatgggcaagagggttttacggaattaactctacgtacactggaaacccgtactcccctgacccgctgccatcgccagtatctggtcaatatgacccatctgcgggaaattgttttcggggaaaacggtcatgcagaattagttttacgcaatgatgcacgtattcccgtcagccgccgttatttaaagccgcttaaagaagaactgggattgaattaatcattttgtctgcaccctatctatacacaatggatttcaaaatgcatcgcggcggcaagggaactcatccccgggagcatagataaccgtatgtttataaaaacggtgactggggtaagtgagcgcagccaacaaagaggcaacttgaaagacgaagtgtataagccaaaatcaaataaggatatgtatggtcgatctctacctgaaaattaaaaccaatcaaatgaccctgaaaaatctcaataatcaaaaagaactgagtattacaggaaatttcagcacttctcgcttattggttggggatttctatgatgcaaagctgcaattggattcgttgtttaaacaacatggtctgatgcgatttattgagagatttattgggcgcagacatcgggtacttattcatccattggaacaatcggaaggaggcctttgctccgtggaagaacgtgtattactggaaatcacgtatgttgtctccagagcaattacccaaaaaatgattatccatcaaggtgagtgcttactttcagatgcggaagttaaagatattctgggccggaaatagcctgaaaaaatcataaccacccgtataacgggtggtttgctcttgccctataagggcttgttaccgactgcgcctaaatgacgctgctttctcttcgttcaagctaagtgtctttgctgctttggcctaccccttgaaggggtctacatgctctttactactcaatttatccgagattaaatccgacttttcttgctctctgatatatttttgaattgtcgcttcatttagccctaccgtactgacatagaacccttccgcccaaaactttctgttgccaaatttatattttaaattggcgtgtctatcaaagatcatcaacgaacttttacccttcaaatatcccataaagcttgaaacgcttagctttggtggaatactcaccaacatatgaacatgatctggcatgagatgaccttcgattatttccacacctttatacttacaaaggtctctgaggatctctcccacacttgaacgaatattattaaaaatcactttccgtctatatttcggcgaaaagacgatatggtatttacacagccactttgtatgcgctgagctttgtgctttaatgcccataaacacctttccttatttgagttacgaatattagcttgaacatctatatcgtaacggaaaggtgtttttcttggtataacctttgaactccacccgcaaagcgggtggttttatgtttaagacgctaacgcgacttaaactggctaaagccataaaaaaaaatcagccgggcattatgcccggctgataaaatgtactcattttaaaactatcaagttatgtctttactttattggatctggaaaataaataaccaacccacaatgctccaatccagaatggcatgaggataacagatatacgtataccaggtatcgtcaggatgataataagaatacaagccagaaatatcagacacaggaaattaccaaatggataccagaatgctctgaaacttgtcttaaccccttcggcattctttgcagcccgaaatttcaggtgtgacacacaaatcataatccaattaatgactaaggttgtcactaccaatgccatcaaaagctcaaatgccttacccggcataacatagttaattaatacacctatcgatgttgccaacgctgacaatgcaattgataaaaccggaacaccgcgcttattcactttggtcagaatacgtggtgcattaccctgcttagccaagccgtacagcattcggctgttacaataaacgccgctgttataaaccgacaacgctgcagtcaaaacaacaatattcaaggcattagcaacccaaaagctatccaggttatggaaaatcagaacaaatggacttcccccctcaacaacttttatccacgggtaaagagacaatagaatgaacaacgaaccgatataaaacagtaaaatacggtacacaacctgattagttgccttcgggatatttttttctggattttcagcttctgccgccgtaattcctacagtttccaatccgccgaatgaaaacataattacagccattgctgtgatcagacccgcagcaccattaggcatgaaaccgccatactgccataaattacttacgctggcctgtggccctcctgttccactaatgagcaagtaagaaccgaagaggatcatgccgataatggctccgactttaatcatagagaaccagaattctgcctcaccatagagccggacattaattaaattgacagagttaatcaccacaaaaaatattgctgctgaaacccacgttgggatctcaggccaccagtattgaatatacataccgacagctgtgagctccgccattccaaccagtataaacataacccagtaattccaaccggatagaaaaccggcaaaattaccccaatatttataagcaaagtggctaaaagaacctgctactggctctgcaacaaccatttcccccaactggcgcattatcaggaatgcgataaaaccactaatggcataccccagaagcactgaaggcccggccatttttatcgtttgggcaattcccaaaaataaccctgttcctactgagccaccgagtgcaataagctgaatatgcctgttctttaaaccacgcttaagcgtcgactgttgtatatgccccgtcatctagtcctcttatttcgataattatatccgtcgtctttcaggccatttctgtgttggcttagctcacttaccgctacgattcagcccgaaatccattgggtatagaacctgtttaaactattttatttgtcgttttggacctgaactggccgaagaaaccttagatttcttcaatttttgcgcgatctatcatacccaaactgccctgacactattgctatcgtgtcagactctaattttgacccaatatttagtttactcattcaaatcagatgaatattaaaacatcattcacaaagaataaataccggaaatgcatactaattcactcttcgtccccttgtgattgtaatgcatattcaggcccgataagagtaaaattaactctcgattgtcgattatgtataaaactaaaatcttgaaaagaagttgtgtatacttcccatcacctttaaccaatttataattgtaatgccacaggataatcacttagcacttgtatgcgcactgagtaaatggatagaaaaccaccttggtcgtgtcatccatcttgaagaacttgctgcttactctggctattcgctttggcacatgcagaaaatattcaaggaagtcaccgggatctcactgggtaaatacatacgtcaacgtcgtctggctggtgctgtacatcttctgaagaacagttcccaacccatttttgatattgcgctggattttggcttcggctctcaatcccactttacttatatgttccgtaaagaatatggcattacaccttacgattttcgtcaaagtacagatatagagcttgaagttaaacttccattacatctgtcttacaattgctaatcataagataagttatgcggccagacatcaatatcaggccgctaccttactaacttctcaaccatcatccttagtgctacaacgagattagttttcatttaatttatacttttcaactaaggctaatgctatcgcttccgtttctgcatcgggataaccctgaatatctgatggacgaaaatgcatctgaaatgcccggatcgttttatgcgtatgcacatccagatagcctgtctgcggaatagaatacccataaacagccagtgctttttgtattttgataacgggaacaggcgtatctggtgctctgtcagctaaatatttactgaccgtggcagcatcaggccaggccccgatcccttcttcataaagagtatgccatggaaaaacaggcccgggatcttctttccgaagtggagcaatatcactatgaccaaccacattcacagcttcaattttatgcctacggataatatcttttgccagtcggatcaaagcatctatttgtgttggatgatattcacaccactcttttttaaaaaagtattttttaaatccacaattaactatttctatgccgatagaataattatttaaatttttataccccctccattcacttctgccggcatgccaagctttttctccctcagaagataattgaaaaataatcggttcattatttttatatttgggatgagcgggaatcaaatactggacgctgacattaccgccagtcagagcccgtaaggaacgtttctcattcaaagccgtgtaatgtacgaccagaaacttaactgattcaatattctgttttgtcgaatacgaataagaatgatcaataagataatcattcctttcttccaatggggattgccgactacaaccaatcaatagcgtaataagcatacctactaagatttttctcatcatatttatacaataacagaagaaaaattgaataatgtcactatatagtagatgaaactagaatagatgctgtctttttatcggctggaatgctatgcgttataccgtttttacaataacataaaagccggacttccattaaatctggaatatccggctaatatgtctattcattttattttactaataatgaatattggtcttaatttcagctattacgtttttgattcttctgagccggctcattatcccaaatgccttcttcaatctgcttttggagctccggatacatattaatatcaaatgttggcaacttccctgcttgtctctgctggttatagtctttagccaatttcagcgcaatgcctgataacaagaaaatagctatcaggttcacaatagccatacaggccatggatacgtttgccatattccagactaaaggcacttccgccattgtaccgaacatcaccatggctaatgctgcaatacgtaaaatgaataaacctgcagtatggttacgttcgaggaatatcatattactttcagcataagcgtagttagcaataattgatgtaaaggcaaagaagaaaattgcaatggcaacgaaagttgttccccaatgaccaactgcggaggatagcgcacgttgcgtcaattcaatgccgctgatggcagtaatattctcattaaggatgcctgaagaaagaataataactgctgtagcactacagataacgatcgtatccataaatacccccaacatctgcacatacccctgagaggccggatgtggcggatatggagaagcagaagccgctgcgtttggtgcagaacccattcccgcttcattcgagaacaaaccacgctgaacgccctgaagcattgcctgggaaataccataacccaatgctcctgccgcagcttcctgaaaaccaaaagcactcttaaagattaatgcaaatacttccggaatacgttcaatattgtggcctacaacccagaatgccagaattaaatatgcacccgccataaatgggacaactaattcagcaacccgcgcgattgagcgcaaaccgccaaaaataatcacaccactaataatgactaatgcaataccgacatataatggattgatatcgaaggcaaaagaagctgcttgtgcaattgagtttgcctgaacggcattaaatacaagaccaaacgcgataataaggaagaatgaaaacaatacacccatccaccgcttcttcaaccctttctccatgtagtaggctgggccaccacgataatttccctgatcgtctttcgtcttgtacaactgagcaagcgtgctttccacaaaggaagttgccataccaataaatgcaacaacccacatccagaaaatagccccagggccaccagcagtcagtgcaatcgcaactccggcaagattcccggtccctacgcgcgccgcaaggctggtacataaagcctgaaaagatgagatgccggatttatctgatttcttgctgtgtttcaggactgaaaacatgtggccaaaatggctaagttgtataaaaccaaatcgtatagtgaagtaaaggccaaccccaagaagcaagtatattaatacgtagtcccaaagaatgttgttaatgaagttaatcagatccgtcaagatattttccccttactattagcaaacattagctgaccataatcagtatccgtctaaaatttattgtgcttaatatcctttattattaacaagtaacacaattctgcgaatgagacacagagatactagccagtaaaacgaaaagaatgtaacacaatatctatttcaatgggtaacttttaatgaaatttttacatttactttagcgtttatgaacatttgcactaagttacattcatgccaacggccctattttaggcctgttaatcatacttaatgacgaataaatggtctgttttgttgatatcagctgtatttaagatgcacatcttacgaaacaattaacacacaaaaaagaaacaaataacaaacaaagatcaactttttcaaaagtaattaaatataaaacgcttataagcgcttcttttaatcactgcccgcatgtttgatagatagaaaatcaattgtttattttacaatctatcaatgtcgttaatctctcgacacagcaataattgcattcattaaaaacactaaaataacgacaaaatttaatgttgaaatctcttgaatttaagaaaacatatagcaatatctttcttcaaatgagattattaaattttaatgctgtgataattggaaaaagccaccatttcatattaagattttcacttgttattttttacataagaaataaaaaaaacaggttagcaagatattaatattccactatctggccatcagataatctgctagtgaggttatgattgatgttagaaagaaaaagaaaaaatccagcggataacatactgccaaaacgtgtaaataggggaaaatctaaatacgagtaccatccagcaacaggcggttctatctcaatttgctgtttaaattcgccactgtctgttatctggaaagagtacaacaagattgtagaaaaaattgaaaaaaatagtacttagcccccctgtttatatcaaaatcataaccacccgtataacgggtggtttgctcttgccctataagggcttgttaccgactgcgcctaaatgacgctgctttctcttcgttcaagctaagtgtctttgctgctttggcctaccccttgaaggggtctacatgctctttactactcaatttatccgagattaaatccgacttttcttgctctctgatatacttttgaattgtcgcttcatttagccctaccgtactgacatagaacccttccgcccaaaactttctgttgccaaatttatattttaaattggcgtgtctatcaaagatcatcaacgaacttttacccttcaaatatcccataaagcttgaaacgcttagctttggtggaatactcaccaacatatgaacatgagctggcatgagatgaccttcgattatttccacacctttatacttacaaaggtctctgaggatctctcccacacttgaacgaatattattaaaaatcactttccgtctatatttcggcgaaaagacgatatggtatttacacagccactttgtatgcgctgagctttgtgctttaatgcccataaacacctttccttatttgagttacgaatattagcttgaacatctatatcgtaacggaaaggtgtttttcttggtataacctttgaactccacccgcaaagcgggtggttttatgtttaagacgctaacgcgacttaaactggctaaagccataaagtaaaaacagtacggtaataatttattattaccgtactgaaatgagtaatatattaatttttatatgcgatatgcgctctatataacgattagctcgttattttttcattctcaatttgatttaaaagctctctaaaatagacaactaatggacgtaaatttgctttgtgccatacagcccaaagctgggtggtaatattcatccagggcacctcgcgtaaaatagcccctttaggcaagttatagcgcaaactattttgtatcaatgtcacgccaaggcctgcggcaacaaggcctaacgctgttaacggttcttctgcttctaaacgaatatctggccgaaaccctgctttcacacaggcggcaacaaaatcatcccgtgagtgcgaattatcattgttgtgtaagactgagatccattgttgtgccgttaaatcatcagggataatgtgctcttttgttgctaaagggtgatgatgaggaaccgccactaacatgcggtcattcaatacttgtcgatattctaattcactcccttttccttctggtggagtatcaaccatcgcaaaatcaaggctccgttggcgcagtccttcgaactggcgttctggcgtttggttatacaacgcaatatggacatctggatgtgaatcccttaacacacttaatgaacttggcagtatgcctgagtgcattgcattttcaatgtagccgacacacagtccaccatcttctcctcgacctaaacggcggcctaatgattccaagcgattggcgtgagtaaggagtgagcgcgcttcagtcaaaaacgtttgtccatcagacgttaagcgaattcgttgctggcttcgttcgaacaacattaatccgagtctgtcttctaattgagaaatttgccggcttaatggggattgtgaaatatgtaggcgctttgctgcacgcccgacatgttcctcttctgctacaacaacgaagtagctgagttggcgcaggtcaatcatagttattgcctttaatgtcttaacttagactaattatgtcctttcatgtcataaaaaatcaacctactatcatgctccatgataggatggttcactctcctgaatcatcattttgctgataacaagctaatttatttaaggaattacaatatgagtattaaaaaattacttcctagccaaattggttttggcggagcgccattaggtaacatgtttagagcaattccggatgacgaagcgattgcaatcgtacaggaagtatggaatttaggggttcgttattttgataccgcgccgctgtacggttctggtttatctgaaatccgtatgggtgaagtcctgtctcaatattcacgtgatgattatgtgttgagtaccaaagtgggtcgcatcatgttagatgagatggaagatcctgcaaatcgtgatttcggggaaaaaggcggtctttttgaacacggtttgaaaaacaaaattcttaatgactactctgaagatgcgacactgcgctctattgaagatagtctgaaacgtttgaaaacagaccgtattgatatcgtgtggatccacgatctttcacaagatttttacggagatagttggttagagcattttaacaccgcacgcactggtgcattccgtgccttaacccgcctgcgtgaagaaggcgtgatcaaagcttgggggctaggtgttaaccgcgttgaaccttgtgaattaacactgggcttagatgagccgaaaccagatgcattcttattggcaggccgttatagcttattagatcacagccgtgcactacaacgactgatgccagaagcgttagagcataatgttgatatcgttgttggcggcccatacagctcaggcgtattggtagggggcgcgcattttgaatatcaaaaatcttccccagctattcatcaacaagtcgcgaagatttatcaaattgctaagcaatttaatgttgatgttaaagccgctgcattacagttttcactagctaacccagcagtagcagcggttatccctggttcaagtcgtccaggtcgtatggctgaagatttagcagcattaaccgctaaagtcccgactgatttctggttagaaatgcagcgccaaggcttggttgctgttaacgcaccattgccaattcgttaatcgctcaatgagttgttgatgc

SEQ ID NO: 3418 - DNA, 32325 bp, Xenorhabdus sp.; identical to SEQ ID NO: 3417
  CDS (25458)..(25838)

SEQ ID NO: 3419 - DNA, 32325 bp, Xenorhabdus sp.; identical to SEQ ID NO: 3417
  CDS (22482)..(22826)

SEQ ID NO: 3420 - DNA, 32325 bp, Xenorhabdus sp.; identical to SEQ ID NO: 3417
  CDS (21539)..(22258)

SEQ ID NO: 3421 - DNA, 32325 bp, Xenorhabdus sp.; identical to SEQ ID NO: 3417
  CDS (19839)..(21536)

SEQ ID NO: 3422 - DNA, 32325 bp, Xenorhabdus sp.; identical to SEQ ID NO: 3417
  CDS (16744)..(19671)

SEQ ID NO: 3423 - DNA, 32325 bp, Xenorhabdus sp.; identical to SEQ ID NO: 3417
  CDS (11204)..(11491)

SEQ ID NO: 3424 - DNA, 32325 bp, Xenorhabdus sp.; identical to SEQ ID NO: 3417
  CDS (9671)..(10135)

SEQ ID NO: 3425 - DNA, 32325 bp, Xenorhabdus sp.; identical to SEQ ID NO: 3417
  CDS (7741)..(9666)

SEQ ID NO: 3426 - DNA, 32325 bp, Xenorhabdus sp.; identical to SEQ ID NO: 3417
  CDS (7058)..(7444)

SEQ ID NO: 3427 - DNA, 32325 bp, Xenorhabdus sp.; identical to SEQ ID NO: 3417
  CDS (6494)..(6970)

SEQ ID NO: 3428 - DNA, 32325 bp, Xenorhabdus sp.; identical to SEQ ID NO: 3417
  CDS (3804)..(4184)

SEQ ID NO: 3429 - DNA, 32325 bp, Xenorhabdus sp.; identical to SEQ ID NO: 3417
  CDS (31)..(951)

SEQ ID NO: 3430 - DNA, 912 bp, Xenorhabdus sp.
  CDS (3)..(911)
ctctaagttgggacgattatcgccagcagcacggtattgaggcagcaaagcaggcattcagtgaagggttgtatcaggtggaagtgaatatgtcagtaccaaaatcagtcgtcattaatctggacgaacaccgggcaaaagagcgtgatccgttaataccgttcactcaagcccgaaaagagggaatttttcatatcacccctaaattagataaagaaacaggcgagattatcaaacctgagcaatggttatgctcctttgttgaagtcattggaacggggacgctggatggtgatgaagatgatcaatatcttatttttcgttggaaagcccagggtaagaaagagcccgtgattaaaggtatttcctcggctcatgtgggtgaacgtgagggatggcggatactgaaagcggcgggtgtacaggtcaccactaaaaaccatctcagggccattctgggtgactggtttatccgaaacccggcacaagaaacatggagcgttaccactaaaacaggctggcacaaaggtgcgtatatcatgcctgatggttccatcatcggtacaccagaacaacctgtgttatttgtggggggcagtgcgtcagcaaatgcctacaccgtctcaggaacggcagaaagctggcgtaagcatgtagccacactggcgaataataacccgttcatgatgctgggtattgcgactgcattagctgcacctttggcgggtatcgtgggaactgatggcttcggtattcatttgtacgcccaatccaccgcggggaaaacgacaaccgctgatattgcaaccagcttatacggtgaacccgataagcagcgcctgacatggtacggcactgcattaggtattgccaatgaagcactggctcataatgatggtctgttatcactgg

SEQ ID NO: 3431 - DNA, 32812 bp, Xenorhabdus sp.; identical to SEQ ID NO: 486
  CDS (108)..(230)

SEQ ID NO: 3432 - DNA, 32812 bp, Xenorhabdus sp.; identical to SEQ ID NO: 486
  CDS (913)..(1776)

SEQ ID NO: 3433 - DNA, 32812 bp, Xenorhabdus sp.; identical to SEQ ID NO: 486
  CDS (2947)..(3330)

SEQ ID NO: 3434 - DNA, 32812 bp, Xenorhabdus sp.; identical to SEQ ID NO: 486
  CDS (3934)..(4776)

SEQ ID NO: 3435 - DNA, 32812 bp, Xenorhabdus sp.; identical to SEQ ID NO: 486
  CDS (4942)..(6294)

SEQ ID NO: 3436 - DNA, 32812 bp, Xenorhabdus sp.; identical to SEQ ID NO: 486
  CDS (7329)..(8558)

SEQ ID NO: 3437 - DNA, 32812 bp, Xenorhabdus sp.; identical to SEQ ID NO: 486
  CDS (8944)..(9330)

SEQ ID NO: 3438 - DNA, 32812 bp, Xenorhabdus sp.; identical to SEQ ID NO: 486
  CDS (12463)..(14082)

SEQ ID NO: 3439 - DNA, 32812 bp, Xenorhabdus sp.; identical to SEQ ID NO: 486
  CDS (14097)..(15116)

SEQ ID NO: 3440 - DNA, 32812 bp, Xenorhabdus sp.; identical to SEQ ID NO: 486
  CDS (15113)..(16111)

SEQ ID NO: 3441 - DNA, 32812 bp, Xenorhabdus sp.; identical to SEQ ID NO: 486
  CDS (17293)..(18177)

SEQ ID NO: 3442 - DNA, 32812 bp, Xenorhabdus sp.; identical to SEQ ID NO: 486
  CDS (18179)..(18478)

SEQ ID NO: 3443 - DNA, 32812 bp, Xenorhabdus sp.; identical to SEQ ID NO: 486
  CDS (21344)..(22321)

SEQ ID NO: 3444 - DNA, 32812 bp, Xenorhabdus sp.; identical to SEQ ID NO: 486
  CDS (22339)..(22962)

SEQ ID NO: 3445 - DNA, 32812 bp, Xenorhabdus sp.; identical to SEQ ID NO: 486
  CDS (23446)..(26283)

SEQ ID NO: 3446 - DNA, 32812 bp, Xenorhabdus sp.; identical to SEQ ID NO: 486
  CDS (29790)..(30359)

SEQ ID NO: 3447 - DNA, 32812 bp, Xenorhabdus sp.; identical to SEQ ID NO: 486
  CDS (30667)..(31242)

SEQ ID NO: 3448 - DNA, 32812 bp, Xenorhabdus sp.; identical to SEQ ID NO: 486
  CDS (32649)..(32783)

SEQ ID NO: 3449 - DNA, 32812 bp, Xenorhabdus sp.; identical to SEQ ID NO: 487
  CDS (29226)..(29444)

SEQ ID NO: 3450 - DNA, 32812 bp, Xenorhabdus sp.; identical to SEQ ID NO: 487
  CDS (25730)..(26365)

SEQ ID NO: 3451 - DNA, 32812 bp, Xenorhabdus sp.; identical to SEQ ID NO: 487
  CDS (21871)..(23427)

SEQ ID NO: 3452 - DNA, 32812 bp, Xenorhabdus sp.; identical to SEQ ID NO: 487
  CDS (14042)..(14230)

SEQ ID NO: 3453 - DNA, 32812 bp, Xenorhabdus sp.; identical to SEQ ID NO: 487
  CDS (13372)..(13596)

SEQ ID NO: 3454 - DNA, 32812 bp, Xenorhabdus sp.; identical to SEQ ID NO: 487
  CDS (12277)..(12870)

SEQ ID NO: 3455 - DNA, 32812 bp, Xenorhabdus sp.; identical to SEQ ID NO: 487
  CDS (11711)..(12313)

SEQ ID NO: 3456 - DNA, 32812 bp, Xenorhabdus sp.; identical to SEQ ID NO: 487
  CDS (5369)..(5980)

SEQ ID NO: 3457 - DNA, 32812 bp, Xenorhabdus sp.; identical to SEQ ID NO: 487
  CDS (4362)..(5246)

SEQ ID NO: 3458 - DNA, 32812 bp, Xenorhabdus sp.; identical to SEQ ID NO: 487
  CDS (729)..(968)

SEQ ID NO: 3459 - DNA, 33524 bp, Xenorhabdus sp.; identical to SEQ ID NO: 420
  CDS (4577)..(5734)

SEQ ID NO: 3460 - DNA, 33524 bp, Xenorhabdus sp.; identical to SEQ ID NO: 420
  CDS (8658)..(9521)

SEQ ID NO: 3461 - DNA, 33524 bp, Xenorhabdus sp.; identical to SEQ ID NO: 420
  CDS (10058)..(10756)

SEQ ID NO: 3462 - DNA, 33524 bp, Xenorhabdus sp.; identical to SEQ ID NO: 420
  CDS (10857)..(11771)

SEQ ID NO: 3463 - DNA, 33524 bp, Xenorhabdus sp.; identical to SEQ ID NO: 420
  CDS (12727)..(15651)

SEQ ID NO: 3464 - DNA, 33524 bp, Xenorhabdus sp.; identical to SEQ ID NO: 420
  CDS (22021)..(24594)

SEQ ID NO: 3465 - DNA, 33524 bp, Xenorhabdus sp.; identical to SEQ ID NO: 420
  CDS (25122)..(25334)

SEQ ID NO: 3466 - DNA, 33524 bp, Xenorhabdus sp.; identical to SEQ ID NO: 420
  CDS (25371)..(26195)

SEQ ID NO: 3467 - DNA, 33524 bp, Xenorhabdus sp.; identical to SEQ ID NO: 420
  CDS (26220)..(26924)

SEQ ID NO: 3468 - DNA, 33524 bp, Xenorhabdus sp.; identical to SEQ ID NO: 420
  CDS (26939)..(27835)

SEQ ID NO: 3469 - DNA, 33524 bp, Xenorhabdus sp.; identical to SEQ ID NO: 420
  CDS (27871)..(28551)

SEQ ID NO: 3470 - DNA, 33524 bp, Xenorhabdus sp.; identical to SEQ ID NO: 420
  CDS (28742)..(30907)

SEQ ID NO: 3471 - DNA, 33524 bp, Xenorhabdus sp.; identical to SEQ ID NO: 420
  CDS (31037)..(31987)

SEQ ID NO: 3472 - DNA, 33524 bp, Xenorhabdus sp.
  CDS (33079)..(33522)
tcagcaaataggatacggaaaaaatatctactggaccccgaaagatattgcacagttatgtaatcaattaagaaataatgattttgctgtcaaagtgcgagggttagactgccctgataaatttggcttgccaattaaaacagtaacagggttcaggtaatttaatagtgtaaagatgtaaactttaatgaccaccttgctagttcttatattctacctactatgctagagattgattaaaaaagtcagttcactacactacattggattatcatcctaaataatcaaataaaatcagagttaaacactgattatacggggtgtaattttttatttatcattcatgctattaaccccttgtaaattgcttaacccagtgacacattgtatggctctatgggctaacatctaataagctcttctcatttttttctgaacactctctgaacattcaaggatattatgaacgaaccacagacagccaaaggtattttatatgccttaggtgcttatttgatttgggggttggctcccatctatttcaaagaaatacagtacgtgccacccgatgaaatcgtatcgcatcgtgttatctggtcggttttctttatggtactgatgctgacaatcactcgtcactggcgtcaggttttgactgtaataaagcaaccaaagaatctgctggtattaggtatcaccgcctttactattgccagtaactggctggtttatatctgggcagtcaacaataatcacatgctggaagcaagtcttggttattttatcaatccactggtcagtgtgctgtttgcaatgatattcctcggtgagcgtttccgtcgtatgcagtggattgcggtagggctggcattcaccggtgtctttattcagctatggcaatttggctctgtgcctgtgattggcctgtatctggccacaacatttgccctgtatggcctgatccgtaaaaagctgggcgtggacgcacaaaccggcatgttgattgaaactatttgggtactcccggtcgcactgacttacctgctgtttttcactcataccccaaccagtaatatgttgaataacacgatatccctgaatctattgttggttgctgcggggatcattacgacaatcccattgttgtttttcaccgctgcggctgctcatctgcgcttatccacgctaggttttttccagtatatcgcaccaacattgatgtttctgctggcaacactggtttacggtgagaagattggctcagagcgtttgatcacatttggttttatctgggctgctttgattgtgtttacgctggatgcgctttatacccaacggcgattgcggaagtaaatcggcattattactaaactggcccaaagccgtcttggtaaatcgggtcagttcttcttgctcttcttcaataaacttcgagtcatagtataaagataaactcccccagaaacatagctgactatgtaactggaggcagtagaagccgccaaaagagcgacttaaagagtggaaaccggaaaggttacagccagtttttccgcttaaagtagaggtaaggtgccagtcccgcagcaatcatcactccaatagctgccggataaccgaatgtccagtgtaactccggcataaattcgaagttcataccgtagctggaagccaccagcgtcgggggcaggaacacaacagaaacaacggagaatatcttgataatccggctctgttcgatgttaataaagcccatcgccgcctgcatcaggaagttaactttctggaacagggattcgttatgtggcaacagggattcaatatcacgcaggatttcacgcgcctgttctaactggttagcaggcaaacgggcacggcgcacaaggaaattaagagcgcgctggctatccatcagacaaaggcgcactttccagccaatgtcttcctgctcagcaaggttagacagggctgaatcaaattcatccccttgtttaccgttcataatgacccggctcagggattccagcacactgtagatattttcaatgacatctgccagctgttcgatcttggtttcgaataagtccagcaggagttcataagcatttccgtcaaccataatctggttgcgggcacgcattcggtataatcggaatgcagggagttcacgctctcgcaatgtgtagagacgaccgtcacgaatggtaaatgcgactgtcgagttgccagcatggtcttcggcgtcttcaaaatagaagaatgagtggacgtgcaagccatcttcatcttcaaaaaaacgcgccgaagcctcgatatcatccagctcagtgcgggtcgccaggatttgtcctaattcgttctgaacccgaagtcgatcatcatctcccagcccaaccaaatctacccacatggagtcggataatgtatcaccttcttcaagttcaagacggagcaggcgattattctctaatttaaatgcgttcagcatgtaccataagtctccttatactccctacgttcatcgtaaggcgcgaatgttacgcttatacccgtcgtatttcaaactacctcttttctgaaatccatagggtctacctgtcaacattcgaccggattattattggccggtttcaagtctggcataagcggcgaccagccacttgatgccttcaccctgaaacgcgatctgcaaacggcaatgctccccactgccttcaatattaacaatcgttccttcaccgaatttaggatggcggactcgttgccctaaagcgtagccactatcattggcgctgagtggtgttcccagtcgtttatggctcaccggtcgggatactgttgccctcagacgaacttcagtgacacattctgccggtaactcaccgacaaaacgggatgggcgatggtacacctctttaccatataaacggcggctttcagcataagtcagcgtcagtttttccattgcccttgtcacaccgacataagccagacggcgctcttcttccagacgccctccttcatcaatggacatttggcttggaaacatcccctcttccatgccaacaataaagacctgcctgaattcgagaccttttgccgaatgcagggtcatcagctggacagaatcctgataggcatctgcctgcccttccccagcttcaagcgcagcatgggacagaaaagcctgcaacggcatcatatcttcgtcttcatcctgatagctgaactggcgggtcgcagtaaccagctcctcaaggttttcgatacgcgcctgtgctttctcacctttttcctgttggtacatcgcccacaggccagaatcccggataacccgatcagtctgcacatgcagcgacatttcctgtgtttccgtttccagcgcgttaattaattcgataaaacgttgtaaagctgatgctgcccgacctgccagtaccttttcctgaatcaacaactggctgctttcccagagtgtcttctgctgatcacgcgccatctggcgcacaacatcaagggttctgtccccaattccccgggtcggtgtattcactactctctcaaaagccgcatcatcattacggtttgccactaaacgtagataagacaacgcatctttgatttcctgccgttcgaagaagcgctggccaccatagatccggtaaggcatggaagcctgtaacaatgcttcttccaatacacgggactgggcattactgcgatacaggatcgcgcactctttcaaagctcctccgttatccagccagttcttcaggcgactgaccacataacgtgcctcatctagctcattaaaagccgagtaaagtgagataggttctccttcactgccttctgtccacagatttttgcccagacgatcactgttatgtgcaatcagggcattggcggctttaagtatgttactggtagaacggtaattttgttccagacgaatagtttgtgccgcggggaaatccttcaggaaacgctggatgttttctacctgcgctcctctccagccataaatagactgatcatcatcacccacaatcataactctgcctgaatcccctgctaacaggcggatccatgcgtattgaatactgttggtatcctgaaattcgtctaccagaatattagtaaaacgatcgcgataatgttgcaatatttgcggtttattcagccacagctcatgagcgcgtaatagcagttcagcgaaatccacgagtccggcccgatcgcaggcttcctgataagcctggtagattttcagccatgtaacttctaccggattgccgtagctttcaatatggcgagggcgcaaaccttcatctttcttaccgttgatgtaccacatgccctgacgtgctggccactgtttgtcatccagattcatcgccttaatgatccgcttgatcagacgcagctgatcgtcactgtcaagaatctgaaaatcctgcggcagattggcatctaaatgatgggcccgcagtaaacgatgggccagactatggaatgttccaatccacatgccaccctgactggtgccgatcaggttttcaatacgatggcgcatttccgctgcagctttattggtaaatgtcaccgccataatggaaaaaggtgaggcatgttcaactgatagtaaccaggcgatccgatgtaccaatacacgggttttaccactaccggctccagccagtaccagcatattggtacggggtgctgcaacggcttcacgttgtttattattcaggctttcgagcagataagagacgtccataattaccatcagttgttagcaatgaccgctgtcactgtttttctatacccttcgtctttcaagctgcctctttgttggctgcactcgttcaccccagtcacatagttatctatgttcctggggactctctcctttgccgccgcgatgcaactcgaaatccattgggtatatatagatttgcagtctgaaattatatcagtgcgatcagagaatccaagtcagaaatctcaacatgtggaaccagtcgcccttccggttcctgcatgagatttttattttcaatattgatccagcaagcctgcataccgctgagaatggcgccttcaacatctgtctgcaaattatcaccaacatgcaggatttgatttgccggcaatgccagccgttcagccgccagatgatacatatccggataaggtttggaacgcccgtccacgccggctttaagtacaaatttgaaataaggggccagaccacattcagcgggttctgcattaccattggtgatcgccaccagcggtattttttctgccagtaccgataaggtgttatgcgtggatttcggtactgtaatctgattacgccaataagtgaaacaggacataatctcatccgcaccacgtactgcttcttcacggttaaagccgtggtagctgaacatcagctcggcggattgtcgccgccataatgtcacatcgtggtatatttcaggctccatctcaagcaccgcctgacggtatacatacagatcttcacgtccaaaatggctgaatttgctatcgtactgcctgataaaacacaatacttctttttcggttctgtcgatgacgggatgattatcgtaaagtgtatcatccagatcgaatgtcatcgccgcaaacggcgtgagaggccgataaaaacgcattatgatttccctctttttgctctggggtgagccacatcataaactttggctaagtgttgaaaatccagatgggtgtatatttgggtagtcgataaatttgcatggcccaatagctcctgcactgcccggagatcaccactggattccagaatatgtgtcgcaaacgaatgacgcagtttatggggatgaatatggctgtttactccctgacgaattccccattgttcaaatcgcttttgcacattacgtgtagacatccgtttaccactttgggtagaaatgaaaacagcattatcttccggttcaaacaattcccgcattactagccagcgttgcagccattccagtgcaattctgccgacagggactttccgctccttactgcctttaccatatacccagacttcgccgctttccaaatccagatgccggcaatccagcccaaccagctctgacaaacgtaagccggcaccatacatgacttccatcattgttctgtcacgcacggacaacggatcattcagatcaatattgaggagctgatttacctcatcgacatccatgttcttaggtagatgctgttttttacgtggcgcgctgacaactttcgccgggttagcttccattttttcctgcgttaccatccagtcaaggaaactgcgcagggaagaaagacgcagggcaaggctggcagactgtaatccagcccgacgactacgggcagcgaacattctgactttggtgacatcaagtgcctgccactcggttatgcccatttccagtgacatttcggccagcaccgtcaaatgtcggcgatagttgattattgtcatcgggcttaaacggcgctcaacccgcaggtgatgcagaaaagcctctactggctcaaggagtgaatcaatgggctggctcatgctcgctcgacccaacgggatagcaaccccggtaatagtttcgctaactgatccaacaaatccgttcccatgccctcgtaataatgttgcttgtcatgactattgaagatcaccatgcccagctctccccgcattcctaaaagagatactgcgacagaaccgacatgacgggcctgaggcatcagcagtaaaatttccgggccatgtaaccgcccaagataatgattactatcgccgaatcgctgaatacggacagactcaaaagcattacgggatatcgccaaatccggcgcattcagaggagcgccaagcaaccacttatcagaaaacagccggatatagcagttactcagacccagtgttttagcccaggcactcaaacgggaaagaaaaccctgcaaactttcggcagcagaaagttcagcaagcaattgcagcaggcggttaaacaggatctcattctgttttgcctgctccaccagatgtactagatcgtcttccagataaccgatccgttttctctgacggttcatatgccattccatcagagaaacacattcacgcaccggatgaggaacctgtatcctgtcaactgcattagcattacggataaaaaaattggggttatccagcagataatccaccaccatctgatcatccaacatgctttcagtatgtaatggttcgttttctttacccattttccaatgccttatatttcacagttacaagtgaattgtaccgtcataaacgtgagttgcaggcccagtcttataaagtggctgccccggcccatcccaacgaatttgcaaagaaccaccgggcaaatcaacacgaacctgtttatccagcagaccttgctgaataccaatcgcaacagccgcacacgcaccactgccgcatgcccgggtttctccggcaccccgttcaaatacacgtaaacgaatatggttacgacttacgacctgcataaaaccaacgtttactctctcaggaaaacgttcatgacgttccagaacaggaccgagtacctcaacatctgccgtgtccacattatcaacctgaataacacagtggggattccccattgagacaacaccacagagcacagtgcgctccatgacccggatgatataagttttctcggctttattcgcgcgaaagggaacagactggggttcaaagacaggttcccccatattgacacagacctgatcatcatgattgatgctcaagaccatttggcctgcctgtgtactgactttaatatcacgcttattcgtcaatccccgtaaacgaacaaaacgggcaaaacaacgtgctccattgccacattgagatacttcactgccatccacgttaaaaatacgataatgaaaatctaaatcaggatcatagggtgcttcaacaaccaacagttggtcaaatcctacgccagtatgcctatctgacaaccggcagattaattccggtgaaaaataaacattctgggttactgcatcaacaaccatgaaatcattgccaagaccatgcattttggagaattgcatataccactccaatgaaagcccatcaccagctcacgcttactgggcactcgctgagatattgtttttagaagtatcgtttttattagacgtgctgtcctgagaaacatgacccgcaggctgtgccgtattaactgaaacctgaggtgccgctggctccgccggagggaagtagagaggacctttcaggccacaacctgtaacagagagtaatgttatgatagcaagtgaccaacggaattgtttgttcatcataattaatgcctgtgattcatacgccaatactctctataatcgcagttaggccctgaaaagcaaataggaaatgaatatgaacgatagcgaatttcatcaattggccgatcaattgatgtcacacattgaagaacaactggataattatgaaggtcatgcagatattgactgtgaaaccaatggcggtgtcatgacgctgagttttgataatggtagcaaaatcattatcaatcgacaggaaccttttcatcaaatctggctggcaactaaaaatggcggttatcattttgattatcgcgataaccagtggatttgcgaccgtagtggcaacgactttctttatatgttgggacaagcaatcaccgagcagagtggcgagcctttcctgttttagctcgttgctatctagctcgcttttatataaagctgcaattatcagcatttgtgccgtatcgaaaatacggcacttttatgacaaatatgtatgacaaacgcgcggctattccagcgatggctcactgagttcaatagtggcaagaatggtactgactattcgccctcattgcttcacccgtctccagcacggtaacactctctgtctcatgatccagcagtgactgcccatccataaatggagctacatgagtgcgttcacccttctttatgatctgatagaactgtggcaggttaaaattgatgaaactggaaccataagtgaatcgatcatgggatgaagaataaaaacggctgacatcacgtaccagctcttctttacttccttcacaatgagggtaaatctctaccttgtttgattcatcaagaatataaatgttgaaaccctgagtgccctcaatattctcaaagaaaaactgaattattccctcacaggcaaatccgtcaataatagaaggcagctgtttatctttattatcaactctaatcggtaaaccatgcagcttggtatttgaaattgcattgtaaaactcaaccgcattttccagtttttgtactgaaacattcaaccgttcaaaaaacagcccccaggtttgaccggaaatacgtaataccttgcagcgatcaagatcctgacggttactggaaaggcgtaattcgatacattctgaaaccaattgcctgacacgggtacaaatcaacccacgcaagtgccgactgtaacaaaagacttcaacgctcgctggaggtgcggcgtcacgatgcattttgcccagaatggttttcagcgcttccagcatggattgttcaccattaaaatgcagcgttctcacttcattccatgaattacgataaagcagatcaatgctgctcaccatacactgctgtgattcaccaaaactcaggatatctaattttctgaaatcaaaatgcacaatctgatcggaaaaccgggtcgttggatcagtttctaaattaacaataattgccagatggcggatctcacagggactgtatagtgcttttggtgtcggagcaggcaaacgaatcgggaaatgagtggaaatatcgttgactaaatcagccaaattctttttgtctgcctgagaatcaccattgcgaatatgaagacgggttttttccgtcagcaacccgttgaaataggtccatgacaccagcttatttaaataacgattatattccagcggctgatgaccaatgatagattctattgtcggggcacggttgtagagataccagccactgcgatttgcccgccccgggggaacataaataaaggtcagatcctgttctgacagatccggtgaaatttgtgggttaactaatgtgattttgccgggcagtgcttcaaacgcagcatacaacttacgagtcaatacgccgatgtcctgcgggctagcactcacacttaaattgttacgccgggcaaaacggatcaggttgcgataactctgcatcatggtatccagcaactcattatgtgctgtacgtacctgctcaattttccatgaattgcggttattcagtatcgccagtttctcagtatcccatccccattcctgtactaactgagcaataacctgccgccgccatccagtgcatccctgagcaccgtcactactctcagttttttcacaaactttcagataaaagcagcgccgggctaaatccagacgcgtcatatcgttagtcaccgtcaggtaatgggtaacacgatcaagcatcatgcaataagcatcaagaccataagagacaatcaagccttcatggaaatgttgcttcatttctgtcgccagcaattcactgttgggatattcccaggaataggcttccagcaacaggcttttcaatacggctttataaggagaatcaacacttttataaagttgccataaactggctccaaaatattcttctgccgataactccgccaatcctccaagatccagccactcattaggtgttaaaaccccctgagcatataaagaggtgacataatcatcgtaattcgcttcttcttctacagggaccatcgcccatagcaggcgtttacctgccatccgaaccgcagtgcgataaaactcatccagtagaaggatatactgagttgaaccacaatcttcgccattcaggctgccactggtattatgacgaaaacgattctcatctatcagaaaaaatgtaacctcaatacccagtgaagcggcccactgttgtattaaactgcatttttgttccaatgaatctttttcgctattatccagccatgattgatggcaaacccaaatatctaagtcagaagagcagctttgcccgatagaagaggtgctgcccatcgagtaaatacccgcaattggcaattcaccattagaggaatgagatacaataccagctggctggtattccatatctttaatccaaaatagctgggtttcatcaggtttaaaaaaacaaacgccatgaggaacgtcgttttcgatataacccggcatcattgggtgatgataatgtaataatactggaattaaattataaacctgcttaaacgtggcactcatcgagtcagtcgcacgctctaacctaagctgattaattgcatccagccgctgcttcagcgtttcaatataaagatacaagtgttttgcctgcttcagtttcagtgcttacaatcgccagtttccactaaggcccagcgcccgttaacgctttattcctgttaacgtgcaatttacaaaaattatttttagatttctttactaacttatttgtcggaaacgtgatcaatttaacaccttgcagctaaagcgtaaagcccgcaataccactttttcgcctgccctacaaccccaaataatcaattaaccctttgtaaaatattaagttaatcacaaatttgagactaaaatatgttttttgaaatagattttatattcatctaatttctatattgctcagataacatattgtaaacagtgaattttagataaccatttgattaattttaattgataaacatctttatattttttcacaacagataaatgacaaataggaatttgattttaaatcaatctttttgtttattttctctatttagttaaaatattattttaatatttaaaattatttttaccaattaagactgtatatttatatactattcgagtttttcttaactggaaaaaacattatcgaagtgttaaaagagatctatttttacggttctacttttcacttctgaggttaacaacctccaattgccgttaattaatacaattatccaatactattatccatgacaatgaaaaccattcgcattgcgactcgccaaagccctctggctatgtggcaagctcgatatgttcaaaaacaactaaaacattttcatcctgatttgcaggttgaattaattcctatgactacccgtggagatatcattcttgatacccctctcgccaaagttggtggcaaagggttatttgtaaaagagctggaactggcaatgcttgaaaatcgcgctgatattgccgttcattccatgaaagatgtcccagtcgaatttcctgatggtttgggattggtcacaatctgtgaaagggaagatccacgagatgcttttgtttcagtagaatacgcctcgctcaatgacctcccaaccggcagtatcgtcggaacatccagtttgcgccgccagtgtcagctgcgccagcttcgtcctgaccttgtgatccgcgacttacgtggcaacgttggcacccgtttaagcaaactggacaacggtgattatgatgcaattatccttgcggctgccgggctgaagagattagggctggaagatcgcatccggatgccactcgcgccggaattactgcttcctgctgtcggacaaggtgccgttggtatcgagtgccgtctggatgacatgcagacccgtgagttacttgcacctttaaatcataaaaacacggaaatttgtgtcctcgctgaacgagccatgaatacccgtctggaagggggctgccaggttcctattggtagttatgccatctggcagggcgataatatctggttacgagcgcttgttggcgcacctgatggcagtaacatcatccggggcgaaagaactatttgtagtgaaaaaacgagctgtagtgaaaaaacgagctgtagtcaaagcactatcagcagtgataaagcaatatcatccgaagaagcttgtcaggcgggtatttcactggccgaagaattattggagaaaggtgcccgccagattctggctgacgtttatcagagagatctacctgcatgagtatcttaatcacccgccctgcccccgcaggagaagaattggttaagcggttaaaagctgctggtaaaacggcattcagtgcgccacttatttcaattcatccgggggccgatttgccgttgctgtctcagaaactgcaaaggctaacggcaggtgattttgtctttctgctctccaaaaatgccgttcattatgcctgtgagcagcttggacaagatagcctgtcatggtctgacagactatcttattatggtatcggtaaatcaacttccctgttttttcatcaaaaaacagggaaaagcattctctggccagaccagggagaaaccagtgaagatttactgcaactcccctccttgcagcaggtggagaataaaaaagttttattactccggggtaatggtggccgtgaaatgattgcttcaaccctgcgggcaagaggagcagaagtcgactactgtgaatgctatgcacgtcgagctgtcaaatatcattcagctgagttcagtcattactggcagcggtgtggtataaaaaccatcgttgttaccagtggcgaaatgttacgactgttatataacttagttattgaaggtgatagcgctgaaggtaacgctaatgatagtagtaatagcaaagcgtggttattaaattgccgactgattgtggtcagtgaccgcctcgccagtattgcccggacactgggctggcatgtaataaaagtagccaagagtgcagataatgacgccttaatgcaggcgctggaataaaccaatatgggatgtccattatgacggaacaaaagaaatccactgatgcggttgagatacaacaccctcagcagcctgaaaaggctcctcgcaaatccagaaattatggatgggtgggcagtactctctcaattgccattgccttggcagtaggcgccggtgggctctatctttattatcacaataaacaacagaacgaggcattaagagctgcaaacctcaatctgcaaactcaggttgcttccctcatacaacagcaatctgtcgataagcaggatgctgacagcaaaattgaacagttaaaacagggcttgcagaaagaagagacgaaaaaccagcagcaaatcgagcaagtagacagcaacatggcagaacttcgggatcgagtttctgctgttacgaattctgacgttgagaactggcgtctggcacaggcaaattttctcgtgaaaatggccagccgcaagatatggggtgatcaggatattgccaccgcccttgcactactaaaagacgctgacaacagtcttgcggatatgaatgacgccagcttaatgcctgcccgttcagcgattaagacagatatggatacgctgtccaaaattaaacaagtcgatctggatggtatcattctaaccctgaataacttatcaaatcaggtagataacttaccgctggttgataaagtggaacaggggaaacccatggatgaagatggtaaagagatcagtgcctcactctctgactggcgtcagaatctgagcaaaagctggcacagttttatggataacttcatcactatcagaccgcgtgatggctccaaagagcctttattagcaccaaagcaggaaatctacctacgagaaaatattcgctctaaactgttaattgcagcccaggctgttccccgccgacaaattgatacttatcgggactcactagaatctgtttcaacctgggtgaacgcttattttgatacctcattgccagacaccattacctttctggaagaattgaaaacgctggaaaaacagcctctttccattgaaatgcctgaacaattaagcagccagcccattctggccgatttagtacgtaagcgtatctatcagccggcttctcaacctctgccggaagcccagcatcagccaaagtctgaaaatgccccagctcaggcggaaacacctgttcaggagggttgaagatgctgaaaatattattattgtttgtcatccttattatcggtgttgttcttggccctttcctgtcaggacatcagggatacgttcttatccagaccgataattacgatatcactaccagcgtgaccggtttagtgattatgttccttctgctgcaattcctgctgatttttatcggctggtgttaccgcagattaaaacgcaccggcacttttacccatagctggatttttggcgggtataagcgtaagcgtgcccgtttacaaaccagacaagcattactcaagctggctgaaggtgacttcaaacaggttgaacatttaatgacacgtaatgctgatcatgcagaagaccctgtcgttaactacctgcttgctgcggaagcggcgcagcaacgaggggattatttccgcaccaatcaatatatcgagcgcgccgccgaagttgcggataaagaccaactgcctgtcgatattacccgcacacgtatccagttagcacaaggggaaacccatgcagcccgtaacagtgtagataagttactgaatacagcaccgagacatccggaagtgttacggctcgctgaacaggcgtatatgcgctcaggtgcctatcagtcgctgattgatattttacctgcgatcaaaaaagtgggcctgcatgacgaagagcaaatgtctcaattgcatcagcaagcgtatatcgggctgatgaatcaggtcatggcagaaaaaggcagtgccggattaaaagcatggtggaaagatcaacaccgcaagatccgcaatgaaacagcgctacaggttgcgatggctgaacatctgatcgagtgtaatgatcatgaaactgcacagcgaattattctcgacggattaaagcaacaatacgatgaccggctgttactgctgcttcctcacttaaaagcgggcaattccgaggtcgtgcaaaaatcactgtcacatttactgaagcaacatggtgaaacacctctgcttaacagtacattggggcaagtagcattacgtcacggcgagtgggcaaaagcagaaacagcatttaaggcagcccttgcacagcgccctgatgcccatgattacgcctggcttgctgatgcgctggataggctgcataaacgtgaagaagccgctcaaatacgtactaaaggctttatgctgacactgaaacgagaaagtacctcagaagaagcgtaacctttagaaatttgtcatgattaacaactcagacagggatatcaccgttaatcatggcaaaaatacggatcaagatgacaaagagaaaataacaggcaaaaaaaacacctgtcacgataaaagacaggtgcataaatacaatcaggtctacagacggatagtgcctcactcaacgttatgtccggttcgtgatgaaaagacaattgcttactcatctataacatggaccataggcaccagcatcagctctacatcatcccgaggtttatgaagctatgctgtcataaggagtgggatgagcatctacgattttactaatgcattttccatgccagattttctcctcacccaattacgggcacataaataactctatagtctaaatctaaagtccactcaatgaaaaaacagcataagagatcaaatgaataggttagctttctagaaaatacgccaaataccgtctctcatttgagacaacaattcagcatctaaattacactcaaatataatcaacaagttatatgtctcaaattagagacagcaaagggtatcgtttgtcgttgaaatacaacactgagattaaaacaattttaaaaacaaaaagttaataaaattgcaaactaataaaaacaatctatttcaaaagaatcgagtatcagaaaagcaaaggagatttagggaaagggaaatattttttattttctttaaatacaatcataaccacccgtataacgggtggtttgctcttgccctataagggcttgttaccgactgcgcctaaatgacgctgctttctcttcgttcaagctaagtgtctttgctgctttggcctaccccttgaaggggtctacatgctctttactactcaatttatccgagattaaatccgacttttcttgctctctgatatacttttgaattgtcgcttcatttagccctaccgtactgacatagaacccttccgcccaaaactttctgttgccaaatttatattttaaattggcgtgtctatcaaagatcatcaacgaacttttacccttcaaatatcccataaagcttgaaacgcttagctttggtggaatactcaccaacatatgaacatgatctggcatgagatgaccttcgattatttccacacctttatacttacaaaggtctctgaggatctctcccacacttgaacgaatattattaaaaatcactttccgtctatatttcggcgaaaagacgatatggtatttacacagccactttgtatgcgctgagctttgtgctttaatgcccataaacacctttccttatttgagttacgaatattagcttgaacatctatatcgtaacggaaaggtgtttttcttggtataacctttgaactccacccgcaaagcgggtggttttatgtttaagacgctaacgcgacttaaactggctaaagccataaataaaacagatggatatcaccgtagccagtgatatccatctgttttgaataggtatttcaataagtgctttcagtaagttcttttagcagtatttctctgcgttcctgcatgttttttatcgttttttgcttcacatgcccaaaaccccggatttgatcgggtaaaacagcgagcttctgacaaatctccatgttattgctatttaatttttctatgagtaaatcaattaattgttcatattcggagagtaaatccctctcttgtttccgctcttcctgataaccaaagatatcaaaaatagtaccgcgcaatggtttacaggcagcgagaaaacgaaaaacaggaattatccaggagccatactcccgttttcctctttcaccggttctgggatctttacgattgaaaaatggtgcactgaggtgaaagcggatcttatccgttttatcaaactgtgaacggagcttatccaagaacccggttttgacgtaaaggcgggcaacttcatactcgtctttataggccatcagtttgaataagttttctgcgatagatttcgttagtacttcggcattaatttgctgtgtaacctgttggacttgagcaacacggctgagataacgcagtgcatatttttcattctgatactcaaccagaagctggtatcggtgtaaaatcaggtcatccagtgtcttaatggtttgtttcggttcaacatgtagagaattattcaggatatctggttgtacggccgcaattctgccgatatgtaaagcgcgtcgcgcattctctatgacatgattttttatgccacttttctggatggcctgctcgatagaatgtagactgattgggattttaccaagctgccaagcatagccgattaaaacaatgttagtttgatttctgtccccaaccaattcggcagcaatctgctcggcatcaatggattgtaatgtccggcagtgttggcggagagtatcctgtattctgctttgatctaaattgagtgtcgggtttctcagcatggcaccgatttgcgtctcatgggtattcagtacacaactggtttttgattttgacattacttccagtgagttttgccctgtgacagtgactaaatcagccgcaatagcaagatctgcacgtcctcgatcaattctgacctgatgcaattgttcggcattctgactcaatcgaatatgggtcattgcttcaccccctttttgagcgaagcctgtaaaatcaagcagattaacagcatatttttctatttcggcagcaagaccaagcatatgaccagtagtaatgatgccgtttcctccgacccccgctaataaaatttcaaagggagcatctgccatttttatcgttggtttagggagtttaatcagcaggttatcaatttcttcctgcgacattattgtgccgggatcctgaactggattggcgttttcgatagtaataaaactggggcagaagcctttcaggcaggatagatctgaattacagacatggtgatctatcgcacgtttagtgcccagcggtgtttcaatcggaacaacagcaagacaattggattgaatttggcaatcaccgcagccttcacaaacggcttcattaatcaccgcccgcctttttgcctgtgggattaaccctctttttcttttacgacgtaattctgttgcacagacctgctcatagatgatgactgtcacgcctttgatatcccgcagacgtttctgtacatcttcgagataatccgactgataaattttgacttcggcagggaggctattctggcctttatatttatccgggtcatcggtgacgactacaacttctttcgccccttcagccagtattaaagaggcaatttgctggatcgttatattgccatcaagtgcctgtccgcctgtcattgcaacggcgtcattaaataacagtttataggtgatgttgctgtcagcagcgatggactgacgaatggctaaatgccctgaatggaaataagttccgtctcccagattctgaaatacatgggagcgattgataaaagcggaatgacctatccagtcaactccttctgaccccatcgcggtcaggccataacccgtactacgatccatccatgctgccattacatggcatccgataccgatttgtgcctgactaccttcgggcagacgggttgaagtgctgtgggggcagccagcgcagaaataaggtgtccgtttgggaagcgtgatatcgtgtaatgttgtctggacagtccattccaaagggacagaaagaaataagtcgaatttttttagccaatctgccagaagaggagcaagcagggaagggcgtaactccatatctgtagagactagtttgttgccgagatgatcgtgtttcccaatcagattaatttgtcttggcaaattaatgagatgctgcgcgagatgcagttcaacaacagcgtttttttcttcaatgacaaaaatatcagaaacctgtgatgccatctcgctgagaagtggtgataaaggataaaccagtcgaatatggagaagagcaacgccgttttttgtcagctcagcaggtgacaggcctccgatgcgcagcgcttccagaacatcctgatgagctttaccaacggtaactaataaggctcgcggatgttggcatggtgcgatgagctggtctatcggattaagcctggcgaagtcctgaacagctttcagtttatagaccagccgttgttctatcaaagggctgggaaggtccggccagcgccagtgtaacccactcggcccgggatctatttccggtatcttatactcaggaagagttttctctctcctgatagtactgctttccacgacttcactgattgctttgaacccaacccatgttccgctgacacgggaggctgcccaaccccataatcccacatcatggtagtcagacactgaagcgggatgtaagaccggcataccccatgatatcagcgagagatcagattggtgtgacatagaagaagatacgcatccgtgatcatcgcccaaaataaccagtactccgccattgggtgaagtaccataggcattgccatgcttgagcgtatctccggcgcgatcaacccccggccctttgccgtaccacatactaaaaacaccggtaacattgcggtcggggtcagattcaactttttgagtcccataaatcgcagttgctgcaagatcttcattgattgcagggtgaaaacgtatattagcctgagccagttttttttcgttttgccataatgcctgatccaagcgggctaatggtgaaccccgataccctgaaacaaatcctgctgtattgagattatggcttttatccagctctgcctgagcgagaagaagatcgacaagagcgtcattgccagtaacaaatttaggtggagagtatagagtcatataattcggcctttactttaagagcattaccgtttgagatacgactaaaaatggatctaatctatttccagcaaattattccgacaagtacaaatcttattagaggttaattgtatatattatgttaatttttagataacataatgtaccatattgcaatggcagcgttctataaacatatgcaaagtatgcggtatatacagatttgaatgtcttttgagcggttagtgttgatgtatgggtaaatggcttgccatctttatctgaggcgttcataatagcgcgcgttcctgagatgcaggaagttgatagtcacgggtgtttaccgtaattcaaactcaagttaaagcatttctggttcaccatcaataatgcgggaatagctcagttggtagagcacaaccttgccaaggttggggtcgcgagttcgagtctcgtttcccgctccaaatcaaatttccattctgtaaactagtcaatcgatcaattagtcgaatctcaaacctaatacaataggtaatgtaattactgcaagcattgtttgcaacgtgataatcgctgacattaactgactgtctccatttaactggcgggttaaaatataagctgtcggtgccgtaggtatggcgaaaaagagaatcagtaagttgatttccaacacatcaagcttaaataaacagccaataataccggcgaccaaaggcatcagtaataatctggacaggctgttaatgataattggttttttctctgttcttagcattgatggctgcaacgatgcgccgatgcaaattaaccccagaggaagactcgcccctgccagaatttttaaaaattgccctgagccgtaaggcaagccaatattagtcagattgagggttatcccaatgaaacaggctaatatcagagggtttttagtgattatcatgacaaactgcttaattgataacgtcttgatatctggtgttagtgcaaacacagaaattgcattgcaaagaggaaccaagatcgcgagtatcagcgacgctacagcgatcccatgagagccgaaaatatctaccgtaatggctaatccgagataagtattgaaacgcaataacccctgtacataaacaccaaaacgttgcgctggccatttgagtaaaaacttaataacgattaatgttattaaacctgtgctaattacagcgagaatggcccaaaatagctgtggtagctgaggattatctaaagacgtcgttgccaggctattgattaataaagcaggaaaaagcagaaaataattaagtttctctgctccttgccagaataaaggattaaatgaggtattacgctttagaataaagcctaatagtatcagtgcaaataatggccataagatggtaataatctgattcatatattatcttaaattttgctacctaccgtcttccgagccgcttctttgcaggttgtatcgaaatccgttggtatatatcccaatatggtttcttagccgtatattattttgttatctttttattggtcataaaaattcctgcaataatgaaaattccaccaatacatatagatacagtaaacgtttcctgtaaaaagagtactccgcccaatatcgctgtcagtggatttaatgcaataaaaacacctgctcttgtggcgccaatcttaccaatgccatcatagtataaaacatacgcaatagcagatccgatgacacctaaatatgtcaaacttatcaaatcgctcatggataaagaaactaatgcagtaaagttaaaatcatccgtcacgaacgctgttattgttaacattattgcacccacaatgacggagtaagcgacagtatataatgcaccaatttcattgattgttttcctgccgaaaacactataaatcacccagctgatgacacatcctaaaatagagatgtcaccaatcatattacctttgttactcaataatgatgataagttgtttccgataatgacaatcccggcaccaaacaaacagaatgaaatcccgatagtttttatggtggacattttttccttaaacaaaaaatacgagactgttgctatcactgcgggatttattgcgacaatcagagaagctctggatgcatcgatatatttcaggccataaaaaaagcaaaggttatagacataaataccaaagaaacccagcatgacaatatttgccatttgtgatttattgattttgataaatccttttttagaaaaagcgataatcactattagcacaaatgctgcaaatataaacctaaccgtagctgataataacgaactggtatcagaagagataaaccttcctgctatgaacgttccgccccatataatggaaacaatagtcaacttaatgtagcttgaataatcatctggttttgttgtcatacttattatcgccttgtgatgttttctcacttaatattttcgttagtaaatgatgataatgaactatgttcttgtctgattttatatcaattacattatgttattgacgttagtcaactcagcatagcaatatcatcataaaaaacaaagaggaaagactatctctggtgaggcttattaggcgttaatgtaatttaatgataagtaatctatctttttaacgtttaatattattttgactggtcagataaattaacttagccatataattaattatatggctaagatgcatttagtaaatgccgtaatcacataaataaatgtgattatatttcagagagcagcaaggtattttgaaatttattttttattcccagttttaatttagcatcattaaatatctcattgataatacttcgttgaattcggcttcctcccatgaattgatagttcataggttcttgcagaagtaagactacatttttataattttcctgactataatttcttatcgattcaaggatgtttatttttgtattatagtagcctatcgggttacttttctctgttttttcaatcaagaaatctatcatatcgaatcgcttattaatgccaaagactaacgctgcatggaaatcattgaagaaataaaaaccaagttcatctttattattccatgactcaaaaagtaaatttgcatgtttttgtatatattggtcgtcccttccatgcgtgaatttcattttaaataataaagaagtggcgtctaaatcttcaagtccatgcctgtcatttttatgacgaatctgatgatatatgtctaatgcctgatcaatttcgttaatttccatgagaaacatcgcatagtgccagaacaggtggatcctcatgccatagttgttataccaaatgtccttcctttcatccatccactcctttccctcatgaaataatttcttatcataaaaatagtggcagatggcatgaatcgcataaatatcgaaactatttattttcagtgaactggctgcactgtcataagactcatcatgatacccgttttcattcagaatgaaggccttaatacctttgaaatagctataaaactcatcgttaatcccccagtgtttgttaacaagactgagtgtttcaagcatggttccggtcataccattgttgaattcaatcatatgacatgtataaaaactgaatatatctttagggttttttagtaagcatttatagaaataatttctggcctgataataattttcattaattaaagaaattatcccgaagttgattaaatcagcgcgtttatccgattcttttttacttattttttctagtatatcgatgagtgatttagcctgtttatacttacttttctccattgagagaagtaagtcaactatatgtatttgtaatattgaaagagagatatcacttgagtgaaaccaatttatatttgtgagtttttcgtttcgtttcattcccagtatgcaatgataacattcatgtatgagtgataaatcatcaattgtattaacaacctgtgatacatttgacttatcattaataatcataggtaacaacctcatttagagttgattgatatggtatttttatataaggttatatttaattattctatagtgaatatattataaaaaggaatgaaaattaatacgttcttttaaaaggaacagtctattagtatagggtgtgtatcgaatattattatatattctcaacctgcttccagcattccgttatccagtcacttaatattaataactgctgaagaatatagatgatttaattggctgtttttgtttaaaaacctcttctatatattaatgatcacgaaggtgctgtaatttgatatggcttttctggttaattagaataattatattccatttctttgaaagtatattttttgccagaaagagtaatcacggtctgtattattgcagtttatagtttgttgttctatggcgtattttaatgagaactatggtaattatactatttccagttgtggacagttttctttgtatatttgatatctagtgctaactgaaaatatttctctgcttgacctttaaaattatcattatcgataggagcatggaaagtatgataagaaccggaaagcaatatatagaaaatttgcgtgatggacgcaccatttttattaatggagaaaaagttacagatcatgtggatcatcctgcattcaggaatgcgattagatctgtagcaagcctgtatgattataaaatccaacatgcagatacaatgactttcaggacagaaaccgacgagcagatgagtttgtactggcagttaccttccacccccgagaagctgattgcacgtggtcaggctgcatatgagtgggcgaagcagactgtcggctggcttggcagaagcccagataatgcagcagcagtgcttaccggaatggtcacgcatattgagttgttcgaatcttattctcaggaacgcgctgatgctttacggaattattttgcctatgtgagtgaaaatgatctttatctggcctatgcgctgattaacccacagggcgatcgctcaaaaacaccgggtgcgcatgaaaagaatatttaccatacccttggggttgtggaaaaaaatgctaaaggtattgtggttcggggagcaaaaatggttgctaccggcgcagcattagcagatgaaatattagttggttcgcataaaccgatgaaaaaaggcgttgatgaacgctatgcgctctcttttgctatgccgatcaataccaagggcataaaaattatatccagacgttcttacgagcagggagctaaccccgctgattatccgctatcatcccgttttgatgagaacgattccaccatctatttcgatgatgttctggttccctgggaaagggtattcgtctgcgaagatatcgagatgtgttttaagcaggtagattcaaccgcaacggaactcctgatggatattcagagtattgcccgttacgcggtaaaactacattttctggctggtatggctcaggaaatggctgaaaataatggtgtcagcgaatatccacccgtaaaagaatcactggcacagcttgcttcctatgccatgaatattgaagggttatttaaaagtgtgctccattgtccaaaaattgagaatggattttatctacctgacaaaacgttgctttatacatatcgggtcatcgggcagtccacatatccaaatgtactggagacgatcagaaagttggcgggtggcggaattttgatgatgccatcaagtcagtctgatttagaaaattctgaaattttgagtattattgagaaaacacaatactcatctatcgtttcccctgctgagaaggtcaagttcatgaaactggtctgggatgctattggttctgaatttgcctcaagacatcaccaatatgaactgttttacgccggagcacatcatcagacactgggacggctttacaatcaatacgactgggggttatcaagagaattagtggaaaagataaaagcgctttaattcacgttttgttgccatacttgcccccgttgtggctacgctgtggggcaatagtagcaattatttgccaccttattcccatcaaaaataatttgctgaaagcgcttgccatcctgctttaacgggtccataatgccgcctcatttttggataggcagaggaaaatttctccactagtgtctagaatggatgaagtgttcccatttttactgctgatccctgatgctttccagcgaagtacaaattctattttttatccacagaatttaacataacaaccattttgagttgaccagtattgatttgcttgttacacagagttatccacaggcgatatgttcgcgtctaacttttttaatttattatcttaaataagatatatcaattaactaattgataaatttgaataattaacttttatttaaagtatcttaattgatatttatctttcctttgcgctttgagtagaaaagcatttttattttattcacaaggaaacagaagctttttttaagcaaaaatcagactgattgtatattaagcatctcggggcaaccctttggtaattgcccgtattaaccgtttttgttgtgatgtttgaacgttaattgcatcaatacttcggcgggatagttgttgggcaatagcccagtggatatgttcatctaacacctcacttagcccaattcttttttctaaaaccagtacgatttcatcacggtatggcgcattacccaatgcaactgaaatattacgcagccagcgtaaatagccaatacgacgtattgctgaaccttctgttatgcgcagaaacttttcttcgctccaattgaacaaatcgagtagttcaggagtatgtagtgctgcgcgagggctaaaatcggcttcttctgttaattgtgaaaaacgattccaagggcagataagctgacagtcgtcacagccataaatccggttgcccattaatggacgaaactcttccgggatcacaccctcaagttcaattgtcagatatgaaatgcagcggcgggcatcaatggtataaggctcgacaatggcacctgtcggacacgtggtcatacaggcaacacaacgcccgcattgctcttcctggggggagtcaacagggaggggaaggttaaccagtaattcgccgagaaagaaccaagagcctgactctctgtttaatataagtgagtgtttaccaacccagccaattccggctttagcggcaagcgggcgctccataatcggagcggaatcaacgaaaggccggaaattcagtattccctgatatttatgggcggagcaatattcctgaatttgctcacccagctttttaagccgctggcgtagcagtttatgataatctctgcccagtgcataacgactaacatacccctgctcaggattattcagggtgctggcaaaagcggctttggccggcaggtaattcatgcgcacgctgataacccgcaaagtaccgggtaacaattcatgaggacgtgctcgcatcatgccgtggcgtgccatccagtccatttcgccctggtattgcttatcgagccactcctgtagtctcggctcttctgtggataaatcggtatcacagataccaacttgctgaaaaccgagagaaaggccccattgtttgatgtttgctgccagaaggttcaggtcgagagggattgccattggatattgagtgactgctgtaaagggcggataggttaacacaggttttgcccttcgtctttctggttgctttgtttccgggtagaagatagtaaatgataatagctgagttatgttatggttattggttaaactatctaactaatatgtctttcatatatcctatgggtttcagacgatggtctgggaaacgatgggtatattccaataggctttaattcaataaaacaatagataattttctatgaaagaacttgttttatcacttccgaatgaaaatgccaccgttgcattgggcaattcagtggcagcagcctgcgaacgcggctatgttatttatctatatggcgatcttggtgccggaaaaacaacgtttagccgtggttttctacaggcgctgggtcatcaggggcatgtgaaaagtccgacttatacactagttgaaccttatgctctacagccacgccctgtttatcattttgatttgtatcgtctggccgatcctgaagaactggaatttatggggatccgcgattattttcatcaggatgccatttgtctggtggaatggccgcaacaaggagcagggtttttacccaacgctgatattgagttgcatttagcctataacaatgaagggcggcaggctcattttgtggcgttatctgaatatggtgaaagtttactggataatctgaaatccttatgaaggaatccctgaccatgatgaatgccttctgtgtgaagacgataaaaaaatggcaaccccattggctgatgttttttatgctttttgttgttttgagccaatgggttatgacaacggcggtagcatcaacactatcaaatgtgcatgtaagtaacagttcatctgaagccactgttacgctggggttcactggcgggcatcccgagtatcgcttttttcctcttcataatcctgaaaggctggttgtggatattcgtcagtcagccggtatcacaggattgccgatgcgtttatctggtcagaatctggtgaagatagtccgaacgagccagccgcctgatgcgcaacataagcgggttgtactggaactggctcagaaggcaacggccacttccgttgtaaagcaatccggtaatcaatatcagattattttcactctgaaggccgagggggctgtaaatagtccttcaatatttaaagagaacaccgcatctagtgaggtttcaactccacacaagagtaagcagtcactaacaaataagacggctgaagtcacttctgtcatgcaggaaacaaaacctgtgtctgcgcataatgccccggttgtaaaaaagcagataaataaaactgctcaggggaaatatccgattgtgattgctatcgatgccgggcatggaggacaggatccgggagccatcgggccgcgaggattacgggaaaaaaatgtaaccatcagtgtggcgcgcaggctggaagaacttttgcgtaatgacccgatgtttaaacccgttctgacacgcaacggagattattttatctcggtagccggacgctctgaggttgcccgtaagcataaggcaaatatgctggtttccattcatgcggatgctgctcctaatcgcagtgccagaggagcttctgtatgggtattgtctaatcgtcgtgcaaacagcgagctgggaaactggctggagcaacatgagaaacagtctgaattattggggggcgcgggagatgctctggctaatggtacagatccgtttttgagtcaggcagtactggatttacaattcgggcattcacagcgggtaggttatgacgtggcggttaaggtgctacaacagttatctcaggttggttctctgcataagcgcacgccggaacatgccagcttaggggttttgcgctcaccggatattccttccattctggtggagacaggatttatcagtaacacatcagaagaagagctgttaggctccaatcaatatcaggaaaagctggcgcaggcgattcatcttggattgcgtcactattttcaggctaatccgttgcagacagcaccaaaataattttaaacggtacgtaataaacccggtgatttaagaaaaatcgcaaattaccaagaaaaagtaggtaaggtcgaatatggctatcaggatattacccccacaattagcaaaccagattgctgctggtgaagtggttgaacgcccggcatcggtagtgaaagagctggtggaaaatagccttgatgccggcactacccgtattgatatcgatattgaacgtggtggcgcaaaattaatccgcatacgtgataatggctgtggaattagccgacaggatctcacattagcgctggcccgtcatgcgaccagtaaaatagcctctctggatgatttggaagccattgtcagtatgggatttcgcggtgaagcgcttgccagtatcagctctgtttcacggttgaccctgacttcccgccctgaggggcaggcggaagcatggcaggcttatgccgaaggccgtgatatggaagtgacggtaaaacctgctgcccaccctgtcggaacaacggttgaggttttggacctgttttacaatactcctgcccgacgtaagtttctgagaacagaaaaaactgagttcggtcatattgatgaggtcgtgcgcagaatcgcccttgctcgtctggatgtggcgatcaatctgaatcacaatggaaaactcgtgcgtcagtatcgtccggctaaagatgaatcccagcatgaacggaggctggcagcgatttgtggtacggcatttatgcagcaggcgctggcactgtcatggcagcatgatatgttgtctatcaagggctgggttgttgatcccaaaagttctcataccgcgtcagatattcagtattgctatgtgaatgggcgcatgatgcgggatcggctgattaatcatgctatccgtcaggcttatcaggatttgctgcaaggcgaacagcaaccggcttatgttctgtatttagagatagacccgcatcaggttgatgtgaatgtacacccagctaaacatgaagtacgttttcatcaggcgcgtctggtacatgattttatttatcagggtgttgctgcggtgctgaaacagcgcagcaacggcgctgaactggggctagattgtcaggaagagacaacagactggataccggaaaaccggccttctgcgggggaaaaccattttctccgacaaaaacaaacagcttcggccgggtcaacgcaaaaaacgtcatcctctccccgtaccgcgtctgaaacaccatcttcaggtcatcaggcaggacatagtggtatcagacagccttatcagggggaaagttaccagaaaaaacaaggcgagttgtatcaaaaattgatgcagtttgcgccagaagaaaagcagccactttttcctgaacggtcggacgcagaaagaaaaacttccgaaaagtcggcttctgtcacagaaaaatcaccattaatgcctgctcgttcaactcctgtacagggaaaaaatagtagttatagtttcggtaaagtattgagtatctacgctccccactatgcattgcttgaatcggcctcgggtattggattattgtcactgcctgttgctgaacgctggttgcggcaggctcaattaacgccgggtgagcaggggcttaaaccacagccacttcttatcccacttaagttgtctctcagtgagacagaggtcaatgttttgcgacagaatagtgagctattgaagacttttggtattgaatcgactgtcgcacatggaaaagtgaccattcatgcggtatcgttgcctctgcgccaacaaaacctgccaaaactttttccggcgttgttgggttatctgatggaacagtcatcagtttcagtacagcaggtggcaatctggcttgcccgccatttgggcagtgaacatgaaacgtggaatattgcacaggctgttcagcttttagctgatgttgaacgtctttgccctcaattagtgggatctccgccagagggtttattacaattaattgatttacaagcagtggtggcactttttaatcatgagtgatttaaaaactcaacatttgcccacagccatttttattatggggccgacagcctcaggaaaaacggcattatcaatcgctttgcgtcagcatcttccggttgaactgattagcgttgattctgcactggtttatcgtggcatggatattggtactgcgaaaccgtctgcagaagagcaggctcaggctccgcaccgtttgattgatattctggatcctgccgacgtgtattctgctgctgatttccgtcgcgatgcgctggaacaaatggcagaaattacggctgcagggagaattccgctcctggtcggcggaaccatgctatatttcaaagcattactggaagggttatcaccactaccttcagcagaccctgaagtcagggcggtcattgagcaggaggcagaggaacacgggtgggagtcattgcatcagcaattgcaggagattgatccggttgcagcagcaagaatccatccaaatga

SEQ ID NO: 3473 - DNA, 33524 bp, Xenorhabdus sp.; identical to SEQ ID NO: 3472
  CDS (31086)..(33041)

SEQ ID NO: 3474 - DNA, 33524 bp, Xenorhabdus sp.; identical to SEQ ID NO: 3472
  CDS (29717)..(31009)

SEQ ID NO: 3475 - DNA, 33524 bp, Xenorhabdus sp.; identical to SEQ ID NO: 3472
  CDS (29193)..(29657)

SEQ ID NO: 3476 - DNA, 33524 bp, Xenorhabdus sp.; identical to SEQ ID NO: 3472
  CDS (25829)..(27253)

SEQ ID NO: 3477 - DNA, 33524 bp, Xenorhabdus sp.; identical to SEQ ID NO: 3472
  CDS (15227)..(16372)

SEQ ID NO: 3478 - DNA, 33524 bp, Xenorhabdus sp.; identical to SEQ ID NO: 3472
  CDS (13971)..(15161)

SEQ ID NO: 3479 - DNA, 33524 bp, Xenorhabdus sp.; identical to SEQ ID NO: 3472
  CDS (13750)..(13959)

SEQ ID NO: 3480 - DNA, 33524 bp, Xenorhabdus sp.; identical to SEQ ID NO: 3472
  CDS (12176)..(13189)

SEQ ID NO: 3481 - DNA, 33524 bp, Xenorhabdus sp.; identical to SEQ ID NO: 3472
  CDS (8477)..(8800)

SEQ ID NO: 3482 - DNA, 33524 bp, Xenorhabdus sp.; identical to SEQ ID NO: 3472
  CDS (463)..(1353)

SEQ ID NO: 3483 - DNA, 29489 bp, Xenorhabdus sp.
  CDS (3488)..(4051)
catttttcaagacacgtggttgtttgactagaatacaaccaaatattgcactgtagctcgttcacggtgttcaatattccagcagtaaaaagccccgcacagagcgaggctttaagatgagcgatccgattatatttatcgaatattgcttactgtagcagtgaaatatccgcaacccgcaagaacaaatcacgcagttcactcagcaatgtcagacgatttacccgcacttgcagatcttcatccatcaccatcacattatcgaagaacgcatccacaacttcacgcagggaagccagttcgaccagtgcatcctgataattgccttcggcaaacagaggagccagtttttctttcaggacgacaagatgggtcgccagctggatctcttccgctgctttcagtaccgaagcctgaactgcatcactcagtttctcttctgatttcgccagaatgttggaaacacgcttattagccgctgccagagaaacagcctcatccagcgtacggaaatgcgttaccgctttcatacgggcatcaaaatcggctggctgtgtcggacgacgagccagaactgcctgaatggtatcaacgctgtaacccagctcctgataccaggtgcggaagcggccgagcataaactcaacaacatcatccacaacttttgcattagtcagtttatcgccatacaggcgaacagcttcttctgccagagtctgaagatcgagaggtaattttttctcaacaataatacgcagtacacccaatgcagcacggcgcaaagcaaatgggtctttatcccctttcggatgctgaccgatgccaaaaatgcctgccagcgtatccattttatcggcaatcgcgactgcgcaagaaacaccggttgatggcagttcatcaccagagaaacgtggctgatactgttcgttcagcgccagcgccacatcttcagcttctccatcatgacgggcatagtgcatgcccatcacaccctgtgtatcagtgaattcaaagaccatgttggtcattaaatcacacttggacagcaaacctgcgcgggttgcatgagtcacatccgccccgctcttgtcagcaatccagccagccagtgcctgaatgcggtctgttttatcacgcagtgtacccagctgcttctggaacaaaacagtctccagacgcggcaggttatcttccagacgctgtttacggtcagtcttaaagaagaattcggcatctgccagacgtggacggactactttttcattacctgaaataatctgctgtggatcagaagattcaatattggtaacaaaaataaagttcgccatcaatttgccggatttatcgtaaaccggaaaatatttctgatcgcctttcatggtataaaccagtgcttccgccggtacttcgaggaatttttcttcgaattttgccgtcagaaccacaggccattccaccagagaagtcacttcttccagcaggctgtcggtcaaatctgccacaccaccaagctcagttgctgcctgctctgcatcacgcttaatcagggttttgcgcgtttcataatctgcaataacccgaccacgctcctgcaaaattaccggatactgttctgcgttatcaatggtgaactccgcttcacccataaaacgatgaccacggatgatacgatcagatttgatacccagaatttcgccttcaatgacctcactacccagcagcatagtgacggtatgaacaggacggacgaactgagtttctttatcaccccagcgcatcagtttagggataggcaatttagccaatgaactgcttaccatacctgccagcaactctttggcttcacagcctttaacctgtgcccgatacagcagccattcgcctttatcggttaccagacgctctgcctgatcaacagtgatcccacaacctcgcgcccagccttctgccgctttggttggtttcccttccgcatcgaacgcctgagaaatggccggaccacgtttttctacttcacgatcagcctgtgccgccgccagattggccaccttcagcgccagacgacgcggagcagcaaaccagcgaacttcaccatgacccagattggcgttgttcaattctgtttcaaaattggccgcaaaggattcagccagtgaacgcagcgcctttggtggcaactcttctgtgccgatttccacaaggaaagtctgttgagtcatgatggcctcttaattttctgttacaccgtttttgttacacatcgggaagccaagcgcttcgcgggaagcatagtaagcttcagcaactgctttggtcagagtgcggatacgcaagatataacgctgacgttcagtcacggaaatcgctttacgggcatccagtaagttaaatgtatgacccgctttcagaatgcgctcataagcaggcagtggcagaggtgtttccagtgccagcaactcctgcgcttctttttcatactgctcgaaacaggtgaacaaaaaatccacatctgcgtgttcaaagttgtaagtagactgctcaacttcattctgatgataaatatcaccataagtcgttttacccagcgggccatcactccacaccagatcataaacactgtctacaccctgaatatacatggcgaggcgttccagaccgtaagtgatttcaccggtaacaggcttacactcaagaccaccaacctgctggaaataagtgaactgagtcacttccataccgttcagccagacttcccagcccagcccccatgcacccagagtcgggttctcccagttatcttcaacaaagcggatatcgtgaacggtaggatcaagccccagctctttcagtgaaccaagataaagttcctgaatattctctggagagggtttgataataacctgaaattggtagtaatgctgaagacggttcgggttttcaccgtagcgcccatcagtcggacgacgggagggctgcacataagcagcagcaataggttccggccccaaggcacgcaggcaggtaataggatgagaggttcctgcgccgacttccatatccaatggttggacaatggtgcagccttgacgcgcccagtaatcctgtagtgtcaggataattccctgaaaggttttggtatcaaacttttgcatgttgaatccgcacgcgatacttatacacaatgaatttcaaggtgcatcgcggcggcaagggagttcatccccaggaacatagataaccgtatgtttataaaaacggtgaccggggtgagcgagcgcagccaacaaagaggcaacttgaaagacgaagtgtatatgaatttaaacgaaaggggtcagtataccctttgaccgtaagatatacagcactgatcacctcccaattttgtcacagcataaaaaaatcttatccgaatcactttacatggatattcatacagctaaacttggtgtaattattcaccaattcctacggagatgtgcaattcatgaataaagaaataactcgctgtggctgggttacctcagatcctgattatctggcctaccatgacaatgagtgggggaaaccattaaaggatagccaacaactttttgagttgatttgccttgaaggacagcaggcgggtttatcgtggttcaccattttgaaaaagcgggaaggttacagaaaatgcttccaccagtttgatccggcaaaagttgctgaaatgggtgaaaatgacgtcgagaaattaatgcaggatcctgccatcgtccgccaccgtgcaaaaattaacgccattattgataatgcccgagcctatctgaaaatggccgagcagggcgaaaatttcagtgaatttatctggcaatttgttgacggtgctccacaaataaatcattgggaaacattggcaaaagtgcctgccaaaactgacctttctgatgctctttcaaaggcattgaaaaaacgtggctttaaatttatcggtagcaccacctgctatgcttttatgcaggctgcgggtttggtggatgatcacatcgcaaactgttgttgccggaaataaccggtacagaatgaaaatcagcacatattctctcaacaaagagataacttgaaagacaaagcgtaaaaatagatgacaatataacaaggcgcgagttatggtgtcttcttaccatacttctacaaaatacaaacaaagatgcaacagccgttatgaaattctctcaattcggaaacaaattcacacaagagtcaggtattacgcgcctgatgaatgatctcaaccagggtctgagaacacccggagcgattatgcttggtggtggcaaccctgcccatattcctgaaatggatgagtatttccagcagctcttggcagatatggcattaaatggccaattaactgaaaccctgtgtaattacgatggcccacagggaaaaaatacgttaattgctgcactggcacaggaattacaggaaaaactcggctgggatgttaatccacagaatattgccctgaccaatggtagccaaagtgcttttttctacctgtttaatttattagcagggcgtgatgaaaatggttcaataaaacgggttctgtttccgcttgcgcctgaatatattggctattctgattctggtctggatgaaggtttatttgttgctaataaacctaatattgaattattgcctaatgggcagtttaaatatcatgttgattttgaccacctgaatatttctgaagatatcagcctgatctgtgtttcccgtccaaccaacccaacgggtaatgttgtcactgacgaagaattactgcgtttggatgcattggctcaaaaacatcaaatccctctgctgatcgataatgcctatggcgtgccattcccgggtattatttttagtgaagcaacccctctgtggaacccgaatattattttatgtatgagtctgtccaagcttgggctaccgggtgctcgctgtggaatcatcgttgctaatgaaaagattattcgggcagtcagtaacatgaatggtgtgattagcctggctccgggaggcatcgggcctgccatgacgctggaaatgatccgccgtaatgacctgttccgtttatcccaaaatgtcatccaaccattttataaaaaacgggtagaacaagtcattgagattattcgtcactatctgccagaagaatactgtcttatccataaaccagaaggagcaatattcctctggctctggttcaaaaatctgccgattacaactgaagttctttatcagcgcttaaaaaagcggaaggtattaatggtaccgggtcattatttcttccccggtctggaacacaactggcctcatgctcaccaatgtatgcgcatgaactatgtgccagatctggcaaaaatagaagaaggtatccgtattttgtccgaagaaattgagattgctcatcaggaagtggaatgttaatcgggttgtaccctatggatttcgagttacatcgcggcggcaagggagttcatccccaagagcatagctaactatgtgactggggtgaacgaacgtagccaacaaagaggtaatttgaaagacgacgggtatataaaaaaagctccctcatttaaagtgagggagtaagatgataacgaggactttttacctgagaacaggacagtagttattagaatcccaaaagaattcttcacacacagtaggaaaggaaaacaatccttgtttatacactttccctgaactcggtatatttaaccagaaaacaaaaaagataatggtctgaatagacaggtttttttcactttaaattgcctctactatgtgaaattaagacaattaccccatattgtgtgatctaaagcacacttaatgaatcaaacacatatacttaattattcaacgctgttttcaatcttcctctctgccagaaaataatatctactaacagtctccagattcagcagcggtcagtattaataggcatgctcgcttgttagccggacaaattcgctcccgacgaatttgccctactttttccgttacgactcaacccaaaatacagggatataaattcaaataaaataattcactttataaattatttcaaaataaaactatcgaggagaattaaagaagtctatcgaaaaaaattattggatttaacaataagtgctatagcaaactgaatattacctaactatagtaaatagtattaaaaagttatttttatgcttattcatgaaaaaattatactaggtataaatataacttctggatattggcaattaactcattgagctcaaggaatggaaatgatgaaaaactataaactgcttctattaccttctactattattggggggcttttgctaacaggctgctccagtatcatgactcacagtggccctaatcaagggtattattcgggagcacaagccaatattaatatgttaaaagatgacaggacaggatggttcctgaaacccctgctcgtagtcgatctcccattatcagcctttttagatactcttctactcccctatgattatgcccactctaatcaggatcaaacggagcaatcccctaaacttcgcattgaaaaactggaagaaagcacaaacagcacacaatcgatattagaaaacgcaatgaataatgaaccctgattttgccgataccgattaggctaaagattatcttatctcaactatttttcaggcatcgttattgtgcaacggtgcctatttcagccctgtttcaacaatgaaaagctgccgatatccatcaatatcccgcataaaagcaatatatcggtcatcaggtgaaaacacgattgcatcagcacagggagcaacgtcagtacgagctgttaaccgctgggtttgcccactctgactgtcacaaagcataacactgttatcgcaaacaaaagcaataaaccgcccccggttatcccagttaaatgcggattgtatgtcatgaatattatctgtgatctgtaccggctcgcctccatttggagatatatgccataattgaataacaccattgccatctctcatcagaaaacaaattttactgccatccggtgatgctctgagccaatgccggggaacattgactactcccggataacaattctgatgggtgaaagttaatcgtttttgtttaactccggcgggcggcgcaggtaatgccgtttcggttccggctaatggctggcaaccttctagtgcataatcttcatcatgctcaggcaggtcaaccagataaatttcagggatcttttcaccattttcagcatacgtatcaccaataaaagtcagtgcccaacgctgccattgcccattctctttaagatatccctgttgtccaacccacccttcttcatatgcacgattgatctcatcactaccgggatgtggatgcgttgtggtttggctaacaacgactgaaaaataacgaccatcgtattctctcgggtgttttttcgctgaaatcacagttcttagtggaacagccacagcaacattacgcaaatcaagagcagggtctaactcatgcataacatggtcattataggtaaaactcaaacgactgctgtcaggactgaaaacatgcacatgtgtaccacctcgcaaagctccggctgtataaggaggagtgatatccagtgcatcaatattgaacgcaacgtttggttcgctatcggaaacaatcaccccacgacgatgatgaaaatcatattgccagtgattatccgggtgctccgggccatgaataaatgcgtaacgtaccggctcttgtgggctaacagtgacaaccccaacatgtgccccatcttttgcctgataaataacctctgtctggccgttattgatatgaattttttctatcgtcaggccggaaaaagatgctccgttaggacgtacatcataaaccagccactgactatcaggagtccagatatttatattagttatctgatggctacggttatcaaatgtaatctgacgttccttgaaaatcattattttccaccttaatatgcgggaattcggataataaaaactaactttatgtaaatttaactaaaaattttcaatcgaggcgttattatttccgcattactcttacttcttcattatctttcatctgactaaatttatgctactcagtgtcctttatatcattggtatcacggctgaagccatgacgggtgctttagccgcaggtcgccgaaaaatggatgtcttcggcgtgattattatcgcttctgttacagctatcggtggtggctccgttcgtgacataattctgggccattacccacttggctgggttcaaaacccggagtatatcgtgactgttgcctgtgctgctgttttcacgatttggattgctccaatgatgaaacacctgcgtcgtttgtttctgattctggatgcaatcggcctgattgttttttcaattattggtgcacaaatcgcactggatatggactacagcccaatcattgccgccattgctgctgttattaccggcgtttttggtggcgtactgcgcgatatgttttgtaataccatcccgctggtgtttcagaaagaaatttacgctggggtctcctttgctgctgcctggttatatatcgccttattgcatactccactacaccccaacagcgtcattatcataacccttattgctggcctcgctgcccgcttaattgctattcgctatcgtcttggattaccgatatttaattacgatggtgctgatcactgatatgaatctgggcgtttgaagcaaacttttgctcttacgctctcattcgactctaccattttattttccttatctccgatgactgtaaaggatatgtctacagatcaatgccctgtaaagttagtacttctattaattctttaacgtcaggatgctgaaaaaatctctcaatttttgctctttgtttaactgataaagcactatatttttgtgtttctacttcgggtgactgcatttttccgaacaaagctattttatttgtaaatttattagcataaggcattcctatcgcttcgcgccataatgaggctggctgccgctttgattgctggaattgactgaaaattgattcagcacgcttagttccgatgttcggtatttcagccagttgtgttacatccaatgctaaccagtctgtcagattcttgatcttttcacttgtgactagagtcatccatgtaccttgactcactcctctcattttcaatttttcgcccatccatgtcagacgtgcgataaactgctgttggcattcatcattattcaatacaaaacaactgagtgaatgaaattgttctgcatcaggaagattaagatgtttgcgttcagcgatacgccaaaccaccttatcaagttttggtataccatgccctgccagtgctattgttactttatctcccggataaacatcccaatatttccaacgcgtcaccgagccaatatgaacgcggctaacttgcctgtcatctaattgaatcttttccagctccagcaatacggaaattttccctgttcggcctatcctgaattgaatatcgtttactgtggtaacttgttgctgtagaggatacttccatgcaacagcccaactgtttgaacctgaacgccattgtctgccggcgggctcagtctcttgccttaatacaacaccatcagtagcaaaagggaggggatgggtaaaatacattttccatttttcttctgcctcttccgcattaaaaatagggtggctaaattgttgcgtagccggaaagcccatggaagccaattgttcaagcttagcagtcatttcatccggcccatccggccaactccatacaaatatccctatttgactgagttcttctgaatgggccttacgcatcatcaaacccgcaaccttgctgcgcgcgccctgactaccaacaaccgactggcggtgattattctgtcgccaaaaaagctcgccttgtaacaccatatattccggtgcattttttatctgttggggaatactggatataaatttgcttttatccagccagtctgtcccttctgttccattcccacggctgattaaccctgtcagcagccccttctgataaaccagtgttaccgcaacaccatcaattttgggctgtaaccagactttcgagcgcccttgtacccatttccgcatttcctccagacctttcagtttacgcaaccctgtatgctggacaggatgagtctgttttccattatccggaatggctataacaacgttattattctgtgtctgatccagacaatgctgccagtgtgtcagagtttccaatagctgatcgtaaatttcatcatctatttcactaatcccctgctggcgatacaactgctcccatcgcgctacctgtggtgtcaggtgttcgatttcaagctgaagtttttcctttgaccagacgggacaatctgctgcgagtgctatcggcactccacataacaacatcaatattataatgagaaaattaagcatccttgctccacacgttccttaaatgcaggcaaagaataataaagaaatttagctataccaatgaggaaaaagagcgtttgcgatgagtctcgaaaaattattagcttgtttctgcaacctattattttatctggaattgttttgcaaaaaatcgctttaatcttcgtttgttaataaaaaattttgttgaatcactcgtaggcatgtattgtaacgctgcatggattaacgtatccgtgtatactatgtgggattttatatccctacgcttgcatttattaatacccaaccagtcaagaaatcagcatgagccaaggaacgttatatattgtttctgcaccgagtggagcaggcaaatcaagccttattcaggctttattaaacacccagcctttgtatgacactcaggtttctgtttcacatacaacccgcccggcacgtccaggcgaaaatcacggtgaacattattttttcgtcacaaccgatgaattccagaatatgattaaccatgatgagtttttggaacatgcctgtgtttttggtaactattacggcacttcccgtaaagtaatcgaagatactctcgccagtggggttgacgtctttcttgatattgactggcagggtgcgcaacaaatccgtcagaaaatgcctgcggcccgtagtatttttattcttccgccttcaagggaagaattactccgccgcctgcgcgggcgcggtcaggacagcgaagaagtcattgctaaacgcatgtctcaagctgtcgctgaaatggagcatcatggcgagtatgattacgtcatcatcaatgacgatttcaatactgctctggccgatttacaatcagttattcgttcagaacgcctgcgtttagaaaggcaggctcaacggcatgatgcgttaatcagcaaattattggcagactgaactaagtttcagtatcatgtccggtcacttatttatctgtggagtagcacacatatggcacgcgtaactgttcaagacgcagtagaaaaaattggtaaccgttttgacctggtgttggtcgctgctcgccgagcacgccaattgcagtcaggcggaaaagatcctctggttccggaagaaaacgataagatgacggttatcgctctgcgtgaaatcgagcagggtcttatcaataataaaattcttgatgttcgtgaacgtcaggagcaacaggagcaggaagctgcagaaatcaacgctgtttctgctatcgccgacggtcgtcgttaattttacggtaggtctgccttgtacctgtttgaaagcctgaatcagcttgttcttaaatatttgcctgaagatcagattggtctgttgaagcaggcttatatcgtagctagggatgcccatgaagggcagacccgctccagcggtgagccatatattactcatccggtcgccgttgcctgtattctggctgaaatgcgccttgatcatgaaacactgatggctgcacttctgcatgatgtcatagaggatacaccaacgacatttcaggatatcgagcaactattcgggacggctgtcgccggattagttgagggtgtctctaagctggacaaactgaacttccgtgataagaaagaagctcaggcagaaaactttcgcaaaatggtcatggcaatggtacaggatatccgtgtcattctgatcaaactggcagaccgtacacataacatgcgaacccttggttccctgcgccctgataaacggcggcgcatcgccagggaaacgctggaaatttacagtccgttagcccatcgattgggtatccatcacctgaaaacagaactggaagagctgggttttgaagctctgtatccgaaccgttatcgggtgattaaagaggtagttaaagctgctcgcggcaaccgcaaggagatgatccagaaaattctgtcagaaattgagggcagattaacggatgccggcatcaaatgtaccgtcaatgggcgggaaaagcacctctactctatctatcgtaagatgcatctgaaagaacagcgttttcattccatcatggatatttacgcgttccgtgtcatcgtcgataatcttgatacctgttaccgtgttctggggcaaatgcacagcctgtataaaccccgtcccggtaaagtaaaagattatattgccattcccaaagccaacggctatcagtccctgcatacttctctgatcggcccacatggagtcccggttgaagtgcaaatccgtactgaagatatggatcaaatggctgaaatgggggttgctgcacactgggcttataaagagcagggtgaatcaggtacgactgctcaggttcgcgctcagcgctggatgcaaagcctgctggagcttcagcaaagtgccggtagctctttcgaatttattgaaagcgtcaaatctgatctattccctgatgagatctacgtttttactcctgaagggcgtattgtcgaattgccggcaggggcaacacctgtcgattttgcctatgccgttcacaccgatattggacacgcctgtgtcggggctcgtgttgatcgtcagccttatccactgtctcaaaccctcagcagtgggcaaaccgtcgaaattattaccgcaccaagtgcccgccctaatgccgcatggctgaactttgtcgtcagctcgaaagcacgcgctaagatccgtcagctattgaaaaatctaaaacgggatgattcagtcagtctgggacgccgtctgcttaatcatgccctcggcaacggcctgaaagttgccgatattccggaagaaaacattgccagagaactggcaagaatgaaactgacttcactggatgatctgctggcagaaatcggcttaggtaatgcaatgagtgtcgttgttgctcataatctgttgggcgaaacagagaaaatgccaaacagtaatggcggcaacaataacagtaacaacaataatagtaataatagccgtaaactacccatcaaaggcgctgatggtatcctgattacctttgccaaatgttgccgtcctatccccggtgacccgattatttctcatatcagcccaggcaaaggtttagttatccatcacgaatcctgccgtaatattcgtggctaccagaaagaaccggaaaaattcatgcctgttgagtgggataaggatgtcaacagcgattttattgctgagattaaagttgacatgtttaatcatcagggtgcactggcaaatctgacagccgccattaatgatgcgaactccaatatccaaagcatgaataccgaagaaaaagatggccgcgtttattgtgctttcattaggctgactgccaaagaccgtatccagctggcaaatatcatgcgcaagatacgtgtcatgccggatgtactacgagtcagccgtaaccgaaattagaggttatgaatcctaaacgttatgcacgtatttgccagatgatggcaatgcgtcagcctgacctgacgatttgtttagaagaagtacacaaaccccataatgtatctgcagtgattcgtactgcggatgcagttggtattcaccaaatccacgccgtctggcctactcaacaattacgaactcaactctcttccgccgcaggcagcaacagctgggtgcaggtaaaaactcattcatccgttgagcaggctatcaatcagtttaaaactgccggaatgcaggtattagcgaccaatctttctgataaagccgtcgatttccgtcagattgattacactaaacctacctgcatcattatggggcaggaaaagaaaggcatttccaaacaggctattgctctggcagattatgatattgtcattccgatggctggcatggttcagtcgctgaatgtctccgttgcttctgcgctgatcctgtatgaagcacagcggcaacgccagcttgccggtatgtatcagcgagaagaaagcatgctgtctgaggaagatcagcaaaaattgctgtttgaagggggataccccgttttagcggcagtttcacaccgtaaagggctggaacgacctttagttgataagcaagggcaaatcatagcaagtgaatcctggtgggcagcaatgcaggcaacgacaacaccatcagcagggaaataaatcacactgacggaaaaccggattgatggagaactggattaatggagaatagatatgaaaggccgattacttgatgccaccccgttaacaactttacgtggtgttggagccagtcaggtaggtaagcttgccaaactggggttggtcaatctacaggatctattactgcatttgcctctccgttatgaggatcaaacccggctataccccatcaatgaagtattacccggtatttatgcgacagtgacaggcaaaattttacgtaccaatgtcgtttttgggcggcggcgtatgatgacctgccaaatcagtgacggcactggcatgttaactctacgctttttcaatttcactgccgccatgaagaacagcctggcagacggcaaacatatcatcgcttatggtgagatccgccggggttctcagggtgctgaaattatccacccggaatacaaaatccagcaacacgccgagcgcatccatttacaggaaaccttaacccctatctaccctacgacagaaggtgtacgtcaaactacgctgcgtaaattaatcgaacaggctttagaactgctagatacctgcgccgttaatgagctattaccggagcagttcagccggaagattatcagcctctcaaatgccctgcatacgttacaccgcccaccacctgacatttccttagctgatttggaaagtggcagacatccggctcaacgccgcctgattctggaagaattactggctcataatttaagtatgctggcagtcagagcgggagcgcaacgctttcaggcccagcctctcactgcggataattcattaaagcagcggttactggctttgctccccttttcaccgactcgtgcacaagatcgcgtagtggcagaaatagagcatgatctggaaaaagaagttccgatgatgagactgattcagggggatgtcggttccggaaaaacgctggttgcagctctggcggcagtccgtgccatagttcatggtaaacaggttgcattgatggcacccactgaactccttgctgagcaacatgccaacacttttcgccagtggctggaaccactcggcattcaggtaggatggctggctggaaaacaaaaaggcaaggctcggcaggcacaacaggaagctattgccagcgggcaggtaagtatggtcgtcggcacgcatgctatgtttcaggaacaggttaaatttgccggattggcattagtaattattgatgaacagcatcgcttcggtgttcatcagcgcctggctctgtgggaaaaaggacatgaacagggctttcatccgcatcaattaatcatgactgccacaccaattccacggacactggcaatgacagcttatgccaatttggacacatccgttattgatgaacttcctccggggaggacaccggtaacaactgtcgccattcccgatacccgtagaaatgaaattatccagcgggttaaaaatgcctgcttagatgaagggcgtcaggcttattgggtgtgtactctgattgaagactctgaagttttggaggcacaggctgctcaggttaccagtgaagagcttgctctggcattgcctgaattgaaaatcggtttagttcatgggcggatgaagccggcagaaaagcaaaccatcatggaagcttttaagcgtggtgaactacaactattggttgcgacaacagtgattgaggttggtgttgatgttcccaatgccagcctgatgatcatcgataacccggaacgactgggactcgctcagttacaccagcttcgtggccgtgtcgggcggggagcaatagcctcacattgtgttctgctttataaaacaccgctgaccaataccgccagaatccgtttgcaggttctgcgggacagtaatgatggtttcgtcattgcccaaaaagatttagagatccgggggccgggtgaacttcttggtacacgccaaaccggtaatgtcgaattcaaaattgccgatttattacgggatcaaagtatgctccctgaagtccagcgtattgcccactatatccaccagcattatccggaaaacgcgaaggcactaattgaacgctggctttccgaccgctctcagtatagccacgcctgagtaataagatttaacaaagataattaaaaaaatgccgctgaaatcttccagcggcatatctaacaagaacaaaaagctaagttaaattaacctgtgacagatgggaatataggtaacatcaggtaaattttgataattgctgcgttaacgatatcaataaagaaagcacctaccatcggtacaagcaagaatgctacatgggatggtccgaaacggtcagtgattgcctgcatatttgcgatagctgtaggtgtcgcacccagcccgaagccacaatgaccggctgacagtacggctgcatcgtaatttttacccatgactctgtaagtcacgaatattgcgtacaatgccatcactaccgcctgtacagcgaggatcaccagcatcggcagggcaagggaagccagttgccacagtttgagactcatcagtgccattgctaggaagagtgacaagctgacgttacccagtactgatacagccctatcaaatacccggtaaaaaccgagcagagacaggccattactcagtatcacaccggtaaacagaacacagacaaacgttggcaaaaagagcgtatcttccagcactttctcaagatagttaccgaccaacaagcagatagagattaatgcgatggtttccagcatgaccaatggcgtgatcaggcgaccggtataaggtttttcaaatgcagatggaacttcagcatcatcattctccagacccggtgttttgtcatttctcaccagcaagcgagcaacaggcccaccaatcaggcctccgagaatcaaaccaaatgtcgcacaagccattgccacttcagtcgcattctcaaaaccgtagcgttcagtaaataccttaccccatgctgcacctgtgccgtgccctcccgaaagggtcacagaccctgccaatagccccatcaatgggtcaaggccgagcatttttgccagtgcaataccgactgtgttttgcaccaacagcaagcctacaacggcaacaacaaagattaagagaagttttccgcctgctctcaggctggcgaggttagcattcaggccaactgtggcgaaaaatgccaacataagggggtctttgagggataggtcaaagctgacttcccagcccgtaaactgtttaactgcaagcagaacaaaagcaaccagcaagccacctgcgactggctctggaattgtatacttttcaagaaatgaaattgactgtacgagctttcttcccagtagcaaaacaagtgtggccgcaacgagcgtgccataaatatccagatgatacatttatgtaccccatctaattgttaaaattatgttaatttaatgcgacgttataatcatcctataaaaacgccaagagcaggtaaggattggattagaaaaaaaattcctaataaacacaagttaaaacatttaaaaatgtgacgaaataaggttataagccataggcaaaattttacgcaaacgattgcttttataatttagatcaataaaatgtgtttttttcactcgaaactacactcatggccacctcaacacgcgaaaattcagcactggaaactctcaaaaaatcagacagcgaattaatttaccgtctggaagataaacctcatcttccgcacgctgtatttgccgcctttcagcatctgctggcaatgtttgttgcggttatcacaccggctatgttgatctgtcaggcacttgggcttccggcagaagatacccaacgcatcatcagtatgtctctgtttgcctccggtctggcatcactgattcaaatccgctcctggggacctgttggctctggtttactttctattcagggtaccagctttaattttgtcacccccctcattatgggtggcttgtccctgaaaaatggcggtgctgatgtaccgaccatgatggcggccctgtttggtacgttgatgcttgcagcaacgacagagatattgctttcccgtgtacttcatctggctaaaatgctcatcacacctttggtttccggcattgttgtgatgattattggtctgtcacttattcaggtcggactgacttctatcggtggtggctattctgctattcagcaaggtacattcggagcccctgaaaacctttttctggcaggaattgttcttgccattatcgtactgctgaaccgccagcataatccctatctgcgggttgcttctctggttattgccatgacagtaggttatctggccgcctggtacatggacatgctaccccacgcagccacaacagaagacaaaccaattatcactgtgcccgccccgctgtattacgggctttctattgactggcatttactcatcccactaatcctgattttcatggtgacatcactggaaacgattggggatattacagccacttcagatgtttccgagcagcctgtctgcggcccgttatatatgaagcgcattaagggcggtgtactggcaaatggcgtcaattcgatgatttctgccgtatttaatactttcccgaattcctgttttggtcagaataacggcgtaatccaattaactggggttgccagccgttatgttggttaccttattgcttctatgttgatcctgatggggctatttccggcagtggccggttttgtccagcatattccagagccggtattaggtggcgcgacgattgtcatgttcggcacgattgcagcatccggtgtcagaattgtttcccgggagccgttaaatcgccgtgccattatgatcattgcattgtcactagccatggggcttggcgttgcacaacaaccccttattttacagtttgcacctgagtggataagaaatctgttttcttccggtattgcagcgggtggcctgactgcaatcctgcttaatctgatttttcctcaggaaaaataaactaccgcgtttcaatctaagattttcaccttggttttcgccttgttgttatattatcccgctctaatcgcgggatttttttatattttgcgtaacctttcgcaatattctgccctagatgggggaattaaaggtttttcagcattgtctattgagtgatgctcttttttacggcataaaaggattttttcaggaagattatattggggtgagatgatgaagtggttagggaaaggctttgctgttctgctgttattactgattctggcaattattgctgtttattttgttgcccagacacactggggagcaaagaaaataagcagatggattaataaacaaggtcattatcaggtcaatattgaaagtatcaatcacagctggctccagcctatgaccttaatgctcaataatgtgagtctcagtgataagcagggctctttctcactcaatgccaatactgtcgatctggattttaaatggcaggccccgacaaaattaacaaatctgcgtaagttgaccttacaagatggaaaactgatactttcaggctctgagtttacccaagccttgaaaaccgatgttttgcaactgaataaaatggatgttcagctaacaacccccagttcacagattcagggcaaaaatattgtcggcggtattactccctggtctcctgataagaataccctttttggctcagggcaataccagttcagtgccaataatatcaacataaatggcctgtcatttgataaggtcgtcatgcagggtagctatcagaataacaatctggttataaattcctttggtgcggagttcctacagggtctgatctctgggaatgggcaacaattagctgatggcagctggaatttagagaatatcctgatcaatgacatacgctggcaatcacccatgacgctggctgagctgacagaaaaaacccgccacctgtccgctatccacattaaagatctcaatcttactaacgccaaattacagggaaaagattggtctgctgattatcttaataccagcatcaaaggattgggattggttaacgggcaatggcaggcagaagatggcctgattgactttaatgccatgaatatggccttcaacgaagctcagttcaaagatatattaggccagttcagtttttccggtgatatttttaccatcgctaatctgactacccattatcagaagggtttatttaatattaaagcgcagtgggatcgaaaaaatcatcagttaaccctcaatgatagctctgtaaccggtctgatttactccttaccttcagagtggcgcgactatattaaaaatccggcacctgaatggatttcagcactgaagttaaataatgtcagtatccacaatacgctcctgattgataccaaccctgattttccatttcagctcaccaccttatcgggatatgtcgatactctggatatcctgaaagatggtcactggggattatggaatgggaaagcttcattgcaggccatgagtggcacattcaataaaattgaagtggtgcggccttacctgcaactacatgccacagatgacaaggttattattgataaaatgaacaccttttcaggtgacggcatactccagtttaacggcttccttgaacagcttgctgcccaaaaacccttccagctcaatgtcaaaggaatgagtgtggatttgggaattttgccacaatggggctggataccacttcacctgcatggtgaggggaatttctcactggctatcactggaaacctttctgccgataatctgaaaagcacgatcaatggcacactgacggctgaagataaggcatccaataaagagtcacaatccgttaagcaaggcgtgatttctactgataactgcccagccgggcaatctgatacagaacaatctggtgaggctgggcaaccgaatggtgatcaaagcaaaacctgtgcaactgtcgtgttgtaacaaattcagtatgtagaaaagccacatatttcagcaactcaggttgtaatagcttatgctgccgctgcccgctcagcgggtaagacaatataagtaccggtgaacacacttccgagtccctgttcaccgctgacatgaacttccagttttacacgtgctttattaccacgggcaaggcgggctaaatcaccactcatattgttgagatcggcaacagcactaggacgaccaacaataggtttttggtaacgaatattcgcatccaccagaatgatctctccccctagttgacgctcctgcaagagcagccaaatcagaccccatgcggttaatgtcgattgagaaaatagactgccagcaaaaatagtatgatgagggttttggtttcccgcttccggcatagtcgtaataaagcgctgccccgtatattgagtaatacgcacacccatcttttcactcagggggatatgtttgtaccatgcctgctgcaattgagcacaccagtccggacgatgcagaatatcatcaagactcataatgggtttaatcatcaaaaaatgattaatgggagatgaattagcgccgttgataagcccacggttttgaaatcccaacttattaaagaaatcaaccgcatcctcacgcgcactgcaaactatccgcttcacaccttcctgccgggcaacagattccagtgccattgcaaccaaggtgcccagccctttttgctgctcattcgggtcaacagccagaaaacggatagcaccttcactgtccgcattgatatataaacgtccgacagcgactggcctgcccttctcatcaaccaccatttgatggtgagccattgagtcataagcatctttttctgagccgacaggctgatgaagtggtttacgcagcatctcccaacggaattggtaataagtttccagctcttgttcggtttgaggtactctgaggtgatacatagaaacagccccttctttgcgtgttgtcgtgtgtagtcggggagcatgcatgcttttaacattatatttctaatcagaaagtcatacttgtaaccagaaagtcactggcccgtcatttgtcagactcactttcatgtccgcagcaaattgccccatttctgtttttacaccagttgcacggcactgttcaacaaaatagcgataaagttcatctgcttttttgggttcagcacctccagaaaagcttggtcttaaacctttttgggtgtccgcagccagagtgaattgagagataaccagtaggctaccattggcttgctggacgttgagattcattttcccattttcatcactgaatacgcgataacccattaccttttcacacagacgctgcactttttgctggtcatcttctttttcaacccccagaaaaacgagcagcccctgttcaatttcacctatagtctgactatcaacaaccacttttgcttgtgttacgcgttgaattaatgcaatcatttttcttatgtatgatccgtatcggtagattaacctgtaagggtggagcctcgcttgccaagatgccaccctatttagaacttgttgaatgttatacccttcgtctttcaagttgcctctttgttggctacgctcgctcaccccagtcacatagttatctatgctcttggggattccctcccttgccgccgcgatgcaactcgaaatccattgggtatacatgaagatcagaaattatgttacggtgagaggtgaaaagtcgtgtgtcttaaaataatccgggatagtatccctgccgcttacatgaatggctttgaggcctaatcttttggctgcttcaacattttcctgtacatcatcaaaaaaaacagcctgctcagcagctacaccttctttttccagtaaatatttaaagatgtcctgattaggtttacgtatccccagatcctgagacaggtataaatgatctgctgatgtagtgacttcagggtattgttgcggccaatactgaaaatgcaggcgatttgtgttggataaaataacaacccgatgcccctgctcacgcagtttattcatcaactcaataacttcctgcctgacaccaacgaaaatcgcattccagccttcagaaaactgctcaaagctaagagaaacctccatttcatcgcataacgtttcggcaaattctgcatctgtaatttggccacactcgtgcttttcaaatgcttcgcccagtgcaaatctgggagccagaactgcaagtggtgtcccgctcaggttactccaaaccgccagtacccttctaaaatcaatatcaataatcacgttacccatatcgaaaatatacagcatactccctcctgactgaggtatatcgttttgtacttttatcataatttcatcaacaaaaaaggtgaagcgacaaaaaatagacaaattacgctgataattaacccacaccaagaatcaatcttagttgaaaaataagaaactgagtgaggttgcaatactggcaggttattgagagaaaagttagattaagcgggtcatgaaactcagggtgccgaagcaccctaagctgtcaggagaaattaagcgtctttgctacggcttgcacggcgacgatcattctcagtcaaatggcgtttacgcagacgaattgactctggagtcacttctaccagttcgtcatcatcaataaactccagtgcctgctccagtgttttcttgatatgcggagacagtgttgtcgcttcatcagtacctgaagcacgaacgttggtcagctttttacctgtcagacagtttactgtcaggtcattagagcgggagtgaataccgatgatctggccttcataaacttctgtaccatggccaaggaacagcttaccgcgctcctgcaaaccatacagagcataagcaaccgctttaccctgaccgttggagatcagtacaccattctgacgacggccaatttcacctggacggatgtcatcatagtggctgaatgttgcgtacagcagaccagtaccggaagtcatagtcatgaattcagtacggaagccaatcaaaccacggcttggaataacgtaatccagacgtacgcgacctttgccatctggcagcatatcacgcatctcgcctttacgttcacccagcgcctgcatcacatcaccctgatgctgctcttcgatatccagagttacctgctcaaaaggttcctgcttacggccgtcaatttcacggaaaataactttcggacgagaaacgcccagctcgaaaccttcacgacgcatgttctcaatcagaacggaaaggtgcaattcaccacgaccggaaacacggaaagcatctggatcttcagtttcttcaacgcgcagagccacgttatgaaccagttcttttctcagacgatcaaggatctgacgggatgttacgtatttaccttcacgaccacagaaaggtgaagtgttaacacagaagtacatgctaacggtaggctcatcaacggccagcgctggcagagcttcaacagcgttaacttcacacagcgtgtcagagatgttcagatcgcccagaccggtaatcgcgatgatgtcgcccgcttcaaccttatctgattcgatacgatccagacccaggtggctgaatactttaccaactttaccgttacgagttttaccttcgctatcgataagcgtgatgttctggtttggttttacggttccgcgcttaatacggccgataccgataacacccacatagttgttgtagtccagctgggaaatctgcatctggaacgggccatccagatcaactttaggcggctcaacatggtcaacgattgcctgatacagcggagtcatatcttctgccatttcagtatgctcgttgcctgcgatacccatcaatgcagaagcataaacgatagggaaatccagctgctcatcagttgcacccaggtttacgaacaggtcaaatacctgatcaacaacccagtcaggacgcgcgccaggacggtcaactttgttgataacaacgattggcttcaaaccatgagcgaaggctttctgggttacgaagcgagtctgtggcatagggccatccatcgcatccaccaacagtaaaacactgtcgaccattgacattacacgctctacttcgccaccgaagtcggcgtggcccggggtatccacgatattgatacggtagtcattccatttgatggcagtattttttgcaaggatggtgataccacgttctttttccagatcattggaatccatcacacgctcagctgttgcagcacgttcaccaaatgtaccggattgctgtaagagtttatcaaccagcgttgttttgccatggtcaacgtgagcgataatggcaatgtttcttaaattattaattgacaagtatttttaccgttttagctatttgaagaaatattaaatgggtacagcatgcagggtgcgatgctaccctcattcaacacaaatatggtgctattttacacgttataaccacagagtgaaataaatgtgagacgcatcacttttgaagtttatctgtttttttgcatataaacacgacataacctgaaataacattaataaccatcatgataacaaccgtgataacaatcacaattatagtaattcacctatattttatagcggctccggcaattcaccataacagtgcagtgcgttatcccaatgcaccaattaagtgcaaaaaccctcgaaaattcctcgtcctttctatcaattctctataatttttctccatttatgtacggatacatcaggattaaagcttttttaaaaattggcacgcttttcgcattagttttcacattagagtttagcattgaaaattgccacgaattgtctgtatacaaagacagcatcagctgcttaagataaaggcggcgtttctgacaacgcatccggctgacgtaaaccaggagaacttagtatgtccgttgaacatgttttatccatgattgaagaacatcaggtgaagtttattgacttacgttttactgacactaaaggtaaagaacagcacatcactattcctgcccaccagattgatgaagacttcttcgaagatggtaaaatgtttgacggttcatctatcaagggctggaaaggtatcaatgaatctgacatggtgttaatgcccgacccttctacagccatgcttgatcctttctttgatgatgccactctgattattcgttgcgatattctggaacccggcaccatgcagggttatggtcgtgacccccgttccattgcaaaacgtgcagaagatttcctgcgttccagtgatattgctgacactgttctgttcgggccagagccagaattcttcctgttcgatgatgttcgtttcggcagttctatttcaggctcttattatcatattgatgataccgaagcggcatggaacagcggaacgcgctacgaaggtggtaacaaaggccatcgtcccggaatcaaaggcggctatttcccggttcccccggtagactcttctcaggatctgcgttcagctatgtgtctgacgatggaagaaatgggtctggttgtggaagcacatcaccatgaagttgcaaccgcaggccagaacgaagtcgcaacccgcttcaatactatgaccaaaaaagcggatgaaacccagatttacaaatatgttgtacataatgtcgcccatgctttcggtaaaaccgccacatttatgccgaaaccattagttggggataacggctcaggcatgcactgtcatatgtcactgtccaaaggtggtgttaacctgttcgcaggagacaaatacggtggtttgtccgaaatggcactttattatatcggcggtattatcaaacatgcccgtgccctgaatgcctttaccaatccaactaccaactcatacaaacgtctggtgcccggttttgaagctccagtaatgctggcctattctgcccgtaaccgctcagcttctatccgtattccggttgttgccagcagtaaagctcgtcggattgaagtccgcttccctgatccggctgcaaacccttatctggcgttctcagctctgctgatggcgggtcttgatgggatcatcaataaaatacatccgggtgattcaatggataaaaacctgtatgacctgccagtcgaagaagcacaggaaatcccaactgtggcctcctctttggaagaagcactggcggctctgaatgcagaccgtgaattcctgacacgcggcggtgttttcactgatgatgcaattgatgcttatatcggtgtactgaatagcgaaattgaacgcgtacgcatgacaccacatcctctggagtttgaactgtattacagcgtgtaatgcttaaaagcatcaccgccgttcttgattagttttgttgccgtgaaacttttgacccattttcggatgggtccttttccttctgacctttccctccgatatctcagatataaagaggggtactcaatttatgattaaataagatacaatgcaccaaaaaagtgcaaaggttgaatggcaatggctgattttcccaaagcagaacaaattcttgattcattaataaatagtgtattagtgctggataacgatttgattatccactatgccaatcattccgctatgcaacttctggcacaaagtacacgtaaattattcggcactccgcttccggttttattcagctatatctcgctggatacggaatttatgcgatccagcctgatacgcgggcatggttttacagataacgaagtgatattggtgatcaataatcactcgcatgttatgtcgctcagtgcccagccaatttccgaacagtttattctgctggaactcgctcctatggatagtcagcgacgtttaagccaagagcagatacaacaggcacagcaggtagctgcacgggaattggttcgggggctggcacatgaaattaaaaatccgctggggggtttacggggagcggctcaattactggcaaaaacattgccggatccctctttgcgggaatatacacaagtcattattgaacaggctgacaggcttcgtacccttgtcgatcggttattggggcctcaacatccgggggctcagattagccagagtatccaccatgttgtcgagcgggtttatcagttggtatcactggaaatgcccagtaatattactctggtcaaagattacgaccccagcctgccggagctgtctcattaccctgatcaaattgagcaggttttattaaacatcacccgcaatgcgctacaggcattgggtgatcaaaaaggcactattactttacgtacccgaaccgccttccagattaccttgcacggtgaacgttaccgcttggcagcccggattgatattgaagataatgggccgggcatacctccgaatattcaggatatgctattttatccaatggtgagcgggcatgaaggcggaaccgggcttgggttgtctattgtccgcaatctcattgatcagcacactggaaaaatcgaatttactagctggccggggcatacggaattttccatttacctgcctatcaagaaataggggatatcatgcaacgaggaaaaatctggatcgttgatgacgacagttctatccgctgggtacttgaacgggcgctgagcggcgcagttggatggtatttgaaatgcaatcgatgctgcttatacacgctagatgtgtaatcgagc

SEQ ID NO: 3484 - DNA, 29489 bp, Xenorhabdus sp.; identical to SEQ ID NO: 3483
  CDS (4204)..(5460)

SEQ ID NO: 3485 - DNA, 29489 bp, Xenorhabdus sp.; identical to SEQ ID NO: 3483
  CDS (8170)..(8787)

SEQ ID NO: 3486 - DNA, 29489 bp, Xenorhabdus sp.; identical to SEQ ID NO: 3483
  CDS (10865)..(11488)

SEQ ID NO: 3487 - DNA, 29489 bp, Xenorhabdus sp.; identical to SEQ ID NO: 3483
  CDS (11543)..(11818)

SEQ ID NO: 3488 - DNA, 29489 bp, Xenorhabdus sp.; identical to SEQ ID NO: 3483
  CDS (11837)..(13978)

SEQ ID NO: 3489 - DNA, 29489 bp, Xenorhabdus sp.; identical to SEQ ID NO: 3483
  CDS (13984)..(14691)

SEQ ID NO: 3490 - DNA, 29489 bp, Xenorhabdus sp.; identical to SEQ ID NO: 3483
  CDS (14746)..(16827)

SEQ ID NO: 3491 - DNA, 29489 bp, Xenorhabdus sp.; identical to SEQ ID NO: 3483
  CDS (18041)..(18142)

SEQ ID NO: 3492 - DNA, 29489 bp, Xenorhabdus sp.; identical to SEQ ID NO: 3483
  CDS (18365)..(19750)

SEQ ID NO: 3493 - DNA, 29489 bp, Xenorhabdus sp.; identical to SEQ ID NO: 3483
  CDS (19964)..(21739)

SEQ ID NO: 3494 - DNA, 29489 bp, Xenorhabdus sp.; identical to SEQ ID NO: 3483
  CDS (26710)..(28119)

SEQ ID NO: 3495 - DNA, 29489 bp, Xenorhabdus sp.; identical to SEQ ID NO: 3483
  CDS (28294)..(29343)

SEQ ID NO: 3496 - DNA, 29489 bp, Xenorhabdus sp.; identical to SEQ ID NO: 3483
  CDS (29352)..(29483)

SEQ ID NO: 3497 - DNA, 29489 bp, Xenorhabdus sp.
  CDS (27271)..(29340)
gctcgattacacatctagcgtgtataagcagcatcgattgcatttcaaataccatccaactgcgccgctcagcgcccgttcaagtacccagcggatagaactgtcgtcatcaacgatccagatttttcctcgttgcatgatatcccctatttcttgataggcaggtaaatggaaaattccgtatgccccggccagctagtaaattcgatttttccagtgtgctgatcaatgagattgcggacaatagacaacccaagcccggttccgccttcatgcccgctcaccattggataaaatagcatatcctgaatattcggaggtatgcccggcccattatcttcaatatcaatccgggctgccaagcggtaacgttcaccgtgcaaggtaatctggaaggcggttcgggtacgtaaagtaatagtgcctttttgatcacccaatgcctgtagcgcattgcgggtgatgtttaataaaacctgctcaatttgatcagggtaatgagacagctccggcaggctggggtcgtaatctttgaccagagtaatattactgggcatttccagtgataccaactgataaacccgctcgacaacatggtggatactctggctaatctgagcccccggatgttgaggccccaataaccgatcgacaagggtacgaagcctgtcagcctgttcaataatgacttgtgtatattcccgcaaagagggatccggcaatgtttttgccagtaattgagccgctccccgtaaaccccccagcggatttttaatttcatgtgccagcccccgaaccaattcccgtgcagctacctgctgtgcctgttgtatctgctcttggcttaaacgtcgctgactatccataggagcgagttccagcagaataaactgttcggaaattggctgggcactgagcgacataacatgcgagtgattattgatcaccaatatcacttcgttatctgtaaaaccatgcccgcgtatcaggctggatcgcataaattccgtatccagcgagatatagctgaataaaaccggaagcggagtgccgaataatttacgtgtactttgtgccagaagttgcatagcggaatgattggcatagtggataatcaaatcgttatccagcactaatacactatttattaatgaatcaagaatttgttctgctttgggaaaatcagccattgccattcaacctttgcacttttttggtgcattgtatcttatttaatcataaattgagtacccctctttatatctgagatatcggagggaaaggtcagaaggaaaaggacccatccgaaaatgggtcaaaagtttcacggcaacaaaactaatcaagaacggcggtgatgcttttaagcattacacgctgtaatacagttcaaactccagaggatgtggtgtcatgcgtacgcgttcaatttcgctattcagtacaccgatataagcatcaattgcatcatcagtgaaaacaccgccgcgtgtcaggaattcacggtctgcattcagagccgccagtgcttcttccaaagaggaggccacagttgggatttcctgtgcttcttcgactggcaggtcatacaggtttttatccattgaatcacccggatgtattttattgatgatcccatcaagacccgccatcagcagagctgagaacgccagataagggtttgcagccggatcagggaagcggacttcaatccgacgagctttactgctggcaacaaccggaatacggatagaagctgagcggttacgggcagaataggccagcattactggagcttcaaaaccgggcaccagacgtttgtatgagttggtagttggattggtaaaggcattcagggcacgggcatgtttgataataccgccgatataataaagtgccatttcggacaaaccaccgtatttgtctcctgcgaacaggttaacaccacctttggacagtgacatatgacagtgcatgcctgagccgttatccccaactaatggtttcggcataaatgtggcggttttaccgaaagcatgggcgacattatgtacaacatatttgtaaatctgggtttcatccgcttttttggtcatagtattgaagcgggttgcgacttcgttctggcctgcggttgcaacttcatggtgatgtgcttccacaaccagacccatttcttccatcgtcagacacatagctgaacgcagatcctgagaagagtctaccgggggaaccgggaaatagccgcctttgattccgggacgatggcctttgttaccaccttcgtagcgcgttccgctgttccatgccgcttcggtatcatcaatatgataataagagcctgaaatagaactgccgaaacgaacatcatcgaacaggaagaattctggctctggcccgaacagaacagtgtcagcaatatcactggaacgcaggaaatcttctgcacgttttgcaatggaacgggggtcacgaccataaccctgcatggtgccgggttccagaatatcgcaacgaataatcagagtggcatcatcaaagaaaggatcaagcatggctgtagaagggtcgggcattaacaccatgtcagattcattgatacctttccagcccttgatagatgaaccgtcaaacattttaccatcttcgaagaagtcttcatcaatctggtgggcaggaatagtgatgtgctgttctttacctttagtgtcagtaaaacgtaagtcaataaacttcacctgatgttcttcaatcatggataaaacatgttcaacggacatactaagttctcctggtttacgtcagccggatgcgttgtcagaaacgccgcctttatcttaagcagctgatgctgtctttgtatacagacaattcgtggcaattttcaatgctaaactctaatgtgaaaactaatgcgaaaagcgtgccaatttttaaaaaagctttaatcctgatgtatccgtacataaatggagaaaaattatagagaattgatagaaaggacgaggaattttcgagggtttttgcacttaattggtgcattgggataacgcactgcactgttatggtgaattgccggagccgctataaaatataggtgaattactataattgtgattgttatcacggttgttatcatgatggttattaatgttatttcaggttatgtcgtgtttatatgcaaaaaaacagataaacttcaaaagtgatgcgtctcacatttatttcactctgtggttataacgtgtaaaatagcaccatatttgtgttgaatgagggtagcatcgcaccctgcatgctgtacccatttaatatttcttcaaatagctaaaacggtaaaaatacttgtcaattaataatttaagaaacattgccattatcgctcacgttgaccatggcaaaacaacgctggttgataaactcttacagcaatccggtacatttggtgaacgtgctgcaacagctgagcgtgtgatggattccaatgatctggaaaaagaacgtggtatcaccatccttgcaaaaaatactgccatcaaatggaatgactaccgtatcaatatcgtggataccccgggccacgccgacttcggtggcgaagtagagcgtgtaatgtcaatggtcgacagtgttttactgttggtggatgcgatggatggccctatgccacagactcgcttcgtaacccagaaagccttcgctcatggtttgaagccaatcgttgttatcaacaaagttgaccgtcctggcgcgcgtcctgactgggttgttgatcaggtatttgacctgttcgtaaacctgggtgcaactgatgagcagctggatttccctatcgtttatgcttctgcattgatgggtatcgcaggcaacgagcatactgaaatggcagaagatatgactccgctgtatcaggcaatcgttgaccatgttgagccgcctaaagttgatctggatggcccgttccagatgcagatttcccagctggactacaacaactatgtgggtgttatcggtatcggccgtattaagcgcggaaccgtaaaaccaaaccagaacatcacgcttatcgatagcgaaggtaaaactcgtaacggtaaagttggtaaagtattcagccacctgggtctggatcgtatcgaatcagataaggttgaagcgggcgacatcatcgcgattaccggtctgggcgatctgaacatctctgacacgctgtgtgaagttaacgctgttgaagctctgccagcgctggccgttgatgagcctaccgttagcatgtacttctgtgttaacacttcacctttctgtggtcgtgaaggtaaatacgtaacatcccgtcagatccttgatcgtctgagaaaagaactggttcataacgtggctctgcgcgttgaagaaactgaagatccagatgctttccgtgtttccggtcgtggtgaattgcacctttccgttctgattgagaacatgcgtcgtgaaggtttcgagctgggcgtttctcgtccgaaagttattttccgtgaaattgacggccgtaagcaggaaccttttgagcaggtaactctggatatcgaagagcagcatcagggtgatgtgatgcaggcgctgggtgaacgtaaaggcgagatgcgtgatatgctgccagatggcaaaggtcgcgtacgtctggattacgttattccaagccgtggtttgattggcttccgtactgaattcatgactatgacttccggtactggtctgctgtacgcaacattcagccactatgatgacatccgtccaggtgaaattggccgtcgtcagaatggtgtactgatctccaacggtcagggtaaagcggttgcttatgctctgtatggtttgcaggagcgcggtaagctgttccttggccatggtacagaagtttatgaaggccagatcatcggtattcactcccgctctaatgacctgacagtaaactgtctgacaggtaaaaagctgaccaacgttcgtgcttcaggtactgatgaagcgacaacactgtctccgcatatcaagaaaacactggagcaggcactggagtttattgatgatgacgaactggtagaagtgactccagagtcaattcgtctgcgtaaacgccatttgactgagaatgatcgtcgccgtgcaagccgtagcaaagacgcttaatttctcctgacagcttagggtgcttcggcaccctgagtttcatgacccgcttaatctaacttttctctcaataacctgccagtattgcaacctcactcagtttcttatttttcaactaagattgattcttggtgtgggttaattatcagcgtaatttgtctattttttgtcgcttcaccttttttgttgatgaaattatgataaaagtacaaaacgatatacctcagtcaggagggagtatgctgtatattttcgatatgggtaacgtgattattgatattgattttagaagggtactggcggtttggagtaacctgagcgggacaccacttgcagttctggctcccagatttgcactgggcgaagcatttgaaaagcacgagtgtggccaaattacagatgcagaatttgccgaaacgttatgcgatgaaatggaggtttctcttagctttgagcagttttctgaaggctggaatgcgattttcgttggtgtcaggcaggaagttattgagttgatgaataaactgcgtgagcaggggcatcgggttgttattttatccaacacaaatcgcctgcattttcagtattggccgcaacaataccctgaagtcactacatcagcagatcatttatacctgtctcaggatctggggatacgtaaacctaatcaggacatctttaaatatttactggaaaaagaaggtgtagctgctgagcaggctgttttttttgatgatgtacaggaaaatgttgaagcagccaaaagattaggcctcaaagccattcatgtaagcggcagggatactatcccggattattttaagacacacgacttttcacctctcaccgtaacataatttctgatcttcatgtatacccaatggatttcgagttgcatcgcggcggcaagggagggaatccccaagagcatagataactatgtgactggggtgagcgagcgtagccaacaaagaggcaacttgaaagacgaagggtataacattcaacaagttctaaatagggtggcatcttggcaagcgaggctccacccttacaggttaatctaccgatacggatcatacataagaaaaatgattgcattaattcaacgcgtaacacaagcaaaagtggttgttgatagtcagactataggtgaaattgaacaggggctgctcgtttttctgggggttgaaaaagaagatgaccagcaaaaagtgcagcgtctgtgtgaaaaggtaatgggttatcgcgtattcagtgatgaaaatgggaaaatgaatctcaacgtccagcaagccaatggtagcctactggttatctctcaattcactctggctgcggacacccaaaaaggtttaagaccaagcttttctggaggtgctgaacccaaaaaagcagatgaactttatcgctattttgttgaacagtgccgtgcaactggtgtaaaaacagaaatggggcaatttgctgcggacatgaaagtgagtctgacaaatgacgggccagtgactttctggttacaagtatgactttctgattagaaatataatgttaaaagcatgcatgctccccgactacacacgacaacacgcaaagaaggggctgtttctatgtatcacctcagagtacctcaaaccgaacaagagctggaaacttattaccaattccgttgggagatgctgcgtaaaccacttcatcagcctgtcggctcagaaaaagatgcttatgactcaatggctcaccatcaaatggtggttgatgagaagggcaggccagtcgctgtcggacgtttatatatcaatgcggacagtgaaggtgctatccgttttctggctgttgacccgaatgagcagcaaaaagggctgggcaccttggttgcaatggcactggaatctgttgcccggcaggaaggtgtgaagcggatagtttgcagtgcgcgtgaggatgcggttgatttctttaataagttgggatttcaaaaccgtgggcttatcaacggcgctaattcatctcccattaatcattttttgatgattaaacccattatgagtcttgatgatattctgcatcgtccggactggtgtgctcaattgcagcaggcatggtacaaacatatccccctgagtgaaaagatgggtgtgcgtattactcaatatacggggcagcgctttattacgactatgccggaagcgggaaaccaaaaccctcatcatactatttttgctggcagtctattttctcaatcgacattaaccgcatggggtctgatttggctgctcttgcaggagcgtcaactagggggagagatcattctggtggatgcgaatattcgttaccaaaaacctattgttggtcgtcctagtgctgttgccgatctcaacaatatgagtggtgatttagcccgccttgcccgtggtaataaagcacgtgtaaaactggaagttcatgtcagcggtgaacagggactcggaagtgtgttcaccggtacttatattgtcttacccgctgagcgggcagcggcagcataagctattacaacctgagttgctgaaatatgtggcttttctacatactgaatttgttacaacacgacagttgcacaggttttgctttgatcaccattcggttgcccagcctcaccagattgttctgtatcagattgcccggctgggcagttatcagtagaaatcacgccttgcttaacggattgtgactctttattggatgccttatcttcagccgtcagtgtgccattgatcgtgcttttcagattatcggcagaaaggtttccagtgatagccagtgagaaattcccctcaccatgcaggtgaagtggtatccagccccattgtggcaaaattcccaaatccacactcattcctttgacattgagctggaagggtttttgggcagcaagctgttcaaggaagccgttaaactggagtatgccgtcacctgaaaaggtgttcattttatcaataataaccttgtcatctgtggcatgtagttgcaggtaaggccgcaccacttcaattttattgaatgtgccactcatggcctgcaatgaagctttcccattccataatccccagtgaccatctttcaggatatccagagtatcgacatatcccgataaggtggtgagctgaaatggaaaatcagggttggtatcaatcaggagcgtattgtggatactgacattatttaacttcagtgctgaaatccattcaggtgccggatttttaatatagtcgcgccactctgaaggtaaggagtaaatcagaccggttacagagctatcattgagggttaactgatgattttttcgatcccactgcgctttaatattaaataaacccttctgataatgggtagtcagattagcgatggtaaaaatatcaccggaaaaactgaactggcctaatatatctttgaactgagcttcgttgaaggccatattcatggcattaaagtcaatcaggccatcttctgcctgccattgcccgttaaccaatcccaatcctttgatgctggtattaagataatcagcagaccaatcttttccctgtaatttggcgttagtaagattgagatctttaatgtggatagcggacaggtggcgggttttttctgtcagctcagccagcgtcatgggtgattgccagcgtatgtcattgatcaggatattctctaaattccagctgccatcagctaattgttgcccattcccagagatcagaccctgtaggaactccgcaccaaaggaatttataaccagattgttattctgatagctaccctgcatgacgaccttatcaaatgacaggccatttatgttgatattattggcactgaactggtattgccctgagccaaaaagggtattcttatcaggagaccagggagtaataccgccgacaatatttttgccctgaatctgtgaactgggggttgttagctgaacatccattttattcagttgcaaaacatcggttttcaaggcttgggtaaactcagagcctgaaagtatcagttttccatcttgtaaggtcaacttacgcagatttgttaattttgtcggggcctgccatttaaaatccagatcgacagtattggcattgagtgagaaagagccctgcttatcactgagactcacattattgagcattaaggtcataggctggagccagctgtgattgatactttcaatattgacctgataatgaccttgtttattaatccatctgcttattttctttgctccccagtgtgtctgggcaacaaaataaacagcaataattgccagaatcagtaataacagcagaacagcaaagcctttccctaaccacttcatcatctcaccccaatataatcttcctgaaaaaatccttttatgccgtaaaaaagagcatcactcaatagacaatgctgaaaaacctttaattcccccatctagggcagaatattgcgaaaggttacgcaaaatataaaaaaatcccgcgattagagcgggataatataacaacaaggcgaaaaccaaggtgaaaatcttagattgaaacgcggtagtttatttttcctgaggaaaaatcagattaagcaggattgcagtcaggccacccgctgcaataccggaagaaaacagatttcttatccactcaggtgcaaactgtaaaataaggggttgttgtgcaacgccaagccccatggctagtgacaatgcaatgatcataatggcacggcgatttaacggctcccgggaaacaattctgacaccggatgctgcaatcgtgccgaacatgacaatcgtcgcgccacctaataccggctctggaatatgctggacaaaaccggccactgccggaaatagccccatcaggatcaacatagaagcaataaggtaaccaacataacggctggcaaccccagttaattggattacgccgttattctgaccaaaacaggaattcgggaaagtattaaatacggcagaaatcatcgaattgacgccatttgccagtacaccgcccttaatgcgcttcatatataacgggccgcagacaggctgctcggaaacatctgaagtggctgtaatatccccaatcgtttccagtgatgtcaccatgaaaatcaggattagtgggatgagtaaatgccagtcaatagaaagcccgtaatacagcggggcgggcacagtgataattggtttgtcttctgttgtggctgcgtggggtagcatgtccatgtaccaggcggccagataacctactgtcatggcaataaccagagaagcaacccgcagatagggattatgctggcggttcagcagtacgataatggcaagaacaattcctgccagaaaaaggttttcaggggctccgaatgtaccttgctgaatagcagaatagccaccaccgatagaagtcagtccgacctgaataagtgacagaccaataatcatcacaacaatgccggaaaccaaaggtgtgatgagcattttagccagatgaagtacacgggaaagcaatatctctgtcgttgctgcaagcatcaacgtaccaaacagggccgccatcatggtcggtacatcagcaccgccatttttcagggacaagccacccataatgaggggggtgacaaaattaaagctggtaccctgaatagaaagtaaaccagagccaacaggtccccaggagcggatttgaatcagtgatgccagaccggaggcaaacagagacatactgatgatgcgttgggtatcttctgccggaagcccaagtgcctgacagatcaacatagccggtgtgataaccgcaacaaacattgccagcagatgctgaaaggcggcaaatacagcgtgcggaagatgaggtttatcttccagacggtaaattaattcgctgtctgattttttgagagtttccagtgctgaattttcgcgtgttgaggtggccatgagtgtagtttcgagtgaaaaaaacacattttattgatctaaattataaaagcaatcgtttgcgtaaaattttgcctatggcttataaccttatttcgtcacatttttaaatgttttaacttgtgtttattaggaattttttttctaatccaatccttacctgctcttggcgtttttataggatgattataacgtcgcattaaattaacataattttaacaattagatggggtacataaatgtatcatctggatatttatggcacgctcgttgcggccacacttgttttgctactgggaagaaagctcgtacagtcaatttcatttcttgaaaagtatacaattccagagccagtcgcaggtggcttgctggttgcttttgttctgcttgcagttaaacagtttacgggctgggaagtcagctttgacctatccctcaaagacccccttatgttggcatttttcgccacagttggcctgaatgctaacctcgccagcctgagagcaggcggaaaacttctcttaatctttgttgttgccgttgtaggcttgctgttggtgcaaaacacagtcggtattgcactggcaaaaatgctcggccttgacccattgatggggctattggcagggtctgtgaccctttcgggagggcacggcacaggtgcagcatggggtaaggtatttactgaacgctacggttttgagaatgcgactgaagtggcaatggcttgtgcgacatttggtttgattctcggaggcctgattggtgggcctgttgctcgcttgctggtgagaaatgacaaaacaccgggtctggagaatgatgatgctgaagttccatctgcatttgaaaaaccttataccggtcgcctgatcacgccattggtcatgctggaaaccatcgcattaatctctatctgcttgttggtcggtaactatcttgagaaagtgctggaagatacgctctttttgccaacgtttgtctgtgttctgtttaccggtgtgatactgagtaatggcctgtctctgctcggtttttaccgggtatttgatagggctgtatcagtactgggtaacgtcagcttgtcactcttcctagcaatggcactgatgagtctcaaactgtggcaactggcttcccttgccctgccgatgctggtgatcctcgctgtacaggcggtagtgatggcattgtacgcaatattcgtgacttacagagtcatgggtaaaaattacgatgcagccgtactgtcagccggtcattgtggcttcgggctgggtgcgacacctacagctatcgcaaatatgcaggcaatcactgaccgtttcggaccatcccatgtagcattcttgcttgtaccgatggtaggtgctttctttattgatatcgttaacgcagcaattatcaaaatttacctgatgttacctatattcccatctgtcacaggttaatttaacttagctttttgttcttgttagatatgccgctggaagatttcagcggcatttttttaattatctttgttaaatcttattactcaggcgtggctatactgagagcggtcggaaagccagcgttcaattagtgccttcgcgttttccggataatgctggtggatatagtgggcaatacgctggacttcagggagcatactttgatcccgtaataaatcggcaattttgaattcgacattaccggtttggcgtgtaccaagaagttcacccggcccccggatctctaaatctttttgggcaatgacgaaaccatcattactgtcccgcagaacctgcaaacggattctggcggtattggtcagcggtgttttataaagcagaacacaatgtgaggctattgctccccgcccgacacggccacgaagctggtgtaactgagcgagtcccagtcgttccgggttatcgatgatcatcaggctggcattgggaacatcaacaccaacctcaatcactgttgtcgcaaccaatagttgtagttcaccacgcttaaaagcttccatgatggtttgcttttctgccggcttcatccgcccatgaactaaaccgattttcaattcaggcaatgccagagcaagctcttcactggtaacctgagcagcctgtgcctccaaaacttcagagtcttcaatcagagtacacacccaataagcctgacgcccttcatctaagcaggcatttttaacccgctggataatttcatttctacgggtatcgggaatggcgacagttgttaccggtgtcctccccggaggaagttcatcaataacggatgtgtccaaattggcataagctgtcattgccagtgtccgtggaattggtgtggcagtcatgattaattgatgcggatgaaagccctgttcatgtcctttttcccacagagccaggcgctgatgaacaccgaagcgatgctgttcatcaataattactaatgccaatccggcaaatttaacctgttcctgaaacatagcatgcgtgccgacgaccatacttacctgcccgctggcaatagcttcctgttgtgcctgccgagccttgcctttttgttttccagccagccatcctacctgaatgccgagtggttccagccactggcgaaaagtgttggcatgttgctcagcaaggagttcagtgggtgccatcaatgcaacctgtttaccatgaactatggcacggactgccgccagagctgcaaccagcgtttttccggaaccgacatccccctgaatcagtctcatcatcggaacttctttttccagatcatgctctatttctgccactacgcgatcttgtgcacgagtcggtgaaaaggggagcaaagccagtaaccgctgctttaatgaattatccgcagtgagaggctgggcctgaaagcgttgcgctcccgctctgactgccagcatacttaaattatgagccagtaattcttccagaatcaggcggcgttgagccggatgtctgccactttccaaatcagctaaggaaatgtcaggtggtgggcggtgtaacgtatgcagggcatttgagaggctgataatcttccggctgaactgctccggtaatagctcattaacggcgcaggtatctagcagttctaaagcctgttcgattaatttacgcagcgtagtttgacgtacaccttctgtcgtagggtagataggggttaaggtttcctgtaaatggatgcgctcggcgtgttgctggattttgtattccgggtggataatttcagcaccctgagaaccccggcggatctcaccataagcgatgatatgtttgccgtctgccaggctgttcttcatggcggcagtgaaattgaaaaagcgtagagttaacatgccagtgccgtcactgatttggcaggtcatcatacgccgccgcccaaaaacgacattggtacgtaaaattttgcctgtcactgtcgcataaataccgggtaatacttcattgatggggtatagccgggtttgatcctcataacggagaggcaaatgcagtaatagatcctgtagattgaccaaccccagtttggcaagcttacctacctgactggctccaacaccacgtaaagttgttaacggggtggcatcaagtaatcggcctttcatatctattctccattaatccagttctccatcaatccggttttccgtcagtgtgatttatttccctgctgatggtgttgtcgttgcctgcattgctgcccaccaggattcacttgctatgatttgcccttgcttatcaactaaaggtcgttccagccctttacggtgtgaaactgccgctaaaacggggtatcccccttcaaacagcaatttttgctgatcttcctcagacagcatgctttcttctcgctgatacataccggcaagctggcgttgccgctgtgcttcatacaggatcagcgcagaagcaacggagacattcagcgactgaaccatgccagccatcggaatgacaatatcataatctgccagagcaatagcctgtttggaaatgcctttcttttcctgccccataatgatgcaggtaggtttagtgtaatcaatctgacggaaatcgacggctttatcagaaagattggtcgctaatacctgcattccggcagttttaaactgattgatagcctgctcaacggatgaatgagtttttacctgcacccagctgttgctgcctgcggcggaagagagttgagttcgtaattgttgagtaggccagacggcgtggatttggtgaataccaactgcatccgcagtacgaatcactgcagatacattatggggtttgtgtacttcttctaaacaaatcgtcaggtcaggctgacgcattgccatcatctggcaaatacgtgcataacgtttaggattcataacctctaatttcggttacggctgactcgtagtacatccggcatgacacgtatcttgcgcatgatatttgccagctggatacggtctttggcagtcagcctaatgaaagcacaataaacgcggccatctttttcttcggtattcatgctttggatattggagttcgcatcattaatggcggctgtcagatttgccagtgcaccctgatgattaaacatgtcaactttaatctcagcaataaaatcgctgttgacatccttatcccactcaacaggcatgaatttttccggttctttctggtagccacgaatattacggcaggattcgtgatggataactaaacctttgcctgggctgatatgagaaataatcgggtcaccggggataggacggcaacatttggcaaaggtaatcaggataccatcagcgcctttgatgggtagtttacggctattattactattattgttgttactgttattgttgccgccattactgtttggcattttctctgtttcgcccaacagattatgagcaacaacgacactcattgcattacctaagccgatttctgccagcagatcatccagtgaagtcagtttcattcttgccagttctctggcaatgttttcttccggaatatcggcaactttcaggccgttgccgagggcatgattaagcagacggcgtcccagactgactgaatcatcccgttttagatttttcaatagctgacggatcttagcgcgtgctttcgagctgacgacaaagttcagccatgcggcattagggcgggcacttggtgcggtaataatttcgacggtttgcccactgctgagggtttgagacagtggataaggctgacgatcaacacgagccccgacacaggcgtgtccaatatcggtgtgaacggcataggcaaaatcgacaggtgttgcccctgccggcaattcgacaatacgcccttcaggagtaaaaacgtagatctcatcagggaatagatcagatttgacgctttcaataaattcgaaagagctaccggcactttgctgaagctccagcaggctttgcatccagcgctgagcgcgaacctgagcagtcgtacctgattcaccctgctctttataagcccagtgtgcagcaacccccatttcagccatttgatccatatcttcagtacggatttgcacttcaaccgggactccatgtgggccgatcagagaagtatgcagggactgatagccgttggctttgggaatggcaatataatcttttactttaccgggacggggtttatacaggctgtgcatttgccccagaacacggtaacaggtatcaagattatcgacgatgacacggaacgcgtaaatatccatgatggaatgaaaacgctgttctttcagatgcatcttacgatagatagagtagaggtgcttttcccgcccattgacggtacatttgatgccggcatccgttaatctgccctcaatttctgacagaattttctggatcatctccttgcggttgccgcgagcagctttaactacctctttaatcacccgataacggttcggatacagagcttcaaaacccagctcttccagttctgttttcaggtgatggatacccaatcgatgggctaacggactgtaaatttccagcgtttccctggcgatgcgccgccgtttatcagggcgcagggaaccaagggttcgcatgttatgtgtacggtctgccagtttgatcagaatgacacggatatcctgtaccattgccatgaccattttgcgaaagttttctgcctgagcttctttcttatcacggaagttcagtttgtccagcttagagacaccctcaactaatccggcgacagccgtcccgaatagttgctcgatatcctgaaatgtcgttggtgtatcctctatgacatcatgcagaagtgcagccatcagtgtttcatgatcaaggcgcatttcagccagaatacaggcaacggcgaccggatgagtaatatatggctcaccgctggagcgggtctgcccttcatgggcatccctagctacgatataagcctgcttcaacagaccaatctgatcttcaggcaaatatttaagaacaagctgattcaggctttcaaacaggtacaaggcagacctaccgtaaaattaacgacgaccgtcggcgatagcagaaacagcgttgatttctgcagcttcctgctcctgttgctcctgacgttcacgaacatcaagaattttattattgataagaccctgctcgatttcacgcagagcgataaccgtcatcttatcgttttcttccggaaccagaggatcttttccgcctgactgcaattggcgtgctcggcgagcagcgaccaacaccaggtcaaaacggttaccaattttttctactgcgtcttgaacagttacgcgtgccatatgtgtgctactccacagataaataagtgaccggacatgatactgaaacttagttcagtctgccaataatttgctgattaacgcatcatgccgttgagcctgcctttctaaacgcaggcgttctgaacgaataactgattgtaaatcggccagagcagtattgaaatcgtcattgatgatgacgtaatcatactcgccatgatgctccatttcagcgacagcttgagacatgcgtttagcaatgacttcttcgctgtcctgaccgcgcccgcgcaggcggcggagtaattcttcccttgaaggcggaagaataaaaatactacgggccgcaggcattttctgacggatttgttgcgcaccctgccagtcaatatcaagaaagacgtcaaccccactggcgagagtatcttcgattactttacgggaagtgccgtaatagttaccaaaaacacaggcatgttccaaaaactcatcatggttaatcatattctggaattcatcggttgtgacgaaaaaataatgttcaccgtgattttcgcctggacgtgccgggcgggttgtatgtgaaacagaaacctgagtgtcatacaaaggctgggtgtttaataaagcctgaataaggcttgatttgcctgctccactcggtgcagaaacaatatataacgttccttggctcatgctgatttcttgactggttgggtattaataaatgcaagcgtagggatataaaatcccacatagtatacacggatacgttaatccatgcagcgttacaatacatgcctacgagtgattcaacaaaattttttattaacaaacgaagattaaagcgattttttgcaaaacaattccagataaaataataggttgcagaaacaagctaataatttttcgagactcatcgcaaacgctctttttcctcattggtatagctaaatttctttattattctttgcctgcatttaaggaacgtgtggagcaaggatgcttaattttctcattataatattgatgttgttatgtggagtgccgatagcactcgcagcagattgtcccgtctggtcaaaggaaaaacttcagcttgaaatcgaacacctgacaccacaggtagcgcgatgggagcagttgtatcgccagcaggggattagtgaaatagatgatgaaatttacgatcagctattggaaactctgacacactggcagcattgtctggatcagacacagaataataacgttgttatagccattccggataatggaaaacagactcatcctgtccagcatacagggttgcgtaaactgaaaggtctggaggaaatgcggaaatgggtacaagggcgctcgaaagtctggttacagcccaaaattgatggtgttgcggtaacactggtttatcagaaggggctgctgacagggttaatcagccgtgggaatggaacagaagggacagactggctggataaaagcaaatttatatccagtattccccaacagataaaaaatgcaccggaatatatggtgttacaaggcgagcttttttggcgacagaataatcaccgccagtcggttgttggtagtcagggcgcgcgcagcaaggttgcgggtttgatgatgcgtaaggcccattcagaagaactcagtcaaatagggatatttgtatggagttggccggatgggccggatgaaatgactgctaagcttgaacaattggcttccatgggctttccggctacgcaacaatttagccaccctatttttaatgcggaagaggcagaagaaaaatggaaaatgtattttacccatcccctcccttttgctactgatggtgttgtattaaggcaagagactgagcccgccggcagacaatggcgttcaggttcaaacagttgggctgttgcatggaagtatcctctacagcaacaagttaccacagtaaacgatattcaattcaggataggccgaacagggaaaatttccgtattgctggagctggaaaagattcaattagatgacaggcaagttagccgcgttcatattggctcggtgacgcgttggaaatattgggatgtttatccgggagataaagtaacaatagcactggcagggcatggtataccaaaacttgataaggtggtttggcgtatcgctgaacgcaaacatcttaatcttcctgatgcagaacaatttcattcactcagttgttttgtattgaataatgatgaatgccaacagcagtttatcgcacgtctgacatggatgggcgaaaaattgaaaatgagaggagtgagtcaaggtacatggatgactctagtcacaagtgaaaagatcaagaatctgacagactggttagcattggatgtaacacaactggctgaaataccgaacatcggaactaagcgtgctgaatcaattttcagtcaattccagcaatcaaagcggcagccagcctcattatggcgcgaagcgataggaatgccttatgctaataaatttacaaataaaatagctttgttcggaaaaatgcagtcacccgaagtagaaacacaaaaatatagtgctttatcagttaaacaaagagcaaaaattgagagattttttcagcatcctgacgttaaagaattaatagaagtactaactttacagggcattgatctgtagacatatcctttacagtcatcggagataaggaaaataaaatggtagagtcgaatgagagcgtaagagcaaaagtttgcttcaaacgcccagattcatatcagtgatcagcaccatcgtaattaaatatcggtaatccaagacgatagcgaatagcaattaagcgggcagcgaggccagcaataagggttatgataatgacgctgttggggtgtagtggagtatgcaataaggcgatatataaccaggcagcagcaaaggagaccccagcgtaaatttctttctgaaacaccagcgggatggtattacaaaacatatcgcgcagtacgccaccaaaaacgccggtaataacagcagcaatggcggcaatgattgggctgtagtccatatccagtgcgatttgtgcaccaataattgaaaaaacaatcaggccgattgcatccagaatcagaaacaaacgacgcaggtgtttcatcattggagcaatccaaatcgtgaaaacagcagcacaggcaacagtcacgatatactccgggttttgaacccagccaagtgggtaatggcccagaattatgtcacgaacggagccaccaccgatagctgtaacagaagcgataataatcacgccgaagacatccatttttcggcgacctgcggctaaagcacccgtcatggcttcagccgtgataccaatgatataaaggacactgagtagcataaatttagtcagatgaaagataatgaagaagtaagagtaatgcggaaataataacgcctcgattgaaaatttttagttaaatttacataaagttagtttttattatccgaattcccgcatattaaggtggaaaataatgattttcaaggaacgtcagattacatttgataaccgtagccatcagataactaatataaatatctggactcctgatagtcagtggctggtttatgatgtacgtcctaacggagcatctttttccggcctgacgatagaaaaaattcatatcaataacggccagacagaggttatttatcaggcaaaagatggggcacatgttggggttgtcactgttagcccacaagagccggtacgttacgcatttattcatggcccggagcacccggataatcactggcaatatgattttcatcatcgtcgtggggtgattgtttccgatagcgaaccaaacgttgcgttcaatattgatgcactggatatcactcctccttatacagccggagctttgcgaggtggtacacatgtgcatgttttcagtcctgacagcagtcgtttgagttttacctataatgaccatgttatgcatgagttagaccctgctcttgatttgcgtaatgttgctgtggctgttccactaagaactgtgatttcagcgaaaaaacacccgagagaatacgatggtcgttatttttcagtcgttgttagccaaaccacaacgcatccacatcccggtagtgatgagatcaatcgtgcatatgaagaagggtgggttggacaacagggatatcttaaagagaatgggcaatggcagcgttgggcactgacttttattggtgatacgtatgctgaaaatggtgaaaagatccctgaaatttatctggttgacctgcctgagcatgatgaagattatgcactagaaggttgccagccattagccggaaccgaaacggcattacctgcgccgcccgccggagttaaacaaaaacgattaactttcacccatcagaattgttatccgggagtagtcaatgttccccggcattggctcagagcatcaccggatggcagtaaaatttgttttctgatgagagatggcaatggtgttattcaattatggcatatatctccaaatggaggcgagccggtacagatcacagataatattcatgacatacaatccgcatttaactgggataaccgggggcggtttattgcttttgtttgcgataacagtgttatgctttgtgacagtcagagtgggcaaacccagcggttaacagctcgtactgacgttgctccctgtgctgatgcaatcgtgttttcacctgatgaccgatatattgcttttatgcgggatattgatggatatcggcagcttttcattgttgaaacagggctgaaataggcaccgttgcacaataacgatgcctgaaaaatagttgagataagataatctttagcctaatcggtatcggcaaaatcagggttcattattcattgcgttttctaatatcgattgtgtgctgtttgtgctttcttccagtttttcaatgcgaagtttaggggattgctccgtttgatcctgattagagtgggcataatcataggggagtagaagagtatctaaaaaggctgataatgggagatcgactacgagcaggggtttcaggaaccatcctgtcctgtcatcttttaacatattaatattggcttgtgctcccgaataatacccttgattagggccactgtgagtcatgatactggagcagcctgttagcaaaagccccccaataatagtagaaggtaatagaagcagtttatagtttttcatcatttccattccttgagctcaatgagttaattgccaatatccagaagttatatttatacctagtataattttttcatgaataagcataaaaataactttttaatactatttactatagttaggtaatattcagtttgctatagcacttattgttaaatccaataatttttttcgatagacttctttaattctcctcgatagttttattttgaaataatttataaagtgaattattttatttgaatttatatccctgtattttgggttgagtcgtaacggaaaaagtagggcaaattcgtcgggagcgaatttgtccggctaacaagcgagcatgcctattaatactgaccgctgctgaatctggagactgttagtagatattattttctggcagagaggaagattgaaaacagcgttgaataattaagtatatgtgtttgattcattaagtgtgctttagatcacacaatatggggtaattgtcttaatttcacatagtagaggcaatttaaagtgaaaaaaacctgtctattcagaccattatcttttttgttttctggttaaatataccgagttcagggaaagtgtataaacaaggattgttttcctttcctactgtgtgtgaagaattcttttgggattctaataactactgtcctgttctcaggtaaaaagtcctcgttatcatcttactccctcactttaaatgagggagctttttttatatacccgtcgtctttcaaattacctctttgttggctacgttcgttcaccccagtcacatagttagctatgctcttggggatgaactcccttgccgccgcgatgtaactcgaaatccatagggtacaacccgattaacattccacttcctgatgagcaatctcaatttcttcggacaaaatacggataccttcttctatttttgccagatctggcacatagttcatgcgcatacattggtgagcatgaggccagttgtgttccagaccggggaagaaataatgacccggtaccattaataccttccgcttttttaagcgctgataaagaacttcagttgtaatcggcagatttttgaaccagagccagaggaatattgctccttctggtttatggataagacagtattcttctggcagatagtgacgaataatctcaatgacttgttctacccgttttttataaaatggttggatgacattttgggataaacggaacaggtcattacggcggatcatttccagcgtcatggcaggcccgatgcctcccggagccaggctaatcacaccattcatgttactgactgcccgaataatcttttcattagcaacgatgattccacagcgagcacccggtagcccaagcttggacagactcatacataaaataatattcgggttccacagaggggttgcttcactaaaaataatacccgggaatggcacgccataggcattatcgatcagcagagggatttgatgtttttgagccaatgcatccaaacgcagtaattcttcgtcagtgacaacattacccgttgggttggttggacgggaaacacagatcaggctgatatcttcagaaatattcaggtggtcaaaatcaacatgatatttaaactgcccattaggcaataattcaatattaggtttattagcaacaaataaaccttcatccagaccagaatcagaatagccaatatattcaggcgcaagcggaaacagaacccgttttattgaaccattttcatcacgccctgctaataaattaaacaggtagaaaaaagcactttggctaccattggtcagggcaatattctgtggattaacatcccagccgagtttttcctgtaattcctgtgccagtgcagcaattaacgtattttttccctgtgggccatcgtaattacacagggtttcagttaattggccatttaatgccatatctgccaagagctgctggaaatactcatccatttcaggaatatgggcagggttgccaccaccaagcataatcgctccgggtgttctcagaccctggttgagatcattcatcaggcgcgtaatacctgactcttgtgtgaatttgtttccgaattgagagaatttcataacggctgttgcatctttgtttgtattttgtagaagtatggtaagaagacaccataactcgcgccttgttatattgtcatctatttttacgctttgtctttcaagttatctctttgttgagagaatatgtgctgattttcattctgtaccggttatttccggcaacaacagtttgcgatgtgatcatccaccaaacccgcagcctgcataaaagcatagcaggtggtgctaccgataaatttaaagccacgttttttcaatgcctttgaaagagcatcagaaaggtcagttttggcaggcacttttgccaatgtttcccaatgatttatttgtggagcaccgtcaacaaattgccagataaattcactgaaattttcgccctgctcggccattttcagataggctcgggcattatcaataatggcgttaatttttgcacggtggcggacgatggcaggatcctgcattaatttctcgacgtcattttcacccatttcagcaacttttgccggatcaaactggtggaagcattttctgtaaccttcccgctttttcaaaatggtgaaccacgataaacccgcctgctgtccttcaaggcaaatcaactcaaaaagttgttggctatcctttaatggtttcccccactcattgtcatggtaggccagataatcaggatctgaggtaacccagccacagcgagttatttctttattcatgaattgcacatctccgtaggaattggtgaataattacaccaagtttagctgtatgaatatccatgtaaagtgattcggataagatttttttatgctgtgacaaaattgggaggtgatcagtgctgtatatcttacggtcaaagggtatactgacccctttcgtttaaattcatatacacttcgtctttcaagttgcctctttgttggctgcgctcgctcaccccggtcaccgtttttataaacatacggttatctatgttcctggggatgaactcccttgccgccgcgatgcaccttgaaattcattgtgtataagtatcgcgtgcggattcaacatgcaaaagtttgataccaaaacctttcagggaattatcctgacactacaggattactgggcgcgtcaaggctgcaccattgtccaaccattggatatggaagtcggcgcaggaacctctcatcctattacctgcctgcgtgccttggggccggaacctattgctgctgcttatgtgcagccctcccgtcgtccgactgatgggcgctacggtgaaaacccgaaccgtcttcagcattactaccaatttcaggttattatcaaaccctctccagagaatattcaggaactttatcttggttcactgaaagagctggggcttgatcctaccgttcacgatatccgctttgttgaagataactgggagaacccgactctgggtgcatgggggctgggctgggaagtctggctgaacggtatggaagtgactcagttcacttatttccagcaggttggtggtcttgagtgtaagcctgttaccggtgaaatcacttacggtctggaacgcctcgccatgtatattcagggtgtagacagtgtttatgatctggtgtggagtgatggcccgctgggtaaaacgacttatggtgatatttatcatcagaatgaagttgagcagtctacttacaactttgaacacgcagatgtggattttttgttcacctgtttcgagcagtatgaaaaagaagcgcaggagttgctggcactggaaacacctctgccactgcctgcttatgagcgcattctgaaagcgggtcatacatttaacttactggatgcccgtaaagcgatttccgtgactgaacgtcagcgttatatcttgcgtatccgcactctgaccaaagcagttgctgaagcttactatgcttcccgcgaagcgcttggcttcccgatgtgtaacaaaaacggtgtaacagaaaattaagaggccatcatgactcaacagactttccttgtggaaatcggcacagaagagttgccaccaaaggcgctgcgttcactggctgaatcctttgcggccaattttgaaacagaattgaacaacgccaatctgggtcatggtgaagttcgctggtttgctgctccgcgtcgtctggcgctgaaggtggccaatctggcggcggcacaggctgatcgtgaagtagaaaaacgtggtccggccatttctcaggcgttcgatgcggaagggaaaccaaccaaagcggcagaaggctgggcgcgaggttgtgggatcactgttgatcaggcagagcgtctggtaaccgataaaggcgaatggctgctgtatcgggcacaggttaaaggctgtgaagccaaagagttgctggcaggtatggtaagcagttcattggctaaattgcctatccctaaactgatgcgctggggtgataaagaaactcagttcgtccgtcctgttcataccgtcactatgctgctgggtagtgaggtcattgaaggcgaaattctgggtatcaaatctgatcgtatcatccgtggtcatcgttttatgggtgaagcggagttcaccattgataacgcagaacagtatccggtaattttgcaggagcgtggtcgggttattgcagattatgaaacgcgcaaaaccctgattaagcgtgatgcagagcaggcagcaactgagcttggtggtgtggcagatttgaccgacagcctgctggaagaagtgacttctctggtggaatggcctgtggttctgacggcaaaattcgaagaaaaattcctcgaagtaccggcggaagcactggtttataccatgaaaggcgatcagaaatattttccggtttacgataaatccggcaaattgatggcgaactttatttttgttaccaatattgaatcttctgatccacagcagattatttcaggtaatgaaaaagtagtccgtccacgtctggcagatgccgaattcttctttaagactgaccgtaaacagcgtctggaagataacctgccgcgtctggagactgttttgttccagaagcagctgggtacactgcgtgataaaacagaccgcattcaggcactggctggctggattgctgacaagagcggggcggatgtgactcatgcaacccgcgcaggtttgctgtccaagtgtgatttaatgaccaacatggtctttgaattcactgatacacagggtgtgatgggcatgcactatgcccgtcatgatggagaagctgaagatgtggcgctggcgctgaacgaacagtatcagccacgtttctctggtgatgaactgccatcaaccggtgtttcttgcgcagtcgcgattgccgataaaatggatacgctggcaggcatttttggcatcggtcagcatccgaaaggggataaagacccatttgctttgcgccgtgctgcattgggtgtactgcgtattattgttgagaaaaaattacctctcgatcttcagactctggcagaagaagctgttcgcctgtatggcgataaactgactaatgcaaaagttgtggatgatgttgttgagtttatgctcggccgcttccgcacctggtatcaggagctgggttacagcgttgataccattcaggcagttctggctcgtcgtccgacacagccagccgattttgatgcccgtatgaaagcggtaacgcatttccgtacgctggatgaggctgtttctctggcagcggctaataagcgtgtttccaacattctggcgaaatcagaagagaaactgagtgatgcagttcaggcttcggtactgaaagcagcggaagagatccagctggcgacccatcttgtcgtcctgaaagaaaaactggctcctctgtttgccgaaggcaattatcaggatgcactggtcgaactggcttccctgcgtgaagttgtggatgcgttcttcgataatgtgatggtgatggatgaagatctgcaagtgcgggtaaatcgtctgacattgctgagtgaactgcgtgatttgttcttgcgggttgcggatatttcactgctacagtaagcaatattcgataaatataatcggatcgctcatcttaaagcctcgctctgtgcggggctttttactgctggaatattgaacaccgtgaacgagctacagtgcaatatttggttgtattctagtcaaacaaccacgtgtcttgaaaaatg

SEQ ID NO: 3498 - DNA, 29489 bp, Xenorhabdus sp.; identical to SEQ ID NO: 3497
  CDS (26338)..(27261)

SEQ ID NO: 3499 - DNA, 29489 bp, Xenorhabdus sp.; identical to SEQ ID NO: 3497
  CDS (21457)..(22746)

SEQ ID NO: 3500 - DNA, 29489 bp, Xenorhabdus sp.; identical to SEQ ID NO: 3497
  CDS (18992)..(20605)

SEQ ID NO: 3501 - DNA, 29489 bp, Xenorhabdus sp.; identical to SEQ ID NO: 3497
  CDS (11365)..(12576)

SEQ ID NO: 3502 - DNA, 29489 bp, Xenorhabdus sp.; identical to SEQ ID NO: 3497
  CDS (6729)..(7697)

SEQ ID NO: 3503 - DNA, 29489 bp, Xenorhabdus sp.; identical to SEQ ID NO: 3497
  CDS (6297)..(6698)

SEQ ID NO: 3504 - DNA, 29489 bp, Xenorhabdus sp.; identical to SEQ ID NO: 3497
  CDS (5409)..(6026)

SEQ ID NO: 3505 - DNA, 29489 bp, Xenorhabdus sp.; identical to SEQ ID NO: 3497
  CDS (3352)..(5169)

SEQ ID NO: 3506 - DNA, 43149 bp, Xenorhabdus sp.; identical to SEQ ID NO: 114
  CDS (1)..(204)

SEQ ID NO: 3507 - DNA, 43149 bp, Xenorhabdus sp.; identical to SEQ ID NO: 114
  CDS (815)..(2791)

SEQ ID NO: 3508 - DNA, 43149 bp, Xenorhabdus sp.; identical to SEQ ID NO: 114
  CDS (2830)..(4575)

SEQ ID NO: 3509 - DNA, 43149 bp, Xenorhabdus sp.; identical to SEQ ID NO: 114
  CDS (4572)..(5570)

SEQ ID NO: 3510 - DNA, 43149 bp, Xenorhabdus sp.; identical to SEQ ID NO: 114
  CDS (5740)..(5919)

SEQ ID NO: 3511 - DNA, 43149 bp, Xenorhabdus sp.; identical to SEQ ID NO: 114
  CDS (5926)..(6669)

SEQ ID NO: 3512 - DNA, 43149 bp, Xenorhabdus sp.; identical to SEQ ID NO: 114
  CDS (7855)..(8640)

SEQ ID NO: 3513 - DNA, 43149 bp, Xenorhabdus sp.; identical to SEQ ID NO: 114
  CDS (8733)..(9959)

SEQ ID NO: 3514 - DNA, 43149 bp, Xenorhabdus sp.; identical to SEQ ID NO: 114
  CDS (9940)..(10662)

SEQ ID NO: 3515 - DNA, 43149 bp, Xenorhabdus sp.; identical to SEQ ID NO: 114
  CDS (10659)..(15116)

SEQ ID NO: 3516 - DNA, 43149 bp, Xenorhabdus sp.; identical to SEQ ID NO: 114
  CDS (15291)..(16004)

SEQ ID NO: 3517 - DNA, 43149 bp, Xenorhabdus sp.; identical to SEQ ID NO: 114
  CDS (18408)..(18956)

SEQ ID NO: 3518 - DNA, 43149 bp, Xenorhabdus sp.; identical to SEQ ID NO: 114
  CDS (19056)..(19688)

SEQ ID NO: 3519 - DNA, 43149 bp, Xenorhabdus sp.; identical to SEQ ID NO: 114
  CDS (27866)..(28192)

SEQ ID NO: 3520 - DNA, 43149 bp, Xenorhabdus sp.; identical to SEQ ID NO: 114
  CDS (29473)..(29661)

SEQ ID NO: 3521 - DNA, 43149 bp, Xenorhabdus sp.; identical to SEQ ID NO: 114
  CDS (29836)..(30135)

SEQ ID NO: 3522 - DNA, 43149 bp, Xenorhabdus sp.; identical to SEQ ID NO: 114
  CDS (32719)..(33606)

SEQ ID NO: 3523 - DNA, 43149 bp, Xenorhabdus sp.; identical to SEQ ID NO: 114
  CDS (36622)..(38898)

SEQ ID NO: 3524 - DNA, 43149 bp, Xenorhabdus sp.; identical to SEQ ID NO: 114
  CDS (40423)..(40770)

SEQ ID NO: 3525 - DNA, 43149 bp, Xenorhabdus sp.; identical to SEQ ID NO: 114
  CDS (41765)..(42559)

SEQ ID NO: 3526 - DNA, 43149 bp, Xenorhabdus sp.
  CDS (35484)..(36290)
tgtcctctaaaggttagttgtgtatgccaatgattcacattgggaagatgaccgggaaatagctatttggggtaggcatgccatgaaggggacatctggtgctgatgttattgatgctctggctcccatcggagcaaagcgtgaaatcgtctcccctaaacggttttatggtgcttttgatggtacaaatcttggcgctattttcgaacaacatggtgtgacagaagtagtattgactggccagcataccgattgttgcgttcgtcacacagcttatggtgcgtttgttcgtggttatgacattaaagtattatctgatgctgtttgtgtttttctgcaagcggatcagaatgaagccctcaattatcttaaatcaatttatggtgttgaaattacaacaagtacagagcttggtgtatattcgctataactattttatgaattaagccctttatattttaattaacttttcatatttcagattgagattttattggctggataacggaaaagacatgggcattgaacaaataatatgactggcagataaaatatctgccagtaaatttaccgaaacgaaaggaggatatttaaatctctggtaaattacgaccgtagtagatttcctgtatctcttttttaagcaggtggataatttcctgcttttctgtttcgtttaactcttcagctgtggtattgaataaatattcattcagatcaaattctttcagcatcattttggtatgaaaaagattttcctgaaaaatattcacatccatcatatggtattgagactggatctcttcagtcacgtaattttgaatggagctaatctcgtgatcgatatacagttttactccgttaatatcccgggtaaaaccgcgaacacggtaatccattgttacaatgtcagattccagttcatggatcagataattaagtgccttaaggggggaaattacaccacaagtagagacttcaatatctgccctgaatgtgcatatgccgccatcaggatggctttccggataggtatgtacacagatatggctcttatccagatgggcgacgacagaatcaggaagaggccccgggttttccgtattatccaccagtttgggatctacgggttcttcactaatcagaatggttacgcttgccccttgaggatcatagtcttgacgggcaatattaagaatgtttgcaccaatgattgaacaggtttcactgagaatttcagttaagcggtttgcattgtactgttcatcaatgtacgcgatataactgtcgcgatcggctttcgtttttgcataacaaatatcgtaaatacagaaacttaagctttttgtgagattgttaaagccgtgcaatttcagtttacgcaatttacttcacctcccggcatgggtgactattggtttccagatagagaatccagcaaatactgtggcagggcaaagctacctgcatgtatggctggggtataataacgacaggttatcgccgcattatcgaaacgctgttgcaggatttttaggggcgtctgacgtagggctgaggtttgtgttgcccatgcgaacgtcatgatcccgccgtaataagtaggaatagcggcctgatagaaactgctgtcagcaaaatagtggttcagttttttgtggcttgtaatggcttcgtcttgttgcaggaaacaaacaccattctgggcgacaaaaacgcctctttcattcaggcagcgagcacagccttcataaaactcagatgtgaataaactttcgccgggcccttctgggtcggtacaatcggagatgatgacatcaaatttatcagaggttgtattgacaaagttgacgccgtcatcaataacaagtttgaaacggggatcatcgtaagcccctgcattatggtttggtaggtattggcggcagaattcgacaactccggcatcaatttctaccatagtgatgttttcgagttattgatgccggcaaacttcacgcagcatgccaccatccccaccaccgataatcaaaacgcgtttggcatttccatgagcaaatagtggtacatgggccatcatttcatgataaataaactcatcgcgttcagttgtttgtactacgccatcaagagccataatgcgacccagtttcgcattttcaaaaataatgagatcctgatgctcggttttattgtgatagagcacattttcaaccgtgaaatactgaccaaaattggtatgtaatgtctcataccaagtgtttttctgtgacatctattggtattcccccattgtggtccccataattatgaggcgcacataatagccaacaacagaattagttgcactgtgatatttgccagagagtgacaataaaattattttacataagcaagcaggctgagggagcggcgtgcaagagagcggcattttacctcatgaggcaggtcgattcccttcagatcgttgtagccctgttgattcagttcctccattaactgaccatcataattcccgagatcccatttattacgctgggcaaaatagacaaccgtacgcctgatttctctatctgggatctggctatagccacaatcatattttaggtagatgtaaactgctgtgagatcagcaagatcttccgcttcactttcggacaaagctttcacaggttgtgtgaaaccaaatagaaccagggcgtaagtcaataatgcaaattttctcatagttcctattatattgattttctaccgttttgcctaagttaacatattaatatcttcattagccaaactttatttccctgaattggggaaaatctcgtggagatgaaattcaaatcatatgtgaagttgatgaacaatgggtgtttgtcggtaacaggaaaaatcaatcaagatactttcgggtgaaatttctctgctaacgcgattggccccaatttatactaaggcaattccggaagcaaaatcatatgtattattatccattaccgatcccaaaatttaccctgatatatcatctatgtcgataatttctccagttatggtgtgtcaaatgtgagcagttttaattgcttgattttagtcaccacaggatcaaccatagtcctacagtttatagataaaagtgcagatagcattacatcaatgatattgataattttttggagcagataaaacggcatataattagtaagtctcttacttacagccgtttaccagctcatcgccgaggaaaatcccatcgatattaaacagttattttatttaatcgcattagataaaactcagcactttggacaagcggcagaaatgtgtcatgtcactcagccaacgctctctatgcgactaagaaatctggaaaaagagcttgatgttattttgataaaacgaagctcgcgctttgaaggatttacagaagaaggtgaaaaaatattaaagtgggctaaaaccatgcagtcagcctatgaagggctacaggcagaagccgctaattttcgccagcaattgttaggtcagcttcgtattggcattgttcctctgactaatattgagccaatgctgatgttacaacatctttctgaaacatttactgaaatacgctttcaagtaagttcgggccacagtgaaaaaattattgatgatctaaatagtaatcgtttagatattggcatttgttatctggaaaaggcggatactcatcaacatgatatttattcactgaagaaaacaaaactcgggcttttatttaaccgaacacaatttacgcctgccacaccaacagtcacttgggaaatggtagcaacattacctctggcgcttatcagtcaggcgaattactttcgccaatctatcgatcttgcatttcagcgttataatcttcaacctaaaataattcttgaaagtgattctacacttcatcttattcagtcagtcaattccggcttttgtgcatctatcattcctattactgagaaaatggaaaaattaagtgataatattgatattattccaatagaggatgctgttattaatgctgcacttggtatattgatccgccgagaagagcctcgttcagtattaattgaaacctgctttgctaatatgtgtgactatgtggaatatataaatatttaggaatatgggtatgttttaccttagctgttaataataaagaattaagctcacgagaaaaatagtcgcacgtattattgtgcgactattttcattgaaaaagactttcagtaattaagctgatttatcctgctgagaaaaaactcttactggcactgatttataagaaggtgtaccactttcttcatcaatataatctaatggaattaaaatattcgcttcaggataataagctgcaacagttcccggcgcaatattgtatgaaataacagtgatatctttgagaaataactttctgttttggctcactgtttcaataatgattttatccccgtgcttcaaatcacgggcttccagatcaacatcattcataaacagcacatcacgtcgtccaaatactccacgataacgatcatccaatgcataaatggttgtattatattggtcatgactacgaatagtcattagacgcaatacatcttcacccagcacatctgcgttttctttcacacctttaaacacagaaaacattgccttgccagttggtgtaggccaaatgcgctctgttggtggcaatggcatacgaaatccccccggagtccggatgcgctgattatagttatcaaatccaggaatagttttctcaatcaaatcacggataagatcgtagctttcggtatagcgtaaccatggtgttttactattcagtaaagtagcggctgccatttcagccacaataacaggctctgattttaacagtggtgatgctggtgttaattttcccgatgatgcatgaaccattgacatggaatcttcgacagtaatggattgacgccctaactccctaatatctaattcagttctacctaaacaaggtaaaataaaggtttctttcgccaccagtaaatgagaacgattaagcttagttccgatatgtacactcaagtcgagttttttcattgctgaaaatgataattcaggatcaggtaatgccacggcaaagtttccgccaagacaaagcagtgccttcacgcgcccgtcaaccatcgcttgcatcgctttaactgcatcgtgtccgtgttcataagggggcttaaacccgaagacttcttccagtttttgtaagaattctggcgatggtttttctgtaataccaacggtgcggttaccctgaacattagagtggccgcgcagtggacatattccagccccggatttgccgatattgcctttcatgagtagcaaatcggcaattaaccggacattcgcggttcctttattatgctgagttattcccataccataagtgacgatggtcgcatccgaattagcgtacaacagcgcaacattttcaatatcggcttgagaaatgccactttcattctcaatatcttgccaggaagtaccgcgtagctcttctttgacggcatcaaatcccatggtatgtgttgcaataaactcatgatcgagaatattcccgcgtttttcatcccattccaataagactttcatgatgcctttcagcgctgctgcatcacctcccgcttttacctgatagtaagaagaggcgatattcgttgagctataggtcgccatttcaatcatattttgcggatcggtgaaacgctctaatgcgcgttcacgcagtggattaaacaccactataggcacaccacggcgagcaacttcgtgcagtgttcccatcattcgtgggtggttagtcccggggttatgaccgatagaaataataagctgagttttatcaaagtcatctaatgaaacagtgcctttaccaatgccaatggattgaggcagacccacactggtgggttcatggcacatattggagcaatccggaaaattatttgtgccgtattctctggcaaagagctgaaatagataggctgcttcatttgaagctcgtcctgaagtgtaaaattcgacctcagaaggtgatggtatttctcttaaaatttcaccaatacgacggcatgcagcttcccacgaaacaggaaccagtgtatctgtggcagcatcataagccagtggatgagttaaacgcccatatccttccagttcataatctgatttttccagtaaagtgctcacggtattttcagccagaaactcaggagtgacacgttttttggtggcttcccacgtaacagcttttgctccattttcacaaaactggaatgtagagttgtgttctttatcaggccaggcacacccggggcaatcaaaaccgtcgggttggttagtatttagcaaggtctttggcgcaacaaaagcgtccatctgagtacggacagcgattgccgttgcttttaatgctccccatccgcccgcggggccatggtaaggatgtacacccggcacggttgatttatttttactcatatctacattcctaacatttattaataatcttttttataaaaatatgcaggtgaatatttgaatcgagataggtatatcaacgaatagatattacaaaataaaaaagataagtcatatataaaaagataagtaaatattaactttgctttacaaaaaaatgaataaaaaatattaaatttacttctgagaaggttttaaatataaacactcttttctgttccttaggaacattagaacaagatatttgtgaagtcaaccaaaatgattttgacttatctttatcatagataccatctatcattcgataaacttaatttatttgactctgagatacaatgagataaaaatacatgtcactatgaaaataaaaaaacgaattgaaaaaacacttgtaaattaagggagtgtataaatattaatgtaacaaaaatgcatggcgttatatgacttaatatatattggtgttattgagttaaatgaagattgaaaattataaataacgaaaggagaacgtgggttaatgtattaatggaagtcacctgctcattaaaaagataattttataatgtctattgatagatattataaaacctcaatattgaggtttgtttttattaaaaaacaaactaacaataaggtaaaataaataatgaaaaatatcatcgcacatatattaatgctgatggaggcgctatgttcggattagacgcttttcatcttgccaggatccaattcgctttcactgtatcatttcatattatctttccggctttaaccattggcctggccagttttcttgcaatcctagaaggtttatggctaaaaacaaaagaggaaagttatctgaagctataccacttctggataaaaatttttgccgttaactttggaatgggggttgtttctggtttggtcatggcctatcagttcggcacaaactggagtgggttctcacaatttgccggcagcattacaggcccgttattgacttatgaagtgcttactgccttctttcttgaggctggcttcctcggcattatgttatttggctggaataaggtcggtagaaaactgcacttttttgccacttgcatggtggcagtaggaactattatttctaccttctggatcctctcttcaaacagctggatgcaaacacctcagggatatcacatcgaaaatggtattgttattcctgataactggttacagataatatttaatccttcatttccttatcgcctattacacatgtctgtcggtgcgttccttgccagcgccctgtttatcgcggcgtgtgcggcctggctactgcttcgtggaaaagacaccgcccctgtacgtaaaatgctttctatggcgttatggctaattttaattattgctcccattcaggcggttatcggtgatgctcatggactgaatacccttgaacatcagccagcaaaaattgcggctattgaaggacattggagtaatacatcaggtgaagcaactccactgatcttatttggtataccagatatgaatgaagagaaaaccaaatatgcactggaagttccttacttgggtagccttatcctgacccacagtctggaaaaacaaattcccgctcttaagtctttccctcccgaagacagacctaacgctaccattattttctggtcattccgaatcatggcaggcctcggtatgctaatgattttattaggggtcgcaggtgttttactgcggagaaagcagaaaatataccgctcccgtgcttttttacgttttgttcttctgatggggccttctggtctaatcgctattctcgctggctggtttacgactgaaattggccgacaaccgtgggtggtctatgggttacagcgtacaaaagatgctgtttcagcgcacggcgatatgcaaatgagcttaagtttattgctctttattctggtctatttttctgttttcggcattgggtacttttatatgatgcgtctggtgaaacaggggcctgaagaaatagcatctccaagtcattctgaaatgcagcaaccgtttagtggagaaaaacagaatgggtattgatctttctattatctggtttgtcatcattatcttcgccacactgatgtacattgttgctgatggctttgatttgggtatcgggatcatattgccttttaccaaagatcctaccgaacgggatgtgatggttaatactgtcgcccctgtatgggatgggaatgaaacgtggctggtattgggtggtgctgcgctatatggcgcttttccactggcttattccgttattatagatgcattaaccattccgctgacactgatgctagtcgggcttattttccgcggagttgcttttgaatttcgcttcaaagcactgccagaacaccgtgctttctgggatcgcgcttttatcggtggttcactgttagcgacattttgtcaggggattactgttggtgcggtgattaatggctttgagatcacaggccgtcattttagtggctccgcactctcatggcttgcgccatttccgctattttgtggtttggggttgattattgcctatgctttattaggcagctcatggttaataatgaaaaccgaataccggttacatcgtaagatgtgttcgctgaccgtttatttagctcttgctttattggctgtcattgctgtcattagtatctggacacctttggcacatgcagatattgctttgcgctggttcagtttacctaatctctacttcttgctgccggttccattattagttttagccagcacatggtgccttgttcgtagtgcctataactatggtaactacgcgccatttttcctgaccttattattgatatttttaggcttctccggtttaggtataagcctgtggcctaatattattccaccgtctgtttctatctgggatgccgcttctccaccacaaagccaagggtttatgttagtgggtgggttattaattaaccccaattctgtttaagctgtcactggaatatcttcttcttctgagtagaaaactttcagtgatggtttcttctttttatgacaataagcaattaaccccgttaaaacagtcaacagaaacccttttatacttcgatgacgagaatgttctatttgacagatatatttcaattgcccattaaccgtctcgataataaaacgccttgataacattatcttatcccaatcttccagcacactcgctttaatattactccgctttttcgtgatgaaagtgacaccgttttgtgctaaatcgtttgccagttcctgactaagataacctttgtcgccatacaaggaaccgattaattcttttgctaattcccgaaccactttcctgtcatccgtatttccagccgtgattttgagggccagaatttcgccaagatggttaataatcaggtgtaatttgaaaccgtaaaaccaccccattgaggtttttcctcgctgtgctgtcccttcaaataccttatggcggggaatacggatattatggcacacgctcaaacgcgtggagtcaataaaggcgatccccgtagggtttccttttaattgagtcagatagctgcacagaggcactaaaacggaaggcgcgacactgataaaacgagtataactgagcaaggtgggaaaatcgtgatgatgatatcgccaaatatgctccagataaaaatttttaaaatcacgataatgcgacagatgaaagaggatcaggatggtcatgatttcactgggatacatgtgaccttttctacgacgtaggcgatatcccttattgagacaaaactgttcccattgtggaatgaaaaaacgacaaaagtcatcgacatcgatgaaagtttcaactaagttgttcatagcctgttcctccccggagctgtttcgacttgcaccaaaacactgctccttgaacaggcttctcgtcaatttcttatccagaattggggttaattaagtcatcttgagaataatcttttcaaaatggtgtatatcgtataaacctgcgcttgtcacatatgtgcgtaatccgctcataaataagcttttatcacttttcctaacgccattccaatgatcagttataatatattcagctgattcagaacgtatgattgaataaaaaccaatctggaaagcagtttgatgaatgacatacctgtattctccgacgatatcattatagatgagattacctatagagatatcatgggatttaaaaataccatcgaatattcccggactgtcattactattgttgataatgagtgaaaaactttcgtcgtgactcacgtaagtaccgtctataggccccataattttatcctctgatttaataatgttagtttttgtttattacttacaagaaaaacacttttcgttaattcaacagataaataatttctggatatggatcggtatagaaattagtaataaccatcctgaaaaaattaggtctatgattctttatctatagtgtcaggcatttgcacccgaacagaaacaaatctaccatcgggaatatcgattaaatcaccgtcagcataaccttcacgtatatttctggcgaatgcgggggcgtctgagtgttcacggtggtaggtcattaattttatggaaccatcgagtagaacttcatggttgacccagattaacgggagtttatttttacataatggtatttcaattccattctcaataccgccccatgcaccatcgatgtttaaccctgtaacacctttgataagatatatgcctttagaaatacgttctgctgttgcatctttagactcgtcatttgtttcaaattttccatcactccaaagattgattatggttgaagataatttgaaatttccatttgcatccatgaaagtgttagcacccagtattgagaattggctccagttgttaaatgcagaattatgctccccctttctggtgcgtatctaatagtgccatcagcgcgagggcgcttcactatgttataataggccatgatttacctctcaggcaccagtacaccattgagtgtggtgtactggatggtgtaccgataaaccgaaaatagcctaaaacgtattaaaatgcacgaaaatagaaaaacagaaaaacctgtagtaagcagtataacaaagggaaattcaggaaaattcaaaccttcccgcttctccgttgcgccgatgctggataggatgtacattatataaaaatcaatgagttgaattcttgtggtgtactattggtgtaccctttgtttttttgtttgttttttgcgctaaataatcaatcttatcttttgattcttttctcttcctatctattagattagccagatcttcaacatgaaccatacgtggtgatttttgactatcattacatctaaaggttggtaatggcaacaaacccagtgaggctttttgttctgcagtagctggtttcatgccaagatatctttcagcaatatccgcaagtggaatggtagctgtttcgaattcagccattaacaagaataccgtgttcatttcatttccttttgaataaccttcacatagtaaaccagcactggtttagagctattttatgtggttgaatgggataaatttgggggcattatttgaggcaatcccttgccgcctcccagggcgcgagcatactttgattaatatttgtacttaaaatgtcaatattattttttaactcttttgttaactataaatgtctaaagaaccatgatttagatcaattattacccgatataaaaccacaaaaatgacatattgaaaattattaatctttaaaaagcagtaaaaatagtgtgctcgcgccctgcagcagagtagtgatagggtgtagggttagatgttattacttggtattgagaagagattcgaagaatggcaataattcgcattctttaatttggtaatcagcccatttgctggctagagtttcaggaatagatattgttttctttgttgtgacaatttcgcttggtattaaaaatatatgcttggtatcttcattgtcacccaaagcataaaatacaaaaaaatctgctacatcaagctgtctatttatacaaaatccccatctgggagctgaatttcttattccttttcctctttggtatctttttatccttgctgtttttatatcgatagttatatcacctattgaaaaatctacagttgattgaaatttgagattattattatcgatagctatagggaccgattctttaaatcgccgttcaccaatggtagccactctatcagtcactgagccatatcgcgctttatcgccagtaactggatgattggcttttcttagtattgagtatacattctgtcatggaacgcctaactctatgcctaccaacttaagatttttgtgtttggagtaacttgttatacaagcttgtatcttatccacctttatctcctaaaatgggatcgcgtcatcatcaaaatccattggtggtgctgattgtggctgttgtggtttcccccatccctgagattgttgttgctgtcttgtgtgctgctgtggtggctgctggctttcctgtctggctcctagcatctgcatcgttccaccgatatttaccaccacctcagtagaatagcgatcctgcccttgttggtcttgccacttccgtgtctgtaactggccttcaatgtaaacctgactgccttttttcagatattcaccggcaatttcggcgagtttcccgaatatcacaaccctgtgccattccgttatttccctcatttccccggattgcttatcccgccatgtttcagaggtggctaaagtgatatttgttactgcgccaccgtttggcgaataacgtacttcaggatcttgacctaattttccgacaagaataactttattaactccacgctgtgccatttatgccgcctgtttcagttctttaaatctaatcccggtcacttccttacatttttcttgcaaatctgggtgtccttccagtgatttccatgtatcggaatattgttgctgtagtttttctctgctgctttcatgagttgcatattcagtaaaatcccgcaaaatttcatcggctcctttagatgccacatgatggatttctgcgtcagcatcaatggctgtttcttcggttggaatacagaacgcctgaaatgcagcatagcagcatgagaaatttcgattacaacactcacaccaatcccaataataaatctcagcaacagaaatatacggaaaaacaaatcgccgaacataactggctgcaatatcaaaaggaggtattaggtagagaaggattaccagccagtgatatggaatttaggggggatttcagatgaacacttatccccgcagatcgcccggctgttttgtgccaaaagacccgaaggagcgagaacagtatctgaatgaactggtcgcggcaatcagtaataaaacgccacatcccgcaatcatgagtgctaaggagcgtgtcttagcagagcgactattcaatattaactataaatcttcatttaacccgcccctacctcagcatatgcaagaacagcgtgacgaagagatacgtcaggggtggcgagagtactggtcaaagaatagtaaagagcacgatcactatcggggtgaatcacctcgccgccataatggtggtatctggacaggagattaattttgacaatttacagagtagtagacaccgaaacctgcaacatggacagcgggattgtagagatagccagcattgacattgtaggtaacatcataaattacatggaaaaacaatctcatttcgtcaatccccaacaccccatctcagtcttgtctttcatacacaaatcccctgataaaaaatcgggggatttttttgaatctttttccactttaccgatctgagtaataacgatttcatggaggtacggtaaaatgttccaaactcacgcagaacaatgggctgatgaaactttttctcgcgcaaatttgggcgatagtcggcgtacaaaacagcttatcaaattcaccgtctcgttagccaatcatatcgggcaatctattgtgcaatcactcaaaactcccgcggatattgaagccgcttatcgatttacgcgtaatcaggccattaacgccaccgctattgccgaggccggatttgcggcgacggctgaacacgccaaatcctatgactgtttgctggcattggaagatacgacctcactggaatttactcatcagaccgtccggaaagaaatgggctataccacatcccgaaaaagtgccaccggtctgcatgcccattctgttttactttttgctcccaaagaagaacggctcattggcctgattgaacaaacgcgctggataagagcgctgagtcagtatggcaagaaagcgcaacgggcttcccgtccatataaagacatgacgggtttaccgcccagttcacgctgttcattaacccaattcagtaacgcttccagtaaagaatccaactcgatagcccgcagtattcttgcaatggtatgtcgacagggtattccatgggaaaaagtccggtattcctttaaccacttaattttggcttggccataagtcacaatgtcttgccagccttcagctcccgccataatggcactgacaaagaggaaaataatatcaaccagatcgtattggcgattaatatcagagcgggtttctttcacaacggataagtgttcaatcagagtcataggtcagcaatgagaaggaaaataaatctcattagatcatgtcatttgccttcattcaagaaatgctaaaaaagtatgctcgcaccctgataagatcacacatcaacagcgttttattgtacgttcaatgcaaagtcgttgcattgaacaaagcccggataagctttatcagttcagtgaatctttacagccggcagataaaagaacagttcaggttaagcagcgaggtgggcgtaaggcacgtgaagccgtctgtgagctccgttatgcgcctgttaccctcaaaatgccggtcactcaacaaccaccgactaaagtcggtgggttagtgattaacggactgaaagtccggatacgcatcggctaaacgatgcgtcaattatccagcctgaagtgatcattcgggttcggttcaaaatgatgcgccagataggcctttatcatctcttccgttaactgacctaccgtcgcacaaaaatagcctctgccccaaaaatgctgaccccagtaacgctttttcaagtgagcaaactcttcaaacaacttacttgctgtccttccctttattcgcctcatgatttctgagggcgctaagctcggaggacaactcaccagtatatgtacatggtctttgctcacgaccccttctactatcctgatttcgaacgcttcacaggtctgacgaactaactctctcacccgtaaaccaacttcacctgttagcactttgtgcctgtattttgttacccacacaaaatgatactcaatctgaaataccgtgtggctgccatatctgtaatccatattgcacctctcgtgcaacacagtatcgcagctaaagctgaccgactaaagtcggtggttttaaccttttatatggaaaaataaaattaaatggtaataatacaggcaaaaaaatgatttattagccaatgtgggcaaaaaaagtgcaaatcatatagggtgtaatcaatgatagatgataataatcactaattttgaaattagtttggaatattgctctgcttttcggtttgttgcttgccttttaacgctataaaagttttacttgtgggcagttgttggcgattctacctgttattaccactatcattttgtatcttacaagtatcagtaaatatgatactaatcactgactgtttcatcaggatccagtttcgccagtgaaaattcaagtgcttgcaatatttcctattgtatatgcaattcttttagcaacaataatgtaacaatcattatgacacatcgtttatcatctaaggatatttgggcattaggctttatgacctttgccctgtttgttggtgcgggaaatatcattttcccacctatggttggcttacaggcgggtgaacatgtttgggtcgctgctgctggttttttgcttacggctgtaggtttgcctgttattactgttattgccctggcgaaagtcggtggcggtattgaagcgctgagttcacctatcggtaaaacagcgggtttaatactggcaacgatctgctatttggctgttggtccgttattcgcaacgccgaggacagcaacagtttcttttgaagtaggtattgctccgttaacaggttcaggcgaccttccactttttatctatagcgtcatttattttttgctggtgattttggtttcgctatatccgggcaaattactggatagcgtcgggcatgtgctggcaccaatcaaaatagcggcattggtgattcttggaggggctgctgtactatggcctgcagggcaccctattcctgccattgagacttatcaggagattccgttttcaaatggctttgtgaatggctatctgacaatggatactctggcggcgatggtatttggtattgttattgtcaatgctgcacgctctagaggggtggaatcatcttcattactgacacgttatacgatgtgggcaggtttgatcgcagggctttgtctgacgctggtttacctttctttattcaaactgggagagggcagtggcgatttagtaccaacagctgacaatggcgcggctattctgcatgcctatgttcagaatgtttttggtaactatggtagtttcttccttgcgatactgatctttattgcttgtatggtaactgcaataggcttaacttgtgcctgtgcagaatttttcagccgttatctgtcactttcttatcgcactctggtcttacttttggggctcttttccatgttggtttccaatctggggctgagtcatctgattacgttttcaattccggtacttacagcaatttatccgccttgtattgcgctgatattgctgagttttactaaccgctggtggcataattttacccgtattctggcccctgctatgctggtaagcctgatgtttgggattttggatgcgataaaatcatctcattacctgtcacatttgctgccagagtgggccactcatctgcctttagcagataaaggtctggcatggttaataccaactctgctgtcagtggttgtatttgctctttatgatcgcattgcgggagaagccaaactcccaaagcatgaaatccagcagggacaaagctgattattatattttgatgtttttgtagtaataagaaaatgaaacaccacagcatggatttatgctgtggtgtttttgttgttcattttttcactaaaataattgtgcctatcagtaaatataaaaccgaattttattcataatgaaaaaaactctgatgaatttaatcattattagaaagtgtttttttaaattcagacttattagtaaaaaataatgggaaaatgaaaatcatatattaagcattcaattatagataagagtaaccaccatgtttgaaatttaatttggaatattattctgctttttggtttgctgcttgcctttttgcgatataaacgctttacttatacttgtttgttggcgattctggttgttactctgattgggtagcatgtgcttatcactgagcataagcttctctcagaattaaagtaaaaattcagtttaccaatgaaaaattcggtgcttattgcggtttttttatttacatttcgtaaccgcgtttatagcacttatcatttcatatgtaattttaaacaataatatattatcaatcactatggcacatcgtttatcatctaaagatattttggcattaggttttatgacctttgccttattcgtcggagcgggaaatattatctttccgcctatggttggcttacaggccggagagaatgtttggattgcagctgctggttttttgctgaccgctgttggcctccctgttatcactgttattgctctggctaaagtcgggggcggtattgaagcgctgagttctcctatggggaaaaccgcgggtttgatattggctactgtctgttatctggcggttggcccactgtttgcaacaccgagaacggcaacggtttcttttgaagtcggtattgcgccaataaccggaggaggcaaacttccgcttttcatttacagcgtcatctatttcctgttgatgatcctgatatcactttatccgggtaaattattggataatgttggtcgtatactagcgcctattaagatgtctgcattagttattctggggattgcagttatattgtggccggcaggtaatccaattccggcgactgatgtttatcaggaaatgccattctcaaatggttttgtgaatggttacctgactatggatactctgggggcaatggtttttggtattgtgattgttaatactgtgcgttccagaggagtggagtcttctgcattactgactcgctacaccatatatgcaggcttaatcgcagggctttttcttacgctggcttacctctcttttttcaaattaggtgaaggtagcggtgcattagtacctaatgctgagaatggtgcagtgatcttacacgcttatgttcagaatacttttggcaactatggcagttttctccttgcggtactgatctttatggcctgtatgacgactgcaattggcttaacttgctcctgtgccgagttctttagtcgttatctgccattgtcgtatcgtgcaatggttttattattggcttttttctccatgctggtttccaatttggggctgagccatctgattacgttttcaattccggtacttacagcaatttatccaccttgtattgtgctagtactattgagtttcaccagtgggttgtggaataacttttcccggatactggctccggctatgctggtgagtctgatgtttggggtgctggatgcagctaaggcttcaaattaccttgttcattttttaccagaatgggcgacacatctccctctggctgaccaaggactggcatggctaattccgactttgtcgtcggtgggtatatttgctatttatgaccttattgtggctgaaagaaaaatcccaaagcatgaggtatagcagaaataaaagcgattattactcgttaattttatttttagaaacgataagcggcacaagttagtgccgctttttacctttatgagttatctattatattctcaaaaagaattgggttattgagtgataaatataattttgcttaacttgataagcgatattataaatctccaagataatgtaaataagaagctagaaagaaaggtaattactggcgagttttctgaaatttgtctggtgagtgtaaagttgggcctgaataccattatggagtaattgatgttaatgatttttctaagcagggaaatcattcatgggttcaatataaaaaattaagcacccataaaatatagtgggatataaaaatgaattgacaattttaagttttatacacttcgtctttcaagttgcttctttgttggctgcgctcactcaccccagtcacatagttatctatgctcctggggattactgagaggctcctgcctctcaccggaggctagcctttggctgggcagattcgttcccgacgaatttgtctctctcttgccgccgcgatgcatcttgaaatccattatggatatcgcattaatagcgtgttagtcaaggtggttttgagcggatttgatagggcgatgagcttgttcaatcagagtaactataccggtacatttatacgtgtgcacagattatatttcttgagtcaatattttttaatattaatgtgagcataaatatcatctttttggtactaacgaaaaattatatatatttaggtatttaagtaatatatagatagttgttttaccagattgcgatgctttcttctgatgacttctgacattaggtaagctgaacgtggtggagtttgactactttaattgatggcaacgagcgtaagactcattagattgagtgaaaacactaaacgtagcacccaacagtatatcgtggcattatctacgataatccactgctccgtcatatctattctgggtcaagatgattcagaacataaatgagatactaacagactcattacacaataatatcgacgagataatggagacacttaaacgctgtttggataagtggcaccttatctagaggtagttattggcgattgtggctgtttttatcgctatcattttgtatcttgcggggattagtgaatatgatgctaccactgattgttgggtcaggatccagtttcgtgagtggaactcaattaactgcattggttactatcttatctgtaattgtatttaaaacaataagttaacaattattatgacatactgtttatcatctaaagatatttgggcattcggttttatgacctttgccccatcccgcggggcagaatatacgatttccccgtctatggttaacctgcaggcaggtgaacatgtttggaacgctgatgcggctcttttgctgactgctgtggaactggatacatgtgctggcactgtatctgtttgggggttagcatgagtcaacaatggacttcccgtttgggacatatattagcagcaaccggatctgccgttggcattggtgccatttggaaattctcttatgtttcagccacaaatggtggtggtgcatttctgattgtatttttattgtttagttttgtgattgggttagccgttctgctagctgaaaacatactgggcagtagtacaagtgaagtggctgttaatgcgtttaaaaaattactcggtaaacactggggatgggttggctttataggtgtactgagttcatggtgtatctatagtttctacagtgttgttggtggctggaccatcggttatacggtgatggcgggcacaggccagttaaatattacagatacctctcagctgacatctattttcaacaatttcattagtgatccctggtggccgataattgcacatctggcattttcagggctaacttgttacgtcgtgctatctggtgtgcaaaaaggtttggaaaaagcagttaaggtcatgatgccaatgttattcctgatcatgataatgctgattattgtcggtatccgcttacccggctcatcagaaggtctaaaattatttttatacccagacttcaataacttgactggaaaaggtattttagatgcattagggctggcattcttttcactttctatcggtttgggtatccacattacttatagttcctacttaccgagtaacaaaggtatttgtaggtcgagtatctgggtggtaatcctctcctgcttggtctgtgtactggctggtctgatgatttttcctgctttggctgcagctggtttacaacccaatgcaggccccggcttaacgttcatgacaatgccaatttattttgcgagtctgcccggtggttcaatcttagcagtcacgttctttttgttattactgatggccgcgctgacctcagcaatttcattacttgagcacattgttgcttatgttcagagtcgttttaaatggcggcgccgtaaagcaagcttagttgttacggcatcgattatgttaatggggatccctgtttccttatcttttggcccgctaagtcacgttacattaggtggaaaaaccatctttgacatgctggatttcattacttccaatgttctgatgccattgttcggaattatcatttgtctcgtatttggctggtcacataaggctaatgctttaatacctgagaatatgccatcgcggagccgccagtgtttactgtttatatggagatatgtcgggccgttatgtattggggtgattttagtacacggccttatgcctgactaacacactatctgagtgattttgaaaaatagctaaaataaataagggtgggcatttgaatgcccacccttattttttaacttatggctttagccagattaagtcgcgttagcgttttaaacataaaaccacccgctttgcgggtggagttcaaacgttataccaaaaaaaacacctttccgttacgatatagatgtacaagctaatattcgcaactcaaattatgaaaggtgtttatgggcattaaagcacaaagctcagcgcatacaaagtggctgtgtaaataccatatcgtcttttcgtcgaaatatagacggaaagtgatttttaataatattcgttcaagtgtgggagagatcctcagagacctttgtaagtataaaggtgtggaaataatcgaaggtcatctcatgccagatcatgttcatatgttggtgagtattccaccaaagctaagcgtttcaagctttatgggatatttgaagggtaaaagttcgttgatgatctttgatagacacgccaatttaaaatataaatttggcaacagaaagttttgggcggaagggttctatgtcagtacggtagggctaaatgaagcgacaattcaaaagtatatcagagagcaagaaaagtcggatttaatctcggataaattgagtagtaaagagcatgtagaccccttcaaggggtaggccaaagcagcaaagacacttagcttgaacgaagagaaagcagcgtcatttaggcgcagtcggtaacaagcccttatagggcaagagcaaaccacccgttatacgggtggttatgattccaactatctgtaaaactcagcaatgctgaatcaaacaattattggttagttttgtaagaatggattcgttttccgttcatgccccaacgttgacattgggccatggcccggaataaattgataatcatcccccaaagccagaactttttctttgatggattggatcaattcatcatgattcccacccggaaaatctgttctgccaatactacctttaaacagcacatctcccatcgaaatcaatttatcagcatgattggcaaaaataatatgtcccggagtatgtcccggacaatgcaagacagaaagctgaatattaccgacttttaccgtatccccatcatccagccaacgttcaggggtaaaagatgggcattcttcaacgccaaacatctggcattgaacctctaacgcttctatccagaaagcgtcacctttatgcggcccatgcaccggtatattaaaatgtttagcgatatcaacggttgcaccaacatgatcaaaatgaccatgtgtcagcaaaacctgggttaactttactccccgcctctcgatctcagcgatcagtttttcagcttcacctcccggatcaacaattgcagcttccagcgtttcatcgcaccagatcaacgtacaattctgcatcgcaacggtgacaggcattatgtggtatttcattgtattgtttacactccacaatcaggacaaattcttaatatattcgtcatctttcaagccattttacagtccacttgaaatatgaaagatataataagattaccacgtcctgaccgggcctgtatcaatatgaataaaattactttttgggtaaaaccctactccaccagctttcattttcaatgcagctttacggatatgtgataactccatgccatcaatatggaaatccattgcctgaccgcgggtatgataactatgttttgccacgcctgaacttgcatgacgcaacatattattcgtctttaatgaacgatatcctgaaactaactgaactggtttatttgttcccatcatcatttgtaacagataaatttgatcaaataattttggatcaattttctttgtttcattttggcgataatcacggaataaataattcagtctaataagttcagatttattataatgacgcccatcaaagaactcggctttaattgtttctccggtatggagattatctacccgcaggatcctggggcgtggtgttgtcagtgtggctagtgcatgttggggcaataaacctaaccctaatgcaaccatacttacgccgagccacttacggcggttatgatcaatattattcatatattgtgctctactgctttctctgattcttagatagtttcaaaaatatattaacagttaacaccaatcaattaacaaaaccgcaacgaacaaaaaagtagcttttactatttttgtacattaatgtaaattttttagctgatgtttttattctgatttactgaatacagtttttattaaactgaatttaaatatttatatttggttaatgcaagctattaatttagtaaatgtgcaataattaaaataaaaaattaaagtgtgggagagatggcaggtaaaaaaaatagcagtgagaatattcctcactgctaaaatatattattaactttttccatttataatttaacaaaaataagagtattatctggctaccaaaacctgagatataagttcagatttttgtctggcatggctatcatattcataaatatcagcacgatattgtagttttcctttttcatcaacccaggctgtctggtaataaaggaataccggaattcttttcggtatattcacatattttgttgcccacgttttcaaagaattattgacttttcctttattccagccagcatcccctaacaacatattggctaattcaggtgctttattaacacggacacaacctgaactgacagctctcatttcacgcttaaatgaagcctgatttggtgtatcatgcaaatatattgcttccgaattaggcatattaaacttgaatctacctaatgagtttgttgggccaggtgcctgccgtatccggtaagggaaattaccgggagttatgactccccagttaattgatgaagggtcgacaacggctgcatcactgctccaactggaaaacactgtataaccacggctgcgaaaataactgggatcacgcatggctctcggtgctatatctttgcgggtcatgctaacaggaaccgtccagggaggattaatcactacattattcagttcactactcataattggcgtttttcggcttggacgcccaacaacaactttagaacttaatgcttcttcgccattcaaataataaaatagtgaataatcaggtatattcactaaaattgcggtaggaaggttatcaggaatgatacgcaaccgttgcatattcaatgccatgatccttgcgcgggttttcggggtggtatttaaccatattcttgttgattgcccgatgactccatcagcagctaaaccgtgtaaagactgaaaacgctttactgctgcaactagctctttgttataaaatttattctcagggctaactactgaaaattctagagtacctgaacggaccaatatatttctcagcgcaataacactctggctactttgcccgggccttaatgtttctttcattgaaaattcagaccacggttgtttgtccttcaattgttttagcatctcattacgcatcggttcgtacatagaatggttaggtgataatgacgaaatgtaattgctgagattattattcttaacgtgctgttgccacttttcaattaaactattcgggggtaaatcgattttatatggagttttaccatataaccatgaatcccctttattatgaatggtattaatatagtgaagataacctaacatagcatcagatagaataatatccctccccatttcatttaattcgggtgaattaagttgtatcatccatttaccaaatagaggatgaaacccggctaacgccgaatcaagcaatgtgatctttaaaattttgtatggcagtttcatcccgccataacggtttcatattatttagtgaatataatcgtgatactgttgataatatatcggctttacttgtttaggtaataattcttgtaactgaactttattttcttccggagaacctgataaagatacaggagccatttgagtagagttgatatcagtatctacttttttttccccccatgataatggctgggcatcatttgctatcaatacgttttgttgacttgcaaaggctccctctgatactactaaaatgctacagataaaagaaacttttagtaaccttaccgtattctttgccataagagttcacctcgcttttacgtatactcctttttcatagtgacaagtttaccgactgtatttatcagccatgaaaccatacatgaaatttactgggtatatttggctatccaatgacttattctaattatcggcagaccaatgttatcagaagagaatagtattaattatatacataattacttattaagacagaaagccccccaattatatccaattacatgaactaaaagaaaattattgttataataaattaacttatattagtgataaaaaagaaaaggcactcaaagtgcctttaataataaataaacatgataaatgtttaaattaatattctgagttaataacgacttcttctccaaattttcctgctttaggtaaaggctgataggaggaatttgatgctctcaagatacgaataccacgaatatttaattcacgggctgcggcaatatcagcatcagcatcgccataatagattttcaggttatgatctctcatccaactgattttattatttttaccgggatcatctcctgcaaagataacagcattcattttatcggcagggatatgaaggtcttcctgtaaatatttagtcactgtttctgttttagttctggtacggccagtaatgaaataaatatcatcaccgcgtttcaggtgcatatgaaccaaatcgatgccaacctgtttcggcatactgaatttatcccattcgttgttcattttctcccagaattccgggtttttcaggtagctattgtcattcggcgaatattccagttgacctcgataaaagccggggctggaaaacagtacggtatcatctatatcgaatcccacagacatggggggtttactttgcaaacttttttcaatctgctccactgaaacccagtgtaccgcctgacgttgggaaagctctactgtagtgacccctgagctgacttgttccggcacttgtacttttgcctgagcagtactacttaggccaacagcaagggcagttgcactcaatgctaacactactttacgcatagtttttccttcttctcatcctgatcacaatgggagggaatgataagcactctaattgcaagaaaatgagattcaatgcacatatttcaaaacgtgattattatcttcataaattaaaaagccgtcatataatcaatgacggctttaacttactcactcagagagaaattattttcagaatatcgcctgagcctgttcctgccgctgttcaatagccggagtttcctgcccaaagccacgtaaaccaacaacatgcacatgttcctgattattaaagatcttacgtactaatttatacgtagttcctttctccggactgatattttccggtgcggcaataatcagctgcatctgtaaacgttcacataactcaaacagtgtggcgatagacttcgcatccagacgagctgcctcatcaaggaataacaaacgacatggggaaatatctttgccacgcagacgacgagattcctcttcccagctctgcacaaccataaccagaatcgacatccctgtaccaatggcctcaccggtggaaagcgctccactttccgcttttagccagccatctgagccacgattcacctcaacgtctaattcaaggtaattacgataatccagtaattcttcaccaattgtctgaggtaaacgctgccccatatcaatttgtggatttaagcgctgataaagtttggccattgcttctgagaaggtcaggcgctggctattaaacagatcctgatgttgttcctgctgttcagacagcacatccagtaaaacagcgtggctttcacgtatattcacattcaggcgtacaccaccgacctgaccgaaggaaaccatttgtaatccctgattcagcattctgatacggttctgttcacgctggatagtcttacggatgatattagccacgctcttagaactgatcgccagtttttgctcacgtgccgttaactcttcagttaaacgcgctagctcgatttccatctgctcaatcgcatcaaccggatcatcagtacgaataatatcctgccggatccgctcacgcagatgctgataaacagctacaaagaactgtatcttacgctcaggacgttttggatcttcagacaaacgcaacgcatcacgtaaatgttcattatctgctacggcaagacgcagtgcacccagcgccttatccgacattgaacgtagtgcatcagcatccatgtaagccagttcacggcgatgaagacggcgttcaacgccattatctttcaccatccgcatcactgcacaccaacctgctttagaggatacgacctgctcacgtttctgataataatcacgttctgatttgcgcagttttttctggaggttttccatttccgcctcacagaatgcgatctgcttctcaagctgattgactcgggaacgattggcctgtactgcggcatgaagctgatcacggcgttcacgggcacgattttccgcattagcgtcagcctgtacaccgatatctttcatctcctgttcaagttctttcaacatatcctgcttggtgtcataagaactcttcagggaagccagtacctgactgaactgagcgctttgtgattgctgctggcgaagttgttcacgagcgcgtctgcggtcagattccgcgtgttcaaggcgctgacgcaatttatcgttcaggtcactattttcactgagcattccggctgaatcgctgtaactgaaatgcacgctgcgctgtacaacttcagtcagggcaaaagcctgttgtttggctttgatttgactgtgtttcgccatttcataatcccgctgcaattgctcatgctggcgaggatcactttgtaaaacggatactatcggttcaagtttatgcagggtattgccgtgctgttgcaggaaacgagccgcatcctgtgcttcactcatttcttcacgtacagcttccacccgatcaatcagggcttcatccagcaaaatcgtaatttgtgggatcaaccgattgagtacagacaggctctcttttacctgagccagtttttgttgattctgttgtgtgtgggactcaaattgtgacagttctcgctccagctctgttctccgatgattcagagtacggatttccagttccggatcgctatcaaatgccaccgacaagtgtttaccgacaaaacggctgaaagcctgatgtgcacgctggattttctgcacatcaaatgaaagtgttgcatagcgctctgccagcgtatcacgctccagactgagcgcttccagacgattttcccttgccgcccgtccgaatagagggacttcaggatagcgagaataacgccactgacgatcagaagatttaaccagaacagcattttcctgctcttcaaaatcaaacacgctgtcatcaaacgattgtggatctccttcgatcaggtagagatcttccgggcaatcctccaatgcttccagatgtgggcgtaccaaggaaagatccgggacaacaatcgcatgacgtgctgagccatagagcgcagagaaataaggtgcatcatcaatggtgatgtcgtcataaatttctgacaacaaaacaccaccgaaacgctccgccagagccagtaaacggctgtcttccgcaccacttggttggctcagccgttcaatctgtttttccagttcacgtttctgtgtcgaaacattatcacgttcaacagtgatttcacgttcctgctccagcaattgctgcatatattccgtgacatcattgctgttttcgaaattttcaccactctgctcgcaaagctggtccagtgtttcctgtgccgccagccagactggagcacgggcagtcagcgcctgtattttctgtttgagttgttcgagttcctgacgcacctgcatgcgagattcaccgctttcattagcagtcaggcttaattcttccagctgagcttctaactcaccctgcaacatttccaaatcttctggctgatattgctgctgataacgcttacagaattcttccagcatgcgttctgcattttgctggctgttaagacgctgttccagctcagccaactgaatacgaagcggttgaacacgctctgacagatggcgttgagatgaccattcacgcaatacttcacgggcactgtgccatgcttcactacggctgacttcaccaacaatatttttcaccaactgataagcctgctcaaactgactatgagcagcatcagccacactgagtttttgttccagtgctaacaggatttcggttgcctgttgttctttggcctgataagtctcctgccattcatcagcattctctgccgataattcaggaagctggcaaagctcacgagctcgctccagcgcttgcagtgcctgttgatactgaatagcacgggtctgctgaacatccagtgcctgctgataatcagcaagctggctttttaattcatcaacttcctgctctgcggcctcagaagcaacttcatattccgcctgcatctctttcgcttcttcaacgacttcagtctgttcttccagtcgataagtcagctcttcgatatcagcctgataacgatcaattttttcctgctgacgcatggctgtctgaaccagattcaaatgatcgctggctgcctgataatccatttccagatcagaagatgcgccactttgttctgtcagctcccgcgccatttctacatgacggtattgttccgtcactaactgccgccgactgccaaacaattcactgcgcaaagccagcgcttcatccagatgaacacgacgttcattggcatggcgcatatagtcagcagaaacataagctgtcgcttcggtaatgaggtgcttaaacaggtcacggtcagattgagtgacgcggatagcttccagtgtgatacggttttcacgcagagcagcttccatatcctggaatgctttcctgacgccgctattttctggtaataggtaatcacgcaatgaacgtgtaatcgcgctggaaataccgccgtacaacgatgcttctatcaggcgataaaacttgctgcgatcactggcagagcgtaggcgtttcgggatcacccccaaatcaaacatcagggcatggtaatcagtgatggaattaaattgtttgaactgaacaccatccatttcttcgacgcgctctttcagttcattcagtggcagaacccgcgcctgacgttcgttgatgttttcagtcaatagttgtgttggctgtattgaagcaggtacaccctgaatcataaagggcttgatatcaacttttcggtctcgccctgcgatttgttgtaagcgtacaccagcaataattctctgatggcgggaattgaccacatccagcgtagaataacagacacctgcccgcagtttaccgtgcagacctttatcacgggagccactggttgcccctgcttccgtcgtattacggaaatgcagtagtgttaaatccggaattaatgcggtgacaaatgccgccatcgttgtggatttacctgcgccgttacccccggataaagtcgttaccagttcatcaagatcaaatgttctggcaaaaaaaccgttccagttaacgagtgtcagtgagcgaaatttaccgcgttcaatcatgactgttcatcctccgcacctgctgctgaatccgttggtgcttcttcgtgttcattaccttcctgcgataaactgctctccactggcattgcttctccatcacggatcatccgtaactgagcttcacgtggatcatcaccgctacgtacatctgcaccgaaacgaaataccgcttcggtaatcataaatttattgctgtcattttgtaggaaataggccatccccaaacgacgcaggcggttcagagaagtgcgtactttttcctgtaatttttgtttatccaaatctgaaccggttgaacgctgattcaccaatttcatcagtctgttttcatcagccagtgacaacagctcttcatgtagttcctgaaaggtgaatatcccctgattagataagcgctccgggctgagatagaggtaacacagaattttacccaccatcatgtccagctcagataaaacagagcgggagatcagcgtatttgaacgcggccgcaggtagaaaaaaccttctggtgcacggatcaattcgacgttataacgcgagtaaaatgtttccagctcttcctgaaaatccatcagaaaagcatgattatcaagattatccattccaatatgacgccctgaacgaagctggctgtctaattctggaaaaagtgtgttggataatgcctgagccagtttaactggcataaattgttcaatatgtgtcgatgacatgtgcctgcaccttggctccgtaatcattaatcgctaaccattccgctggcaacccagagaaatctgcttctgcaacgcccagtcgtactgcctgatccaccagaatacgtgcaacatcaaaatgacgtttgtgtggatatttggcaaggtaatcacgcaatacagcgcccaaatccagagggagtttggcctgttggtaaattgccagtgcctgttctaccatttccgccagttgctcgtgaatttcattaaattcttcgtattccatctctggtggtaattcacccatgacttcttcattgcgtaatgtcagttcttcatcacgcatatccagcagacgctctgcactggcaacattcagcacccacgggttatcgaagtaattctggatagactggcggagacgctgagcaaaaatgcggttcttatccatatcaatcgctgttcggatgaacttgtgaacatgtcggtcgtaaccgatccagagatcgatggattgctgtccccagctaataatgcgatcgagtttattttgtagatcaaaaaccagtttatccaccagttcagaaccgccactcatcatgttggcatcctggatccgcagcagattggcctgtaatttgtcgcccgctgcctccagagtatcctggagctcccgcagagttccggaggtttcagacaataattgctcacaattcgctatagcagcctgccagtcctgattgagcaaagcggcaatatctgcttttacactgttttgctgctcatccatgatgcgctgtgacagatcaatgctgtcaaaaatttcagccactgaatatttaagaggagcaaatacattgcgatgccagtgaaattcatcaccaccttcttcagccgcttcggccgcacgatgtagttcattggcaacaatggaaagctgcatagaaagacgcaacgtggaaaattcacgctgacggatatagtagtcgctaatgccaatgcctaatggggtcaaacgatagatagcactaccatccgccagttcactggtaaaacggttaagtagcttttgccttaccatatcgttaattgcattatttgccctgaccgccacggcttctgaagtctgctcaaaacctttacagacttcccggaaagcatcaatcagctctccttcgctcatttcgccatcaagacgttcattattcagtacggcaattgccattaaaaaagccaaccgttccggtggcaacgaaatggaaaaatcattctttctggcccaggacacaagttcaggaacagtctgggaatattcactcataattcgctctttaaggtaggcttgcgtgccgtcacatgaatatagcgcccaaggctaatataaggctcttgtctacaataacgctgttcaagctcaagcagcgccggaaaatctgtattttgcaattggcggctttgcaggtagtcgtgaaagaccctgactccggttttacccactatttccatattaagttcagtgagccattgatatacctgttcaggtattaatggattctgtggcgatagggaacgtttccggcgacgctgaatatttggcgttgctaaatgaaaattacccagaatggcattgcgcataaccagcccattagcattataaaacattaatgagagtgcaccaccgggcgtaataatatcacccaatatttctatcacatctttttgatcggttatccattccaataccgcatggaacaggattagatcaacaggctgagtaatatgttggtgaatatcctgtaccgggctctgaataaactgcatctgctgaagaactccccgctcttcagcgttgctttttgcccgttggatcatttcttcggaaaggtcacataatataacctgatgacctaattcagcgagctgacaggccatattcccttcaccgccccctgcatccaaaatacgcaaagatcgttgaggcaaatgattcagcaattcttcgatatcctgccagacaacggcctgtctgattttacctttggtggtgccgtaaatattacgcgaaaatttgtctgcaatatcatcgaaattgcgatcccgcatgaaaaaacgcctcattaataaactaagctttatgtatctattgagtatttatagagtctatcgagtagagatagtgtctagtgctatttttactaccgttattctggcacagtaatcggtaaattcactacttttacccttgaatttacccctgtgcggtgataattcaatcagattaaggcctgttgatgctatttctgctaaaaaaatacgttggtgcgctattaatgccgctccctttaatcattttaatcgctttcgtcgctttattcctgctgtggtttacccgatggcaaaaaacagggaaaacaattctttcactaagctggctgaccctgcttttattgagtttacagcctgttgcagataacttactactccctgtcgaaggaaaatatactcaacgttacgagccagatgcgatacacgcgcctgcggtaaaatacattgttgttcttggcggcggcttcacttataacccggaatgggcaccaagtgccaaccttatcagcaatagtctgcccagagtaaccgaaggtatccgcttatatcgccttaaccccggcgctaaaatgatttttaccggtggtaagggagttaattcaatcagcagtgctgaaatcgcggctatggtagcacaatcactgggggttcctgtagctgacacgatagcattaaaaaatccgctggatacagaggaagaagcagccgaagtcgaaaaggttattggtcagcaaccttttattctggttacatccgcaaaccacatggcccgttcactgaaattctttgaacaacgtggtatgcaccctattcccggcccggcaaatcagctggcagtaacaacgccactgtataactgggaaaaatatattccgtcaccccattatttttctcacacggagcgggcatggtatgaaactctgggtagtatctggcaggcaattaaaccttccggtacagataaaggtgaaaagagtgaaagtgggaattaatgatacgaattattgctgagtagccggaaaaaattaggcgaacttaatcgcctaattgccatgaatctgttttgttattgtttataccaatcaaacttcaagatccgtgttatatctccccgcgaagcgggggagatataaggcttttcatagtattgctgattgcaacttgaagttaaaaaagtatatatcaggctgcaaaagtttttctgactacctccaaatcttccggtgtgtcgactccagcgcccggagcctgtaatgccttcgctacatgaattttttccccataccaaagtactcgtagttgttcgagcatttcgatattctccagtgggctggattcccactgcacatagcggcgtataaacccggctctgtatgcataaatcccaatatggcgcaggaaattatctccgatagtctctttggactgcataaaacgatcccgctcccacggaatagttgcacgagaaaaataaagagcataaccctgtgcatccatgaccacttttacggcattcggattaaatgcttcttcagcattctggatctgaacggcgagtgttgccatacctgcatcactcccagccagattatcagcaacctgcttgatgatttgctcaggaataagtggctcatcaccctgaacattgacaataatttcatcatcagcgaattggtatttatcaataacctcagccagacgctctgtacctgaatgatgattttcactggtcatacaggcttcaccacccgcagcagtgactgcatcaaaaacagcctgattatctgtggctacaatcacgcgaccggcaccggaacggatagcacgctccataacccgcacaatcatcggcttaccatgaatatcagccaacggctttccgggcaggcgggatgaagcaaaacgtgcggggataatgactgtaaacataaattatttcttttcctctgttggtaaagcacgtgcttcatgctccagcagcacaggaataccatcacggaaaggaaaagcgagacggtcaattttacaaatcagctcaaagttttctttatcgtaactgagtttgccatgacataccggacaagcgatgatttcgagtaaacggtgatccatacatcccccaaatgacgggtttttgaagtttaatgtggctcagaataccacaagcgatgtatcaccgttaactctgttgttttatttaatatttgcctgacgttacggcgttaccggcaatattctgaacttcatggaataataggcacaaatccgagaataactgccgttatgttctgcccttggtcggctgagggattaaggcacaaatttcatccagcaatttttccccctgaacttccggcaagtaagctgataccggtaaataccaccaattatcctgcgcaaaccggccacatttgacagcatctttttccgtcatcagtaaattctgcccagtattggttaaagctaatagctgtaccttttcataagactgatgatcagcaaatgcatgtgtcgcctgcaaatccacgccaaattgctgcaatgcagcaaaaaaacgaggtggatgaccaatccccgccattgcaactgcattgggaataccgctgatttttcgcttttctccggtcaggagattaacagcaatttctccttttaacgtcatcggtaattcgcctgtttctgctgttccaccgttaacgataatggtatttacggtatttaatcgccctgaaagctcccgcatcggccctgccggtaaccaatagccattaccaaaacggcgagcaccatcaatcacaacgacttcataatcacgctgcaaagcataatgctggagaccatcatctgtgataacaatatcaagggaagaatgctccaatagttttttgactgcatcaatgcgttttggcgcaactgcaactggggcacctgtgcggcgatgaattaaaaccggctcatcacctgcctgaccagtagttacctcatccgttaccagcaaagggtaatgttcagacttcccgccataaccacgggaaacaacacctacccgataacctttctgctgtaaatgttccaccagccagataactaccggtgtttttccattgcctccggcagttaaattaccgacgacaacaacaggaacggaggctttccatgaacggaataatcctgacttatagcccagcttacgcaggccacttaccagcccataaagggctgatagtggtaataacaggatatagagccatgaacgacccgaccaaatgcgctcaatcataggccaaactgcattcgatgaagctgagcatatgcgccatttttctccaacagaacgttatgattgcctctctcgataatattgccatcttcaataacaataatttcatcagcactttcaatagtagaaagacggtgtgcaattaccagagaagttctgtttttctgcaattcatccagtgcagcctgaatcgcacgttcagattccgtatccagtgccgaagttgcctcatccaaaatcaagataggagaatcacgcagtaaagcacgggcaatggcaatgcgctggcgctgcccaccagaaagcaggacgccattctcaccaatcatagtatcaaggccgttatccagtttcttgataaagtccattgcgtaagccatttctgccgcacgttcaatttcttcacggctgaactggccttcgctggcataagctatattgttagccacggtatcattgaacaaatgtacgttttgcgataccagtgctatctgattacgtaaagaagataatgtatactcacgtaaatcatgaccatccagcgaaatactcccttcactgacgtcataaaaacgggtcaggagattagcaattgttgatttaccggagccagaacgcccgaccaaagcaatagttttgcctgccggaatttccatagaaatatttttcagagcaggactctctttggttggataacagaaagtcacatcacggaattcaagatcacctttcgcttttttaatttcacgctttccgtcatctttttcctgctccatatccagaatagtgaataacgtctggcaggctgccataccacgctggaattgtgcattaacgttagtcagtgatttcaacgggcgcattaaagcaatcatggatgagaatacaactgtaattttacccgcagtcagtgcacccataatttcaggaaagctggcagcgtacaggataaatgccagagcaaatgaagcgataagctggataataggatctgaaacagaatcagcggaaaccattttcattccctgctgacgcatatgattactgactttattaaagcgctgtgtttcaactttctgaccaccaaagattaaaacctctttgtggcctttcagcatttgttctgcgctggttgtcaccattcccatactgttttgcatatttttactgatacgacgaaaacgtacagaaaccagacgaataactcccgcaacaatcggagcaataacaatcaggatcaaagacagctcccaactgtaataaaacatcagtgcaaaaaggccgataattgatgccccttccctgacaacagtcaccagcgcaccggaggaagaagatgcaacctgctctgaatcataggtaatacgggaaagtagcgtccccgtagattgctggtcaaaaaaagcgactggcatgcccatcatatggttgaacaaacgacggcgcatctgcatcacaactttaccggaaacccaggagatacaataacttgatacaaacccagatatgccacgcataagcatcagcccgataaccaccagtggcatccatttcaatacactcatgtctgccttgccaaatccttcatcaagtaaaggctttaacaaagaaagcatcaatgtatcaccggcagcatttataactagcgcaaccgccgcaactaacaatccggccttaaatggtgtgatgatcggccatagtcggcgaaaggtctgccaggtagaaaggtctttatcattcattattgagttaccaaaaccaaaagaaatagcggcttattctactcatgatcaccgcgaataccaaaccactgatgataccaccgtgacattaactgttgtcggtatccttctaatttaatgtgatcatgataaacataaccggtaatctggcctgaaactgccgtactattccattgaattccagcatttttatagcggtcttttactttcattgaaggcagtttccagggactgtagcgtgcgacggaagttaaagcatattcaggcctgaccctacgtataaatgccgctgtagaggaagtattactcccatgatggggaacctgtaagacagtcgaattaagattttccttttcaagtccaatcaattgatattcgccttgtttctccaaatcacctgttaataataaactatacttgccatcatcaatgcggataacacaagattgattattacccacattttctgccttttccggtggccagataacccggaaagttaatccatgccatacccattgttcaccacgaacacagggtaagttctctgatttactggaagggctgcgaatatgaatatccggattttttttatgcaggtactccactcctcccgtatgatccagatgatcatggctcagaataatttgttcaggtgttagttgatgccaacgcaggtaaggctggataactttttccgccatattccccgtctcccagcggtttcctgtatcgaataaaatcgcctttcctcctttatcaataacaatagccaaaccatgaccaacatccaacatggaaaagcgccataggtattcatcatcacgcttaaaataacagaacgttattccggcaaaagcaaataatagcccgatatatgatttccaccagccaaaacgccagacaacaacggacatccagccggcaaaagtgatgaagaaaggaatatgacctgtttcagtccatgaatgaacaaacgcaggcaagggcatcaaagcaaacgaaatagtgtaatcaaccaattgccagaaaaatggctgaataaactggctaaaaggtaataaaacgctcaataatatcaacataatcagcggaactgtcagaaaagagattatcgggacagcccataaatttgcgattaatgatgcaatattgatcccctgaaatagcaagagttgtaacggcattaacataagcatcattcccaattgcatatgtaatccacgcaaccagacccagcgccatccataacggatcctttcgggcaaaggcatccaatgaaaccagaataacagtgctacaaccgcaaagaatgaaagccaaaaactgtcagaaaggattgccagtggatcaaaaagcaaaatcagcgcagcactccataaaacccactgccatgaaaaacaaaaatgattcctgcaacgtaaataaatccagactgtcaaccctaacatcgcccggatagcaggaagcccccagccggaaagccatccatatagcattgcagttagccatccgacaagaagcgggaaacgaaatccaacccacgatgcgggaagcaagaactgaattcctctggcaaaagcccagccaaataaactcgctatcgcaacatgtaacccagaaatcgccatcaaatgcgcaattcccgtttgttgtaataatagtcgagtttgtttctccaaccatgctctttcgccaaatgtaagtgcaagagcaataccagcatgtttcagagagcgtatttccgggatcagtctatagattaatttctgccttacactacaagtatcatccaataaatttgctttagtaatttttccattaagcggctggcggattgataatgcataacgctgactatcataacttccttgatttaattgggcatgaacagctctgagtttcattgtgaccaaccacttttgacctgcacaaagtggcgtggagaaattttgcggtattgaagggtcccataaaactgaggcatataaagcaggaaaaatatattttccctcactctcaattaacctaaccctataacgaggcttctcatctctatctgtttcgtttaatgacacgctgtcaaccataataactgctgatcttgtcacatcgctaaaataggttatttgatccagaatttggtggccattccaacatccccaaagtaatccccataatatcagcgaaataagtcggcctaatttataagaaatcagccataaaacaattgcggctacggataagagcaatatttctcgtggttgaggtaattctggcagtaataaaagagggagcattcccaatacaacggctatagctgcttgatttaggctaataatagataatggttttatccagatagaaaaaagtggagaaaaaagaaactgaagagcctgctgcatccgtatctgtccctgcatttaaattccatttatgcggaaaagactattcgatggtaggtaatactgccagtcagataaagtttattttagaaacacttcgcaagttaatttcaaatgaaagaatatacatgaagaagatgagagaataatcgcaaaaacaaaaaataataaaaagaacggcaccctaaggtgccgtagcaattaagtaataacttttatcttagctgtcgccatagatattcacgcggtcgcgtaattctttacctggcttaaagtgaggaacgtatttaccgtccaattcgactttatcacctgtttttggattacgacccacacgcggagctcggtagtgaagagaaaagctgccgaacccgcgaacttcaatacgttcaccggaggccagagtttctgccatatgatcgag

SEQ ID NO: 3527 - DNA, 43149 bp, Xenorhabdus sp.; identical to SEQ ID NO: 3526
  CDS (22953)..(23297)

SEQ ID NO: 3528 - DNA, 43149 bp, Xenorhabdus sp.; identical to SEQ ID NO: 3526
  CDS (21289)..(22608)

SEQ ID NO: 3529 - DNA, 43149 bp, Xenorhabdus sp.; identical to SEQ ID NO: 3526
  CDS (21131)..(21292)

SEQ ID NO: 3530 - DNA, 43149 bp, Xenorhabdus sp.; identical to SEQ ID NO: 3526
  CDS (18470)..(19795)

SEQ ID NO: 3531 - DNA, 43149 bp, Xenorhabdus sp.; identical to SEQ ID NO: 3526
  CDS (16570)..(17910)

SEQ ID NO: 3532 - DNA, 43149 bp, Xenorhabdus sp.; identical to SEQ ID NO: 3526
  CDS (15439)..(15678)

SEQ ID NO: 3533 - DNA, 43149 bp, Xenorhabdus sp.; identical to SEQ ID NO: 3526
  CDS (14512)..(15174)

SEQ ID NO: 3534 - DNA, 43149 bp, Xenorhabdus sp.; identical to SEQ ID NO: 3526
  CDS (13958)..(14257)

SEQ ID NO: 3535 - DNA, 43149 bp, Xenorhabdus sp.; identical to SEQ ID NO: 3526
  CDS (8588)..(9547)

SEQ ID NO: 3536 - DNA, 43149 bp, Xenorhabdus sp.; identical to SEQ ID NO: 3526
  CDS (7231)..(8613)

SEQ ID NO: 3537 - DNA, 43149 bp, Xenorhabdus sp.; identical to SEQ ID NO: 3526
  CDS (3316)..(4140)

SEQ ID NO: 3538 - DNA, 43149 bp, Xenorhabdus sp.; identical to SEQ ID NO: 3526
  CDS (83)..(430)

SEQ ID NO: 3539 - DNA, 38706 bp, Xenorhabdus sp.; identical to SEQ ID NO: 115
  CDS (11091)..(11978)
  unsure (1)..(38706): unsure at all n locations

SEQ ID NO: 3540 - DNA, 38706 bp, Xenorhabdus sp.; identical to SEQ ID NO: 115
  CDS (3)..(2240)
  unsure (1)..(38706): unsure at all n locations

SEQ ID NO: 3541 - DNA, 38706 bp, Xenorhabdus sp.; identical to SEQ ID NO: 115
  CDS (2307)..(3605)
  unsure (1)..(38706): unsure at all n locations

SEQ ID NO: 3542 - DNA, 38706 bp, Xenorhabdus sp.; identical to SEQ ID NO: 115
  CDS (4042)..(4584)
  unsure (1)..(38706): unsure at all n locations

SEQ ID NO: 3543 - DNA, 38706 bp, Xenorhabdus sp.; identical to SEQ ID NO: 115
  CDS (4577)..(5407)
  unsure (1)..(38706): unsure at all n locations

SEQ ID NO: 3544 - DNA, 38706 bp, Xenorhabdus sp.; identical to SEQ ID NO: 115
  CDS (5643)..(5819)
  unsure (1)..(38706): unsure at all n locations

SEQ ID NO: 3545 - DNA, 38706 bp, Xenorhabdus sp.; identical to SEQ ID NO: 115
  CDS (5822)..(6658)
  unsure (1)..(38706): unsure at all n locations

SEQ ID NO: 3546 - DNA, 38706 bp, Xenorhabdus sp.; identical to SEQ ID NO: 115
  CDS (7452)..(8375)
  unsure (1)..(38706): unsure at all n locations

SEQ ID NO: 3547 - DNA, 38706 bp, Xenorhabdus sp.; identical to SEQ ID NO: 115
  CDS (8356)..(8547)
  unsure (1)..(38706): unsure at all n locations

SEQ ID NO: 3548 - DNA, 38706 bp, Xenorhabdus sp.; identical to SEQ ID NO: 115
  CDS (17470)..(18351)
  unsure (1)..(38706): unsure at all n locations

SEQ ID NO: 3549 - DNA, 38706 bp, Xenorhabdus sp.; identical to SEQ ID NO: 115
  CDS (20277)..(20978)
  unsure (1)..(38706): unsure at all n locations

SEQ ID NO: 3550 - DNA, 38706 bp, Xenorhabdus sp.; identical to SEQ ID NO: 115
  CDS (21016)..(22179)
  unsure (1)..(38706): unsure at all n locations

SEQ ID NO: 3551 - DNA, 38706 bp, Xenorhabdus sp.; identical to SEQ ID NO: 115
  CDS (22628)..(23605)
  unsure (1)..(38706): unsure at all n locations

SEQ ID NO: 3552 - DNA, 38706 bp, Xenorhabdus sp.; identical to SEQ ID NO: 115
  CDS (24054)..(24878)
  unsure (1)..(38706): unsure at all n locations

SEQ ID NO: 3553 - DNA, 38706 bp, Xenorhabdus sp.; identical to SEQ ID NO: 115
  CDS (34465)..(34620)
  unsure (1)..(38706): unsure at all n locations

SEQ ID NO: 3554 - DNA, 38706 bp, Xenorhabdus sp.; identical to SEQ ID NO: 115
  CDS (34745)..(35182)
  unsure (1)..(38706): unsure at all n locations

SEQ ID NO: 3555 - DNA, 38706 bp, Xenorhabdus sp.
  CDS (31513)..(31992)
  unsure (1)..(38706): unsure at all n locations
gatgaaagacttgactcatgccgttaagtgtttttagttagctcggtttgtnttactatcatttaaattaatagctacattcataggaattagaggggctttaaattagcacccccttctattgtaatttttacgtgaacattatttccatgatctcctccttcacgggatatcttatacaaaggagaagatgaattaatttcataggaaacgaattcccaatacggaatatcccaatgaatagtaaacatagaactattatctcgtaatctgtattttactattccctctgtaccagtaagaaccccattagattctgagcgaaaatagccagaactgttggagaaaatattgtatggtggttcatgtgcccactgaccatgaagcaactccattgatgatattgtgagagttttacttgtattgttataaatagtaatgtctgctgatcttgcagaaggatctgcatgtgtagaaaaaacagaaaaaccaaatatcgataataaaaaaattaatatcctaaatgacattctttttataataattaactcctttaattttcttgaaaacattagttttatctagaggaaattagctctattattagaagggaaaattgttgtgatttattcatttaaatatgaatgaagtgggatcagttaccctatcaatttaaataataaaaaatgctttttaaatgatgaaatgggtaagttcaatatttatggtgtaactttaaatccctcccacattatttattatagcatgaagggatgaaagtattattttttctattaaaaattaggaaatctatcttttttaaagaaattaatttgttgttctccaatagaaaatacaaaagataaaggagagaacataaatgacctctcctttatcttttactatcggcagtgcttctttacacaatgaattttaagatatgtagctaatcagaaccactattctgtgcatctttgaatctccaatcctcagattgacactaaagcaggaaagtcgcaatactgctacatcgattgagtaacaccctcttatccttacaaaaaaattgctggagttttcttttatggctatctcgctggaaaataaagtcgctgccatcactggcgcagcatctggtatcggtcttgagtgtgcacggatactgattgaggctggtgttaaagtagttcttattgatcgtgccaaagaacgtctgatgcaactcgtttctgaactcggtgaaaatgccatcccgctggttattgatctgatgaagccagaacaggttgacggcatacttgatgaaatactgaaaaaagccgggcgtcttgatattttccatgctaacgcaggtgcctatatcggtgggcctgttgctgaaggagaccccgatgtttgggataaggtactcaacctgaacattaatgccgcattccgtagtgtccgtgctgtgttaccccattttattgagcagaaatctggcgatgtattatttacgagttctatttctggtgtggttccggtggtctgggaacctatttacaccgcttctaaatttgcagttcaggcatttgttcactctacccgtcgtcagatggctgaacatggcgtgcgtgttggtgccgtacttccgggacctgtagtcaccgccctattggatgactggcctaaagcgaaaatggaagaggcactggaaaatggtagcctgatgcagcctattgaagtggcagaagcggtgctatttatgctaactcgcccgagaaatgtcactatccgtgatttggttattctgccaaacagtgtagacctctagcctcgtagcaaggataaccatgaacattaatctagaaaatagaccggataatggcaaagtcgtcattggtgttgatgtcggcactggcagtgcccgtgccggtatttttgatatgaacggtaacatgctgtcatctgccaaacgcgatatcacgctttatcgtgataacacccattttgtcgagcagtccagccgtgaaatctgggatgctgtctgctattgcatcagggaagctatgtcgcactctggctgtgtcccacaacaagttgctggcattggttttgatgctacctgctcactggttgttctgggaaaagatcaggagccaatttccgtcagccagagtaaggatccgaatcgtaatattattgtctggatggatcaccgggcaacagtacaggcagagcatatcaatgcgttaggtcactctgttctcgactatgtcggcggtaaaatctctccggagatggaaacaccaaaaatcctctggctgaaagaaaatcaccgtgaatcatttgataacgcatggcaattttttgatctggcagattttctgacctggaaatccaccagctccctttcccgctctacttgtactgtcacctgcaaatggacttaccttgcacatgaaaagcgctgggatgcggattatttccggaaaattggtttgtctgaactggcagatgaaaatttttatcgtattggacagaacattattgaaccaggtacaccttgtggtcagggcctgacagaaagtgcggcaaaacagatgggattattggcaggaatacctgttgccgcaggaatgattgatgcacatgcaggaggcatcgggacagttggtatcaatggtgatgcaacacgtaatatggcttatgtattcggcacctcttcctgtacgatgacgacaactctggagccggtctttatacctggtgtctggggaccatacttttctgcaatggtaccctgcatgtggctcagcgaaggtggacaaagtgcagccggggccgccattgatcaactattgtcttttcaccctgccgcaatagcagccaaagcgatggcaaaagaaaaacaaaaatctttgccggtttttttagccgatagggttctggaaaaaacacaatcagcctctcaagctgtagaactggcaaaaggcatacatgttgttcctgaatttctgggaaacagagcaccttttgctgatcctcatgctcgcgctgttatagctggattggggatggaggatagcctcgataatctgctttcgctttatattgccggtatatgtggtattggttacgggctaagacaaataatcgaagcacaagcgaaatcaggcgctacaattgacaatattgttatcagcggaggggctggtcagcatcctttagtccgccagctcattgcagatacctgtgatgtgacagtcattgcaacgcaggcatgtgaaccggttttacttggatccgctattttgggggcagttgccggaggtgtatgtaaaagtgttggtgaggcgatgtcgcgtttctctaatattgattgcacatatgaaccgagcgaatcctatcgggaacatcataatattcgctttacatcatttcagagcctccagcaatgcgcgcgagaacttaagggctagttacaatcgcaagaaagcttgttcttgtcggctttcttgcattttattgttcaaatttaaacgttagtcatgcaaccacggtgtaactgtaacacccaccagcatcccttctgggctgagaagccgtgtcacacgttgcccccaaggttcctgtcgattgttaacaagtaattgccatcctttcgtaagtaaaatatttgtcgccgtatccagatcagcaacttcgaattcaatccagctttgtgggatagacaaatcttgtggccattgttcagtgccgaaacaggataaagctgcctgatagagtggccaaagcgcaaaatgctttacaccagtaagcgtaacggactcaattaacaaataatcgttattaccatccatcgttttcaaaggtaatccaagagtatcctgataaaaattcttactcttcgaaaaatcctgagtgataggaccgaatccggcgacaaacagaatatcaacctcgctaatattatgacgcataacgtctctcccacatttttgtaatgggaataattatagcaagtgtttgtttgagcaagatcgccctgattgactcaaaaccgccccgcttttccatttctggagcggtatgaaaatattgaatttattgtgcgctcatcagttcgacaaccgtaatattcaggaggtgttcccctggattaatatctttatgaggttctaaaccttgttgtgtatccagataaacaggaatgccttttttcaaaataattttgtcagttctaccgctttcataaaccacatcaagctcgccatctctgtcagaaacgatgactcgtggatgttgatgggaatggaatgggagttctcccttagggcaaatgtgtgatgctttcactttggcattttcgttttcaaaataaaaagttgaatgtgttgaacatgctagtgccaaagttgaggacatgcaaaaaatggaaatggcgtaaatcaacgttctcattgtgttctcccggattatacggcgaaaaagtatcattcacgagtttggagtctaatgatgtaaaaaatgcaaaattgatattaccgattgattctaaagcaaagaagactaattagagacatacctataacgaagaaaaatcatttgttcggaaagtcttttacatagtggattaattgaaagagtaaatttgccagatttggacatgttaaatgtaaaagaaaacgctatgattataacattttcaacccgaaaaccaaacaacgtgtacatagcggttttatgtgcaatcaaaaacaactgtaaaaaccaccagcataattatctattctgaattgtcggcacacgttatttcgtatcttccacttactaatgaacacatatatgatgcaaaatgccgtttttacccttttcactcttttgccccgtctgaagtatttcctagagttaaaaaacactgtagcttagctatttattaacagtagcgtaacaaaaaatattttcagggtgtgccaatgttctccaaatcaaatatatcaaccagtgtgttactgatttcttctttgcttttgactatagggcgtggagcaacaattccctttatggccatctatctgtcccgtcagtatcagatgcctgttaatcaggtcgggttttcgataagcattgctttgactataactataggtatactctttagtcttgggtttggaattctggccgataaatttgataaaaaaaactacatgctgttagctattatcgcatttatctgtggttttaagttgtcgcttttctctctctaataaattgtgcctatacggtatttgcgacagtactgaaaggttattttgctgataccttgtcggcgtcaatgaaagcgaaaattttttcgctgaactatacctttgttaatataggctggactatcggcccaccaatcggtacatggcttttgatgtacagtgccaattttccgttttggtttgccgcattttctgctgcttttcctatcgtctttatccagcgctatgttcaacgagtcagaactgccgaaaataaccaaaattcagccacaaagtgggatccggcagtgatgctaagagatcgtgcactggtatggtttattctttcaacttttcttggctcactggtattcggctcttttatcgtctggatctcacaatatgtcctgaccgttgctgatagcaccttagctgaagccgttatcggtgttgtattaccaattaatgctgcggtggtggtgactttacagtatgcggtgggtaggcgtattcgtccggaaaatctgaaaaacctgatgacattaggtagtgtctttttctttataggcatagcggtatttatgttcgcggacaaaaacctttacctttgggggattgcagccgttatcttcacactaggcgagctaatttatgcgccggatgagtatatgttgatcgataatattgcgccggaaggcatgaaatcgagttatttttcagctcagacgctggggtttcttggcggcgcatttagtccgatgttaagcggtattgtactcaccgaactcccacctcatttgttatttatcatccagatgggacttgtcgttcttgcatggttaagtatgcttaaaggaatgagtatcaagccattgagtgctgttcagccacgtcaatcataattatatcggtgagccgtaacaatgaaagaaaataaaattgttattgttggtgcaggttttgtcggtgcaacactggcatggtatttgtctaatcactatttatctagtggcgacaaaagcaaaattatccttattgataaaggcctgttgggtaacggtgtaactaaacagtcattcgcatggctaaatgtttctcatggtaagcccggtgccgaccgtaaactcaggcaacaagcactgaatgagtggcatgaactggataagcagacaaacggaaaattaagtgtgaattggtgtggtgctatcagctggcaagaaactgaatatgcaacccgtcaatttattgataatcataataaatcgggttttaagattacatctctgacaaaagatgagcttctgatgctagaaccgcagctttcttactatcccgatactgcagcgtttgcaatggaagaaggtgcggttgacccgattcacgcaacgcaatttcttttgcaggaagccataaacaacggggtgacttatctgccagaaacagaagtcacctccattaaccataatggaaaacagatcactggcgtgacaacgtcacaggaaaccatccatgctgaacaggtagtgctaacagcgggtgtcggtactatttctctgatggaaacactgggagaaaccgcttacctgtcttcctccccttctatcattgtgcaatatcagcatcaggctaacattccttttgtacgtcatattatttcaacccccgatttagaagtgcgcccggtatcaggaacaaggctgcttgcagcagaagattatataagtgatcaaccggagcatagtgctatgtgtattgctcagaaagccctaactctcataaaggagtcttttataggaagtgatagcttatgtttagaacaggcttccgttggtatacgtccaatgccagatgatggaatgccgatcgttggaaaagtggctgattatcaagggttatatatgatcagtatgcatacggcaattacacttgcaccattgatatgtcgactggcacaagaagagattataaatggaactgaacaggcggaattaaaacccttccggattgcccgttttgtttctggaaacaaataattctttatctgaatatcactttcagaagatgactgcgcggaatgccaaaattcgacttcttagaaagcatcaggccttttggaaaaaatactattaattgagtgaaaacttggataatgaagtttatggataattttaacgactacgaaaaactttctgcacgccatgtttctttgcaacgcattctgaccctatttaaaccttggcgaggacgtattatttttattggtttactcatcgtcattggggctggtatcggtgttcttgcaccttttttattacgcgaaattattgatactgcactaccgcaacaaaatatacagcttcttgtctggttagcattaggtttgattgtgattaccgcactaaacgcagtgattaatgcggcacaaatgatcttatctacccagataggtcaagccattatgcacgggctgcgggtacggctctacgggcatctacaaacactttctcttgccttttttactcgaactcggacaggcgaaattcaatcaagtatcgccagtgatattggcggacttcaatctgtcgttagcaatacggtgaccgaaatcattcgcagtgccaccattaccgtaaccaccgccattgcgatgttgttactggactggcgactcgcactgttttcctttgccgtcttgcctccatcactctggctcagccacaaagtcggcctcatgcgtgaacgcctgacgcatcaacaacaagatggtcatgcaaatatgtctgctatcgtacaagagaccctatcagcgccgggcattatcctgtcgcgtactttggcacgcagtttttttctgatccagcgttttgaaaaagcatcgtccaaaaccttacatttagaagtgcgtgcacatactgccggtgagtggtcatggtcggtgattgaactcctactcggtgcgatgccagcgatgacattactgttgggtggcttactgattggacaaggtgtgcctgtgactatcggtacgcttgtagccttgatcgcactacaggaacaattgttgtggcccttagaaaatttgttggaaaatgcggtcaaactgcgtacgacacgggctctatttacacgtatttttaaatacttagacacccctcccgacattgtagaacctgctcagattcgagatctcagtaatgaaggcccacgtggtcacgtccgatttgaaaatgtcagttttagctacgatggtactgacatgtcaagcttatgcaatgtgtcaatagatatcccggcagggagtcatgtggctatagtcggacctacaggtgcaggtaaaagtaccttcggttatctattggcccgactcgttgatccgagccaaggtcgaattaccattgatggcattgaccttcgagagatgagctttgaacaacttgccagcgtactcggagtagtcacgcaagagccatttctcatgaatacaagcatcgcagaaaacttacgctttgcctgcccagaggccagtgatgaggatcttgttgcgtccgcgcgtactgcacaaatccatgatttgatcgtttcgctgcctgaaggttatcagactaaggttggtgaacgtggctatcgattttcaggcggagaaaagcagcgcctcgcgctggctcgaacgatcctgcgtaacccgccaatcctgctgcttgatgaagcaaccagtgcgcttgacaacacaaccgaaaaggcaatttctctggctttggcacaaatggcatccgaacgcacagttatctctattgcgcaccgcctctccactattcgtcatgcggatcaaatattggtgctcaaggatggtcagttaaaagaatggggaacccatcaacagttggtcgaaaaagatggtatctatgcagaactgttacgtaccgctgagccaacctaaaattcaattttcagatgatgagccgcctaagggttgaaggtcatttaacaaataacaattgttggccataattaaattgtttgaaaaacattcactacccattgttgaaataaggaatttttatgaaaactcgcatcttaggtaataaaggtcctaaagtttcatccattggacttggatgtatggggatgagcgaattttatggtcctacaaatgataaggaatcaatttcaacgattcaccacgctattgatttgggcattaacttcttagatacagctgatatgtatggaccttatatcaatgaagaactcattggtaaagccatcaataaagtccgtgacaatattatcctggcaactaagttcggaatcattcgggagccaaacaatgtaacaagtcgaggggttaacggttcattaacaaatatcaatcagctttctgaagatgattatcgtcgtaccagcccccgcttccagagagagaacttcaacaaaaatctcgaactggtcaacattgttaaaacactctctcaccaagttggatgcacaccggcacagcttgcacttgcttgggttcttgctcaaggcgaaaacattgtccctattccgggcaccaagcgtaggaaatatcttgaagaaaatgtgaaagcggcggatataaatattccacaaggcgtgttggatgaactctccagcacattttcaaaaaatgtggctattggaaatcgctatccagatgcgactcaaggccttctaaacggctaaggataatttgcattttcaaggtataacgctaaacggggctgtgttatatagccccgtttataattaactgcttcgtcagaaaatgttagttaggaaggtaataagtaagatattttgagagtagctcttttcccatcggggtgaaatgcactgaatgtcctgcattagccaatgccaggctggtatttctggagtcgtaaattggcatattttcgctgacctcccagcgtgttaactgctgatagacacgctcagaaagcattggcaataaaggtaacagcgcgttgtcgtgcaagtgagggtcagaagtgagtttggagacccactcattataaggaagtgattgcagcggagatccgtgacactcttccagaagatgaaagaacttatcaacactaacggattgttctctttccggaggaacaaggtgatacacctgtcccaagttctttgtatctgcagcgatagttaaaagcgcagcactgacatagtcgacaggaacaaattctttccactgtagtggtaattttgggcaggctccgatagcaatacatcccattatcaggcgtgcaacaaagtcattagggttaccgacaccgcgaacactatcccccatgataaaaccaggccgataaacagataatgggatacctaattcccgtgcctgcaacatcagttgttcaacaacccacttgctctgtgcgtagccgatatcgtatttaagaccttcaatataaggtataaggctgtcattctcgtaaactcggggccttgcgttcaataatcccaccggaccaaatacggctatcgttgaagcgtaatgcaccgctttggctttaccttgtgtggcgaaacgaagaatgttcagtgtgctctcaatgttagaggctcgctggatgcgataaggatgaatatagttaacattcgctgccagatgaaaaacgacatcacatgtattagccaattcatggtggagtttgtcatttaaccctaattttgattgagataagtcacccgcgatagctttaatgcgccctgcgaacgaaggttcccataacccgtacttggagagcgtactttcaatacgttggaatgccgtatcgtcgtcttttgcccgaacgagacaaattatattttttatattcccttttatcttcttgaaggtgagcagttcacgtaagaaaaatgccccaagaaaaccggtcacacccgttagaaaaatggtgggactggcaagctctgcccagttttgaggtgcttcaggcaatggtttgatatctgctggaagttgcccatcgtatagccattccttaacttcatcatccagtataggaatcgtatttccttgtgaaataattttggcaagctgtcgaaggtttggtacttcgtaaagggtctgtaccataaaatgctagttgaattggcgagcaagttcaatcacaaggcgcgcggcttgcaaggaacttcctcctatctgaaagaaattatcatcaagggagatttcgctatgattcaggattttgctccagataagaaatactgcatactcggtatcattaaaacctgccgggcgctcctctgatggtgccggtttttccagcaaagccattaacttacgatggtctgcttttccgtgcggtgtcgtcggaatatcttcgatgacgaaaatacgaggcagcatatatgcaggaagatattcctccagttcgtgtataagccgttcttgatcgaatgtttccggtgagcgcggtacaacaaaagcggcaagaaaatcgtcttcaccttcgtgatctttatcttcgtgtttcacagcacaaactttggtcagacggacttctttactttccagaagacgaacttctatttcttccagctcgatacgatgaccacgtaattttacctgactgtccatacgaccagagtacataaagacaccatcgtcacgctgccagctgagatcgcccgtcttataaagccgtattggctggggatatccgggaatagaaacatgcacgaagcggtcagcattcagctcagcgcggttccagtaacctcgtgaaagcccctcaccaccgagatagagttgccccaaattgccgggtgccagaggtttcatattatcgtctaaaacaaatgcacaggtatggtttatgggactcccgataggaacactaccatctaccaaatcttccagtctgatatcgtgtgaaagcgcaaatatggtactttccgttgggccatatccattaataatatgctggggtggcgcgccggcttccagaaccagtttcaccgtatgagcattgagcgcttcagcccctatcacaagatagcgaatttcacggaatgcctgagggtatgtttttgctatcagattgaaaagtgttgccgcaacgaaaacaatagaaatttcttgattcgtcagttcagactgaaaatattctatgtccagcacatcttttttgggaggaatgaaagctgttgcaccgttgagcagtgttccccatacttcaaacaatgatatatcaaatgttgagttgcaggtacaggctatgcggtcttccggagtgatatttatatatcccgcatcgacaatcacccgcatgatgcctttactctcaacctgtacccctttaggtttaccggttgtaccagaggtaaaaagtacatgagttcgatgagttggggccagacaagcaatatcggtatcagctagctcctctcccgctgcaagtaaatcagaaaatgaaacgaatgtcgtttttaactgggaaaatttctctggagaatcggtaatcgtccacttcacagccagatcttccagcatatcgtttaagcgtgccggagggacattgggatcaagaggtacacagcttccaccagccatcagaatagcaatctggctcgtaatttgttctatgccaggaggcaacaagatggcaacaggcacttcatgggttattccgagagatcgcagcgagcctgcgattgtcgctgaatgcagcttaagagttcgataactgagttctttttcaggtgtgaaaatagcgattttttccggataattctggacctgttttaggaaatgagacaacatgcaaccccctacaaggcaatgggataattttattaattaattcgataacatgttaaaactatcactttgtgtgattattttaataatgaacgttgtctctttcgaatacaagcacctctacgatgctttatgcttttcatcctttttttgcgacgcatttcaaaaaattatattttttctaattaaaaaattaattgagaaaaatttatgaataattctctttttaagggataatttaacccgtaatcacaaatatcaaatactatacgaggttgattatgtctgttcccgcgtttggattaggtacttttcgtctgaaagatgatgttgttattgcatcagtaaaaaatgctattgaattggggtatcgggcgattgataccgcacagatttatgaaaatgaagcagcagtgggtcaggctattaaagaaagtggtgtagtccgtgaggatatctatatcacgactaaaatctggactgataatatgggcgcagagaaagtgataccgagcctcaaagaaagtctcgctaaattaggcacggattatgttgacctgacattaattcattggccgtcgccaaataatgccgttagtcttgaagaaaccatgagtgcgttactggaagcgaaaaaaatggggctgacacgcgaaattggcgtttcaaactttaccgttgctctgatgcaacaggctattgatgcggtaggtgccgaaaatatcgcaactaaccagattgaagtttccccctatttacaaaaccgttatgtaacaggctgggcgaacttgaactttatttctcagggtgataatgcaataaatcctttttccagcccatgaatttctaacccttccggcatagcctcaccgactgttatctggcgggaagttgcctgattttttaaatccgggcgccagcttacgctcaaattcccatcattgtcacgtgacagcgctttttcgggtatcactactccctgctcattgtgataaataacgatactgactttagcgctcataccgggcctgatgagataattcgtgtttatgggtgatgtcactttgatcacaacatcataataaactgctgttccgggctgatcgttgcctgagctttgcatagcgatagtttcaatttttccatacatagaatagccagaaaacccttcgccgctgattttaacaggtagcccttcttttagtttgacgagatccgcttcttcaacttgcgctaatacctgaaactgagttgtatccataatttccagcaaaggcatgccttctgtgacccgcacacctgtctgaattgcgaatgatttgcccttttctccctgctgtgccttaaggatgacaccagaaaatggcgcttttatttccttatgtgcgtattgttcctgtaacgcctgatagcggcttgtggtatttttaagttccatttctgccacttgtacatgactggcactgcctttttgtcgggtagatgtaagatcatccttcgctgaagcaagttccgtcagttgccgacgaagttgttgttcaaggttttcaacttccattctcgggacaattccccgtgaaaaaagcgcctgtgtttttgccaaattatttttaagctccattaccatgtggttagcgttctcgacgttccttctggcccggatgacttcctgactgttttcccagtcccgtaattctccaaccgcagatgaggctttaatcatttccacctgagcctgtcgaatttctatttcaatttttcgggtatcaagcgtgactaaggtctggtttggggaaaccttctgcccttctttaaccagaacctgttggataatcccctcaaatggcgcggggatagtttcaaggcgtccggactggagtttacctaccaagtccaatcgtttttctatcggagagggatttatagcaatccactgtacagcgtcttgagcgggaaatttttctgaggacaatcctcctgaagtgaataaagaccaaaaacagactataatcgccagcactcccatgatgacccaccgataacgcctaagcatggagtagttaaaaactgagtgtttattcattaatcgttatctcccagctttccagtgttgtacctagaatttgatccagttcagcctgagcattgaggtactggataagcgtattcaggcgggcattttccgcatttctcaggtcagtttcaaaactcagtacctgaaagttgctggatcttcccgcctgtaatttttccttttcgatttcaagtttttgttgcgaaagtgaactggcctttatagctagctgatattcctgccagcgtgattcagtatcacggatggcattcgttactctctgctccagattgattctggcctcttccagatgtaatgcctgcttctgaacatcaactctggcctgaacttccgtttgttgttttgtcatatccccgattgggatatccagttggataccgatataattttcccagtttcgggtgtcagcagaagaggaacgatactgggaggttctgccaaccagtgataaatcccagagttggttatctctggcctgcaataactgaatatcggcggtttttgcagaaagtagctgagtaagataacccggctgttgagcttgtgcctttttaattgattgctcaacatccagcctgacataagtccctttcagagtatctgttgcatggataggcgttttgaggctcagagccagtagcttcaggagtgtcagttttgccgcatgaacattattttcagcctcttttgctgagagttcctgcatcgccaaatcggcctgtgtctgtatgatatctgtctgagccattcggcctgcatcaatcaattccttattcgtctctaccagtttctgcatacgtttaagggaagcggcagacaaagcctgttgctcctgcgcccggagtaacgcgtgataggccagaataatttgtgtaatggactcggaaattgtcgattttaaattcagacggttagtttgttcccgaagttttgccagtaaaaccggtgcattattcacatctgttccggctcctcgtaaaagaggctgtatcatagtaatacttgcgccatcattgtgaaggctgcttattcctgacttattgtgctcacgcgcccatgacagcgtgaaacgtgtccccagaggtgtaagtaatgtggcgttaggagacaggctggttttgttgaaattctctgcctgatttttgcccgtaatataacgcccgctcagttgcaatttcggcgtaaaccggtcttctgctacacgtaaatcaaacttctgagcgatacggtccagataaacactgcgaatggcatagttattccgtaagcccagcgatattgcatcactcagcgacaggccgatgacttctcctgtatttttacgatccagactgtgatcagattcagaaactccggcttgagaaaaacagagacacagagtcagaacaccataaatgaaataatttttaatcatcacgtaatgcctgtacaggttccatttgtgaggctttatgagcgggataaaagccggagataagccccgctataacggcacttcctattcctaaagggatggatatcggagccagagaaaatgaccaaccggagtaaaggacaaaaaggaaggcaacgataatccccactaaagtaccaagtattgcgccggtaaaagtcaatacagccgcttcatacaaaaacaggcgtcggatatccagtgctcttgcccccaaagccatgcgtaaccctatttcctttcgtcgggcagaaacattcatcaacatcacattagaaatcgcaattccgcccgttagcagtgagataccagccaacccgatcaacataaaagtaaaggttttaccctgctccgtttgcccttgtaacaattgctgagcaacgcgaacgttaatttcaacctcgggaaacttattcttaaaaaacgcagacaaattttctgcatccgcttctgttgtcgaagttgtggctgaacgggtaatcagcccattcaactgagcatgttgtgatattttacgcatggtttcgagcggaatcacgacaacggaatccagagaaaaaggaaaaatagggttttgcccttttgtttcaaaaacaccaatcacggtatacagataattaccaagctgaatctgcttgccaagtatttgggatgtgtcttctcccacgagagaaacggcgacatcattgcccatcaccagataaggagaatgacgatcataatcggagataaatcgcccatgccgcagttgtaataacataacttcctcaagtgcagccgtggaacctatcagggtgaagtgttctgttttcccgttataacgcacaggtgaggagtaatagatccagggtgctgcggaagataaactcggaatagccgttttcagcgcgtctatcttaatggcttcactatcaatgccatgattgtaagaatagaaattggttgtgatcacattaatatccaacccgctgaacatcttcaacgctgcaagggtcgcgttatgccctgtattcagaaaggccacgacagatgcacaaccaatcgcaattccagacaaagcaagcagagagctttttcccgtagccattaaattacgccaggcttcccgccacatcataaatactgacatgccataatgactaggctgacttttatcatgcatgcattgtcgttcctctgatctcatgcaactgaccatcgctcatacgtaattcgcgctgcatatggttcgctaccatcgcatcatgggttattacaaccagagtcatcgcattgtcggtgtgaagagtggaaagtaacgataaaatttcttctgctgtttgcgggtccaaattaccggtaggttcatcagccagcagcaatgaaggctctccgaccaatgctctggcaagtgcgacacgctgccgttgcccgccagataagtctgccgggtaatgactttctctgtgtgaaagcccaaccaaacccaatttttctctggcaattttatgagcctgcgaagctgaaatgccccgataaagcagcggtaacgcgacattttctgtcgctgtcattccggctaataaatgaaaactctgaaatacaaagccgatttctttattgcgcattctggcccgcatatcagcgtctgctgatgacatatcaacgccacaaagaaaatattctccggaagtgggtttatccagcaaaccgagaatattcagtaaagtgcttttacccgaacctgacgtaccgacaatagcgcaactctgccctgcataaatttgtgctgtgatattgttcagaacggggacttggccttctccatcatgttgataaacacgtgttagcttttgcatattaataacaggtgatattgactccggagaatgaataaaatttattacagtgcccattgtttttataatatccctcatatcttaatgctaaaattaatatttattaggataggttttctatgaatatgctaatgaaataatggttaaataacaacaaaaaatgaactgagtgaatgttgttcaatttatctggctgaggatataatttatttaattccaatttgttaataataacattattatcataaattatgatagttgaaattacatttccaacctagaaagaaatatatgaccagtttataaattttaaaattgctatggcatctgatggtggtttaggatttatcgtgcattgttaaattcaacttgataaacaatatattaaaattgaaattattatgggagaatgtttatgttaaagaaattattaaaaattggatcattagcagtagtactagccggaggaataggaacggcatcagcaaacgatggagttcttaggccatgcccacatcaggaaataggacaaaatggctcgatttttaatagatatgttgttaatccgtacaataattttgctaacgtatttacgcaaatgcataatggcagaaccattacatggtattttcaagggcaaactagagcttgtttatacaacggaaacatagcttacgccgcctactatgaaggcagaaggtagtatggaataaatttatatctgcgaactatttattttatatttttctcagagcattatttttaaccccgttattttaatcggggtttttgcataatgatatctctcatgaaattatattcacagcctttcataaggctaaataatctcctgatataaaaacaatatatcatatataaattttgaaatggtaaaaccacctaatggtaatttacatttatcgagaactatcaatcataattttaaaaactattaaaggaaggtttttatgttgaagaaattcttcgtgggtggagcattagccgcggtgatgtcattaactggcggaatttcaactgcatcggcaagcagcatagatattccatggaataattgtcattcatctcctatagagtataaaaatggcgtatatactaaatacctagtaaaagatggaattgttttccttgatgtacgcaatgaagatggattcaaatggcatttgaaaggatttaaaaaattatacgtttgtggaatgaacgtttatgttggtaaatatgaaggtgtaaaatcataggtaagccctatcgttacagcactttagaatgctaataaacctcgttaatataacggggttttttgattttattatggataattatatttggttattttatttccaaattttatttgctattttttaatcaccccaatctcaaatttaatataaaaacatgcactgtttccaatttttgaaatagtaaactcctcttatggtgatttatatttatcgcatcttatcaaagaatatttggtaagtgataaatttaaataaaaagttattataatgttaaattggaggttttattatgtttaaaaaattattagtaggcggagcattggtagctggtcttgcattaactggcggaattgcaactgcatcagcagcaaataaagattttacctataacgactgttatagctcaggcagaacttatactggtacaaatggaacagtatatgttgtgtatgaagtgcgtaagaatcacatttttgaaagcgtattcacagatggaaaaattcagtatcatttgcaaggcataaagccggtagcatcacattgtggtaaaggctatgtaggttactatgaaggcaaagaaatataatatttccctaaaatcctctaataagaggcttttaaattaatgacattaagtattcagataattaattatctattttttgtaacacgtataatcgcttcttattccaactgtttcaaacgcatctgaatttcatcaatatacattctttttaatgttttaggttttatatcaatcagatgttgggaaaatccatttatatagtcaagcagataacccaattcttcctgatgataataaccagaaattagtgctccatcatcggttaatttgagggagatatgtgaaaatgatttgctatgataatggtcaataccggatctttttattgttatttcaaaataatgttgctgttgtttctgccttaattgttcaaaattagacagattgaaatctgttaaacgaatattttcgggaacaacggattgccctgctgttgggttaaatgactgaattgaatggcagcgtaacacacgtaaatcttgtgcttcataatcaaatacagctaaaaaccactttcctgactcaaaccatatcgcaatagggtaaagaaaaacctttttatcgcagtatattacttccagatttttctgttgaaaaatatgattgagtaacatatcaagatgtttaattggattgatctgtctgacagttcgcacccccagacatttgcgtaatttttcatcttttattttttcatcctgaggcaatacttgctttaatttttcagaaatactacgaaattgtagattaaaaggagtggattgcagaacatgcatacctgaaattgcaaataacattgcatgaatttcatccgcgctaaatctgactggtgctaaccggtaagttggagcaacaacgtacccgccatttctcccccgctcagaatataaaggaacgcccaattcttctaaagctgaaatgtaacgtaaagtactgctacgggataactgaaactcttgcatcagttcttttaaggtcactttctgccttccctgtaagaagagctgcatttgttgcaataacaatgttttcttcattgaaaatccttaaaaggtatcagaaagtgaagcttatatagcgcaggaggtgaatttgtccagataaaaataaatattaagagaggtattttttggttgaacatacattaagttttttcaaaaaactcaagaagcttaatgaatttatcgcatacatattcaaatccaaaaaatgccataacgattaacactacattataatagtgattactatcaccattgtatatcaatgataatgatgatttactgatgaaaaatattgcaagacataaactaaccatattcgcaatagctcttcttgtggattttttcatttttcggtatttaacctcattggtttattaaaatcaaaaatacaataactcaatcgngttgattatagattaaatatttttgcttccgaggcgctgcaaatagggagactatgtctcccatgtaaataattgagtatctatttaaaatttaattgttattttttctgtggtgaattactgaatttttccgcttcttctaacgttaggatgtgactgactccaaaaaaaatggcacctatcccccctataatatatcctactaaccggctattcagtatatggcgaatgattttcatttctttctccgaatgggataactcaacaaccaccgactaaagtcggtgggttagtgattaacggactgaaagtccggatacgcatcggctaaacgatgcgtcaattatccagcctgaagtgatcattcgggttcggttcaaaatgatgcgccagataggcctttatcatctcttccgttaactgacctaccgtcgcacaaaaatagcctctgccccaaaaatgctgaccccagtaacgctttttcaagtgagcaaactcttcaaacaacttacttgctgtccttccctttattcgcctcatgatttctgagggcgctaagctcggaggacaactcaccagtatatgtacatggtctttgctcacgaccccttctactatcctgatttcgaacgcttcacaggtctgacgaactaactctctcacccgtaaaccaacttcacctattagcactttgtgcctgtattttgttacccacacaaaatgatactcaatctgaaataccgtgtggctgccatatctgtaatccatattgcacctctcgtgcaacacagtatcgcagctaaagctgaccgactaaagtcggtggttttaaccttttatatggaaaactcaacaaccaccgactaaagtcggtgggttagtgattaacggactgaaagtccggatacgcatcggctaaacgatgcgtcaattatccagcctgaagtgatcattcgggttcggttcaaaatgatgcgccagataggcctttatcatctcttccgttaactgacctaccgtcgcacaaaaatagcctctgccccaaaaatgctgaccccagtaacgctttttcaagtgagcaaactcttcaaacaacttacttgctgtccttccctttattcgcctcatgatttctgagggcgctaagctcggaggacaactcaccagtatatgtacatggtctttgctcacgaccccttctactatcctgatttcgaacgcttcacaggtctgacgaactaactctctcacccgtaaaccaacttcacctgttagcactttgcgcctgtattttgttacccacacaaaatgatactcaatctgaaataccgtgtggctgccatatctgtaatccatattgcacctctcgtgcaacacagtatcgcagctaaagctgaccgactaaagtcggtggttttaaccttttatatggaaaaataaaaggatttaaaaaatgacaccaaaaaatacgacagaagaattattaatagaaattgctaacgacaatactctttcaaaagaaactcaacaaccaccgactaaagtcggtgggttagtgattaacggactgaaagtccggatacgcatcggctaaacgatgcgtcaattatccagcctgaagtgatcattcgggttcggttcaaaatgatgcgccagataggcctttatcatctcttccgttaactgacctaccgtcgcacaaaaatagcctctgccccaaaaatgctgaccccagtaacgctttttcaagtgagcaaactcttcaaacaacttacttgctgtccttccctttattcgcctcatgatttctgagggcgctaagctcggaggacaactcaccagtatatgtacatggtctttgctcacgaccccttctactatcctgatttcgaacgcttcacaggtctgacgaactaactctctcacccgtaaaccaacttcacctgttagcactttgcgcctgtattttgttacccacacaaaatgatactcaatctgaaataccgtgtggctgccatatctgtaatccatattgcacctctcgtgcaacacagtatcgcagctaaagctgaccgactaaagtcggtggttttaaccttttatatggaaaaatgaacaaatccgtcagggcaaaaccccggataactggacagtaaacaaacgatgccagaaagacaccgaggcaacctggacgaaaaagcacggtaagcgttattttggctataaacttacccttaatgtcgatacaaaatataaagtgatccgccacatcgcgacaggaaccgcggctgtccatgatagccagttttttgaagctgttttggacaggtcaaatacccgtcgggacatttatgcggataaagggtatgccagccagaagcgtgaacgtgtgctgaaggagcagggctatcgtgtgcatattcagagaaaagcggcacgtaataagcccttatcacactgccaaaaaggccgaaataagaaaatagcgaaaactcgggcacgcgtagaacatatctttggctcactctctcagatgggtgaaaaaattattcggacgataggccagctgcgagccaattttgcgatgacgatgaaggcaacctgctatgatttgcaacgtttggtttatttcggaaaatcgggtattcatgctttttaatttcgagatgtgatgaaaaagtgatgcgtttgtttttttcccctgaacaagcaagaaaaagtcatacacaataaggtcagttattggtgagttcaaaattgatcttattttttgtattgagagtttttagaggttcccataaggtaagtcgtcaagttcagaaacatcgattggcatcccacagtcgcgaccatgataaataatatcaaagcatggtgtagtaagttcatcttgtttgaatgtgtgctcacttcttaatgttgtttcccacttatgaccgtcatttctttgttcattttcgtctgcataaatattttttaagttaaaaagcgggaatgttaagccttttgtcgtatcagatatccccttcctcatagtaatttctaaaccacttcgagtgtaatttaatgggtgttctgcgtccactgggctagaaaagcaaaatgttgctcgaagattgacacaacctgtagttggttcatctggataaggaatgaatgctcgcatatgttgagaaggtttgagcacaccttgataaatgacttttacttcattatcgtcacaataaataacatctgaaatattatgcggaaatctaccccagccaacttctgaacgttcatgagtgctgttttcagcatgatgaattaaaagagctttagcagttagaggtgtaatattatattgtaaagatgaacttaaagcgattgcttgtcttaatgctagtggagcagcaaagctagtgcctgcggtacttgccaatccattattcatggggctgaataccttgaaaggttcttctgaatttccgccaaaagcaacaccatctggtttcacgaatccaggacttctaccggggccaatacagctataatggcacctttcccagttttctgaaagagatgttgctgcacctacagataaaccattgaccaaatcggcaggtggttgaatcctattaagacctgctggcaaatggccatcatttccaacagcaactgtgcataaagtattccctgctgagagggcttcctcaagtgttgaagtccagacatgaacatcatcatcatcaacaggtagcctcggccccaagcttaaattaatataatcgtagtgttgtgtgccaagcacactctttattctgattagcacatcaaaaaggtcaatgtcggcattatttatgttcgaatctaagactctgtaatgatcaatattacagtaaggaacatttagttttacagcacctgaatccataacgccaaagagaagcgtagaggtcacatcttgtccatgtgagagaagttgggcacttgtttttccatctttgttaaaggtgtactcagttacccactgactaaaatcatcaatacttattcctccgtcaaatattgctacctttaaatttggattgattgctccttctgatggtaatttaaaactagaaggggaattcacagaacgtctaattactggctcactaactcttaactctggaagatctctaagcgtccttaaaaaagaaaattttgctatttcataagccgtttttttattggctttaataggcataaaggtcaatcctttgacttttatgcatctttctttatcaacggaggcaccttgttgtaaagcaaatataataaaagagtcaactatagctgaattttcatctggggtatgtaaggctacttcaatacttctttcatcatcaccttttaaagacttaattttatcggaggggttaaacattgaaacactttcaagtgtgatgaaatcatctttttggcttttatttaaagtatcatcgtttaatgcacgcaaaaacgattgaaaattttcagttttccctgaaacgtagatacaagccgttgtatactcatcttttctaccttttttctttatgtctttacgaggcttaattctgacagatttactacctacacttgtaagagagaatttgttaaataatcctaccggaaaataacttttagctagaaaagctggatgaagcacgaattttgctactgctttaccatctggtagtgcggaggctggtacgttttcaatttcactgattagtgatgctaattcattcattattactagcttattttcattatagctatagggtttatttttccctccaccacctttttttatttttacattacccgtcagtgtttctccgtaacccaaaagcatattcttatcattcattaccttcatcctctattttaatgatttttctaatttgcgatcttggtattcctaagtctgacgatatttttctttgggaaacaccctcatcaagcatcgtttttatgacattttccaatgctgtgttgttcagtaattcatcaattagagctgagcttaaaggtatctgctctataatagaattccgcttcgcttgattgatggatttttcaatcacagcataagatatttcacctaatcttgatgaaatatagtgcgctaaactttctgcaatttctttcgatataagataacgttgaattaaatcattagtaggatattcaaagtttataactctatcaaatcttctccatgcagcagtatccaaaagttcagaatgattagttgctgctatgagaatagatgtgttgggccattcatcgatagattgtaaaagaacggtaacaagtcttttaagttcaccgacatctgtagcgtcatctctttttttggcaatggcatcgaactcgtcaagtagtaatatacatggaaaagatgaggcgtagttaagtacggatcttatgttatttcctgtcttaccaagatagctgctcatcacactagcaagatcaagagtcaataagggcatatttagtttgctggctaaccattttgcagccaaagttttacctactccaggaggcccgcccattaaaagggagcgggacggatgtaggccctctttgtgcaagagctctttcatttcccattcgattacaaaacgatttagagctaacgatgtgcttgttggccaaacaggttcaacatctagaattacaggatatgtttcaactaacaatttttgccttgtatctgcatctacgggggttgctctaggggtaatcggttgagctctttctacagcatatgctccactagtttgcataagtaggctttctaattttgttgctaattctggtgactcttttttgagcttttttgtcaccatgcgtagtcgcatgacaagactgtctcgtttgccagacagagcatcactgacgacgtcaatgaatatatcattagttaagttaatcactctaccacctcatgataaaattaaaccaattttttggtaatgatacaccaataacgatgtaattagttagaaaaaacataaatccatgcattattagcccagatttaaatatttttgtaccacctttgagtttgctagtatttttgattttagtttgaacagctagcatctaaatgttgtatgcttcatcacccttaccgatctttgcctactaaatgcggtgttttttgcgaatcagttaagaaagtactaatagttcccaatattagggggatgactctttatttatcgcatggtttggtgtgaagaatagatatagtttttattgttcaaactacccgtttcttgttgccataactgaaaaaaacgtctagtttgaattggtttactcgccatcatagatggccatatagctgtaatggcaacaaaaactcccgtagcctgaaagggagagcaagaattgtggtacatctgcacacctttggaagcagatattgtcagacacctaaaccaccgtctggcgatgaaggtttcttaaacgaaaaaatacacccaaaaggtgtttttatattgccaatcaagtgtagtgaacattagatcatgcacttatctttcatatcaacacaaagcatattttcctttatcttcaataaataacaggatggatttcgtacatccgattcatacttctcactatctctgtttgaattattcatcagataaattttttacacctaaacatttaactcattactaccatttgacacttaaccttgcggtgttttgctgtgcccgcgagcattccaacgctcgcacagcttttactgactgtttacggaactcaaggcgtcacttttcgcaggtttaccgctgaaagtgacgccgcagcaaaagagcaacacaaccctgacaggctttggcctaattaaccacacagtgaatctgacactgtattttattgattgaaaaagtatcaaaaggagaacttgacgatatcgaggctggcttttagccggtggggatgacctgttaatacaggcggcagtactgtgtactcaaccgataccccgcaatacctcaacttgcgttcactctggcgcacagatatccgtcaagggcaaagcaggcatgttctgttttgtccgaactgtcgcgcgccagagatcgtatgttgtcaggtataaataaggaaatcgatgagctgattgattaaagaattaccgcgttcataaaactgatctttatgtggagcaagtttatagccgttaaacttagtcgttcggttattgagtccaataatacaatcagttaaagtattcccgccattggctcaatccaatggtcaaggtttagcagccttgtcactcatagacactggcagaaattttgccagtgtgcctgttatcgccttttcaatggtggttcaggcgggggagacgtaagtctcgctggtatgagtgccagtctgctaaccctgtctgaatcgccaccatcaatattaattaatggaaggggtagcaggaatgaataacaacattagaactgactggcatcaggccgatattattgctgcattacgtaaacgtggtacaaccttagcggctgtttctcgtgaagcaggacttagttcatcaacattagcaaatgcactcagtaggcaatggcctaaaggagagtggataattgctaactatcttggcatccatccttcagaaatctggcctagccgttattttgataagcagggtcgattgattgaacgtaaggttcgagacaaaccacaggaataacccgcttcaacgtgtgatctactttgtgaaaatgataaatttttatacaaagccctgagagtgagatgataaactaatttaaacctcatggctttttaactttactcttataccaatatatcaagtagttcataaagtatattaaaatcaaatacatggacaagtaaaaggagtaaacttaactaccacctactgaagtaggtgggttagcgcacttcggtgctgacgactgaaagtcgtcgaaccacgcacctcgtaaacgcgcgtaggtcaaaacattaaagtcaaagtcaccgtctaaagacggtggttttaacctgtcatatggaaaaataaatatggggcacaaaatggggcattttgaaaacgtctttttagtaatttatttaatttcaattaattatatctatttgcgagtccggccttcgcaccatcggaacatcaatagacgtcaacggacgtctttttttgtgcctgaaatccagtatacgcaaggctttcctcgctttttcactcaacctaaatcaacctgattcaatctacatcaacttactgatgtgggtacaactgcgggtatatcgcggttcgataatgtttgtacccacacagaacctttgaaaggatactcaacatggctctgagtgatgtgaaagttcgttcggctaagcccgaagcaaaagcctataagctgactgacggtgaaggcatggttttgctggttcaccctaacggttctaaatactggcggctacgttatcgctttggtggtaaagagaagatgctggcgctggggaaatacccactgtgccactgccggacttcgtcatgagccagaccgcactcgccttttgtttcctcaaaaccgctttcgatttcccagcgatgtccggccacctgaatcaacatcttaagatcggcctgctctttaaagggcatagacaacatagtaggccagttcctgcttctcatcccggttacgccggatcagcagataatggccataacgccgttcctcttcactcacttgcaagcgccagagcgggatccgagcccagtcataccaacgttcgcctttagttcccagcccggctgactgtttttcccagtcgtcagcggtcagactggctgcaatggtgtctgctcgggtgtagtgcggtgtttgccaccagaggcgctcatttttggggatcgctaagacaaacggttggtgctgagattccagccagcatcgcaagcgacgatcctgtccatagaccgcatcagcggtgacccagcgacaggggatattggccttgaatgcccgcgccagcatgttctgggcgagctggggtttcgtggcaaaactgaccgagtcagaaatgccggcggcgtcacagcggaggcgatcctctgtccactgtttaggcagatataaagctcggtcaatgaaggtatgaccgccgttgccggcgtaacacaggaaaacccctatctgactattttcaatccgtcccgccgttccactatactgacgctgcacgccggcagaatgcgtcccttttttgataaaaccggtttcatcgataataaggatatcttgctcatcccccaaatatgcggtgacataatcacgtaagatatcgcgggcggcttcagcatcccagtgagcccgttccagaaaatattgaatgccatccggtgagtgttcacccaaccattcagccagttgccagccgtttttacgttcaacatcgctgagtaacccacgaagatacgccagacaacgttgctgagaacttgcagagcaaaatagtgggatcagacgggaatgagccagcagaagctcctgacaggtgaggccatagggcacctcccttaggatgaggaagaaagaagatagctatcatgacacaatgcaggctacgactgtagtactagacggtaacgtttaaacgaaaatggcgattacacaaaatattaaacaaggtcatacagcttgaaatctaccaaatgcataggctaattatctattctgaataaatgtctaatcttatcgactgttactacccctttccgtatagtgtccgcaattttcatactacttgcctgtaaggtgacttaatgaatatcagcttgattgctgcaatggcgatggatcgcgttattggtctggacaatgctatgccgtggactattccgggtgatttagcctggtttaagcgtaatacactcggaaagccggttgtgatgggaagagtaacctatgaatcgattggtcgccctttaccgggacgcctgaacattatcatcagccgtcagccaggcagcgatgatcgtgtaacctgggtcagttctatcgaagaagctctggctgcggcaggtgatgtcgaagaaatcatggtgataggcggcggtaaaatttatgaacaatttattcctctggccagtcgcatgtatctgactcatattgacgccgaagtgatcggggatacccattttcctgattatgaacccgatgagtggagttcggttttcactgaatatcacgatgctgatgagcgcaattcacacggctactgttttgaaattctggaaagacggcagtaattatttttctctgtcagatacgagaaatggagtgtctgacgaccctccattaaaaattacgaatctgaatcatctgactgagtagcaaatgcaggctgactgaaatactgtttatcttcccaacgtaaaagcgtcagattgccaccccagcaacagcctgtatccaaagcataaatatcagcaggcgttcctcgtccttccagtgctgcccagtgaccaaatgcaatggaataatcttcaggaatttttcgcgggagttcaaaccagggttttagtggcgcgggagcattttcgggcttggatttgcaaatcatatccaattgaccattcgggaaacagtaacgcattcgtgtcagtacgttggtgctataacgcagtcgtgacagtccgcttaattttggtgaccagctattgggcatatcaccatacatcgcattgagaaacaggggataactgtcactgcgtaggattgcttccacttcgtcggcacatattctggctgtttccagatcccattgtggagtcagtcctgcatgagccatgaccagtttcagttcatcatcgatctgtaataccggttgttttctcagccaattaatcagctcatcgacatcaggagcagtaagcaactcatccaactggtctttaggtttattacggctgattttgttatacacagccagtaaatgcaggtcatgattacccagaaccagcctgacggcggaccccagttgcttaacatagcgcagaaccgccagagaatcagggccgcgggcgactaaatcacctgtcagccacaatgtatctctgtcgggatcaaaatcaacctgttgtaagagtgcaaccagctcgcggtagcagccgtgaatatcgccgataaggtatgtagccatagttaatttatcagtgttgggatagccagtcggaataccggaatagtaacccggaatggattgccaagatgatcaatcatctcataatggccttccattgttcccaaaggtgtttccagaacagccccgctactgtagcgatattccgttccgggcgggatcactggctgctctcccaccacgccttcgccatgaacttctgtctgatggccgttactgttggttatacgccagtaacggctgatgagttgcacgggggaatgcccaagattacgaattaatattgtgtaagaaaacacaaaacgtagccggtccggttctgactggctttctacgtaagcgctttgaacttgaatatgaactcttggttcgttgagcataaatgcctccttttactgcaacgtatgtccgttatcagacagtttcagattgagacgataaccagtttgccattttacagtattgctcgactgaaatattttcagcacgtgtacccggatcaacacccaaatcagagagttgttcaggagaaaataggtcacttaggctattgcggatagttttgcgacgttgattaaatgcttgtgtcgtgatccttgccagcatgcggatatcctgcacaggatgaggtatcgacttataaggcatggccttatgaggaattaatcgcacgatagctgaatcgactttcggtgccggggtaaacgcggtcggcggtacttccagtactggcataacatggcaataatattgcgccattacactcaaacgcccgtaggctttactgcccggcccggctacaagacgattgacgacttctttctgcaacataaagttcatatcagcgacagcatcggtgaagctgaacagatgaaacattaatggtgtagagatgttatacggcagattaccgaacacacgcagaggttgccccagttctttggcgatctcaccaaaatcaacggtcatggcatcctgctgaataatagtcagcttatctttcagtttcgggtggacctgcaagcgagcggccaaatcacggtcaagttcgacgaccgtcattttatccagacgcgctgcaacgggttcggtcagtgctgccagacccggcccgatttccaccatagcctgcccaggctgtgggttcatagcatcaactatgctatcaatgacatactggtcggttaagaaattttgcccgaagcgtttacgggcatggtgcccttggtggactttattattcattactgttttgtatcattttaattgcgagattcaatgcggtgataaaacttcccacatcagcttgacctgtccctgccagctccagtgcggtgccatgatcgacagaggttcggatgaatggcagccccagagtgatattcaccgctctgccaaaaccctgatattttagcacgggcagcccctgatcgtgatacatagaaagcaccgcatcagcattatccagatattttggctgaaacagagtatcagctgctaatggcccttccagccagataccttcggctctgaggctttccagtgccggaataatcacatctatctcttcacgccccatatggccgttctcacctgcatgagggttaagaccacagacatagatatgagggcacgggatgccaaatttggttttcaggtcatgattaagaatagtgaccacttcccgcagagaatcaaaagttatcgctttgggaacatccagaatcggtaaatgggttgttgccagagcgacccgtaattcttctgttgccagcatcataacaacacgtgaacactggctattgtcagcaaaaaactcagtatggccggtgaaggcgatcccggcatcattgataacccctttatgtacagggcctgttaccagtgccgaaaactcacctcttaaacaaccatcgcaggctttagccagagtttctgttacataagtaccattctcccggtttaattcacccgcgacagccggagtatggagagagacggggagaatgctcagtgttccggcggcctgtgagccagataaatgttccggggagtaaggttgcaattgcaggggcaggttcagttgccgtgcacgggagagcaagagttcaggatcagcacagacaactaattggacgggccactcagattgggcgagggcaatgactaaatccgggccaaccccggctggttcgccgggggtgataatgatgggtttattttgcatcgttgccatctaaaattttcacataagcagaggcgcgtaattcctgcatccaggtttgcgcttcttcattaaatttacgggtaaacagcagcttgtaggcacgatctttctgtgctgcatcggttttgtcgactttgcgggtatcaagcaactgaatcagatgccatccgaaagcggagtgaataggctggctgatttcgccttttttcagtttaaccagagcatcacggaaagcaggatcataagcacttggcacattccagcccagttcaccgccacgcatggcagagcccggatcttcagaatactcttttgctgcttgctcgaatgtcgttttaccacttaaaatttcttcccggagctgtcttaatttgtcgcgggcctgatcatcagtcatcactggtgatgcttttagcagaatatggcgggcattgacttcggtgactgcaacaggcgcattaccgccacggatatcattcactttcaggatatggaagccgacaccggaacggattgggccgataacctgccctttctgagccgactgaagctgttcagcaaataatgatggcagttcctgtaaccggttccagcccatgttgccgccttttaaggcttgtgtatcgctggaataagcaattgccagtttcccaaaatccccgccttttttaagatcagacaaaatcttgtttacggtaacttctgctttctcgacctgagcgtgggttgggttctcaggcagagggatcaaaatctgactaacattcagttcagtattctgatcattatggctactgagttgattaactaaagaatcaacttcttgtggcagaatagaaatgcgacgacggacttcgttgttacgcacttcagcaatcagcatttctttgcggatttgattacgataggtatcgaaactcataccctcagcagccagactttgcttcatctgagcaaggctcatatggttctgtgccgcaatgttttcaatggttgagtccacatccgcatcaggaatagtaagctgcatctgctttgccatttgcaggacgatgtcatccataatcagacgctcaagaatttggtggcgcaatgttttttcatccggaatctgctgaccagacagtcttgcgttattcttaacggactctaagaggttgttgacgtcactttccagcacaacatcattattaacaatggcagcgaccttattgatttcctgtggtgctgctatggcagtgttcattgcaaacatcaacccgagaatgagcgttctccagttcttcatatgtttcccatcatatcaatcccgccttaccgcggggttattgtgtttacattttgtttattggtatcagaaggaacgctgataaggcaaaatactttgctgaagcatcttctggctacccaaactatgattgttacttaagccacggagttcaatattgagtgaccatttattatcatattcactctggttgtccttccagctgactatcttacgctcgtaaccgacattcacagcccaacagcaggtactatactgcataccgagcattttactggcgggttgtttctctttggtatcgtagtaatacgcgccgacgaccgcccagcgatcagtcaacggccagcttcctatcacaccaacctgagaaataccctgctggtatgcaggagggtttttcagggtagcccgaatatagtcacgattaacaaagcgataattcagttgtatcaggcggtcagcatcacggcggtattccacgactgaattccccatcgaaacctggctcagacgggtatcatactgcaccccacctttgaagccccaggatgagttgatgttccattcaacatcactggcccaggttgtagaacccgttcttctgttattactggcatcaataggactctgtgtctgcccgtcagaattcacatccttaacgcgtggtgcctcaaagtaataaatttgacctatagagaaactaaaacgttcaactaaatcttcatcataaatacgggtggtgataccactcgtgaactggttggctgatgaaatacgatccagaccactgtagaaccgatcacggaacaagccggtataattggtgtgaagcagggaggaatcgtagtcataaatattattctggttcctataaggaacataaaggtactgaacccgaggttccaatgtctgcgtaaaaccgggcttaaagtacatggcacgttcaaataccatttgtgcatctgatttaaactgtggcaaaacgcgattaactgatttctccaaatcagaggtcttttgcgccgcaggaatatcttgttggtagtgggttgccatcaacttaacttcattgttgagacttgcccagccattggagagcggcaggttaatggaaggctctacatgccagcgggttgcattcggctgctccttaccaacgctggtaaatttggcaaattgcgcataggtacggaaatcaaatggccccagatcatttttatagtaattcagatctagctgaggggtagcacggtatgctttcgtgtcaccgttgactttagcggtaaagatctggaattgtttggtggttaacgttgcattccagttctgctgggcatagccgatactgaatttttgcgtggcataaccatcagtgctggtgccgtactgagagctgaaatcagtaaaatagtcgggatcactgactttggtataatcagcactgaaacgccagacctgattcatcactccaccgtggttcaggtagaataaccatcggctattgctgctccgttccctattccgctcaattttatcatcttcatatacgcgatcattattaatccagtccagtgctacggtgcctgaaccagctttcgttaagtaacggaactcgttatcgagcttcagaccgcgtttgctgatcaagtgtggtgtgatggtcgcatcgtagttggcagcaatattccagtaataaggcagaatgaactggataccatctttattggaaaaactggcattagggatcaaaaaaccagagcggcgtctatcgccaatcggtagttgcaggtagggagtataaaatacgggaacatttgcgaccctgaaacgggcgttccaaatctcagccacttcttcctgacgatccagaatgacttctgaaccgataacactccagctatcgttacccggcagacaggaagtaaacacgccattatctaaaatggtatagcgattctcaccgcgcagcatcattttatttgcgctaccgcgtccctgacgacctaccatctggtacttcccttgttccacatcggtatctattgtggttaagttagcccaggcgcgtggccctttcagaattatctgaggatcatcatatctgacattcccggcagcatggagagtccgcaccgggtctttagcttcagtctgctcgaatctgactctgtcggcagtcagtgttttatttccttgttggatatcgacattaccgacaaactttacagaagtaggggattccccatgtgggtcctcagactgaattttaatcggcagtgtggtggatccccggtaatactttagag

SEQ ID NO: 3556 - DNA, 38706 bp, Xenorhabdus sp.; identical to SEQ ID NO: 3555
  CDS (30053)..(30235)
  unsure (1)..(38706): unsure at all n locations

SEQ ID NO: 3557 - DNA, 38706 bp, Xenorhabdus sp.; identical to SEQ ID NO: 3555
  CDS (29140)..(29406)
  unsure (1)..(38706): unsure at all n locations

SEQ ID NO: 3558 - DNA, 38706 bp, Xenorhabdus sp.; identical to SEQ ID NO: 3555
  CDS (23773)..(24324)
  unsure (1)..(38706): unsure at all n locations

SEQ ID NO: 3559 - DNA, 38706 bp, Xenorhabdus sp.; identical to SEQ ID NO: 3555
  CDS (20126)..(20257)
  unsure (1)..(38706): unsure at all n locations

SEQ ID NO: 3560 - DNA, 38706 bp, Xenorhabdus sp.; identical to SEQ ID NO: 3555
  CDS (13308)..(13868)
  unsure (1)..(38706): unsure at all n locations

SEQ ID NO: 3561 - DNA, 38706 bp, Xenorhabdus sp.; identical to SEQ ID NO: 3555
  CDS (9810)..(9932)
  unsure (1)..(38706): unsure at all n locations

SEQ ID NO: 3562 - DNA, 38706 bp, Xenorhabdus sp.; identical to SEQ ID NO: 3555
  CDS (6152)..(7261)
  unsure (1)..(38706): unsure at all n locations

SEQ ID NO: 3563 - DNA, 38706 bp, Xenorhabdus sp.; identical to SEQ ID NO: 3555
  CDS (5228)..(6130)
  unsure (1)..(38706): unsure at all n locations

SEQ ID NO: 3564 - DNA, 38706 bp, Xenorhabdus sp.; identical to SEQ ID NO: 3555
  CDS (1833)..(3461)
  unsure (1)..(38706): unsure at all n locations

SEQ ID NO: 3565 - DNA, 38706 bp, Xenorhabdus sp.; identical to SEQ ID NO: 3555
  CDS (1079)..(1813)
  unsure (1)..(38706): unsure at all n locations

SEQ ID NO: 3566 - DNA, 20653 bp, Xenorhabdus sp.; identical to SEQ ID NO: 278
  CDS (4847)..(5083)

SEQ ID NO: 3567 - DNA, 20653 bp, Xenorhabdus sp.; identical to SEQ ID NO: 278
  CDS (5564)..(6406)

SEQ ID NO: 3568 - DNA, 20653 bp, Xenorhabdus sp.; identical to SEQ ID NO: 278
  CDS (8248)..(9498)

SEQ ID NO: 3569 - DNA, 20653 bp, Xenorhabdus sp.
  CDS (15610)..(16734)
tggtgtattcaacgtcgtacaaggggataaggaagccgttgatgtcttgctgactgatccgcatgttcaggctgtcagttttgtgggttcaacaccggttgccgagtatgtttatgcaacggcatcatcacatggtaagcgttgtcaggcgctgggtggcgctaagaaccacagcattcttatgccggatgctgatttggatatggcggtaaatgccattataggggccgcctttggtgccgcaggagaacgctgtatggcactgtctgttgttctggccgtaggggatgaaatagcggatgagctggtaacaaaacttcggcagcaaattgacagaatggttgttggtgcagggatcagcgaggggcgggaaaacgatatggggccggtcatttctgaacaacacaggtcaaaaatctgtgattacattaacagtggtgtggagcagggagcaaagctgctggtggatgggcgagggtatcaggtcacaggccatgagaagggttatttcgtggggccaactttgtttgattatgtcaccccagagatgaaaatttataaagaagagatctttgggcctgtactgtccattgtgcgcgtacctgattatcacaccgcactgaaattgattaaccatcatgaatacggtaatggcgctgctatttttacccgtgatggtgaaactgcccgtcagttcagtgaagatgtacaggctggtatggttggcatcaatatccctattcctgttcctatggcattccatagttttgggggctggaaacgttctattttcggtccgctgaatgtacatggcaatgatggtgtacgtttttatacccgtatgaaaacagtcacgagccgttggcctgccagcgttcgtctggaacaccatagcagtagctttgttatgccaacgatggagtaatcctatgaataccaagcccataaatactggttctgtaaatatcagatccatgaaagcatcggcaacatcttctcaggcaaagcaccctcaaaaaatgactatggctcaggctttggtcaggtttctcaatcagcagtatatcaacgttgatggagaggaattaccctttgtctgtggtgttttcaccatatttggtcacggtaatgttgtggggttggggcaagctctggaacaggagccggggcatcttcagatctatcaggggtgcaatgaacagggaatggcacatatagccaccggcttttcccggcagaaaaaacggcgacagatttttgctgttacttcctctgtcgggccgggcgctgccaatatggttacagccgcagctacagcgacggctaaccgtatcccactgctgttattaccgggagatacctttgcatgccgccagccagatccggttttacagcaggttgaacagtattgggatggcactatcagtaccaacgattgtttccggcctgtttctcgctactgggatcgcatttccagacctgaacaattaatggcagcgatgattcaggccatgcgggtactgactgatccggcggatactggtgcagtgactatctgcttgccacaggatgtacagggagaagtctgggattaccctgattacttcttccagaaacgggtacatcatcttgaacgccggcttgcctccttatcccgtattcaggatgcggtagagctgataaaacgtaagaaaaagccattactgatttgcgggggaggagtacgttactccggcgcacatgaagctttccgccagtttgcagaaacttttaatatcccatttgcagaaacacaggcaggaaaaagcgccattgttgcggcacatccgttgaattgcggtggaatcggtacaacggggtgtctggcggctaatttgctggctaaggatgcggacttaatcattggtatcggtacgcgttttactgattttacgacagcatccaaatctctgttccaaaatccacaagctgaatttcttaccattaacgtggcagaatttgatgcctacaaactggatgctgtcgcagtgattgctgatgcaagagaagggttatctgcgataattcaggcattagcaaaaacgggatggcattccggttggcaacaggaggttgctcaggctaaatcagtctggcaggaggaactgtcacggctattttctatccagtatcaggccggagacaggccagaaattgcagatcatctggatgagaaattaaatgaatacagtgacacattgcagactactctggcacagacgcgtgtactcgggctgatggatcagtatctggaagataacgccattattgttggtgcagccggttctttgccgggggatttacaacgcctgtggcaacccaaagagccggatacctatcaccttgaatatggctattcctgtatgggatatgaaattgccgcagcactgggggcaaaaattgcctgccctaaccagccagtttacgcaatggtgggggatgggtcttatatgatgttacacagtgagctacaaacggcgattcaggaaaacatcaaaattatcgtgttgttatttgataatgcggggtttggctgcatcaataacttacagatgagtcaaggcatgggtagttttgtgacagaaaatcgttatcgcaatcaacaaagcggtcggttggatggcgcactggttccggtggattttgccaaaaatgcagaaagttacggctgcaaaagttatcgggtgcataatgaacaacaattgattactgctttgcaggacgcccgtaaacaaccatgtgccactctgattgatattaaagtgctgccgaaaactatgacccacgattatgaatcatggtggagaacaggaacagctcaggttgcagataacccggcgattaccactgcagctgaaaatatcaggcggtatgtggagaaatatactcggcagtactagtattcttatatactgtttcatgtctttcatctggccgtgaaattgctctttttatataaggcgtggaatatttatttcatgccaaactccttctttatctcttcactacaattgtaatttcaatgcgttcaacttttctgtagttgagtgctttacttttattattgcatgattttaatggatttttattaattcattcagatctgatagcttatttttcgtgatagatataacactaattacatcattttcatctcaaaatgctaaccgcctctaaaaaataaaatttccaatgtttgttaaattgaaataaatattttggttgatatatttttattcaaacccaaagcaaatatacccgatggatttcagaagatgtctcataaacgaagtaatctgaaagacgacggggatacagaggtatcaaggagcattcatgtttaatattgcattatttggtgctggcagaattggtctggtgcatgcggttagcattgccagtcataaagaaacctgcctctactctgtcgttgatccttatcaggtaaatgctgaaacactggcacagaaatatcaggtcaaaatacaaacaactgaagaagcaatgtctgatccggaggttcatggtgtacttattgcttcagcaacagatacgcatgctgatttaatcgaacaggctgcccgcaataataaaatgattttctgtgagaagccggtccaccttgagcttgaacgggtgcagcaatgccttgctgtggtaaaagagtgccaggttcctctgtttgtcggctttaatcgtcgctatgaccctcagttccgtcagatgaaaaatctgtttcatgcaggaaaaatcggtaaggcagaatccctgatgatcacatcccgtgatcctgccccgccacccgctgaatatatccgggtttccggtggtatgtttcgggatatgacgattcatgattttgacatggcccgttttattatcggagaagagccatgtgctatttatgcacaaggcagcaatctggttgatcctgccattggctcagcgggtgatattgatactgcgtttattgtgatgaaatttccttccggcgctatggtgagcatcgctaacagccgccgttcggggtatggctatgaccagcgtcttgaactgcatggtgaaaaaggtttactgacagccggtaatattaaggaaaatagtgtggagttatggggagataacgggtgtctttccgctaaacccgaacattttttcctgcaacgttatcgtgaagcatatatcgcggaatgggatcattttgtcgatgttatggctggcagagctactccagaaacaaccggttttgatggtgaacaggcattataccttgctgataaggcgctggaatccctgttgtccggtaaagaaatcaaattatagatcatagaaaaacaggggaacattacatgtcagcttttctttcttttattggttttaccctgctggtggcagggattgcttattataaaacaaggaataaacatttaattgattccactgaaggttattttctaggtgggcgctctctgaccggagtttatatcggcagctcaatgttattaatgaatttgtctacagaacatctggttggtttaaatggactggcattcagaacgggatttattgttatggcatgggaagttatagcagccttaactattgtactgtttgccatttacttcctgcctaaatatttaaaattgggaatatcaacaattccagaatatttagaacggcgatttgacaaaaatactttactgattacctctgttttatttctggctatgtatgttatttcgttattgcctatcgtgttatataccggagctattgcactggaaagtttatttcaggtttctcaggtattcaatgtcgataaaaccactgcattatggattatggtctggggggtcggcgggctgggtgccatttacgctatttttggcgggattaaagcgattgctgtagctgataccatcaatggtatcgggttaattatcggcggaggcatcgttacgattttcgccttactgtatgtcggggatggcagtgtctggcaagggctaactgatgtttatcaggcgcaccctgataaatttaactctattggtagtgaagattcacttgttccattttcaaccctgtttaccggattaattatttccaatatgttcttctggtgcaccaaccaatctattgtacaaaaatcattgggtgcgaagaatctggcggaagggcaaaaaggggtcatgttatgcgctgtattaaaattgcttattccttccatcattattttaccgggtgttattgcattccatatttttaatgggcaaatagataacccggataatgcctaccccgcattagtacaattagttttgcctaaaattctggttggcttttttgctgcggtagttgttggggctgtattctctacattcagtggtggcctgaactcctccgttactttatttactgtcaatatttacaaacagagaattaacccgaatgccagtgaagctcgaagtgtagctgtaggaaaatatttgggtattgctctggcgttggtaaccatgctgatcgctccgctcgttgcaaatgcacccgatggtttgttttacctgatccagcaattacaggggatttttaatgctcctattctcagtgttgtgctggtcgggctgatgacaaaacgagttcccccgattgcggcaaaactggggctgttatttggtatgtcagcatatattgtttgtaactttattttgcatattgatatccatttcttccatctggtcggcatcttatttgtgctgaatgtcatttttatgctgacagtcggttatttcttccctgctgaaagttatgaagaagtgtatacaaaacaggtggatattaccccgtggtcaatggtgaaacctatgggatggctaattacactggctgctgtctcaatgtacgtttttctggctcagaatgtgccgaattatgtaatgacactttactatctgtttgcagccggaattctgggatatgtcgcttatcaaatcagtaaagtattgtctaagcgttccattcatcgtgaaagtgcctagaagatctgagtgatggggaatccaaataatatgaaagagattcgtattggcctgattggtgcgggctacatcgggcgtacccatgctatagcctatgcgcaagcatcgacggtatttccattaaaaggaaaattagtacgtgcaatgattgccgggatcacaccagagcttgctcagactcaggcaaaagaactcggttttctacgcccaacgggcgattggcgagaactggttgctgatcctgatattgatgtagttgatatatgtacaccaaattatttgcacaaagaaatggcattagaagccattaagcacggtaaacatatttattgcgaaaaaccactggccctgaattcacatgatgcaaaacagatggtggcagcagccactatcgccggagtgaagacgctggtggggtttaattatatgaaaaacccgactgctcagctggctaaagagattatatcgaatggtgagattggcgaagttgtgcatttttacggcacacataatgaagattatatggctgatcccctgagtcccattcattggcactgctttaagaatgaggctggtttgggcgcattgggcgatcttggtgcgcatattattaatatggcgcagtatctggtgggagatatcacaactgtttgtggtgatatgaaaacaattgtgaaagtacgccctgaaatatcgggttcttctgtattgatccccgttgaaaacgaagatcaggcccatgcaatggtacgctttgatagcggggctataggcgtgattgaaacttcccgcatagcctgtggccgcaaaatggggctgacttatgtcgtcacagggactaaaggcactctgagttttactcaggaacgaatggcggaactgaaactctaccggcacgatgaaccggtcaatcgtcagggttttaaaaccattttggtcgggccggaacatccggattatgcccctttctgtcacggcgccgggcatggtattggcttcaatgaccagaaaaccgtggaagtgaaagatttagttgatggtatcgcgttggatcaggatatctggcctgattttactgagggctggaaagtctctcgcattctggatgcgattgtctgctctcatgaacaaaaacgctgggttaacgtcactgaaattaattaaatctcgcagttagcaacatacatgggttagcaacataagttagcaaaacgcacattgggtaagaggtggagcgatggagcaacataaaaagtttgatgttatctgtatgggacgtattgcggtcgatttatatggtcagcagataggtgcacgtttggaggacatgaccagtttctctaaatatctgggaggctcttctggcaacgtagcttatggtacagcgcgtcagggattaaaatcgtccatgctggccagagtcggtgatgagcatatggggcgttttctacgtgaagagctggagagggtaggatgtgataccagccatttaattactgataaagagcgtcttacggctttggtgttactcggtataaaagacaaagaaactttcccgctggttttctaccgtgacaattgtgctgatatggcgattacccgcgatgatttcagtgaggaatatattgcttctgcccgttgtttggcgattaccggaacccatctttctcacccgaaaaccagagctgccgtgctgaccgcattacaatatgcccgccgtaatggggtaaaaacagttattgatatcgactatcgccctgttttgtgggggctgacttcactgggtgacggtgaaacccgttatatcgcctcaaagcaggtgactgctcaattacaggaagtactctctcaatttgatctgatagtcggtacagaagaagaatttcatatcgctggtggctctaaaaataccttagatgccttacgcagcgtcaggaaactgagttctgccactctggtctgtaaacgaggggctctagggtgttctgtatttaccgggaatattcctgagactcttgatgaagggattactattcaaggcgttaaagtagaaatactgaacgtgttgggagcgggtgatgcgtttatgtctggtctattgcgagggtacctgaataacgaaagttgggaacaaagttgtgcttacgcaaatgcctgtggtgctttggtcgtttcacgacatggctgtgcgcctgcaatgccggataaaacagaactggataactatatcgtgcgagcaaaaaaacttgcgtcaacagcaacaggttatcgccctgatttagatatccacctgaatcatcttcatcgcgtgagtagccgtcataagcagtggcaggaattgtgtgtgatggcgtttgatcaccggattcaatttgttgaaatggcacgtgaagtgaatgccagtcttgatctcattccacctctgaaaaaattgttattccaagccagtcaggaggtgagtacagaagctaatctaaaaggtcactcaggcatattatgtgacagtacttttggacaggacgttcttgatgctgcgaccgggcaggggttatggatagggcgtccgattgaattacccggctcccgtccactctgtttagaacatggaaatattggttcccagctggttagttggccattggaacatatcgtgaaatgtctggtgttcttccatcctgaagataacagcactctgcgtctggagcaggaagaaatagtgaaggaaatttatgcagcctgttgccagtcaggccatgagctactcttagaagtgatcttaccatctggcatgactcgttcagatgaattttatctacgtgcactcaagcggttctacaatcttggtatcaagcctgactggtggaaattgccccccatgcaatctacaacgtgggatcaaattgaagatttgattatgcaacgggaccctgattgtcgcggagttgtgattctggggctggatgcacccgcaaaaacactcaaggcaggtttcaatgcggcagcaggtaaatccattgtcaaagggtttgccgttggtcgcacattattcggtaaagcatcacagaaatggctggctggcgaaattgatgatgagacactcgttctccaagtaaaaaagaactatcacaatctgattaatgactggcgtcagcgtgatgaaaaaaatgcaaaagaagaactgaatcctcaatatacaggagaaccgtcatgactgtgcaacttggcatcaaccctctgacatggactaatgatgatctgccttctctgggagcagaaacatcgctggaaacctgtttatcagaagggcgtcaagcagggtttgcgggttttgaattgggtaataaattcccccgccaatcgcaaatattagggcctattctggcttcccattatctgaaattagtatctggctggtattccgggcaattgttgacacgcagtgtcgaagaagaaattgcagctgttcagccacatttaacgctgctgcgtgaactgggagcgacggtgatggtctttgccgaagtgacagactgtatacacggtgaccagactaagcctgtgcatttacgccctctctttccggcagagcgctggcaggagtatggagaaaaattaacagagtttgcccgttatactcagtctcatggggttcagattgcttatcaccatcatatgggaacagtgattgaaagtgccaaagacattaatcgtctgatggaaaacacgggtgaagaggttgggctgttgctggatacagggcatttaacctttgctggagatgatccgctgactgtcgcaaaacgctggggtaaacgaattaaccacgtgcattgcaaagatacacggccggaggtactggaagatgtcaaaaaccggaaaaccagttttctggatgcagtgttaagtggtgtttttactgtgccgggtgatggctgtgtaaattattcagatattttcaatgtattgagagataacgactatcacggctggctagttgttgaagcagagcaggaccctgcagttgcacatccgctgacttacgccacattagggtataaaaatttacatcggcttgctaaagatgcagagctgatgtgaacacggacattaaaaagtgaccttgaggtagattttatgtctaagctgctatcaaaatatcataaacccgataaaaacaagcggacacaacatatctcgccagaaatcgcaaactggggatatgttcattttgatgtttacgagctggatacgggggagtcaataacattagctgcttctgaaaatgaaacctgtctggttttagttgcaggaaaagcaacagtgaacactgcacaacagcgatttgaacagattggtgatcgtatgagcccgtttgagcgtaaaaaaccttatgctgtttatatcgcgccacatgaggtgatagagattattgctgaaacccaccttgaactggcgatttgtcaggcaaaagggaaaggaaattatccaacccgcttaattacaccgcaggatattggggctgaacagcggggaaatgggcataatcgtcgttatgttcataacattcttcctgatcaccagccagctgatagtttattggtagtggaagtttatactgatgaaggttgtaccagttcttatcccagccataaacatgacactgataatgaacctcaggaaacctatttggaggagacttattatcatcgtctgaacccaccgcagggcttttgtttacagcgtgtttacactgatgatcgcttattagatgaaacaatggcagtgtataacaaagatgttgtgatggttccgagagggtatcaccctgtcgcaacaattgccggatatgatagttattacctgaacgtaatggctgggcctacgcgtaagtggctgtttacatgggaagcagatcatcaatgggttaatagtgacagatacgctgaaaagcacagtaagaactaagagttttttattacgtgcacaatgagcttaaagctaatacttgatggttaaagaataaatggaaagacgaaaagtaaattgctccctcagtagggagcaatatctggggagaatcatggtaagcgtttaagagcagatttagtgaaccagtaaactccacttgctattaataatgaattaagtgctggtattccccattcaacagttaacccaataatactgccaacgaggctggcgataatagcagcccagcctataaccggtgtttcaggcggaagttgtcctttttgtctactttcatccaatacctttcgataagaacgcaaaatatagtaatcaaccagcatgactcccaaaatcggtgggaagacaacaccgagtacagtaaggaaatccacaaatcgatccagaatacccaaaatagaaaatagggttcccaatatcccaattactattgttgttggggggtaacgtagttttttccctgtgactccttcgaccgcattgataacgcccaatgatgaagagtacagattcaggtcattcactcttaatgttgaaaacactacaacgaacaaacccgctccccctgtggcctgggacataatagtgactacatcggctgtatttagtgctttcgcgattaaaatagccagcccattaataacaaactcaccggcaagaatcgtcaacagcgtgatcccaaaaacatgttgccctgatttggtataacgagtcagatcaggagtcatcaaactggcaacaattgcgccaccgacaactatggtgatacctgcactgatagataaagtttcatctgaatgaggtaactgcataatttcataccaattctggccagaatcaccagacagtacaatggtggaaatataaacaactaacaggataaacatgggtacagcaattctggcagtgaatcgtaatgctttaaaaccaaaagccacaagagtcgtcaatatagtaccggatatgattgccgccagactaaagccaagtttatccccgcaagcgaagttaagggatttagcaaaaatagcattctgaatgccaaaccagcctaataaactgacggcaataacaagaccgatcaacacggagcctattcgtccaaaaccgcaccaccgggccaataaactaccggataagccttcacgcatgccggcaaagccgaggccaaaagtgataatgccaaatatcagactgccaataaaaatagcaataaatgcatcggtcagtgccatagcgttgccgaggacagcacctaacataaattgatccaatgcggttaacatgcccatatggacgatagccacgcttagcaaagataaacgttgttgttgtggtattcggcttagtgggtaatcttcaactttaatcataactatttagtattatttaatataatttaaatgaaaagaatgccttttgttattaggcgctcaggaatgtagttatctagctgtaaatttttacaaaattcttcaaattgctggagggagtggacattagctttttggtagatattgtatattctattttcgatagtcttatggctgatgttatagattttagccatttctttatttgaaaatttatgtaacatgaaaaaaataatgtcaagctcagccttagtgaaaaggcttgtacatgcttcagttgtcagaatgctgggttttctctgatttatatattgtaatggtgacaatgtattgagaggcttggcattccaaacaatccaaatacactttttgtcgtcattatatacagggaatttctcactaataaaaggtgttaaacagtctctaccaaaccaataatgtgtttctataacagaaactctgtcttgtatttcttcagttcttttatcgtgctccgtaaggtcatcggctaattcagcccaatcagcagggaattcattatcaaattttccttctatattaaaatttagaggggtattagtataaagataagctgccttattcatgtagacatggcgagaatttaagtctttgattccccaaggatcactaagatgttccatcatagctatcaaccccttcaaataggaatcgtcattcttaaaggataagttcatatctatgtcatattattagatataccagatccccttttctaagtagaaatgtctatattgatgagtataattatttaactttctataagtttgataacttagtttttcatgaaaaattttatcttgagaataaaaaatacaagcataaggcatgcgtaaaaaacgttctaaaacagaagcttttccttgcaatataagctgtttttctagacagatctgctgatttttttcattcatcctgagatgttgaatataaaagaagcaccaccaagctttggaggttaccttattaaaggtattgtcaatgaatatagatagtgaatatctacctatagaaggaaatcgtttatttcgcgctaagatattttttattgtgcattcttcattttttttggttggggtatttataaaatgtaatttcatatcgaaagcatattcccatgtataataaattattaaataatttcttctggaaataaaataacccctgacctagtcgatatcattctttgaatttaatttcaagggtgtttttcacccgtttaaatttatataaaaaatacttatatttaactgggtggacagaagaatgcgaaattcaccgttccgtaataatttctgtcctacgctgtttggtattagtacaaagaagatagcccggtcagggcattaccagggaaatttatctatattttgatataaactataatttcatcactgaaataataacatatataaattatataccatttactaggatcagtcttcactagtggttttcagaggttctagctttatataggacaaaatggaatgctgaaaaccacgggctatcctttttaaggtgtatgataatatatttaactatactaaatttcatgttgttatttagcaaggaaaaattatccattatctaagcagcatctttgttagagaagactaaattatagttaggggaacctctaaaaactctcaatacaaaaaataagatcaattttgaactcaccaataactgaccttattgtgtatgactttttcttgcttgttcaggggaaaaaaacaaacgcatcactttttcatcacatctcgaaattaaaaagcatgaatacccgattttccgaaataaaccaaacgttgcaaatcatagcaggttgccttcatcgtcatcgcaaaattggctcgcagctggcctatcgtccgaataattttttcacccatctgagagagtgagccaaagatatgttctacgcgtgcccgagttttcgctattttcttatttcggcctttttggcagtgtgataagggcttattacgtgccgcttttctctgaatatgcacacgatagccctgctccttcagcacacgttcacgcttctggctggcataccctttatccgcataaatgtcccgacgggtatttgacctgtccaaaacagcttcaaaaaactggctatcatggacagccgcggttcctgtcgcgatgtggcggatcactttatattttgtatcgacattaagggtaagtttatagccaaaataacgcttaccgtgctttttcgtccaggttgcctcggtgtctttctggcatcgtttgtttactgtccagttatccggggttttgccctgacggatttgttcattttcttccttcttattgtgctgcttaggcacggggatcaacgtggcatcaatgatttgccctcctctgggaatgaatccctgtgctgacagctgatgcttcgcctcttcaaataacgctctggcaccttcctgcccaatccgtttttcgaaacaccaaatcgtgttacggtctggaatattaatgacatcggtcaagcgacaaaaacgttgccagctcattcggtcaagcaattgatattccattttttcatcggaaagattatggaaatgtttcaggataatgatgcgaaccatcacctccgtcgggaatggcgggcgtccccctttgggggaaataatacgtgggacgatacggtctagggtgtcagccagtgccgagaaatcaacatatttatcaagaacaagcagcggatcacctaattcatcgatttttcgacggtgatattcggatgcctgtttgtctttttttaaagcagaacgaggcggtatcatgatggcgctaccttgcagagaggtactgtgcctacattttactcaattttgtggctgtgaaaagtttttagaggttcccttatgttttaattgttactttatctgctggggaaatgccagatttatataataatatacgacaaaaatatcagacattacagcctatacaggtacagcagtagggcaaacgggtctaaattgaacagttagttcagtgatgtgccttcagtacataaaggtaggaacattgatgatcgtttgtgatttacaatccgttttctgtcaatgataaccgtagaaaccgtcatgaaagcaaccaccctcagcaatacctttggacacctcactgatccccggcttaatcgtacgaaacagcatttgttgatcgacattctcaccatctcgatttgtgcggttatctgcggttgtgagagtttcaatgcgattgaagaatacggaaaatccaaggaggactggttcagacaatttctggaactccccaatgggatccccagccatgatacctttaacgatgtgataaaccggctgaatccccaagaattcggggaggcttttatcgcatgggtgaataagttagccaaaatctccaccgacattattgcattggatggcaaaacaatgagaggcacactcgacaaagccaacggctctccggctatccatttagtcagtgcttgggcggtggcgaatcaactttgttttggccagatgaaagtatcggataaatcaaacgaaattacggcgatccctaagcttctggccttgctggatattgcagggtccactatcactattgatgccatgggctgccaacacacaattgctaaccagattgtcacggacaaggcagattatgttttggccttgaaaggaaatcagggtgagttttacgacgatattaagctctttttggacaaccaattggcaaaggattttacgggcgttatccatggcacttaccgaagtacggatggcgatcatggtcgtatagaacagcgccagttgtggttaattaacgacgtgaattggctgcagaaacgtcatcctcagtggcacacgttggggggtatcgcggttgtggagtcatggcgggaagagcaaggtaaaacagagagttatgaaaggcgctactatattaccagccatcgtggtgcctcggcagaattccttgcgtgtgccatacgcagccattggcatattgaaaataaactgcactggcaattggatgtgagttttggtgaggatagccggcgtctgagaagcggtcatgcggccgaaaatgtggcattaatgaataaaatagcacttaacttactgaaaaatgagaagtcagttaaaataggcgtgaagactaagcgccagaaggctggctgggataatggctatatgatgaaaatcctgacagtgggattttcatctgtataaattagacccgtttgccctcggtacagcagcaagtcattctacatgcttaaataaaagatatatggataactctttggttatccatatattcagtagaaataaaagcaataattatgatcagtattccatcaatgagtgaaattaggtttattataataatttcatcgaaatatttttattaaaaatcaccatgctcgccataaaagaaaatacaaaaaattaaaaccacactgacgcgctacgcttgtcttctccgagttaccgggctaatacattaacccgctaactcagagatccgaaaaaaatacctgccagagaaaaaatttttgtctacccccttattaaagaattagtaataaaactgttcacactattcacctttaaatatttttatttaaattcatactattaagtggtgatgacttgaaatcaaactcatcaccactcttcacccaaccgttcaccttgaaccagaaaataaggtgaacagtgatgaatagttgtgaacagttttagaataactattcaccctgtaatattttgatatatatggtttaaattatagtgtgaatagtggtgaacacttttttatattcctttgaaaaatgattgtactcagaagaaattattcttctggcaggctatcccttgtcagtttcggcatccattcgatagccgtatcaagattcaagctcagattgctgcgaataccctgtttgcttttcttgcgtaaatattgctggctgtactctgccagtgcgccgggcatatccatgccgaaacgagtcacggaaacaggtttattcaggttattgcctttcatataagcaaggtaggcgtgataaagatatttacggggattgaacggcataatttctgcattgccgattaacaaaccgtcagtttcatgggaagctataagataaccgcagaaatcaaccagtggatcggtaccacgcttaatatccaatgcttccgctgatttctgttgttctgctagtaaacgcctagctaattgtggatcagcgaactgatgcagcaaatgccggataatcacgggcaattctgccgcaattttatcccgcaggagtggatcacgctcgttttctggcacgacttcggaaaagttgaaaatcacccggcggcgcgatactccaccactgcgatcactgaaactcatggcattattgtttactgccagtaccaccgctggaatacgaattgaatagggttgtttgtgcttcggatcgatagcgacttcatcgcctccagtaattgccttgatgccggaaccatcgcccacatagcgagtttgatctggcaggataatcaacgaatagccgacaatcagcgcccgttcccgtgggttttccagtgccgccatacttgcagaaacagtattgcttgggcctgacaacattgaacagatttcagcaaagatgcttttaccactgcctccggcaccggtgacttccagaaaaagctgccagtcataacggttcgccaacaccataaacagcgctgccagcactctgtctgctttattttcacagttggcagttgcttgattgagccagcgccagaactgtggcgcgtgattttgcagggtttcccccgaaacaggggaattgaattcaacgtcattggcaagcagcaaccagtcatttttactatgtggtcggaactggctagttttcaggtcaaatacgccgttactgaatccgattaagtggcgttttggtggttgcatcatgggaagctgtaatttcagggcatccacggcagagctgataccatgtggtgagtacggtagttcctcttccataaaagcagtgaccatttcccgttttaaatcgcggtcactgactggacgccagataataccatcatagtgataaacggcttccgaagcgccatccagtgccaaatctccatcatagcgcgtcagtaatacttctccgcgttggctggctcccatctgacataatgtcaactttgaaggttcggtatcattattaagttgaacggctgcttttttcttgattagtgttggttgataaagctcctgagtaaaggcttgccgtgctattcccactccgtgttgctggcggtaatcgtcccaatcggctttgtactcagttggtggtaatgtgacccatccattgatcgttttggcggttttttctgccgcaatttttccaatattctttttcggcttaccgttcttatctaactcatcgggaagataccaatcattatctgcggcaataatgattttcgtatcaggccagtgttcccggactgattgagcgacagagagcaaattacctgcatctattgcagccagaacggtgccttgatgtaattggctaacggtcaatgccgtggcgtaaccttcggtaatgatcactgtgcctggatgttctcccaactttgataatgcaataaaagcacttttcttttggctaccagacagtaatttctttgttccatccagtttgatgatctgcgcacctgtaacttttttatccagtgttaccaatggcaataataacgaaccatctttcagtaatcgctggttagaacaatgcaatccttttgcagtcaaatagggcgattctccggcgacagttagcgtcattagtgccgctactttttcggcaattggctgtgttgtttgaatggtttctttggctggtttggattctggcaaaggcagcgccagcacattagccacaactttagcagcttccgtaatcgagatcctgttggtttttgccactaaatccagtccatcgccatagtttggagcgtcacactggcggcaatgccagttgccgttatggtgatcatcaataaagtgaaaacggtcagttccgccgcaaataggacaggtgccatgtttgccttttgcgggaatatcaacaccacaggcaggtagaagattttcccaatgatacatagcagattttttcacggattggattaggtcgagcggtttttgtccgcctgttttatctgaatgtgtaaatttagggtgagtttgggtatgctgtatatcagccatcatcgttactcctaataacggtcattggttagacgcctcagatgtgtatcagcacactggggcgttgtttttttatgtcattcttttatgcaatatgtaattggttatcccataagtaaaatttttcgttggtcaagctactggttttttctatcacgaagcggtttggcaaaatcataaggagttacaaatttctccttgttagcatccagataatccgcccaccattgcaccatcagccgccgttcatccaaatgtttggatgtgtgaatatacgccgcccggacattatttctttctatatggcttagctggcgctcgattgcgtcatcactccacaggccagactctcccattgcaccacgtgccattgtgcggaatccgtgtccgcaaacttctgttttggtgtcataacccattgtacgtaacgcattattgacggtgttttcactcattactttctttggatcatgatcgccgggaaacattaccccactttctccgctcaggttgtgcaaagtttcgataagcgaaatagcctgatggctcaacggtacaatgtgttctgttttcattttcataccacgttgagaatgcttaacaccatcaatgggttttcgtgtcgctggtatatgccagacagccctttcaagatcgatttcttcccaacgggcgaatcttatttcactggaacgaacaaatgttaataaagtcagttctactgcaattttggtcagtaagcgcccgcgataacaggaaagacgagttaaaaattcaggtaggcgttcatgaggcaatgcagggtgatgtttgggttttactatggtgagagtgccagccatatcattggca

SEQ ID NO: 3570 - DNA, 20653 bp, Xenorhabdus sp.; identical to SEQ ID NO: 3569
  CDS (10212)..(11042)

SEQ ID NO: 3571 - DNA, 20653 bp, Xenorhabdus sp.; identical to SEQ ID NO: 3569
  CDS (9291)..(10175)

SEQ ID NO: 3572 - DNA, 20653 bp, Xenorhabdus sp.; identical to SEQ ID NO: 3569
  CDS (7321)..(9288)

SEQ ID NO: 3573 - DNA, 20653 bp, Xenorhabdus sp.; identical to SEQ ID NO: 3569
  CDS (6108)..(7241)

SEQ ID NO: 3574 - DNA, 20653 bp, Xenorhabdus sp.; identical to SEQ ID NO: 3569
  CDS (4401)..(6077)

SEQ ID NO: 3575 - DNA, 20653 bp, Xenorhabdus sp.; identical to SEQ ID NO: 3569
  CDS (3376)..(4362)

SEQ ID NO: 3576 - DNA, 20653 bp, Xenorhabdus sp.; identical to SEQ ID NO: 3569
  CDS (1173)..(2939)

SEQ ID NO: 3577 - DNA, 20653 bp, Xenorhabdus sp.; identical to SEQ ID NO: 3569
  CDS (2)..(925)

SEQ ID NO: 3578 - DNA, 33001 bp, Xenorhabdus sp.; identical to SEQ ID NO: 116
  CDS (31470)..(31667)

SEQ ID NO: 3579 - DNA, 33001 bp, Xenorhabdus sp.; identical to SEQ ID NO: 116
  CDS (11322)..(11456)

SEQ ID NO: 3580 - DNA, 33001 bp, Xenorhabdus sp.; identical to SEQ ID NO: 116
  CDS (20305)..(20556)

SEQ ID NO: 3581 - DNA, 33001 bp, Xenorhabdus sp.; identical to SEQ ID NO: 116
  CDS (28208)..(28366)

SEQ ID NO: 3582 - DNA, 33001 bp, Xenorhabdus sp.; identical to SEQ ID NO: 116
  CDS (30321)..(31196)

SEQ ID NO: 3583 - DNA, 33001 bp, Xenorhabdus sp.; identical to SEQ ID NO: 282
  CDS (32405)..(33001)

SEQ ID NO: 3584 - DNA, 33001 bp, Xenorhabdus sp.; identical to SEQ ID NO: 282
  CDS (31945)..(32214)

SEQ ID NO: 3585 - DNA, 33001 bp, Xenorhabdus sp.; identical to SEQ ID NO: 282
  CDS (31487)..(31843)

SEQ ID NO: 3586 - DNA, 33001 bp, Xenorhabdus sp.; identical to SEQ ID NO: 282
  CDS (31116)..(31454)

SEQ ID NO: 3587 - DNA, 33001 bp, Xenorhabdus sp.; identical to SEQ ID NO: 282
  CDS (28762)..(29217)

SEQ ID NO: 3588 - DNA, 33001 bp, Xenorhabdus sp.; identical to SEQ ID NO: 282
  CDS (28542)..(28802)

SEQ ID NO: 3589 - DNA, 33001 bp, Xenorhabdus sp.; identical to SEQ ID NO: 282
  CDS (28129)..(28545)

SEQ ID NO: 3590 - DNA, 33001 bp, Xenorhabdus sp.; identical to SEQ ID NO: 282
  CDS (27599)..(28051)

SEQ ID NO: 3591 - DNA, 33001 bp, Xenorhabdus sp.; identical to SEQ ID NO: 282
  CDS (24868)..(25716)

SEQ ID NO: 3592 - DNA, 33001 bp, Xenorhabdus sp.; identical to SEQ ID NO: 282
  CDS (13107)..(13427)

SEQ ID NO: 3593 - DNA, 33001 bp, Xenorhabdus sp.; identical to SEQ ID NO: 282
  CDS (11740)..(12003)

SEQ ID NO: 3594 - DNA, 33001 bp, Xenorhabdus sp.; identical to SEQ ID NO: 282
  CDS (10980)..(11702)

SEQ ID NO: 3595 - DNA, 33001 bp, Xenorhabdus sp.; identical to SEQ ID NO: 282
  CDS (8053)..(9450)

SEQ ID NO: 3596 - DNA, 33001 bp, Xenorhabdus sp.; identical to SEQ ID NO: 282
  CDS (7556)..(8047)

SEQ ID NO: 3597 - DNA, 33001 bp, Xenorhabdus sp.; identical to SEQ ID NO: 282
  CDS (5553)..(7556)

SEQ ID NO: 3598 - DNA, 33001 bp, Xenorhabdus sp.; identical to SEQ ID NO: 282
  CDS (4126)..(5508)

SEQ ID NO: 3599 - DNA, 33001 bp, Xenorhabdus sp.; identical to SEQ ID NO: 282
  CDS (3726)..(4091)

SEQ ID NO: 3600 - DNA, 33001 bp, Xenorhabdus sp.; identical to SEQ ID NO: 282
  CDS (366)..(1031)

SEQ ID NO: 3601 - DNA, 37380 bp, Xenorhabdus sp.; identical to SEQ ID NO: 117
  CDS (17573)..(18856)

SEQ ID NO: 3602 - DNA, 37380 bp, Xenorhabdus sp.; identical to SEQ ID NO: 117
  CDS (18894)..(20402)

SEQ ID NO: 3603 - DNA, 37380 bp, Xenorhabdus sp.; identical to SEQ ID NO: 117
  CDS (23045)..(23890)

SEQ ID NO: 3604 - DNA, 37380 bp, Xenorhabdus sp.; identical to SEQ ID NO: 117
  CDS (26006)..(26623)

SEQ ID NO: 3605 - DNA, 37380 bp, Xenorhabdus sp.; identical to SEQ ID NO: 117
  CDS (33844)..(35370)

SEQ ID NO: 3606 - DNA, 37380 bp, Xenorhabdus sp.; identical to SEQ ID NO: 117
  CDS (35876)..(36718)

SEQ ID NO: 3607 - DNA, 37380 bp, Xenorhabdus sp.; identical to SEQ ID NO: 457
  CDS (35907)..(37307)

SEQ ID NO: 3608 - DNA, 37380 bp, Xenorhabdus sp.; identical to SEQ ID NO: 457
  CDS (34913)..(35650)

SEQ ID NO: 3609 - DNA, 37380 bp, Xenorhabdus sp.; identical to SEQ ID NO: 457
  CDS (34093)..(34926)

SEQ ID NO: 3610 - DNA, 37380 bp, Xenorhabdus sp.; identical to SEQ ID NO: 457
  CDS (32537)..(33514)

SEQ ID NO: 3611 - DNA, 37380 bp, Xenorhabdus sp.; identical to SEQ ID NO: 457
  CDS (31167)..(32417)

SEQ ID NO: 3612 - DNA, 37380 bp, Xenorhabdus sp.; identical to SEQ ID NO: 457
  CDS (29954)..(31165)

SEQ ID NO: 3613 - DNA, 39957 bp, Xenorhabdus sp.; identical to SEQ ID NO: 345
  CDS (32990)..(33766)

SEQ ID NO: 3614 - DNA, 39957 bp, Xenorhabdus sp.; identical to SEQ ID NO: 345
  CDS (31919)..(32923)

SEQ ID NO: 3615 - DNA, 39957 bp, Xenorhabdus sp.; identical to SEQ ID NO: 345
  CDS (28350)..(28787)

SEQ ID NO: 3616 - DNA, 39957 bp, Xenorhabdus sp.; identical to SEQ ID NO: 345
  CDS (25180)..(27816)

SEQ ID NO: 3617 - DNA, 39957 bp, Xenorhabdus sp.; identical to SEQ ID NO: 345
  CDS (22358)..(24793)

SEQ ID NO: 3618 - DNA, 39957 bp, Xenorhabdus sp.; identical to SEQ ID NO: 345
  CDS (21197)..(22348)

SEQ ID NO: 3619 - DNA, 39957 bp, Xenorhabdus sp.; identical to SEQ ID NO: 345
  CDS (11568)..(11810)

SEQ ID NO: 3620 - DNA, 39957 bp, Xenorhabdus sp.; identical to SEQ ID NO: 345
  CDS (3106)..(4095)

SEQ ID NO: 3621 - DNA, 39957 bp, Xenorhabdus sp.; identical to SEQ ID NO: 345
  CDS (1887)..(2852)

SEQ ID NO: 3622 - DNA, 39957 bp, Xenorhabdus sp.; identical to SEQ ID NO: 345
  CDS (757)..(1662)

SEQ ID NO: 3623 - DNA, 39957 bp, Xenorhabdus sp.; identical to SEQ ID NO: 345
  CDS (1)..(726)

SEQ ID NO: 3624 - DNA, 37191 bp, Xenorhabdus sp.
  CDS (21089)..(21844)
ttctggtttgatggcgctgaaatcattacatcaccgttgagaatattcacacatttaatgttggtggattgatccgtacccagaactcggtttacaaagctcaggacgccacaccttggctaaatccccgaagaacgtaaggcaccccaacgtcaacaccagcaggaggctggcatgaactgaaattaatgtcataaagtgttatttctggcgtatcgttgcatttgcagattgtatctggcccgtatattaaaagttgaatttaatgtaggagggagatatgggacagtatcggcatacaattaccaatattaggctaatgcctcatgatgtattgatgcaaaaaacagttgtattgagctttcatcaggagaagcgatttcattattttttagatttaccaagcaaccctaaatttagagtcaggctcaatattgtagggcactcagcttcctcaatgtcgggagacatattattttcgggagcgtgttcgaataattataatcctggaatgaatttgcgtgatttttgcgaaacgatcacggcattattaaccgaacttaagaaaaaaggagaaaatattcaaagtgttaggatagtgggctgtaactctggaaaaagtaatcttgctcaagaattagctaatcatcttgatatgccagtaaaaggtgcgttagggggaacgagaatgtatccaacgacgtactttcgtccagagtataatatgacccgtaattttattgataaatttggtgatggtagagattattctcaagatgagcaagacaggttgctgaggcacgatccttattatggggtttatcagtggtattacccagatatagaggtcatatttaatcagttcgttgatgaacgaaacaaaaaatagtcggtagcataatggattgtaactcgctaaaataataccatcggccccaacatccgaacctaaacttacgctgttgtgccattaccttaagggaacgagaatgtcacagcatagttttatcaaaatttccgacgacaccctacgaccagctactccagcggccagagaatacctgcattcgaaaatcaaatgcggcgatgtgttgtaggctgatttaaaaaaatcccgcaatccccgtttccaccgtaaatactttgccctgctgaatctcggttttgaatactgggagccagtcggcggcacgatttctcccgacgaaaaggctattgtacgcggttacgtacaatttctggcccatttcgcgggtagtgaagatgccttgcaatccgccgcttttgatgctttcaaacattgggtgacggtggaattatctacatcctatgagatatcctgagcatattcatatgtcatctgagatagccaaaattaattgttagttgcagataacagtttttctgatactgtaaataagaaagaaacaacgggatgaggcatatgttatcaaatcattgcactcctcgacatggtgtttttaacagaataggtttactttatacgctgctttcatgcagcgccgtaacaggtatttgacctagtacatctgtaaatccatcatggatttggctccattacctaacgaaacctacaactacagcattgttagtgttttggattctgctaatccgcacacctgtttcaagacgttaccgcaacgctattgctttcgggcttacatttgccgcagctggtgacttttttttaatgttaccacaagactattttttggctggcctattttgttttctactcactcattgcgcctacatttatgctctatgttgcgacagtatttctatttctgatattaaaactccctcttttcattcaaaatttataattattcgtacggttttcattatattggcgatctttatcatatttataataatcgcattattaatatttatcgggctgttgaataatctgcctaacggtatgagagttcctgttgctatttatgctacgattttggctttcatggctggagtggcggttaatagagctattgtctatccatttaaaaatccgatacctttagcacaacatgcagcgaatacagcggcgattggcggcatcttttttgctatcagtgatagcctgctcgcttatggtcgtttttactttgaaacgccattaagcccctttttggtactcagcacttattatatcgctcaatggtgttttagccgctcagtgataaggcgagatcaatgacaaaactaatcaacactcaatttaatgtcctgcgtcaggcatgggaacaaaatcgacctgatgagaaacaacgcctagaggatttgatatgcctccgcaaaaattttaaagccagtctgaatgaaatggcggaagcgatttcttgtgatttcggccaccgttctaggcatgagagcataatggcagaagcggtaattgtgttgaatgaaattgatctttgcctgcgctctcttaaaaagtgggctaaacctcaaagatacaaggctggatggcaattatggccggcaaaggctgaaatacgccatgtaccacttggcgttgttggtatcatggcaccgtggaactatccggtgaatttgaccctcataccattaatagccgcgattgccgcaggtaatcatgtttttatcaagccttcagagcatacactgcacaccaatgcctatttagaaaaactactcagcaaaatttttcctgaaaatcgcgtcagtatcgcacaaggtggagcagatcttgcggccgatttttctgccctcccctttgatcacctgttgttcacgggttctaaggcgaatggtaaaaaagtcatggcagctgccgcacaaaaccttacccctgttacgctggagcttggcggaaaatctccggcactggttgctcccgatgccgatctgaaaaaagcggctgcccgcattataacgggcaaactattcaattcaggacaaacctgtatagcaccagattatattttattgtcggaaaacgtcattgagccgtttatcgcagagattaaggaacaagtatcgaaacgctatccccaaccaaataactttccagactatacaagtattatcaatgacaaccagtatcagcgtcttatcaaattacttgaagatgccattactcgtggtcatcaaaccattccacttatgcctctaactgatcaagaacaagcacttaaacagcgtgttttcgctcctacgctagttctgaaccctgacgatagcagcgccattatgcaagaagaaatttttggccccctgataccagtcaaaacctaccgttcttatgatgaagcaatccactatattgcaagtcatgaacgcccattagccttttattgttttagccgaaataacaagtacattgaagcggctttatcgcatatcgtcgcaggtagtatctgcatcaatgacacgctataccaatttgcatgtacaggcttaccctttggtggcgtaggcccaagcggtatggggcaatatcatggttatgaagggtttaaaaccttttccaaggccatgcctattttgcgcaaatacaatccgtcactgacagatctgctacgtccaccttatggtcagtttattaatatggttatccgcattctcactcgataaaaaactcatttagaaaccgtggtcttgtcacaggtttggtactaaaccctctttttcataaaattcaaacattattctgcgttgacgaatgcagatcagagaatatagttaaccccaattctgcttaagctgtcactggaatatcttcttcttctgagtagaaaactttcagtgatggtttcttctttttatgacaataagcaattaaccccgttaaaacagtcaacagaaacccttttatacttcgatgacgagaatgttctatttgacagatattttttaattgcccattaaccgtttcgttaataaaacgccttgataacatcatcttatcccaatcttccagcacgctcgctttcatattactccgctttttcgtgatgaaagtgacacccttttgcgctaaagattaattcttttgctaattcccgaaccactttcctatcatccgtattccccgccgtgattttgagggccagaatttcgccaagatggttaataatcaggtgtaatttgaaacaccaaaacacggctccttgaacaggtttctcgtcaatttcttatccagaatttgggttatattaatatattgcctgctagggcgtgttgacgttttgttttcatcacttactcgacccacatgggtaaccagataatgataaatgccagtgctaatgtgctggcgtaatttctcgctaatttatcgtatcttgtggcgattgcacgaaaatgtttgattctggcaaatgcattttcgactaaatgacgataacgatataaatccttatcccactttttatccgaatttcggctattttttcggtagggaataaccgctgttgcaccttgttcttcaatataagttctcaatgcctgactatcgtatcccttgtcagcaacgacaaaatccgcgggcggtgattgcgccaccaaactttccgcatgcaccatgtcgtgagtttgtccctcggataattcaaaatgaacaggcaggccgtaactgtctacggccaaatggattttagtcgagcgtccaccccggctttttccaatcgcttcattttcctttgaagctgcgcctgaactgtgctgatgagcacggacaatactgccatcaataaacaaccattcagtatcagaattcttagctaattcgttgaataatgaattaaaaacacctttttttgaccagacattaaaacgcttaaagaccgtattccatttcccatattcagcaggtagttcccgccagggtatcccggttctcattcgaaaaagaataccttccatgatgaggcgatgcgtttttttatgataggtaagccgattttgttgcatgaagacaaatagcttatcccacacaggatctgataacataggtcgtggcatgatagttcgggtaacgagttttttggcgaaaataagagaccaaattatcatgccacccaattcccttcgagcaaacgtcaacacgccctagctcaatcgatataaaacactaatttttgtgtttttacagaaatgaattagtgtaaacgttataaagaaaaggataattcaagatttaattattaaagtagcacaggatttttaatccggtttgttttagataagtggtggtttttgttattgagtatttttatttatgtaattcacaacattgtgtgaaaggattttttcaatattatgaaaataaaattatttaattcaattaattagttaattatcatcttttgatagatagatctctaatgtgacatcgatcgtttttttgtgaaattatctatgtgaagatcagaaaggtaacaaagaatcaaaaacaccagggaacctcatgaataatttaatacaaaaaataggggttatagggctgggtgcgatgggaatggggatcgcgcagtctttaataagagcaggtatttcaacctattgttttgatataaatgataaagcctgcgagcaattaaaacaaaaaggagcaacaggtgtagctaatagtccagtaaagtgggcatcagagcttgatgttctcttattcgttgtggtcaatgggacgcaaatcgaaaatatcctatttggtggagaaaacccactagtcaaacagcttaaagctgatacttgtatcgttgtacatagcactatttctgcagagcaggcgcaaaattttgcaatacgtctacaggagtatcacattaatatgcttgatgctccaatttcaggtggggcacttaaagcggagcaggggaaattaactattatggcctctggttctcctgagctgtttgagcaaacgaaagagattcttgatgttatctcggagcgcttgtattacgttggtaacaaaattggccaaggttcaatggtcaaaatgattcatcaattattggcaggtgtgcatattgctgtggcggcagagagtatggctcttgctgctaaggccggaatttcattggatttaatgtacgatattgtaacccatgcagcgggaaattcatggatgtttgaaaatcgtattccccatattctagctggagattattctcctaaatcttctgtggatatttttgttaaggatttgggaattgtacttgaagccggtaaggtgatgaaatttccgttaccaatggctgcaacagcgcatcaaatgtttctagctgctagtaatgaaggatttggtcagtgggatgatagtgcggttattaagacatttaagggtataactttaccagagaaaaaatcatgactattaagctgggtgtcattgctgatgatttcactggagcaactgatatcgctagcttcatggtacaaaatggttggagggttatccaattattgggaggaccagatgaaaatccttccatcccatatgatgtagacgcagttgttattagtttaaaaactcgctcctgctctgtcgatgaggcgatagataaatctcttaaggcttgttggtggttgagaaatcagctcggttgccaacaattatttttcaaatactgctcaacttttgattccacatcggaaggaaatattggccctgtaatagatgctttaatggatgaacttaaaactaagattagtgtaatttgtccagctcttcctattaatggaaggactgtagtatatggacatttatttgttaatggacaattgttaaacgaaagtggaatgcagtatcacccgattactccgatgaaagatgcgaatctattacggttgatggaacaacaatcaaaaaaatcggcaggattaattaatcttaattgtgttcggcagggaaaacaagctattcgtcatcaactgaatttgttgcaacaaaaaggtattagctatgtgatagtagataccatgataatggccgatttattatctattgctcaagctgtctcggatatggtgttggtaacaggaggttcgggtttaggcgctgcgttagcaagttaccacactgggaagcttttagatgatttgatgattggtgatattcctccaactgaggataaaagaacaattgtcctttcaggaagttgttctgtaatgacaaataaacaggttattgaatataaaaaaatagctcctgctatggagattagtgttgaacagtgcatcaataattctgagtatgcggatatattagctaaatgggctgttcaacaatctaatgttggttgggcaccaatgttgtatgctacacaaccacctgaaatattaagtttaattaagcaacgatatggaactatagaatctagcactgcaattgaaaagatttttgctgatcttgctaaaaaattgagacagcaaggatttaacatttttattgttgcgggtggagaaacttctgctcaggttgtacaaagtttaggagttagccagttcagcattggtgcatctataactccaggagttccttgggtacgtagtttgcatgacgattgttggtttgctttaaaatcaggtaattttggtgatacctattttttccagtacgcacaaaatctatgtattgagtgaaaaattttatattttctctatgagagtattttttctttataaaatataattactttaatataacgaaatgatttttttctgtattttacgtttagatattcctattttaaggaatgtcttatcccaacgacatgaaaaattataaaaatcaatttctccctatttaattaaactttactcatcagaataaaagttcaatttatttgtttgttattcattatcatactatcttcgtgttaaacatcagtccttttctagataatctaactttatcttgtagtatttctctttaattttgaaaaaattatgtgcaattgttttcatttctgaagtatttcccatttaaatatgttttttattgcattttaaatgtgatgttaatcacaaaaaaatgtaaatttatttgaggtttgctatcttttttatggtaataataaattatataaactctctttaacgatgaataggcagaaaatatggtatgaatttatctgatatgttttgcactatcataatttatagctaagtaagaaattggaactattgcattatagaataataaggattagtcatggctaaatttgcagcaaatttgagtgtgatgtttaacgatgttccatttactgagcgtttcgcacgagctgcaaacgcaggttttaaaggggttgaatatttgttcccttatgaagagccggaggaaaagcttgccacactgttgaaacaatatgaattaacacaagtactgttcaatatgccggccggagattgggagtccggtgaaagaggtattgcatgtttacccggacgagagcaagtttttgtcgatggggttcataaagcgctggcatatgctttagcactagattgtaaacaggttcatgcgatggctgggaaattggatgagcagtttactctggaacaacagaatgaatgttatatcaaaaatatccagtatgctgcggatgttctagccgaatatgatatcaatgtattgattgaaccaataaatgttcgtgacatgccagggtattttttgacaacacaaggtcaggctgaagttttattaaaattaattaatcgtaagaatgtctttatacaattagatctttatcattgccaaattatggaaggtgatttattgagaactatagaacgtttatgggggaaatttaaacatatccagattgcttctgttccagagcgtagtgaacccgataatggagaaattaattttttctggttgtttagtaaattagataagatgggatatgaggggtggattgggtgtgaatataacccaataggtcatacagaagaagggctggggtggtttataaaagcccaattatgattgtctagccatgataatgtaataggagaagcgatgattcctccagaacgcagggattatatttatcgtcacttgcatgaacatagaacagttgccattagcaccttagttgaactattgaatgtttctcatatgactgtcaggcgggatattcgtattctggaagaagaaggtaaagttattaatattgctggttcgattcagttgaatgatgctttacgacaagaattgccatggaatgagaaggtttttatttatcatcaccataagaaaataattgggaaatatgctgcttcattagtggaagatggtcaggtagtttatcttgatgcaggaacaacaactttcgaaattgctcaagtattggcagagcgatttaatttgacgattgttaccaatgatttttcaatttctcagtatttgatgaaaaaacctcaattaaatttatttcatacaggtgggcaagtagataaacgtaattactctagtgtcggaaatagtgctgctatggtattacgtactttgaatgtagatatagcatttattagtactagctcgtgggatattaaacatggtatttctactccttatgaagaaaaagttttagttaaacaggccgctttagatattgcccgaagaaaagtattaatttcagatagtagtaaatatggtaaatacggaatgtttcatgtttgtccactctcaggattaaatgatatagtgtgtgatgccaaattacctattttagtacagaatcaattacaggagttagatttggagctacacgttgtggatgtgtaaatattataaaaattaataaattttaaggtggttatagagggtttataaagagtgtttttaaataaaaaaataactggtgactttttttataagttatcagttattttttattacacctaggaaaattggattgagcacttgataagttatactggtgaaatttcatgtcagatcattctattggtactttatcattaatagagtgtatttgtatatttactaccaataatacatattaaagtggagttttacatggagtttttcattccaatgattggcctaggggttgctgtatttaccgtgatttttttggtcttacgcacccgtattcatgtcctgcttgctatgttaattgcggcaataatagcaggtgttacggggggcttaactgtcattgatactgttgaagttatatctaaaggatttggttcaacattgggtaatataggtatcgtgattgggttagggatcatgatggggcgagtcctggaagtttccggagcgtcagaacaaatcgcttatagctttattaaatggttaggaaacaagcgtgaggaatgggcgttagcaataacaggatatattgtcagtattcctatttttgttgactctgcttttgtaattcttttatccattagctaaagcttttgctacgaaaggtaaacgaaatttattaacactggttgttgctttagctggggggcttgtagtaacacatcatattgttcccccaacgcccggtcctctaggtgttgcagggatctttggtgtagatattggcgcaatgatgttgataagcatgatattggctgttccgtgtgtcataggcataactctttatgcaaaatggttggcaattaaatatccagaataccaatctattaatcaaaatgatgaacaaaaaaatctaaagcaaattcaccagaattacatggaggaaaaagcgaataagccgttaccaagtttatttatttctattttacctatcattgtacctattgttcttatccttataaaggctataaataaattattattgggaacagaaacgtttacaggtaaagagagttatttatattttcagtgttttgattttctcggttcaccaattattgctctagcggttagtgtattgatagctgtttatatgttaataccaaatgctagcaaacaagaagttattgaacatttggaagcagggttacagacagcaggtattatcctattagttacaggcgctggtggtgcactgggtgcagtattgcgtgaaagtgggacgggagctattttggcggaatatattgctggtttgccaattacaccaatattaattccattcattatttcaactttagtgcgttttattcaaggttcaggtacagtggcaatgattactgctgcttctatttcagttcctattcttagccagatgcctgatgttaatatgttattagcagctcaggctgcgactataggtactctgtttttcggttacttcaatgacagcctgttctggatggttaaccggatgatgggtattaaagatgcaaaacaacagatgattgtctggtcaattcctaccaccattgcatgggggatcggactgtgtggtatattacttcttaatcttattatgtaggctattgtgatggcgctcaaaaggagcgtccttctttttctcaaactatctaaatatccctttgttaacctataccaagacatcaatttctaataagcccactttaacgcagcttgtaacaagggctttgtccagcataccatgcacctttctcgccaataatacagattgaaatggggttttatggttgatttttatattccagttattggattgggagtggcggtattttcgctgatttttctggttttacgtactcgtattcatgtgcttgttgctatgttaattgctgcggttattgcaggaatatctggtggcctgagtatgggccatgttgttgatgttattgctaaagggtttggtacaacattaggtaacattggtattgtgattgggctgggaagtatgatggggcggatattggaagcctctggtgcaacggagcaaattgcctatagtctgattaaatggctgggtaaaaggcgcgaagagtgggcactcgcaatcaccggctatattgtcagtattcctatatttattaattcggcttttatcatcctttttccgctagtaaaagcgttagcgaagaaaggtaaacgcaatgtattaacgttgggtgtagccctggccggtgggttagtggtgactcaccatattgttccgccaacgccgggaccgcttggtgtggctggaatatttggggtaagtgtcggtaaggttatgctggtgggaatgatactggcaatcccatgtgttattggcatcacttgttatgctaaatggctggagactaaataccctgaatacctgcttgtggaggatgagggaaatctgcaagaaattcatcagcaatatatggaagaaaaagccagcaagcctttaccgggtctatttatttcccttttacctatcgttgtacctatcgttctcatttttaccagtgttattaatggactgttgttaaagacagcactatttgcagggaaggatgactatctttactttcaggtttttaatttccttggatcaccgattattgctctggcgataagtgtgttgctggcgatttataaacttatgccaaatgtcagcaaacatgaggtaatagaacacttagaaactggtttgcagacggtagggatcattttattagtatcgggagccggaggagccttaggcgctgtgttaaatgagggttcaaccgggacaatagtggcgcaatatgttgccagtctgcctatcacgcctgttctgatcccttttatcatcgccacgttaatacgcattattcaaggctcaggcactgttgctatgatcaccgcagcatctatttctgctccagttatcaaacagataccagatattaatatgctggtcgctgctcaggctgcaatggtgggaacactgtttttcagctattttaatgactgttttttttgggtcgtgaataggatgatggggataaaggatgtgaaaaaacagataatcatttggtccattccgaccactattgcgtggggaatcggattgtgtggaatattactccttaatttcatcatgtaagtgttccaatggcgctcaaaaagggcgcttttttgtgactgctcttcgactattgtttctatttcagttttatactcacagtattacttatacacattaaatggtgattaatgtcacattttaatgtatgcgtttcttttttaatttaattaaatgtgacttttatcattaaaaaatgtcagagtattcactaaatttaggtatctccattttatttggattttgaattattcccgttgaggagccaatatgtctgatgtatttcacttaggtattatcaaaaacgacttacagggtgcaactctggctattgttccaggcgatcctgatcgtgttgagaagattgcaaggttgatggataacccggttcatctggcttcccatcgtgaatttacaacatggcgtgccgaaattgacggcaaacccgttgttgtctgctcgacgggtattggtggcccatcaacgtcaattgcagtagaagaactggctcaattgggtgtgcgcacattcctgcgtattggtacaaccggcgcaattcaggaaaatatcagtgtcggtgatgtgctggtaaccactgcggctgttcgtttagatggcgccagcctgcattttgctccaatggagtttccggcagtggctgattttgagtgtactaatgcactgtacgctgccgcgaaagcatcaggtactacaacgcatgttggtgtgactgcttcctctgatactttctatccgggacaggaacgctatgatacctattctggccgcgttgtccgtcgttttcagggttcaatgaaagagtggcaggaaatgggcgtcatgaactttgaaatggaatcagcaactctattaacaatgtgtgcaagccagggattgcgtgccggtatggtggcaggtgtgattgttaaccgtacccagcaggaaattcccgatgttgaattgttgaagaaaacagaaagcaatgccttaagtattgttgttgatgcggctcgccgtttgttgtaattgttgaaattatgggccggaattctctggcccgatcacctgaattttccgttttctttacttcctttcattctgaaatctgataatgtcataacattttgtattaaagatgatttgtctcagccacaaactgtctcaatcgtgcattaatttcaataaaaaagagtgattatgaccacaaccacaacactgatatctcatccttcattactcccattaaatggcggtattaacttccgcgatttaggtaacagaacactaagtaatggttctaagattaaatcaggtctgttatttcgttcaggctctctggatatgctgactgataacgatcaaactttcttggctgaacagaacctgttccagatcatcgattatcgtgatagcagtgaaattatagataggccagaccaggtatggagtggtgcgagctatcatcatgctccggctaatccgctttccaaagaggttgatgctaatttcgataagctaagccatgaggcgttggaacagtttgacgctaaagattttatgttgcggctataccaattgttaccgattaataaccctgcttataagacattagccagtttattattacagccggaaaaaggcggaattgtacagcattgtgctgttggtaaagacagaacaggaattggttctgctttggtattgtttgctctgggggcagatctggataccgtaatggaagactatctggtaactaatattactctgacaccgtttcgggaatatttattgaatgaatatgcaaaaagcatgagtgatagtttgattgagaaaatgtcttatgtattttcagtcagagaagagtttttaatgacagctctgaacagtatcaatcagcattatggcagtgtggatatttggttggaaaaagacgttgggcttgatatggcagcccggaaaaaattgcagagctattttcttgagtaaatccattttgttagcgtaaagaaaagcaaggttagcatcagtttattgatttgctgctaacctgaaattgagtaaagattaacacaggaaaaacgaatgtgagcttgcatgaagtcattgaagtaattatcaattttgtaaaaaatcatgaagcatgggcaattcctattattttcctgcttgcttttggagaatccttggcatttatttctctgctattacctgcaacgatcatcctgttagggttgggggcattgattggtgaaagtggattaaatttctggccaatatggatagcagcagcagcaggcgcattctttggtgactgggtttcctatctatttggctatcattacaaggaaagtgtcggtcagatgtggcctctttcccgccatccacaaaccttagtacgcggacatcgattctttgaacgttggggtatatggggtgtttttattggtcgtttttttggccctttaagagccgcaattcccttagtcgctgggatttgtgctatgccacaacgtcattttcagttggctaactttgcttctgcgctgatttgggcatttggtattttagctccgggtgctttcggtatacgctggcttgcagagtggatggggtaattgcgagccgctttgcaaactgaaataaatcctgtaaacaatctggacatctatacagcctctatttaacttacattaaggttagtcattgagcacagacgctggcgtaatgtgagtggggtgtatagatggatatctattggttatacgtgttaattggtggtttaagtgggttattgtgcggtgggatcttcgtttggttttctgttcaccagcgtattcagtacaaagaaggggaattgcgagaattacacggtcagcttgctgtcagcaatgaaagactggagcagtctcattactggcgtacggagtgtgaacaactcaatcaggagctgcttgcccagcgtgaaatcaacagcatacaggaagcagagttacgtgaattgagtacccgccttgaagagagcaagctggcagctgaagaaaaacagcgtcttttgatcaatagtgaacagcggctgaatgctcaatttgaaaatctcgccaatcgtatttttgaacaaaaccgccgccgtactgatgagtatagccgccaaagtctcaatgatctgttaatgccttttcgtgaacagttggaaggatttcgtcgtcaggtgcaggatagctttgggcaggaggctcgtgaacgccatacgttagctcatgaaatccgtaaccttcagcagcttaatgctcaaatggcaaaagaagcgatcaatctgaccaaggccctgaaaggagataataaaatacagggtaactggggtgagatgatactaacgcgggttcttgaagcatccggtttacgtgaggggcatgagtttcatacacaggtcaatattaaaactgacaacagcgaacgctttcaacctgacattattgtgcatctaccgcaaagaaaagatgtcattattgatgccaaaatgtcactggtcgcctatgagcgctatttcaatagcgatgatgaaacagagcaggttcaggcattacaggaacatattaactctataagagggcatattcgggggctagggcgtaaaaattaccagcagttaccgggattacggtcgttggattatgtcctgatgtttatcccggttgaggctgcttatctggttgcgcttaatcaggctcccgaaatactcgatgaggcgctgaaacataatattatgctggtcagcccgtcaacactattagtggctgtgcgcacgatcaataatctctggcgctatgaatatcaaagccagaatgcacgtttgattgccgacaaagcgtccagaatgtatgacaaaatgcgcttatttgtggatgacatgcaggggttagggcaaagcctcagtaaagcacaggcaagttatcatctcgcgatgaaaaaactggcggaaggaaaagggaatctcattagccaggcagaagggtttcgcgatttaggagtggatatcaaacgccctattgattcacagattattgatatacacaatggatttcaagatgcgtcgcgacggcaagggaactcatctccgggagcatagataaccttatgtttataaaaacggtgacaggggtgagtgagcgtagccaacaaagaggcaacttgaaagacgaaatgtataaatccttccaatcgttcccggtcaatgggcatacccaatagatttttccggatagggttttgtcggaaaggctggtaaacttgctataattttttgaatgaaaagcggacaaagaaaatgccagatcaatctaaagaaaccacacattttggtttccgtaccgtagctaaagacgaaaaaaaagatatggtggcggaagtattccactccgttgcagcaaaatatgatttgatgaatgatttgatgtcatttggcattcatcgtatttggaagcgttttactattgatgcaagtggcgtccgtcgtggtcataaagttctcgatctggctggtggaacaggggatctgacagcgaaattctcccgtcttgttggagagaaaggtgaagttgtactggcagatattaatgattccatgctgaaagttggccgggaaaaattgcgtgataacggtattgtcggtaatgtcagctatgttcaggcgaatgcggaagaattgccattcccggataactattttgactgcattaccatttcatttggcctgcgtaatgtcaccgataaagataaagccttgcgctcaatgttccgggttctcaaaccgggcgggcgtttactggtactggaattctccaaacccatactggcacctctgagtaagatttatgacacctattcgtttcatattctgccacgaattggtcaggcggttgttaaggatgcagacagctaccgttatctgactgaatctattcgtatgcaccctgatcaggaaacattaaaaggtatgatggaaactgctggttttgatctggtttcctactccaatatgaccggtggaattgttgcactgcataaagggtttaaattctgacatggaaactccctcattaagccatagcgtgaattctacggtgctgtttccggttttaactgcctttctggaaacaacgctgaatcacctgctgtatcgagaaacggtattgaaatcagcccgtatgagattagcgggcaaagtgctttccatcgaactgaaagaaattgaaataccgctgatactggttttcagtgaaaaacaggtcgatgttttgagtcagtggtcagagtctgctgattgttcaatgaaaaccacattaccagccctgcttaaattacgtgatcgccaatgcctctcatcgttaatcaacagcggtgaaattattattgagggagatatgcaggttattcagcagtggtcggctctgctggatatgctggaatgggatccggcccattacctttcaccttatgttggcgatattgtggcagaaggactcaatcgggtagtgaaaaatagtatccggtttgcctgtaatactgtctcaaggcagaaaaactacctgagtgaatcactgactgaagagtggaaaatgacacctggcgctttggaattggcttatttcagcgaagaagttgatgctgtcgccaataaactgtctgacatggaaaaacgtctggcagcgatggagaaaaaatatgacgcccagtgaaataaagcgcctctattttatcattaaagttttcctcacctatggattggatgagctgatcccaaagatccgtctgacatggccattgcgttttgggcgctatttcctgttctggctgcctaaccgacacaaggataaaccactaggagaacgcttacgtctggcattacaggagcttgggccggtatggattaagcttggtcagatgctgtctacccgccgtgatctctttcctcctgaaattgctgatcaactttccctcttgcaggatcgcgttgtttctttcgatggtgctgttgcgcgtcaatccattgaaaccgcattgggtggtgctctggaaacgtggtttgaagattttgagcagcaacctctggcttctgcctccattgctcaggtacatactgcgcgtttgaaagagaacggaagaaatattgtcattaaagtgatccgccccgatattctgcccgtgataaaggcagatgtccggttaatgtatcgtttagctaatctggttcctttattacccgatggccgtcgtcttcgcccacttgaagtggttcgtgaatatgaaaaaacgttgcttgatgaattgaacctgttgcgggaagctgcaaatgctattcaactgcggcgtaattttgaaaagagtccgatgctttacgtgccggaagtttatcctgattattgccgggaaaacgtactggtgatggagcgtatttatggtattcctgtatccgatgtcgctgcattagaagcacagaataccaatatgaaattacttgctgaacgcggtgttcaaatcttttttacccaggtattccgcgacagcttttttcatgccgatatgcatccgggcaatatctttgtgagccgtgaacgcccggaagaccctacttatatcggcattgattacggtattgtcggttctctgaataaagacgataagcgctatcttgctgaaaactttatagctttctttaatcgagattatcgtaaagttgctgagttgcatgtggattcaggctgggttccggcagacactaatgtagaagattttgagtttgccatcagaacggtatgtgagcctatttttgaaaaaccactggcagatatttcatttggtcatgtgttattgaatcttttcaatacggcccgtcgttttaatatggcagtgcaaccacagctcgttttattgcagaagacactactgtatgttgaaggtttgggacggcaattatacccacagctcgatttatggaaaacagcaaaaccatttctggaagactggctgcatgatcaggttggtattccggctatcatgcgagcgtttaaagaaaaagccccttattgggcggaaaaactgccggaactgcctgaattggtttatggcacactgcaacaacataaacgtttgcaaacgagcattgatcagatatcactacagttaaaacaacaacggcataatcagcagaaacccctttacttacttgggattggtgcaacactgtttatctgtggtggtttgttttttatttctaatctggtccatctggcatcagggttaattggagcaggaatagtatcgtggctactgggctggtttaagctgaaatagcggtttcttgacatgattacgttctggcatggttgcggtattttcgaacataaggttcgtagattataataaaagaattaatgtttcccacgaacatgaggtagatccgtatgggtggtataggtatttggcaattgcttattattgctgccattgttgtcttggtgttcggcactaataaattacgtactttgggttcagatttgggtgaatcgataaaaggcttcaaaaaagcgatgagtgatgatgaaaaatcagatcaggcagaaaaaaatagccatgatgctgattttgaaactaaaaatctcactgataagcctacggttgatcaatctgaaaaatcagagagtaaaaacaaagaaaaagagtaggtataaaccgtgtttgacattggttttagtgaactgctattagtgctggtgcttggtctgattgttctggggcctgagcgtttacctgttgctgtcagaacagtagctggctggattcgggtattacgttcactggcgacaaatgtccagaatgaacttgcaaaagaattaaaattacaggagcttcaggacagcctgaaaaaaatggaagaaaaggcagatttacaatccctctctccagaattacaggcatcaatggataaattgagggaagctgctgaatcgctgaaagagtcttatcagctgactcctgaagaagctaaagagctggaagaagatgaaacacactttcatcctcctgtatctgataaaaaatccaatagtgaacgctaaaacatgtcgatggacgatactcaacctcttatcagtcacctgattgaactccgtaagcggattttgaatagcctgattactgtgctagttgtttttctggcgctggtttatttttctaatgatatttatcggctcattgctgcaccgttaatggaccaactccctgtgggagcaaatatgattgcgacagatgtcgcatcacctttttttacaccaatcaaattgaccattatggtatccgtttttgtttcggctccgatgatcttatatcaggtatgggcatttattgcgccagcactgtataagcatgaacggcgtttgattgtgccattactgttttccagtagtgtcttattctacctggggatggtttttgcctactttgtggtatttccccttgtatttggtttttttactaaaactgttcccactggagtcatgattgcgaccgatatcagcaattatctgagctttgttatggcgcttttcatggcatttggtgtttcatttgaagtgccgatagcgattatcttgctgtgctggagtggggtagtgactcctgagtcattaaaaagaaaacgtccttatattttggtcggagcatttgtggtcggaatgttactcacaccacctgacgttttttcgcaaactttgttggctgttcccatgtatttgttgtttgagctgggggtatttttgtcgcagttttatgtgggaaaacgcacattacatgaaactgaaaatggctctgaacgtgagacagacggtaacccgaaaaaataatcagccatcagatagtcgtgattattgctacaaacttaaggggttaagcttagtagtattaaaaacaatagttcgtaatggcaaaattagcccagtgtaatcctgctgggttttatattaggagagcagtaatgagctatgcatttccaggtacgtttcctggccgtcgtatgcgccgtgtacgccgccatgatttttcccgccgtttagtcgctgaaaatcaactcactgttaatgacttaatctatccggtgttcgtgatggaaggtactaatcagcgtcaggaagtgccttccatgccgggagtatatcgtttgacaaccgatcttctgctgaaagaagccgaagagattgcccgattgggtatccctgtcttgtctctgtttccggtcattgaatctgataaaaaatcactggacgcgaaagaagcttataatccggatggtttgattcaacgctctatccgtgcactgaaagatgcagttcctgaattggggttactgaccgatgtggcgctggatccttttacaacacatgggcaggatggggtcattgatcaggatggttatgttatcaacgatattaccaaagagattttggtcaaacaggcgttatctcatgcagaagcaggggctgaaatcgttgcaccaagcgatatgatggatgggcgtattggggcgattcgcgaacaacttgagaatgacgggtatgtaaacacccagattatggcttattctgccaaatatgcttcctgctattacggacccttccgtgatgcgataggctccagcgctaatctgaaaggtggcaacaagatgacctatcagatggatccggcaaacagtgatgaagcattgcaggaaatcgcacaggatctacaggaaggggctgatagcgtgatggtaaaacccgggatgccttatctggatgtgatccgcagagtaaaagatactttcggcgtaccgacatttgcttatcaggtatccggtgaatatgcgatgcatatggctgctattcagaacggttggctgaaagaacaaccagcaattatggagtcgttactctgttttaaacgggcaggggctgatgggatcctgacttactttgccaaacgtgcggcacaatggttgcatgagcaaaagaattgatgcttttttaaataaaaatatacacttcgtctttcaagttgcctctttgttggctacgctcgctcacaccaatcacatagttatctatgcttccgtggatgagttcccttgccgccgcgacgcatcttgaaattcattgtgtatagctaagaagtaaaacggatgaataatagaaaatattcatccgttatgacaatttattgattaaggcgtttctcgatagcgtttaaaatgccagcggaatctaaccctaaatcagaatgaagttctgcctgtgtgccctgaggtataaagtaatcaggtaacccgaggtttaacactgaaactgagttccctgtttgcattagtagttcattaaccccactgcctgcaccgcccatgatggcattttcttccagcgttaccagcaaatcatgtcgggaagccatctccagaaccagttctttatcaagtggtttgacaaaacgcatatcaacaacggttgcattcagggattcagcagcctgtaatgcgtttggcagtaacgtaccaaagttcagaatggcaattttttctccctgacggcggataacgcctttgccaatgggtaatatttccagtggctgaagctctgcgcctgtgcccgcgccgcgaggataacggacagcgactggaccctcttgatattggtagccggtatgcaacatctgtcggcactcattttcatcacttggtgccataataaccatattgggaatacagcgcaggaatgaaagatcaaaggcaccctgatgagtctgcccgtcagcaccgacaattccaccacgatcgatggcaaacaggacaggtaagttctggatagccacatcatggatgagctgatcataagcacgttgcaggaaagtcgagtaaatcgcaacaacaggcttatatcccccaatggccagacctgctgcaaatgtcacagcatgttgttcagcaatggcaacatcaaagtattgctctggatattcacgggagaaacgcaccatgcctgagccttctctcatagcgggcgtgatcgccataagttttttgtcagtggcagcttcttcgcataaccattcaccaaaaattttcgagaatgtcgggcgggtatctgagctttttggcagagaacctgttgatggatcaaatttaggaacggcgtgccaactgataggatctttttccgcaggagcatatccacggccttttttggtcatgatatgcagaaattgtggccctttcagttcacgcatgtttttcagtgtctgagttagtgccagtacgtcatgaccatcaacagggccgatatagttaaacccaagctcttcgaatagagtcccgggaacaaccatacccttgaggtgttcttcagtctttttcagcaattctttgataggaggcagaccggaaaagacttttttgccgctttcgcgcagagtcgtatataacttaccggaaagaagctgtgccagatggttgttcagtgcgccaacgttctcagatatcgacatttcattgtcattaagaatgacgagcatatcgggatcgatatctcctgcatggttcatggcctcaaaagccatacctgcggtaatggcgccatcaccaatcacacaaactgttttgcggcctttatcttcatgttttgccgcaattgccatacctaaaccggcgctgattgaggttgatgagtgtccgacacaaagagtgtcatattcactctcattccgccacgggaaaggatggaggccatttttctggcggatagtgttgatacggtcacggcgcccggtcagaattttatgtggataagcctgatgaccgacatcccagactaaattgtcgaagggggtcttataaacataatggagtgcgacggttaattcgatagttccaaggccggaagcgaagtggccgctggagcgactgacactgtttagcaaaaattggcgcagttcatcgcataactttggcaacgtgtctttaggtagcaggcgaagctcttcaggggtttccgccaatgccaatgttggatatttcgctatatcaatgctcatgctatgcctgttaaaatgctatgcacgttatatccttcgtctttcaagttgcctctttgttggctaagctcattcgccccggtcaccgtttttataaacatacggttatctatgcttccgtgtctcattcccttgccgctgtgatgccacttgaaatcccttggatatataaattgaagattaagaaccctgatattattagcatgtaattgcgggggttctcccgagaaggccatattctattttattttgaatttatttaactgataactcatcaatcagcggttgtcatggcctgagtttttagctgtttctctcaatgatgaagcccgccagctgttttagagtcacagtattatagaattgtttttccagttctgtgagagcggcaatagcatcttcatgcagatctttggcttttttctgagcctgctctaatcccagtaaggcgggataggtacttttaccaagctgctgatcgttcccctgacgtttgccgataatttctgtattgccaatgacatccagaatatcatcatgaacctgaaacgcgaggccaatagcttgggcatactgatcgagtaaaggtaatacttcccggccacgtgcaccagcgccatacgcgccaagcctgactgcacaacgaattagcgcacccgtcttgtgttggtgaattttttccagagctgccagatcaatttgttttccttcagcctgcaaatccagtgactgcccgccgcacataccagcaataccactggatattgctaattcagcaaccatctcaaggcgatcagatagtgcgatatttggcatgttgtgttttgccaggatctcaaatgctaacgactgcaaagcatctccggccagaatggcatgattttcaccaaattttatatggcaggtaggctgacctcggcgtaaatcatcgttgtccattgcgggtaaatcgtcgtggatcagagaataagcgtgaatgcactctatagcgagggctggcgcatcaaggctctctttgggcagtccaagcattttacctactgcgtaaaccagaaatggacgcagccgttttccacccaatacagcaccgtgctgcatagcagttgctaacgggctgcctaaaaaggggagcgaagaaaatgttgccatcaacttctcattgatatgttgctggcaattgcttaattgctcttcaaaaggagccttacattgttcagacataaagttactcagcatcaggcgaaaattcatcaagcggcgattgtgcatcattacttaatagaatttgtactcgttgttccgcttgttggagggttttttgcccttgtcttgcaagttgaattccgcgttcaaattcatttaatgcatcctccaaaggaagctcccctgattccagccgaatgacgatttcttccagctctttcagggatgtttcaaaagtcggtgcctgctcggttgctgatgttcggtttgccttagacataatgatttaatagtatgattatttaacgagttacagtgaagtaaatccgttacagaattgcagagtaccctactacactgaaagaaataaatcattcgttactactgtttttttacagacaaactgtttttttacaggagatatagtgagatagtgttatactctgcgccctatccaactgactatttaagaaccatcattgatcctgcttgtgatagttcaatactgaatgactactatatcttactatgaagtttatcattaaattattcccagaaattacgatcaagagccagagtgtccgcttacgttttattaaaatccttgccagcaatatccgtaatgtactgaaaacattcggagagggaactgctgttgttcgccattgggataatatagaagttcgaactaaaaatgataacctcggcgcagaaatttgtgatgcactgacacgtattccgggtattcaccatatcctgcaagtagaagagcgagagtttcgtgacttgcatcatatctttgaacaaacctacgaaacatatgggcatttattgcacggaaaaacgttttgtgttcgtgtaaaacgtcggggtaaacacagttttacttccaatgaagctgaacgatatattggtggcggcctgaatcagcatattgaatctgccaaagtgaagctgacccatccagatgtgacagttaatctggaaattaatcaggatacactggttctggttaaagctcgccatccggggattggcggatttccaatcggaacacaggaagacgttctttctcttatttcaggcggctttgattccggtgtttccagctatatgctgatgcgtcgtggctgccgtgtccactactgcttctttaatcttggtggctctgcccatgaaattggggtgaaacaggtcgctcattatctgtggaaccgatttggcagttctcacaaagtacgttttgttgcggtcgattttgaaccggttgtcgcagaaattctggaaaaagtggatgacggtcaaatgggggttgtgcttaagagaatgatggtcagagccgcctccaaaattgcagagcgctatggtgttcaggcaatcgtgacaggagaagcgctgggacaggtatccagtcagacgctgactaacctgagactgattgataatgcttcagataccctgatccttcgccctctgatttctcatgataaagagcacatcattaagctggctcgcgagataggcacagaagattttgcccgtactatgcccgagttctgtggtgtgatctctaaaagtccgacagtgaaagcagtcaaagccaaaattgaggcagaagaagataagtttaatttcgatattctggatcatgtggtaagtgaagctcagaatctggatatccgtcagatagctgagcaggctggtgagcaggttgtagaagtagaaatggtgactgagttttcttctgatgatgtcttactggatatccgctcaccggatgaacaggatgaccgcccactgaaaatggaaggtatcgatatccattcactgcctttctataagctgagtactcagtttggtgatttgccaaaagagaaaaactatctgctgtattgtgagcgtggagtaatgagccgtttacaggcgctttacctgcgtgaacagggtttccagaatgtgaaggtttatcgcccttaatctgaaaacagataagctgctggcattatgtattgttaccagcagcttattattaacagaataatttattaatagaacaattactgtagattttggtaattgttaatccccggcggcaaaactaactgagctgcaacttctgcggcagtatctttccctttcaaaagctcaatcagttttaaagcaaagtcaaaagcagtcgcaggcccctgactggtgagtagattgactctctcatcaaaatagacccgccgatctatccatttctctggtgctattttatctttcatgctgggatatcccgtcatattaccaactggaaaaagttggtgatgttccagaacaatagccggtgatgcacaaattgcagcgatgattttttcctgactttgtgccgtgcgaattttttccacgactagcccgctatcacgaaaacattccgctccttttatgccgcccggtaggataatggcatcaaaatcttcgtcaacaacttctaccagagggacatctgcaacaatcttaacaccacgtgagcaagttaatatcagcgctccatctgttgctgtactggcgacggtgacgttaataccggctctgaccagtaaatcaatagttgtgacagcttcggtttcttcactaccgtgagcgagacaaatgagagctgaggcgttcatattcttcctcctgtcgtttgatataacgataaatttgtgcgttttctgtcagtatcagcccatgtacacgggctcgagttagtagaaaacccgtaatgtagtctatttccgtacgccgctgtgaacggatatcctgccgcatagatgaagagttttctgatgtctgtgtgatgacatccataatgtaatctatcagtgcctgctgggagatctgaataccatcatgtttcatcacttgataaacctcatcacataaggcatggactttaataatatgatttagtaacccgccatttttacaatcgtaaagtacggtgagtggattgataatgcagtttgcagcaagttttagccagctgatagcataaatatcgttgctccagattacctctggcagagcatcgttcagaatatttgctaatacactgaatttattcgcatcaggtattgtagaaccaatttgggttattcccggtgatttatgataaacaataccattctcctgataggctccatgagttgtcactccggataaaataggattaggcagcggtaaaagttcttcctgtgttcccattccgttatgcagtaacagtatcgggcaatcgggggaaagtgtaggggagagattattaatagcatcgggaacctgccaggctttcagacaaacaagcagtagctcgctttcagcaagatgcttttcattattggcaaggacttgctgttcaaatgttctattttgtaatgtattaatacgaacagctaacgaaggttgtggaacttttagccatgcctgaacctgatgctgttgttcagacaaggcggcaagccataattttcctatggcaccacaacccagaacagttattttcattgttcttccttgagagatactttcagcggaaacgttaaaattatgcaagtcttgcctaaatctccaattacctaaggtcgcggaaatcagaaagatcacttagcctgagaagtatagatcttttgccaataatggaaagcggttatcatgccggattattgattagctggaggtgactggtaatgccatcatttgatattgtttcagaagttgatatgcaggaagtgcgcaatgcagtagaaaatgcgcagagagaattaaccaatcgctgggatttccgcaatgtcaatgcgagttttgaattaaacgagaagaacgaatccgttaagatcgcgagcgaatctgactttcaggttaaccaacttatcgatattctgcgtgaaaaatttgccaaacgaggaattgatggctcggtgctgaatgttcctgaaaatatggttcatagtggtaaaacctacagtgtggaagcaaccatgctacagggtattgatacaccgctagcgaagaaaatcgttaagctgattaaagacagtcagctgaaagttcaggcccaaattcagggtgaacaagtacgagttactggtaaagcccgtgatgatctgcaaagtgtgattacattagttcgcggtgcagagttgggtcagccttttcagtttactaacttcagagattaaccgtaatataagcggattattctttttggtctgagccaaatatttaagggaagcccgtaattatttattactgtcgcttcccttaattctgtacagatatcggctaccctgaactttattatgaatgggcaattacaatctgttctaattgttcacggttagtctgcttagtatctacctttatatatgcgctgagttcctctggcacaatcacgacatctttcacacccacctgagattgtatttccttttccagagcttcaggatcacttaattgagcaggcaaaactagcctgatgctactgacataaggtggctgacgcatggtaaggctgagaataaaccagaatagaataagaatgattccagccataaagactaaggatgcaccttgtatttcgtatagcataccgccaagacttccgcccaacgccacgccgataaactggctggtggaataaatccccatcgctgtacctttataccctgccggcgcttctttactaattaatgaaggtaaaatggcttccatgatattaaatgcaaggaagaaaatctgaataccggcaaatattccccaaagatgtgagcctaaagaccacaatacaaactcagcgataaataacatgccgatgcaaagcaggaaaacctgtttcattcggcgttttgtttctgcataaataatgaatggtaaaacagcaacgaaggaaataagcgtagtaattaaataaactttccagtgttgctggggaggaaaaccgactttttccataacaaggggtagggcaacaaaactcgacatcaataatgtatgcaggctaagtataccaaaattgagttttagcagctggggatcagaaagtacaagccggaagctaccgcgaacaataccggattcccgatttaataagtgtttatgtgtcgatggtactgcgaataatgttattaagataccgcaactggcaaggattgctattgtaccaaataaaccatttaatccaatctggtgagtaacaataggaccgacgacgatggcaaaggcaaatgtgataccaaaactgatcccaataaacgccatagcttttgtgcggttttgctcacgggtcagatccgatagtaatgccataatcgccgcagaaattgctcctgtaccttgcaaagctcttccgacaataacaccccagatggagtcactaaaggcggcaataatgctgcctaagacaaaaataagcagtccaatgatgattaaaggttttctgccaattttatctgaaagtagcccgaatgggatttgaaatatagcctgtgttaaaccgtagatgccaattgcaatgccgattaaagcttcagaggcgccccgtaactctaaaccgtaagttgtcaggactggtaacaccatgaacatgcctaacatgcgtagagaaaaaacggaacctaaaccccatgttgctctgagttcaaggggagtcattttattatcgttcatgggtacctcataccttcaaaaattcgatatgacattttagctagacaggagtaaagcaatgtttgcaagagaaaaggaaagaaaaatggcagggaaaacctgccatttgaatactaccggatgtaagttagagctatttctggagatgccgcagaatccacagacatcataatactcaaagacatgatggccacaatagagaatataaataacttacgagcccaagctcgatcatttgtggttttataacctgataaagccatccccagccaccagatacttactactgcagcaacgatgaggtatttataacctgtatagccactgattgtcagcatcagcgtagcaaccataaatgccagaatatagagagtaatgtggttttttgccacagagatacccttaataacaggcaaaactggaatattggcggcctgataatctttgaaccgaaaaatagcaatggcgtaagagtggggcatttgccataagctgaaaatcagcaatagaatcaacgcacccatgtcaaactgccctgttacggcacaataaccaataacaggaggtgctgcacctgacaagctacctaccagcgtgccataaatagacttccttttcatgtagaggctataaacccctacataaatgacaaacccgatgagagctaactgcattgctaaggcattggctgctacatagagcagcaccatgccagcaatacctaacactgaggcgtaaatcaggctgattttcggattgataagccctttaacaaggaccctttcttttgttctttccatgatcctgtcaatatcgcggtcaatatagttgttaaatacacaacctgacgctactaccaacgatactccgaccattgttgcaaagaacaaggggtaatctattacgcccttggaagcgagtagaaaaccaccaatcacagaaattagatttccgaaaataattcctggtttggtcacttgtaggtattgcttaatcattcaaatcaactcttaatcaaccatcatattgatattcaggttgtacataatccacagtgagccaacgacaacgatggcaataaccaacaatgtgaatattaaagcaacaaggttccagcgttcttcagatgatgtattcatatgcaggaagcagatgaaatgtacaaaaatctgaataacagccatgacaaccacggtgacgaggattgtactgtgtgaagcagtaccatccattaccatccagaatgggatcacggtcaatatgactgacaggataaagccaatcatataagttttgaagctaccgtggctggcgccggtatgagaagtatttggatgactcatcacatagctcccatcagataaacgacagtaaatacacagatccatacaacgtcaaggaaatgccagaacaggctcaggcagttcagacgcgtctggttcacgtcagtcagaccacggcgtgcaacctgaaccatcaggacaataatccagatcaggccaaaggtaacgtgcagaccgtgagtcgcaaccagtgcgaagaaggatgacaggaatgcactgcggtcaggaccaaaaccttctgagatcagtttatggaattcgtaaacttccattgaaacgaagcccagacccaacaggaaggtaacgaacagccacaggtttacctgaccagctttacctttgttcatgcccagcatggcgaaaccgtaagtgatactactgaacaacagcaggaaggtttctaccagcacaaatggcagttcaaaaatttctttacctgacgggccacccgctgtgccgttagcaagtacaacataggttgcaaacagacttgcaaacagaaccaagtcactcatcaggtagatccagaaaccaaatactttgttggctcctgtatcgtggtgcccatgagcgtcatgggcggctgtgttattaagggtttgagtcgacattatttcgcacctgcctttctcagttcttcgtaacgctgatcttcaattttttctacttcagctacaggaacgtagtaatcaacgtcttcgtcaaagcttttcacgatgcagctgatgacaatacctgcgaaacttgcaatagccatccaccagatatgccagataaacgcaaagcccagcaccagacagaatgcactgataaccacgccagcacctgtgtttttaggcatatgaatttcttcatatttagcaggacgcttatattcagtacctttttctttcatatcccaccacgcatcacgagtctggatgtgtggaacttccgcaaagttatagaacggaggtggggatgaagttgaccattccagagtacgggcaccccatgggtcaccagtcagatcacggttctgttcacggtcacggatactgacgtagaactggataacctgacacagaataccaagagcaatcaggacaacaccacctgctgcaacaaccagcaaaggatggaattctgggttgatatcctggctcagacgacgggtcatacccatgaagcccagagcatacagaggcataaaggcaacgaagaagccggtgatccagaaccagaatgcacgcacgccccatttttcattcagggtgaaaccgaatgctttcgggaaccagtaagtagtacccgcgaaacagccgaatacaacaccaccgatgataacgttatggaagtgagcaatcaggaacagactgttatgcagtacgaagtttgcacccggaacagctaacagaacacctgtcataccaccaattgagaaggtaaccaggaagccaacagtccacagcattggggttttgaattcgatgcggccacggtacatggtgaacagccagttgaagatcttaaccccggtcgggatggagataatcatcgtggcaataccgaagaaggcgttaacgttcgcgccggaacccatggtaaagaagtggtgcaaccatacgatgaacgacagaatggtaataacaattgtcgcccataccagagaggtgtaaccaaacagacgttttttcgagaaggttgccgtaacttcagagaagataccaaagacaggcagaaccagaatataaacttcaggatgaccccatgcccagatcaggttgatgtacatcatcatgttgccgcccatatcgttggtaaagaaatgggtgcccagataacgatccagggttaacagtgcgatagtcactgtcagaatagggaatgctgcaataatcagtacgttggtacacagtgaagcccaagtgaaaacaggcagtttcatcatggacatacctggcgcacgcatacgcaggatggtcacgaagaagttaacaccagtcagcaacgtacctacaccggagagctgaagactccatatccagtaatcaacaccaactcccgggttgtattccagaccggacagaggcgggtaggccagccagccagtttgtgcgaattcaccgacccccagagagaggttgatcagaacgacacccacaacaaacaaccagaagctcagggagttcaggaatgggaatgcgacgtcacgtgccccgatttgtagaggaaccacgatattcatcagaccaacaacgaaaggcatcgccatgaagaaaatcatgattacgccgtgcgcagtaaagatctgatcataatggtgcgggggcaggaaacctgcttcaccagcggaagctagggcttgctgtccacgcatcatgatggcgtcggcaaaaccacgcagcatcattaccatggcaacaacgatatacatgacaccgatttttttatggtcgacacttgtcaaccattcgctccagagccatttccatttgccgaaataagttatggaaccaactactgccagtcccccgagaaggatccccaataaagtaaccacaataatgggttcatgtaatgggatcgcatcaagtgttaattttccccacatgtctttattcctcaacacctgcatgagccggttgactcatattcatattatgacccgcagcttcaccatgttctgctttgtcatggcctgttttaccgtgagacataccaaacataccgccatggcccatatcacccataaacttggcgatagtttcctggaacagttgtggtttcacgcttgagaagtattcaactgggttgttctggctaggttttgccaatgcattgaatgcctgcactgtgtccagagttttaggtgacgctttaactttttgtacccactcttcaaaaccagcacgatcttcagttgcagttgcggtgaatttcatgccagagaagccatgtccactgtaactggctgagaagccatcgtatttgcctgctgagttagcaatcaagtgcagttttgtctgcatacctgccattgcataaatctgaccacctaactgtggaatgaagaaagagttcatcacagagtcagaggtgattttgaagttaattggcacatctttagggaatacaatttcatttacggttgcaataccctgttccggatagataaacagccatttccagtcgagggaaataacttcaatcgttaccggcttcacatcactgtccagtggcttatatggatcgagctcatgagtcgttttccatgtaatcgtggccaatacgatgataatcaggataggcacggtccagacaacaagctcaattttatttgagtgtgcccagtttggacgataggttgcagatttgttggcttcccggtaacgtaaagcaaagacgattgccattacgatagccgggataacaacgatcagcatcaggccaaacgctgtcagtatcagcgttttttgctcaacgccgatcgcccctttgggattcatcaataccatatcacaaccacttagcattaaagtggctgcgagtagtgacgataacccaatagtttttttgtatttcataagtctcattagagcgaccccagataacaaaagctttattgtcgtttcatcagtgcgggcattctacggtaaggttaccggagtgtaaacaattgtaatagaagcaggatggcttgtaggctttttatgctagagggatcacatgcaatatgagatttaacaaaaagttaacttcgggtggttattgtatccaataaatcaaaataggcaatattttttatataaccatctatttttaaataaagtttccttaatgaaaattacaggtaacgtttttaaacagacgatgtttcagtaaataaatcatgattt

SEQ ID NO: 3625 - DNA, 37191 bp, Xenorhabdus sp.; identical to SEQ ID NO: 118
  CDS (382)..(1281)

SEQ ID NO: 3626 - DNA, 37191 bp, Xenorhabdus sp.; identical to SEQ ID NO: 118
  CDS (1262)..(3268)

SEQ ID NO: 3627 - DNA, 37191 bp, Xenorhabdus sp.; identical to SEQ ID NO: 118
  CDS (3268)..(3879)

SEQ ID NO: 3628 - DNA, 37191 bp, Xenorhabdus sp.; identical to SEQ ID NO: 118
  CDS (4224)..(5108)

SEQ ID NO: 3629 - DNA, 37191 bp, Xenorhabdus sp.; identical to SEQ ID NO: 118
  CDS (5222)..(6589)

SEQ ID NO: 3630 - DNA, 37191 bp, Xenorhabdus sp.; identical to SEQ ID NO: 118
  CDS (8021)..(8293)

SEQ ID NO: 3631 - DNA, 37191 bp, Xenorhabdus sp.; identical to SEQ ID NO: 118
  CDS (8256)..(8852)

SEQ ID NO: 3632 - DNA, 37191 bp, Xenorhabdus sp.; identical to SEQ ID NO: 118
  CDS (10630)..(10887)

SEQ ID NO: 3633 - DNA, 37191 bp, Xenorhabdus sp.; identical to SEQ ID NO: 118
  CDS (10877)..(11809)

SEQ ID NO: 3634 - DNA, 37191 bp, Xenorhabdus sp.; identical to SEQ ID NO: 118
  CDS (12113)..(13978)

SEQ ID NO: 3635 - DNA, 37191 bp, Xenorhabdus sp.; identical to SEQ ID NO: 118
  CDS (32191)..(32940)

SEQ ID NO: 3636 - DNA, 37191 bp, Xenorhabdus sp.; identical to SEQ ID NO: 3624
  CDS (30026)..(30484)

SEQ ID NO: 3637 - DNA, 37191 bp, Xenorhabdus sp.; identical to SEQ ID NO: 3624
  CDS (26811)..(28259)

SEQ ID NO: 3638 - DNA, 37191 bp, Xenorhabdus sp.; identical to SEQ ID NO: 3624
  CDS (22024)..(23016)

SEQ ID NO: 3639 - DNA, 37191 bp, Xenorhabdus sp.; identical to SEQ ID NO: 3624
  CDS (21828)..(21968)

SEQ ID NO: 3640 - DNA, 37191 bp, Xenorhabdus sp.; identical to SEQ ID NO: 3624
  CDS (20741)..(21085)

SEQ ID NO: 3641 - DNA, 37191 bp, Xenorhabdus sp.; identical to SEQ ID NO: 3624
  CDS (20486)..(20692)

SEQ ID NO: 3642 - DNA, 37191 bp, Xenorhabdus sp.; identical to SEQ ID NO: 3624
  CDS (17296)..(18051)

SEQ ID NO: 3643 - DNA, 37191 bp, Xenorhabdus sp.; identical to SEQ ID NO: 3624
  CDS (15715)..(17097)

SEQ ID NO: 3644 - DNA, 37191 bp, Xenorhabdus sp.; identical to SEQ ID NO: 3624
  CDS (15473)..(15586)

SEQ ID NO: 3645 - DNA, 37191 bp, Xenorhabdus sp.; identical to SEQ ID NO: 3624
  CDS (14169)..(14957)

SEQ ID NO: 3646 - DNA, 37191 bp, Xenorhabdus sp.; identical to SEQ ID NO: 3624
  CDS (13242)..(13997)

SEQ ID NO: 3647 - DNA, 37191 bp, Xenorhabdus sp.; identical to SEQ ID NO: 3624
  CDS (11628)..(12992)

SEQ ID NO: 3648 - DNA, 37191 bp, Xenorhabdus sp.; identical to SEQ ID NO: 3624
  CDS (10590)..(11429)

SEQ ID NO: 3649 - DNA, 37191 bp, Xenorhabdus sp.; identical to SEQ ID NO: 3624
  CDS (10091)..(10432)

SEQ ID NO: 3650 - DNA, 37191 bp, Xenorhabdus sp.; identical to SEQ ID NO: 3624
  CDS (9122)..(9790)

SEQ ID NO: 3651 - DNA, 37191 bp, Xenorhabdus sp.; identical to SEQ ID NO: 3624
  CDS (8240)..(8989)

SEQ ID NO: 3652 - DNA, 37191 bp, Xenorhabdus sp.; identical to SEQ ID NO: 3624
  CDS (6376)..(7638)

SEQ ID NO: 3653 - DNA, 37191 bp, Xenorhabdus sp.; identical to SEQ ID NO: 3624
  CDS (5480)..(6367)

SEQ ID NO: 3654 - DNA, 37191 bp, Xenorhabdus sp.; identical to SEQ ID NO: 3624
  CDS (2221)..(3624)

SEQ ID NO: 3655 - DNA, 37191 bp, Xenorhabdus sp.; identical to SEQ ID NO: 3624
  CDS (1946)..(2224)

SEQ ID NO: 3656 - DNA, 547 bp, Xenorhabdus sp.
  CDS (8)..(283)
gggcgagggttcttcgctcaccagcggcgacgccaatatcgaaaagatctttgtcgacaataatgtctatctgacctccgagacccagaaggccaccgccgatcacggcgaattcgacatggcggcgcagaccttcattctgacgggcaagcaggtcgtcctgtccgagggcacgaatgtcttcactggctgcaagctgaccgttctgatgaacacgggacaggccaagctcgaaagctgtggcggccctgtccggatcatgctcgatccgaaatcgcagaaaaaacagtagtcttttctcgtgaagataccctcgatctcaaaaattcttggcggcgggcgtgatccttccgcggaagctgcctcaccggccgacaaggcccgttatgaaggcacgctgatcgcccatggcctgacgaagacctacaacacccgccgggtggtcaatggcgtgtcgctggtcgtgcgccgcggagaggcggtggggctgctcggtccgaacggtgcgggcaagaccacctgtttttacatgatcactttagagcac

SEQ ID NO: 3657 - DNA, 547 bp, Xenorhabdus sp.; identical to SEQ ID NO: 3656
  CDS (347)..(547)

SEQ ID NO: 3658 - DNA, 547 bp, Xenorhabdus sp.
  CDS (442)..(546)
gtgctctaaagtgatcatgtaaaaacaggtggtcttgcccgcaccgttcggaccgagcagccccaccgcctctccgcggcgcacgaccagcgacacgccattgaccacccggcgggtgttgtaggtcttcgtcaggccatgggcgatcagcgtgccttcataacgggccttgtcggccggtgaggcagcttccgcggaaggatcacgcccgccgccaagaatttttgagatcgagggtatcttcacgagaaaagactactgttttttctgcgatttcggatcgagcatgatccggacagggccgccacagctttcgagcttggcctgtcccgtgttcatcagaacggtcagcttgcagccagtgaagacattcgtgccctcggacaggacgacctgcttgcccgtcagaatgaaggtctgcgccgccatgtcgaattcgccgtgatcggcggtggccttctgggtctcggaggtcagatagacattattgtcgacaaagatcttttcgatattggcgtcgccgctggtgagcgaagaaccctcgccc

SEQ ID NO: 3659 - DNA, 35411 bp, Xenorhabdus sp.; identical to SEQ ID NO: 421
  CDS (18529)..(18972)

SEQ ID NO: 3660 - DNA, 35411 bp, Xenorhabdus sp.
  CDS (32521)..(32793)
ctcggaccatgtgtctctaagaattggcaagggttttacgggcgttatccatggcacttaccgaagtacggatggcgatcatggtcgtatagaacagcgccagttgtggttaattaacgacgtgaattggctgcagaaacgtcatcctcagtggcacacgttggggggtatcgcggttgtggagtcatggcgggaagagcaaggtaaaacagagagttatgaaaggcgctactatattaccagccatcgtggtgcctcggcagaattccttgcgtgtgccatacgcagccattggcatattgaaaataaactgcactggcaattggatgtgagttttggtgaggatagccggcgtctgagaagcggtcatgcggccgaaaatgtggcattaatgaataaaatagcacttaacttactgaaaaatgagaagtcagttaaaataggcgtgaagactaagcgccagaaggctggctgggataatggctatatgatgaaaatcctgacagtgggattttcatctgtataaattagacccgtttgccctcttatcacaaggcagtctgttggtgatatcacggacagatgaagataatacagcaaaagaagtgacgtattatttgcgacgttatctgacaggtcaggtcttataccgttctgtcggttttcgtgtctttatcgttcttgcggataaagattgggatattctgaaaacaaagatgtatatggtgacgggacgcccgcacgttatgataaagataatttacaaatggccgagcatcatttgcaatgtttaaaagagctttatgaccggcgtcaagacacagtaagtccagcctttatgtcaaaatcaggtgactgggtactgattttctgtcttatcgggttactttatctgattatcaggccactgattacttggaatgtaacataatgttatacgcatacgattatggaattctgcaaaacgacatattcagtgataaggaaaagcagcaatcccgtcacaacctaacacgtgctctgacctctgattttgatcgtattccgaaagtctttctggattttgaaacgttttatgatcctgccaataagtattcgttatcagcaaaaggcatgacctatgaaaagtatgttcgtgatccccgttttcaggtcatactttgttcctttcttattcctgatacgggcgaacggtactggataccgaaccataaaggtgcagtaagaaaagaactgaatgccctcatgttacacaactgcaacgtcatcgcacacaaccttccctttgatggttttattctgtcagattactacggtatagaaccccatgagtttacctgtaccatgacgatggcgcgaccattacatggcgcaaaagcggcaaacagtctggcccaattagcaaaacggtattccctgccgaataagaaagaagaagttcaccaggtgatggggatgcgtctggaacattttacggctaccgggttacagcggtatggggattatggccttcgagatgtggatcttttgccaccactctacggtcttttccgttggcactactctgaaatggatatggtcaccatgtccgacacgatacgggccggttgtgtctgccagtttgatttagataaagcgttgttgtgtgagtatatcccgcgcctgatacaactacaggaagaaaaactggcaaaaatttctgcggcattttcacaggatgttgagacatttcgtaaacgcttatcgtcaaaccctcaatttgcagaggtactgacgcagttgggtgtggatgttcctatgaaagacagtaagaccgcaaagaatgcagatgggacaccgaaaaagacgtatgcgtttgccaaaatggacatgggatttaaggcactcttaacatcgggcgatccgtttcttgaggctgtctgtgaggcccgtatgggcgagaagtccacgattgggatcacacgagccaaaaatctattagatattgcacatcgaggaaagatgccggttcccctgaaagcgtttggtgcaacaacgggacgctgggtcggctatcaggatattaatgttcagaacttccccaaacgtggcggcgatctgacgctacgacaatccctgcgggcaccgaaaggctattcagtcgtcacctgcgacttatcacagattgaagccagacggatggctgaccatgccggacaggacgatttgctgttacagtttgcccgcaatgaagatccctactctgactttgcaacgatgttatatggttatgaagtctcaaaaataaatggccgaaagaaagaacgtaacgtcggtaaagagggaattctttctctgcaatatgggtcatggttcgaatcgttttatttacggctacgtacagcctatgatttagatgtcaccaaagaattctgccatgacgctgttttactttatcgtgaccgttataaaaatatcgttcagttctggacgcagtgccaaaatgccttagacgtgatgctttatggtggcacctattcttttggctatgaaaacaactatattgccatgaaaaacaagattattttaccggatggctggatactgcgttatgacgatcttcggatcgccggtaaagatgaactaaaccgcgacatcattttgtataccgacgccgagaaacgggaaacccgcaagatttatcgcggcattattgccaataatgtcacacaaggcagttctacccgtattctacagggaatgatgatgaacctgcgaaatgacggccttttttggtgtttaaccgtacacgatgaattaatttttattctaccaaacgaagatctttcctattgctgtgaacaaatccaataccggatgagagagcgccccgattgggcgcaacggacaccaattgattgtgagctgaccgcaggcccaacctatggtgatcaatatgatgaagctatctggataccgatagcaaactcactctgtatgctaaacccgatacaccgagcatttcccccttatcaaatacctctcaatttcaaaatgataagccatgtttacatcacaactgtccagattgtcatggtttgtttataaaatctaatggcgaaccatgtgtgcatctcatggcctgtcactgtcctcactgtcaaaaggagagtatgtaaaatggcaaatgtcattattaccgtgaccgatctgcctgatggtcaagttgatatcaattataattttggtaacgattttattgccccccaatgtgatgccgacttagaaaaactgacggatgcgcaacagttcagtattctcattacacaatttatcacgggctggatcttggattcggaaaaccaaaagccagctgacgttcaaccggtgatacgcattcccggagcgaagcgcgatgggtaaagtgatattttcagcaaaagaaaaagacgacttaatcgcatatcccctggatcatgatgtggaatggccgaataaaattcataaaccagttgggggcggtaaacttttgtcgctggccttatcattttcgaaactgagtcagtatcaacaatgtccacgacgattttatgaacaacacctgacacataacattccctatactgacaccccagccaccttatggggaacgcgggtacaccaggctcacgaaaattatctgttaaaaggccagcagatggatacggtggtgaaagaaaaaatcggtactggcgtcgcggatatgttaaagaagaaatttaatagtttagtagccgaacagcgtgttggtattcctttgttcggtgaacaggaatgggccattaaagcggacggcaaggtagcaagttggtttgatacgtctgccgtttttatgcggggaaaaaccgatttagggatgggaagtttaaaaaaactctatctgtatgattataaaacaggaaaagaccgttatcctaaaactgatcaactggatttaatgagtgtcatggcaaaagcacagccaaccatgcagcattatacgcaatttgatagtgccctgatattcttagaagcaggcactgttaaaacgcatacaacctctcttcatgaggaaggacacgcgatacaaatgcggaaatttttacgagaatctttacgtattattgattcttatgaacgtgattattggccggaacagacatcgccgttgtgtgcctattgtccggtgatgaactgtccgtttaatgccacggttcagaagtgaacgacagttgacatacgagcggatatactcatgacaatgaaagaaaatccagatgtcacgtttctgacaataaggggagatgccttattggtgttattgcgcaatttatatgagcgacgaaaagaagaacaggccatgctggaaaccattctgacgatgatggaatcattagataacagcgttcagttggcaggagaaggcatgactaacgccaatgcccgattggtcagtatacttaagcaactgaaacccaaagaaactgcagggctatctgatgaagagataatgaaacttgtcggaggacaatggaatgaaacacactcttaaggcgaaagatttacaggcattaatgacctataatcctgatacgggtggtcttttttggaaagcacgtacaccagaactctaccgaaaatacagtcaggcagatcagggaatggcagaacgttcctgtacatggtttaaccaacgttatgcgggtgaacacgtgggtatcacaatgaatggcagtaacacgtatgttcggatcgctattgggagcggtgcgggaaacatacggaaaaatattctggatcttatttgggccgtcgtgacaggcaaagaaccgaatggccttgttcgattactggatgataattgtgcgcgtaccgtggataatattgtgtgtctttctcctcatattgcacaactctttcgtaatcctcgtgcgggaatttaccgtaatcgtgaagagaaaacattttactggcgcatttatcggggaaaaggactcgatcagcaaggtggctatcagacgattaaagaggcccgcgaagctcgtgataataaactcaaagaattaggtttatggcaggaaacattattgaatgatgtatattcataaggctggatgatggcaacgttgcaactctatcagcaacgggcgctcgtcattcaagggtcagaacaagagctagaacgggcacgtgtgttgaatccagaagggcttattgatctgggtgacaatacagttgcctataagtggaactattataatgcggcacttctggcgtttgccaatttacccgctgttagtcctatttatcgggactataattggcccggccccagtgattttcgtccgtatcagcaccagattgtgtgtgctgactttttatgtcttagaaaaaaggcctattgttttgcgggtacaggaacagggaagaccgctatcggcatctgggcggctcattatctgtataccctcggattggtaaaaaagatcctggtactttgtccatcttccgtattattggatgcgtggcagcctaccgctgcaaaattgctgttcggtgtggcggattttacggtaattgaagggtcagtaaaaaagaaacaagagcaggtcgcctcggctgcgccgtttcatattacaaattatgaagcgttaaaaggacttcataaggaatttattcagaataattacgacctgattattctggatgagagtactaaaataaagaacagggaaacggatttatggacgttggtttatccccttgtgcgtaatgccatgtatgcgtggcaaatgacaggaacccccacaccaatggggccaaaagatgcattcggtcagatttgtatgtttgatggttttggtaatacggtgccgaatatctactggtgggaaaatttaacgacgtggaaagtcaacgagtttaaacggcttcctcttgagggttggcaggataccgtcgcaaaatacatgaaacccgcgatccgaattcgaacacgggattgtattgatttgccaccaattgtatatgaatcgcgttatttacccttaacatcggtacagaatgctgcaattaagatgttacgtgttcagcagacggttaatttggcgggtgaagatatcacgggagataaccaggctattctgttgaataaagtggtacagatttgttgtggtgccgtgctttctgaaaatggtgaagtggttgaaatgaaacccacgaaacgattgaatgaatgtctggaaattattcacagtgaagagggaaaagtgcttatttttgcgccattccgtgcagctgttgatatgattgcccgttatctacgccttaaaaatattgcggttggcgtcatacacggtgggataagtaagacagcacgtcaaaaaatcttcgacagttttcaagatgatcttaaaggacagatgcaagtgatagtcggtgtgccctccgcatttgcacacggtgtgacgttaacggcagcgagtcataccatttggtttgcaccgtatagcagtacagaagtgtatttacaggctaatgcccgaatggaacgtaatggacagacacaccatatgacggtaaccgaaatctggggtgatcaacgggaaaaacagctttatgacataaccgcaggacgcgccgatgctcaattaacattgctagatatttacaggagtctcttaaaagacaaccagggggactaacaatgagtgatccttttgtcggtatctcaacagcgcaattggcctcagcccatattcaattaatgcaacagaaagaagccattgaagccatgcacaaggcggcaatgatagaggaaacaaaaagcattgatgatcaattacgcgtcctgtattacgaagttcaaaaacggatgcaaaatgagaaaattcattcattggatacggaattaggtaaggttctcttaaaaacgacggtggaatacagtgtgcaggatttggatgcctggggagattttattgttaccagtcaggacttatcttttttcagtaaaaacgtatcaaaaccacgcgtggaagcgtatagaaaacagcatggtgatgccctgccaccgggattaaaggcatttacacgacaacacatacaattcaaacccgcgaaataaggaattccttatgaataattctatcgtgacctttgatcataatttacccgcgcatttgcgcgatgaacacgacggcctaagtgcttactgggatgatgttggactgtctagttttgctcgtatcaaaatgaaaggacatatattgcaggcttttattggcccgaatctggtcgcccagtcccaacctctgcagcctatgaccgttgttatgcttcgaccatcaaaggtcggacgcacattttatcgtgatacgtatattgaaggcagtaaagaaacccctgattgttactctaatgataatattacgccagctgccgatgcgaaacataagcagtgtacgcgctgtgatttatgtccacaaaatcttcccggctctggcattaatggtgaatcaagggcatgtcgttatcggcaatctattgccgtttggacaccgggagaaaatgacagtacgtgggatactatttttcaggtgaatttatcatcaaccgctatctttggggaaaaaccgaatatcgatggttatatgggactgaatgccctcgtaaattggtttagaaaacaaaaattagatccctcgaaagcctggattcagctttatgttgatccttactcagaacataaacgtattttgatgaaacccaaaggatacgttgctgatcccgaagaatatcaacaggtacgaaaactgattgaatctgacgaacttgaccgcgtactgcggctcggtgttttggatacagaacaagcggaaccattgagtgccgagggattcggacaaatgccagcccatttgcaaaccccagcggctcatacacctgtacgcaataccgaatcagttaatacgggacaggagacggtaaacccctttaccggtgaaattattttctatgacaatcccatcaccgataacatacctacctactggcgacatacggagctgggcgcaattgttatgttacaaccggggacaaacttacccgttgaaacacctgacatagaagaagttacgttagctgattatcaacaatatgaagcacacttagcagaagaacgccgtattgctgaggaacgtcgtatcgcagaagaacaacgtttggccgaagagcgtcgtcagtcagaagctctggcaagacgggcggcggaagccaatcggcaagaaaatggcgcggtcgcagtccgtacccgtacccgaacaccggtgacagacggacaaaatacctcagacgctcaggaaagtggcgtccgcacacgcaatcgaagtgccgtgaacacactacagaatacgtcaataacacaagatagtactgtacgtacacgcagtaggcgtaacgaggtagcatcacaggataccgtttcaaatccagagcagcccactcagacacgtacccgaaatacgcctgcggattcctcagctgtactggggcgtcgtcgtcacgccgcaccgacacaaactagttcaacaggaataacacggacgcgaggtgcaacggtgacgtcctcagcaacagaacagcgttctgcagatgttaatacgccgacacaacaacgcgtcagtcgccgtgcttctgtcgttgaagcaaccgaagccgaagagactttctcgaatgcctcaccgagcttacgtgccgcacaacaacaagcggcagaagctccagatgatgaacaacccaagacacgaggtaaaggcagcctattaaccccagaaatggaggcagctttgaacgcagcgttgttacaaaataacgattagtcgcatcaacgatgatccaatcatggcattaaggagacgaaaatgtcagaggctacgttatctgtagagcttacagaacttgcggtaaagttgggtattaataataaaacgttgggttatctcttacccaatatgtcagcgtcccagattggacgtcttgtcaatgcgtcagcgtatcaggctaaatataccgatgaagtccgtttagccattatggtattaacggaaatagatgccgtgggagcattaccgtgcagtcctaagacggtctatcccaatattcttttagcctttgctgaaaaagtacagacggcattgaaatacaagtacacgctggaagaactgaaacatgacagtacttgggctaatgatctcagtgacgacggtgaacttcccttcgacgattcaaaacgcgactgggatgttattggattaaaaaacatccaatcattgattaaaaatagtattaacctataaggcaccgtatggacttcttaacgtcggttgttcctccagagggtgaaacggtgcttgtcaccatcaaaaagaatcctcggacagcgacaggtaaagaagttcgtaactactgggtcaatatccgcgatggtaatgctgccagatttattcagcagcatgagtcaggagagacggacttatactttgccatgtcttcctttaacacaaaaggaacggaatatgctgggcgtcgggatgatcatgtacaggaagtgaaatccctatggctagatattgatgcagggaaagaaaaattcgagaaacacccaaagtgggcctatcccagctttgaaatagcctataccgcgttttcccaatggctcgttgatgcggatatgtggcaaccgaattatattattgccagtggtgaaggtttacatatttattggatactggataaacccgtgtcaccggaacaatggcgggtacttcatgggggattagaacaactcgtccgcacacacggtttaaaaatggacgcaggagcaagtatgcgcatcagcggcattttacgtgttccgggaacacgacataccaaaagtggtaatgccgttcgtattatagccaccgagtccacaccctactctcttgctgaaatgcaggaagtattaccttatgtacaaccgcaatcgaatagtctgggggcgatgcccgattttcttcaagatgaaaatgattttcaggacgcggtatggggagtgcaaaagaaatcattttcgtttgcacagatcatcgcactatgtgatataggcagtacaaaccccaaaccaggcggctgtgaccaactcgccttatgttatgaacaacaaagtaccaccgacgaaccgacatggcggggagctttatcgattgcgataaattgttttgatggtgaggaatggatacataaaatctcagatcagtatccaacttactccgttacagaaacggaagctaaagcacaatccgtgatagataaaccttacacttgcgacatgttcagtcgtctcaacccggatgtctgtcgtgattgcccccattggggcaaaattcgatcacccattgtacttggtaaagtcattgaagaagcctccgaagaagaattaaagtccattattaaccatattccgcaagcgcgtccggtaacgatacaggatggtcaactcccctcaattacattactgagtaaacaggtcgcggagataacggagcaaccgttaccattgcaccgtgattataaaattgcgtcaagcgcgatgggatcggggatctggaagcgggcaaaagaagcagatggaaaagaaatattaatttataaatatccgcttttatttcttaaccgcgtttattcgccacagaacggtgagtcgtttgtgatgcaggtgacgatgccacatgatccggcacgggtatttgaattaccagtatccgagttacccaaagatcagagtttacagggcttattaagtaaacatggtgtcacggtcacctcaaaagggcaatggggaaatcttatgacctttttacgtcgaaccgcagagcaggctgccgatgtacgggccgctgataagcaacaccaacattatggctggacagatgatatgtctgcttttctgttggggaataccgagtttcgtgtggatggttcggtacgaccaatgatactggcgaataatgggggcagtatggataaagcctttcgtatgagtgaggatgcgtctgtagccggttttcgtaaagcaatggatttaattaatgtgccagatatggagctgccacaatttttgatgggtgtgagttttgccgccccattatttaaattaatgggcgtccagggctgtcttgttcatagttatgcaacgaaatccggtgtcggaaaaacaacgtctgcgcgcctggcggtatcgatttggggacgtcaccaagtcgatggaggcagtggtattgaaggtttgacgcgagacacggcggttgcactatatcgacggctgggtgaattaaatgccattaccatgttcattgatgaaatcactgaacgtcagggtaaagaactgacggattttgtttattccgtaacacaggggcgggataaggacagaggattacccaatacgaatcgtttacaggaaaataatggttcctggactatggcggtcttgtcaacaggaaacttatcactgacacaacaactggtaaacatgaatgcgctgtccgaggctttaaacgcccgtgttatcgaacttgacatgagcaatctaccaagcctatgggggaggagcaacgagcacaaagacttcgttgaacaaacgtttatgttagcccgcacgatacattctggtgctgcaggaagactctggttacgcaacctcatgcgtaacatggatctggtgaaaaagctctgtgaagacgtgagtcgagaatgtcaggcattttttgattttacacaaaaagaacgttattggacatggacagtctcactggggatcgcgggattaattcttggtaaagagttgggggtatgggattttgatgtggcgcgggtcatgaccgccgtgaaagaacagttagaaaggatacgtgtcaacgtcgagcaggataaagtcaccccgacgagtatctttgaacactttatttcggccacgtttgagaatcgtctggaaatcagagcagcaaatacccccattatgtcgaaccagctcccttcgaaagaactcggtttgcgtcaggaaaattacagtcataaattatttattaataaaggttttgcacggcgttggtgtgaaagtaataactatccttttgacctgtttaaagcacacatgaagctattgcaggcacgagatacccgtaagcatatgctggaaggtgtcaccagtattccgacaaaatcaaaaaggcccaatgtttgggaacttgatctgagaggagaaacaaatgactaaaccctcgacacgaaaaaaatcggtgatcccgtctgccgatagcctgcaggagatccctattgagccgaagcaaaacaaagctccccggaataaacaatcgtatgtctcaccggatgcattgcagaagtcggaacagttagagacacaggcagccctattacgttctgctacggaagatgtcgccgtggccgttaactatccgccgtcatccgtacccgaaataccgacaacaccaccggtgatgccggatgtgagcattccacccgaatcatcgtttaatactcaggttatgacgcaattgctgaccgcattagcgcgacagcagccattaaagactccacgtcttgtgactgccggggtcgtcaattatatgcacgtattgaaagatattgatgcagttgagtttgaccaaaaactcgatgatctctatgcaatgttacagtcccgtgcggtagccagaagtgaaaatgccaaacgactgcagaatatgacgttggccatgcacatttaccaggaattcactgagctatggcccaatgcgtaatgattcattcacataacttctcaccgcttgcggtgaggagtgactgatgaaaaaggataaaccacgatgagtgttgtgatctacgatgcccaggaaaattgtttgtatgcggattccctttgtgttgataactatcatcgcatgacgattcaaaaaattttcacttaccatctgaatggtacaaatgatacttcccccaatgcgagtgaaatgtcatttcatgaacgtgggttggcgggttttgttggtgatccgtcaatcgggtatgcacttattcatgcctatatgtgtgggggaatgaatttttgtgagcaaacccgcaaagaattgctgacacatttacgcgatactgatgatgcggatacaggaaatatattgattatccctgaaaaacagaattatatgtggttgacgtcaggactttctgttccttttttccccgtgccaaaacaacggattgtgattggtgacgcacaaataacatcacgggtatacagtaatcttgatcatggcatgtcaccccaagaagcaatagaagatgcctgtcaggtaagtggaaaatttgatgcggcacatttggtttctgggccggtgatccatgtaacgacctcctcacagaactcagagctgtttatcaatttaaacgatatacttagatgaataattcaaagttacgaattaaaatggcataaaacacaattaattttattaaactaataataaacacttttaatttttttcaacttaacttcctgaatacactatatttacctatttaacatagaagccttacttatgccctgtaaaaaaggataacactatgaaaaataaacttattaggggaagtgcccttattattctggcgcttattcttgcaagtatgatgatttatatgagcgtatcccatgcagaaacgttaagtaagaaacaactcattcaggaagacattcaggaaatgaaagcggccattgctacgttaaaccagaatctaccgaaaaggattgataaatatacgatcatgaaaaaaataaaacccaatgataatggattcatttattcctacatcgtattgctgcctattacagaagaaatgaaaaaacagttacattccaatgtactccatatgattaagtcaaactggtgtactcaaacctggtttaacaattcgatttatccgccaattgtctctttcatttatggtggaacaaaaaacacccaagccgtttttatcgttaacaaatatgactgtaattaaaacagttcgtttctctaatggaggttatatgaacgacgaatttttcgacacattcggtatctttttatacattgcttgcattattgggtggttaatatcggtaatatcggtaatatcggatgcctctcatagccgagttgcgtgggttattgttgatatactggtgtttcctatagggatagttagaggagttggaatatggtttggctttatttgaccagaagaactagtgtactttacattcctttttctcagatgactcattatgtaaatatacagaaaccctattattgcattaggtttttattgcctatattcaaataaaatggtttacttgggagtcattaacactaaggaggaaatactatgcagtataccacttacatggaaattacagggacaattcaaggattgctatctaaaaactgttcagatgataatgatcacaaagataaaatacaactcaactatctggaattatcaaaaggcattgatgacttaagtcacataggaaaaataattttagaaaaaaatgtagatagttcttcacctttattatttaatgcgcttgataaaaatgagagtttggaattaaaaatattccagtgtgttgataacaaaataacacatgaatttaaatttaaaaattcgtttatagaaaaaataaacactaagttctcagaagagaatgaaaattcactttctgaaagaatacaaataaaaatagcttgataagaatcattaattatgggcgataaaaaaacattaacgcccatgaaaaaagaagaaaaactatgaatacagaaaaaaacactatttacttattaagtaaactatcacaaaaggaaaataaatccttaagaaattcctatgaaagagaaattaaatccttaagagatgcatatgaaaagggagacaaatccttaagagatgcatatgagaaaaaaattaaatctttaagaaataaacaggaaaaaaagattaaatcgttaaacgatgaacattgtgaggaaaaaatcaaatcgttaaacgaggtatatgagcgagaaatccaatatttgaacgactcatataagaaggaaattaaatcattaaacgatgcatacgaaaaagaaattaaatcaaaagacagatacaatgaatggattagtgacttatttcactgggatctgcaaacaatactagtaaccaactccatattgctattcctttatctaacaacaatatattatactaacaatagcccattaattatgttttttattttcgcttctatatatttattagtcgccccctttttcttaatcacaatatcattagatagaaaaataagcatcccactctatttaaaagcaaaggttatttattttttgagttattttcattatcgtcattaagatacttatccaacagtaaaaccaatttagttgatagattaccaaccctataagcaagcatgggcttgctactaacatgaatttttcttttaagatcagcctttgcccacccaaataacctgattcctcctgtgtcagtgaataatttatctaatagtgaagctttttctaaaccacccccttttttttctaaaggtaagtgtataatccgtttggctttatcatatttagtaagaacggcaaaaccaaaataagcactaaccccaaaatctacaatatcataggctatttccccaacaccctcattggcccctaaagctaaaaaaccttgttctgttgcaaacttaacaggatttaggggatcaactttaccgtctgtaacttcatacaatatatgggtagttccttctataaaattgctacctcctgtagctattcctagaattcccatagttttaagttctttactctttgttagtttccccattctaaacgtcgctactcctaatccaaactgcatagcaccaccgataatagttaacgactttttaccataaaacacataccctttccctgagtattcttgcgtatttaaataagcttgtttatctttttttcgtaattgttcataaccaaatctttccgactcaaattccaattgtatctcatcgacatattttgaagcctgtgtccaatattcaccgcctcttccttgttcataattatataaggctgcttgaaaatcattttttatcaacctgacaacctgacttatttcatatttatagccatttttatactcaatgtaatccaatagataagcggatgcatattgagaaatcttaattaattcattcgcataaaaattaaatttagtctctaacggtgatgacattagtataccctctcatcccatatactgtaagaactggttccggcagtcacatgttcccacgtaatggatttaaatttaatagagagtgactcttctggttgagcatcattatgtgttatagagtttggacaaaagaaattgatattcaccaaagccgcctcggttaatttaattttataatataactcaagtccgccactcatcgaagtgcggtaaaagaaaaactcacaggttaataactcatttgatgttaatgcttgtgataataaaggcgatgatttatcgataggtttacgtatatcgataggttgaaaattgacattttgatgcatagataaattagaggataattcattaaccagtatttcgtcttcatggcctttttgaaatttattgcctatagaatctatagtagaacacccgctagaaatcaaaccttgtttatttcccatcatcttaagataaataatattcgccatcttcatatcctgttatttttaataaaaaaccataatattacaaatagaatcaaaataaaatatttaaaatggaaaaaatttatacaattataaattcaggcacccatcataaattatgttaaacaggtaagtttaatcactaaaaatacccgttagggactttaaaaacacctgtaaacagggatgatggaaatcacagtttatttaacgcgtttttaacgggaacacagaacataaaatactctctacacgcatcaagtttagaatatagttcacaacaccacgaatacaaaaatatttacaattactaggtatattcaattaatttcattattgaatatttttaattatctagttaactagggtaattactggacagctgcgataaaggaattggaatttcatttatctaaatttgaccagaagccttttaataaggagcaagccccccttacctgcaaagctgtgagcgaagcgaactctcagcacagaacttgctagtactcgatagcatagcgtcttagatgatgatttgactgttttgtttttcagctaaaatagcggtaggatgttactgttttattcttttttctgagtggcgcggcgttagccgctgcaagcgaagtccttttttctttttgtttccttttgcatcaattgtcactgtttttcctttgaacgtagtgaaaaggactaacatcttgcgttgtggcctttatttagaggcccaacgcaatgctattccttatttataaggcttttttgttcagaaataactttcgaaattaattatattcacaggtcattgttcgaaattaaatgaggatttattatccaatcggcgagtgttaagacagatgatctcttttaagagaaaaaaatgacataatcgttggaaacgcccatgcttcatttgaacaaaaaacaatccacttgcgagtaaagtcaacggaaaaaccgcgcctgtgcacggtttcattgatatgacgattaaaccatcgattaggtgagtatgaccccttcctgttcaagcaagagacgataaaactggtctgaattttccgctaaatgcggatgctgtgcctttaacttgttccgggcaatataaaccgccgctggtgttgttgtatattgccactgaacatacaaatcccagtatgatcgagaggttttattttttttctgcaagcgtgagagcgcccgctgagtaccattcagttccgcttccagattctctgatttaggcttatccaaaccgtcaattgtctcttcaatatgtttgatggctttcgctttctcttccagtaaatcaggtgcaacaacagatcgttttatgtttttcagtagcttacacaaggcgtgtttatttctgatatcaattcccaatctttccatgcgtaataaatggcgctggtattttttattcagattttcaagctgaccactgtcaacggcccagttctgaaaagcgatcagactttgccggatttcctcacgaggaatgcctttagagatgaaaaaatccggtgtcagccagatacgtactggtttattttgtccagcgtcacgatctttatctcgatgaaccacaagatgcttcatttgttcaaagacagagagtgcgtgtaaggcaatatcatatgctttacgaccattctcatattgatgcagtactcccattgtactggcaataaattcaaagggcaccatcacttcaaacaggtaatcatggcccggaaaaaaatcggcatgagcgactaatgccagtgcgagcgacgtcattgcttcacggctttccgtacgggcacgcacacgcatcggcttacgggtataatggatattatttcgttcagagtagggtatgtatcccttttgtcgcagggtgattaggtcactatctcgccaccagtcgtggcttttcaacgtacgagcaagacgcgcaggcgttcccctcggaacctgaatgttttgattcggtgtattacgccggtggattttggactgcccttttctcagggcattggactcaccacgccgggtacgaatagggtaatcagaagttgatagggtgtgttgaactttatacacaacccctgcacttatggcggggatcaaaaagttgcaatagaagtctcatcgttctatactcctacacagaaaccacaaacgatttctgctctatgataccccgtaattctgcttcctccgccaagatgactcagattatggggtttctgctttttagccgccagtgaatttcgcgtactgacggtatcttagtcacctttcggcgtgactgaccagaaattctgatttaaaaacacacattaatgtctattaactttagcactctaacgctcaaggatcaatttatcctcatgagggggtgccaattttataaactttgtgacatctacgcattatctctgtttttaaacgcattcagtacccgataaatggttgcttcaccgagtttaaaatcctttgctaacgtccctattgttacccccgattgacgacgctgataaatgtcgtttcgcatggtatcatttaattttgcgggacgcccgaatttaacacctttttctatcgctttggcaatcccttctgcctgacgttcgctgcgtaagtcattttcaaactccgcaatagatgccaacatattgaacatcaaacggcctgccgatgttcgggtatcaatattttgatccagaacaacgaggtcaatatcttcttcctgaaagcgggtagcaatttgtgacaagtgcgtcacagaacgggcgagacggtctagctttgtcacaaccaacgtatccccgtcacgtaaataattcatacatgcctggaactgtggtcggtgcgctgtccgaccactccgtttttcctggtaaatccgtttgcagtcagcctgagttaatttttcaagttgaatatctaaactttggcctgttgagctgacccgtgcataacctatctttgccataatttatcatcgctctaaagacatttgattatttatcatagtctttttgcgaccatacttcatgggctattaaaaataatttgcactttttgatagactgttgaacatcaagtaatacattcaaaatccccttcttcttatcatatcgtgattaagaaggacaacatctactcaacaaacgatgaaccacaaagacagaacgtgtcgaagcggataaaaacgttgagtaccgttgattatcttcggaattttaatttaatgtgttttccctggctaaataaaaacagtaatacttgaaaataaaagagataaaattgtgataattataagaatatgttttcctacatatgtgttaatgttaagtattattactcagtcttacagagtaaaaattactcatattacgtatgaaaaatatatttatgagggcatctacaaaatagatcattaaagatgatgcagtttgtattgcagtcaaagtgattataaaaaacacttatgctatgtttatcaattctgggaataaagttgactatcataaccgcaatattggagaaaaatgacatataacactttatagttaatagagggattggacaggtgaattattagagaataaagttcacgatgtccaaataaattgatttattcaggaggaaattttctgtatttattaaaatacagtatatcaatttgccatttatgaaaatgtaaaattaatttttcttataccctgagtcttatccttttcatgatcgaatatattttttggatatatgtaaatggctatttttctaacgtgaaagacattgaccccctgaaaaaactttcgggtatatagttagctatgttattttcataacaataatcaactaaatccctcttacattttatccctgttttttgatatatattttgaatatgattggcgattgttctttgggataaaaataacctttcagcaatttctttagtcggaagcccctgtagaatataaaacactatttcccactctcttttactaaaaaattctgagggtggtgtaaaaactaatgaggtttgcacatttattttgtctagcctttcgagtgttatcgtatctacaggtctgccatgaaagatagttcctcgacataccccattttcatccattaatggatacttatcacaataccacggctgaaggtagggaaggttgtcaaaagcatgaatttcaatagaggtcactctatcttctaatgcttcaactcgcctgtcctgtctttgaaattcatcctgaaaatttgacgtgcatgacggaatttcaccatcaaaacgaccttctatattatatcctttaggtagacaaagtaattcattgtgttttttattggcatagataaaccgtgaattgtggtctttcgcaccccaggcatcattactcttctcccaaaatttaattaacggcataattaaactttctattgatctattcatacgttaccttttgcatgtcttcctgattaacaatttattctcaagtttataatttatattagaaacaatattccccctctttgtagctttacgttatcagattaaatgtttaattgaaaacactcaatattaaaaataaataagaggtaacagattaattatgtaattttttaatctgaatgaggtgtaatttttgatgactaacaattcgattataggataaagaggaaatggttatcgcagttcactttgacactcttggaagatgatggaatgtcaattcacaacataatgaagaccttcaaggataatccctccccataagataccgcgccaaaaggcacaacacggacaggtataggcagagccaacgaagaacgaatacacatatccgagtggggaatgccatccacataaaacgcgtttcagcaaaggaattttagtgttcattaacgatatcctgcagttcaatcaatgccttgccataaataagactgctctcgtcatcatactgacgcatcaattcctgataatgcgcaatcgccgcttcatcaccgtcataaaaggctttgtccaatgcgccattaagttgtgatcgtgtcaggccctcaacgcgcagattacgcattgcctttgcccgctggttttcaatcttagcaaccggatcgtttttcatcaggacattatatgaaccctcatcattcagattgttaagacgacctgccgcagtagcctgagtaattaactcacgatatttttgtgtgacagcatagttattcgttttgtaccgataagcactcgtcgccgtctgcaggatagcattatctccccatccaacaggccgaaggggaggcgtcgtggtattacgtaccatgttataaataccaccgaacaaagatgagagcagcgcatccgttctggccggggaaatatcgaccataccattcgatttttcatagaagaaacgagtcatgtctttaagaaactccggtgtggtcgtcttgccacgttcaacgtttgccggagtcgtgatctgtttgccgctccagtctaccggatacttattatcgacttcttgcccgaactcgttcacacccattcctatcgtgataagcggctgggcggctgtcggtagcatcattcgcgtgacagtgtaactatctacatcaccggcaggctgaacgggcacaaaggtttctgctgcagaacgaaggagtgacccaacggcttctcccatgtctatttttccgtgtcctaacaaaacgaggttctgtatcgagagcataaaaggacgtacttcataaggcatttcaccacagatatccccgaaacagatagacttcttgcgcgactgactacgggcgaactttgagccgccatccgtatcttcatcatcgggatcatcaagcgccgattgtgtggcagcggcagccagaatgcctaatcccatgagaccgaagcgacccacttgtgtagacataatactggatattaacggcaacgattgcattcctgcattccagaaagcaaaaaatgcgggtaagattttacctgaaccgtgtcgggtaaagttacccgaagtcattcgccggttaatacgagtgatcgttagtttatcgggtaattcccccgcaatcacaaaggggacgccttttgttaataccaccgcttgatacgcgcctgtctttgttcggaaagaaacaatacgaacgacctcatcatccacaaccagcgtattggcttcgggaaacgcatgaggttgtttatgtgcggaaacataaatatggcaccctgaccaaaccaaaatcgccccatagccaatattggcaactccctcagcacagggcaccggataccaggtttgtgtcattaatggattgccaccggcgaacaaatctggacaaaagacaaacgccagcgtctttaccgattgttcatctatctgtgccatttctgcttctttatctcctaccaaaagcatataccagcggatcatagtggcattaaccggcggtttttctgttggcaccaacatgaccgattctgcataggggacgaggatcggttctgaataatcacttggcccggactcttcttgacactctgtcacccaggtataacaaaaggtcagtacctgtgggggtaattcctgattcggacaatcctgtgcaggttcacttggcaaccctttttgccaacaatcatcaggtacgggaatatcatcccgacatttttgtcctgtcaatgttactttaggtgccttgattggacggggtatacctaatgccaccggccccgctttgtctgttatccatgcatagctacactgttttctttcgcagagctatatgcaccaatagcaatagcgtgatctgctgttgcatatgtatttgaactcatagcaatagattgccttcctgttgcctgtgaacctgcacctatcgctattgcccctgtatcatcttcagtaattgctcccgcagaacccgcatcttttgtatccgatgtaagagacaaacattgtggcaccgttggatcaacaccaactacatataatccctctggagtaaatttcagcccgtttccatctttcaccgaaatattcaaatgaatatcattaccctgcgttaccttaaacgcttttgaaaaagataatagcgcatcaatcccatcaggactccaattcaaaatactcggcgcattactatttatcttaactttatatggatcggcttgcgttccgtgccctgaaaaaaaagatgagtcaaagactaatttttcgttctcactttgaggactgaacaatccatcatcttctacagtcagtgtattccccgctttcttcgaaatcctcagctggacattataaccctgcacaaagttaaaagcgtttgaatcaaaaagtaatggcacattaagtccattaggactccaacccaaaatattcgtctgcgaattgttaatcataactttatatggatcggtttgtgttccctttcctgaaaaaaaggtcgggtcaaagactaattttccgctctcacttagtgggctaaacaatccatccttttctaaagtcagtgcattctcttttttactggataattgcacgccaattgtcgttgtcttatgtgtctcatcaacaatggtctgctgagtgatgattgattgatcccttgcactgattttgtcttctatggttgggccaactttccctttcattgaatcagcaaaggcttgctctgacgtatctgttccgggtagttgtcttgacttccagaattcatacgccgattcaccggtcttcccttccatgaatttctcaaaagcacacggcgatgtatccgaacccggaggttgctgttctttccaaaattcataagccgattcgcctggtgcaccacgacgcataggacgattacctaatgtgcgatcattttcacaacagctcattttttcaccctcaataaacctattttttaaaaagtatatatcttaaccaatgacttttatatcgtattcccaactgtcaccctttttcatatttcactcccgaaatcagaatatttcacatggggattttgcgtatagaaaagtacgccagaaactcatttactcaaatactcatttgagtttttactcttatactcattatctcatttacttatatgaagttatgcatttttactcctttactcaccttatttctttacagattaggttgtttattaaatactaaggtgtttattaagtaatacttctatcatttgagtaaatgtgtatatgagtaaaaacacatttgaggatataaatatgaaagtactttcttttctaaatccgaaaggtggctcaggtaaaacaacagctgtcattaacatctgtaccgctctaactcgcgcaggattcaatattgcggttgtcgatactgatccacaaatgagcctaacgcactggagcaaatcagataaagctgcattcgatgtattcacggcggcttctgaaaaggatgtctacagcatcagaaaagatttagccgaatatgactttgttattgttgatggtgcaggttcattatccgttatcacgtctgcggctgttatggtaagcgatcttgtcattattcctgtcacaccaagtccattagattttgctgctgcgggtagtgtcgtgactgtactggaagcacaagcgtatagtcgtaaagttgacgctcgtttcctgataacacgtaaggtagaacacgccttaatgcttaaaatactgaaagaaagtataaaagagaccggtgtcgaacttcttcgtacagcaatcacaaaccgtcaatcttatgtcaaatcaatattagatggtgagagtgtatttgaattaaatgatggcgcggcaaaaggtgaaatcgaggttctgaccaaagaaataactaaattatttgagtaattactcatttactcatatgatgttatgagctgattctttgggagaaataaaaatggcactcgaaaaagctcatagtagcactaaaaaaatgacctttggtgaaaatcgagatctagaacatgtgatgggtacttcaccgccgccagaagtaaaaactaagcgtgtaaacgtcaattttggggaagaaaaacataaacgctttaaggccgcttgcgtaaaaaatggcacatccatcactgacttaatcaataaacttgtcgatgattggttaaaagaaaacgaaaataagtgactgttcgccacgatagggtggcgaccgttcatagcaaattttttacttcacatttgtattatttttcagaattattcagttcattattgacgcgttttaacgcagcgtattcatggcgaatcttgccaaagaccgccatagcctccccatcaattcgaacctagagcagttacagacgttgatctttaatttggaaaaataaaatatgttttgtttttatcttgtttatgctttgtttaaaaaaaaataataatattgttattagcctaaataggctattaaataatagttaattaattttaaattatttcattataaaataaaaaatatccattattaaattggatagtaaggatttattatgaaaataacttactctaatttcaaaataataatcgcagcttatctattaacattaattccaacaatatcagtagcaaaaacaattgaaacatcatataaatatcctattaataagctagttgttcaacatgaatataccaagttaccttatatacttgtcaatggtaatggcggaaatcccggaggtaatggtgggaatggtgggccaggtggagctggcgataattcccctggtggccctggtggcaccggaggcgatggaggtaatagtggaaatggcagtggaaatggaaatggaagtgggaatggaaatggaacagggaatggaaatggcggtggaaatggcggccataatatttaaataaaaaaaaataacgtatctgcttaattttttataatttaaccagatgcgttatttcacatttttaatactttttggagataaataaaatgaaaccatataaattaattatcgctgtttctatattgagttttccttttctatccttacaggctgaacccacaaataattccacttccactatgaaaacaaaaatagccaaaaatacgaaccctactaattgtgatgatttaaatggaggaaccggtcaaaacggccagaatggaataccagggagtaattgtattaatggcggaaatggcggcaatggagcggaagacggtgggagtggcggaaatggcggcaatggtgctgcaggcggtgggaatggcggaaatggtggaaatggaggagctaatggaggtgccggaggtaacggaggtgatggtggtagcggtgatagtaattgaatagaaggagagcactatgaaccatctcaaattattattcgtctttatatgctcattaacagtcgcctcagtatcagcttcaaccaattcattcgtaaagagttcgtctcataataacggttatgttctcattgcaaatggaggaaacggtgggaatggtggtgacggagattctggagggaatggcggaaatggcggtaatgctggtacaggtgataattctaatggtggagatggaggaaacggaggaaatggcaatggagccaataatcctggaggtaatggtggaaacggcggccccggaggaagtggtaacaattcttccggcggtcagggggggcacggtggtaatggtggtcacgatgggaaccatagtactgtaatttaaggagctaattatgataaagaaaaaatcatttttattatgtctactacctttatctatgtttatctgttcttcactgatttgtacctcttccatcatcttttccccaacagttcacgcagcagaacacggaaatgggggggatggaggaaacgggagtggttcaggaaatggcgggaatggcgggaatgcaggaaacggaagcaacggtaatggcggaaatggcggcaatggtggagctaatggaggcaatggcgggaatggaggaaacggaagtggctcaggaaatggcggtgacggaggtaatggaggtcaaggcggtcatggaggtcatggaggtcacggtggcccaaatggtgggcatgatggacatgatggacatgatggacatgatggataatttatatactaatcaaataaactatcaccagcttaaattggtgatagtttatttctgaatccttctcttaagtagcacaataacgtaccattacattaatcatcagaacagcggccatgaatttgatcatgaggaaccttatgttcatattctcgctcgtttatcacccgaagatggtatctaaacgttatgatcaaataagcctgttttgcctgctccacgatatgttggggtatttctgctcccgcatgagcacccccaggtgcacaacaggcatagaacacactgacgcctaataattttcctaaatcagttgctgatatgttgagttttaaccactcatgaaacatttgatcaccctcgtcataaggcgtcatgtctaatgcttcaaaataaatatcctgcattgtggtctgaaattcgccacgacaaaactgaatacattgtctcgtgtcatctttatttcctataacaacaatatcctttttacgggcttccaaaataagtttatcccagtcgttatctgtcaggtgtttcaccttatcaagcgaataataaagttccagccccagtgttccctcatacatttctatggggagagaaaggggggagtacgttatttttggtacagaggataatgctttttccatgtcggccagaatggtttcaacaatattgtgtctcatctctattccttaatacgtttattactggaacaagtatagtagccgacattctcctcggacacgttggtttttttattataaataaggggggaggggtctcttttgacataggggcattggtatattttaaaaaacgatgagaatcttgtgaggttgccccaccggccgccatgcgtcatggccaccgaatttcccataagggggacttccctagcggctaaaacgtacttctttcaccagatagaacgcaaattaacttattgattattaacataattttaattatataatgacagtaaagcgcagtgtgacaggctttattgtctatatcataattaaaagttcccttttctattcagtcaattagacacaaaaaagccccgctaaacgcgaggcagttaataactgatacatttttaatctatcaaaaagtatactttttgatgtttacagaatttccctcttaaaagtcctatcataaatgttttatcaaatcatctaagaaataatgatagtattttgccttttaagttcagaatagcagacataaaaaagccccgcatagcacgaggcatataatatagatcactgatttttattttatctcgtcaatttctggaatgggttgttctttcattgcgtccagttctagtaacaaatctaaacgattggtaggatcaagctgtaagaaaagcgattttatcagcttatattgtcgtgcttgtggcaacatagtaaatccctccgctatatcacacatttttgttactgcgaggaatgatttagccttgatttcgtcgtcgcgtgtatctgcccctttcccgccatttttcgcgttatcatagcgactttttgccgcattaaataaacgccttaaattattaaataccacgtctgcattgacgcattcgtctgtattactatcaatcgcagttgctttcagctcgcccctatcaaacatatctttaatttcttgtttgaaaaagggtaaaacagtttctaacactgatccttttttaactatttgagttacatagaaaataaaaacttccgcttttaatttatgatctgcttttgctacgcgatatacttcattaattaacgttttacgcgcgtctaaaccatttagtttgtactgatcatgttttgctactgtctctttcacttttttcatatccgcaatcgcagcggctgcaatagtcgcgtttgccgcgcttttcttttgcgtcttaacggtattcgtcaacataataaatcctctctctgtaagtggctatattgcctgatatgcaatcaatataggtcattaattaacctatgtcaatttctcgatactaataacaaaaataagaatactgtatttaatcacacatgtcgtttttataacaatctgtatgaggaaaaatgatctcattattcagaaagataaattccaaaaacgaaaacatttcaattggttaatgagatgtttttctttttttgcgatcacatacgtaaggtgccgttatttcgccgaagagaatcagatgtttttcatacaccgtcaaaatgaatattaagtcacttttagtgaattaatattcaactgtattattaagttatgctaatacacataatttttttttattcattctctgtgtgcgcgtcacagagcaagcagcctatatgacatacctgtattcccgccgtgtgcagaaatgcgctgtacattatttatagaacgattctttctgtacatttcaagtagcaagccgctctgtgggagccagaagcaagcgaaatatttatttaacaaattgatacatagcattaacaatcattataaattattcctttctttatcaatcagttactgattagacataatacagctattttgtactttgatgtgatgtcgtttgtaacctgttgttatttaagtgtgcgcaggaaataaaatttgtatagacgtttgctaaacgtatcggcgcaccttatgtcatgtattatctctctctgtgtcagagatacagctatttttattagaaaaaatcgcaaaataaatggcatgaggaaagaaaaaagaagtatgtatataatattattaattaataataaatatataaatatataaataaacgtattatttagttctctaaatatcgtgctattttttactgttttttgcaaaaaagatctatcgagatcttcgagcctaataaattctcttctatgctttctcccattctttttatttctattgttagcgagatcttttgttagtttttagcaagtgtcatattgtgtgcaatttttctatttaacatcttgattaaaaacgagaaaaaaatgctgcaacgcttaaaaatacctacgcaataaattgattttattaaataattatataaaaagtggtagcaaaaatttaatagtacactctaatttatcacgtgatttttatgcaaaaatgaaataacaatcttgtcaattgacatatctctatttcttggaaaaatcaattccgtctattaactatcaaaaggattaaatccatgaaatccaatgaactacatgtacaactccatgaaacgcttatcatcgaattagaatcattcctacgtgtgaaaaatatcgataaagccatgtttatctgtgaggcacttacacgtcatatgctgttattagatggcgcacctccgacaacactgcttacgcgatatgaagaaggcataacacgcagagataacgttattcaaagcctcgtatgggattatcaggaattaaaacgcggtatggaaacgctctgttttaatatcgaggctacgataacagatttaaatcaggatgctgaactaaaaaaactgagtaagtgatctggtctgatgatacgaaaggtaaatcaaaacaagaggaaattttaagatgaatatgtcagaactgactgaacagatgaaaccggaatatgttttactggatttatctaaagaaggaactttccctaaagtatttgtgctagaaggcgaatttctgcctgcgacagagacacaactggcgcgtatcgaattacgcagccgtgatgcgcaaagtgttatttatctccgaggtagtatggatgcgcaggatgcagcatcggctgccgtaaaaaaatattatgagcacgtaggcattacaataagtgatacggtagtggagcatattgtgttcgattggcctaaaacaatgaagtttaccgtcgtactttttgttgttgaaggcgtattatgcgctttaaagaaatgagtatcgaaaagccttagtcagaattatctaaaatttttttatttttcattgtgcaaattacaattagttgcaatacttctttttgtaacttgcacagcgattcctagaggtaacttatggcaatagaaactatagatcattccacgctataccgtttagttgaagcgggtgtggttagtgaagctcaggttgtgagtacgcttggtggctgggtagtgacagtgaaatacggcatgacagagtgttcgttagccgctcaacgcagtcgtcaggtacggctgtttaaaaaattggaaacattagttaattacctgaaaaacgtaggcattgcacagtttaatgttgatgcgtccaactatagttcggaacaccagagcaagaatgcgcgtccagatagagccgtggcgttaaaacgggcgcatgaagcggcggcctatgatgaatggttcagaacacaggtacaaacatctcttgacgatccgcgcccagcgatagtacatgaagacgccaaacgtcattttgcgtccctaaaagacaatctacgtaagaggatatgatgcgtcttgagtggaaacctatggctttggctgacagggagcagattatggagtatatcgctcaggataatccacaggcggcgattgcgcttgatgatgaatttgaagcatccgcagaacgagcttgtttgcaacctgagatgtataaacccggcagggtaaaaggaacacgggaaatcgtggtgaggccacattatattctagtataccgtgttaaacgggatatattgatggttttacgcgttcttcatgctgcgcaacaatggccaacgacgaaataaccggattttggatggttgaggcataaaattccagaacagtgataagacataagggtctaaaagggggactaatgtcacaaggggcaaggttcgtagagaacagttatttaaaagaaaccacagaggctatgcaggcgcagctaaaagaaacggtgtggttttatatgcagggtaatctggctgaaacgcgggaactattacgttgggggccgaagaatcccgcgtgtccacgtgtgtcggatattcgggcatggatgaaaatactggatctgaataccgtcggtattgcgcgtttatttggcgtccaacggacaaccgtagcaacaaactatctggggccgaaattggataaacaggtaggtatgactgtaccacgcctgctgcgtgccgcattgctaacaggatattttaaacacaatcctgatgctccccagtattatgcggcgatgagcttattggatgaaatcatcaaaaacggcgagctggacaccatatggtgcaaaattgtgcaggctaaacgcaaaggcgcaaaacccgaagtcattgaccagttaaggcaatcggccattgcgaccatgtgtccgcaatatcccgtgagtttatcagacgcgagcagtatgacgggatcggataataaaattccccccaaaaaagtacgaccatcgcgggaagtttatcggatggaagcggctgacaaacggcgcttaaataaggattactcacgccatgtgattgttgatgaagattttacgggcgcgacattggacggcatatacaatgaaacggtattcgtaaattgtatctttaataaaaccacgttcgtgggtcagttctatgatgctgaattttaccaatgtcagggtacagaaatcttactcaacggcttatttgaccgtgcgcagttctacgaagcacgatttgatgtgctcgaactgaaaggatcattcacatttagccgcttgatatcctccttctttggtaatcccaacggaatagaggcacaaccggagcaatttgcaggcgcggagggtattctctcctatgtggatatttccctgccagaaccccgcacgatacaaggccgcgaaacattgtcaaaatggatacaaatttttcctgcagcaaaagcgtggtcacgaaccactcagccaggcacaccaatgggtgatgtcttacacgcggcatattttggggaataaggtagcccgtgatattgcgcagcataaaatctggtatacagaagttgcagcatattctctaaacgcaataactgagattgcttgatttacgaccacaacatgcgataattgtattaatagttaatacaacggaggcgatatgagaaagattacaacgattagtatgggcgatcagctcgacggatttgttcagcgtatgattgaaagcggtcgctatggaaacgccagtgaagtgatgcgttccgcattgcgtctgcttgaacaacaggaagcgcatgatgaagtgatacgcaaggcggttattgcgggtctggaaagtggtgaaagtgcattaaccttacgggatattgccgagcagaggaagcgtaaacacaatgtatagactctcaaaacaggcagccgaagattttgccggaatttatgactatacgttctggcaatttggtgaagctcaggctgaccaatatacggaggcattagaagagttcttcgatacattagccagaatgccgcatatggggagggaatacgatgttgttcctgacgttatgcgcattgagtttcacaaacatacgattttttataagatccgagaaaacgatattttcattgtgcgtatcctccatcaacaaatgaatcacgctcattacttcctctaaatagggaaataatgagcgtgattttgtcatatattcttttcttcgtttaagattaaatctcatttacatgatgatgcaacttctcctgattttgtttatataaatacaacgtctggatattttcaatttcaaccataattaaagagatagcccatgctgattatggcatgggttttctttagccccctaatttcgggttccgccgaagaacccccaaaagtgacgattctgagtaccgttacaccgtagcgaggattttatagactgtagcacgcgctatttttaattgtctcgatatgtttgttgctccgataccttgttcatgaagatggcgaacttgagctttgtctattgtgggtttacggccaaatttaacccctttagctttagcctccagacggccttcgtttgttcgctccagtattcgttggcgttctgcctgagcaaccgcagataaaatggtgaccaccatcttgcccattgtcccttctgtgctgatcccatcatccagaaaacgtatggcgactcccctctcatcaaattctttgatcagctgaatcatatcggcagtatcacgaccaagccgatccagctttttcaccagaataacatccccttcttcaatctttagccgaagcatttggagaccttctcgatccaggctactgccggtcaccttatccgtaaatatacggtctgctctgaccccttccgctttaagtgccttcacctgcacttctagtgattg

SEQ ID NO: 3661 - DNA, 35411 bp, Xenorhabdus sp.; identical to SEQ ID NO: 3660
  CDS (34379)..(34642)

SEQ ID NO: 3662 - DNA, 35411 bp, Xenorhabdus sp.; identical to SEQ ID NO: 3660
  CDS (2)..(526)

SEQ ID NO: 3663 - DNA, 35411 bp, Xenorhabdus sp.; identical to SEQ ID NO: 3660
  CDS (567)..(794)

SEQ ID NO: 3664 - DNA, 35411 bp, Xenorhabdus sp.; identical to SEQ ID NO: 3660
  CDS (1114)..(3087)

SEQ ID NO: 3665 - DNA, 35411 bp, Xenorhabdus sp.; identical to SEQ ID NO: 3660
  CDS (3181)..(3402)

SEQ ID NO: 3666 - DNA, 35411 bp, Xenorhabdus sp.; identical to SEQ ID NO: 3660
  CDS (3677)..(4222)

SEQ ID NO: 3667 - DNA, 35411 bp, Xenorhabdus sp.; identical to SEQ ID NO: 3660
  CDS (4253)..(4549)

SEQ ID NO: 3668 - DNA, 35411 bp, Xenorhabdus sp.; identical to SEQ ID NO: 3660
  CDS (4533)..(5105)

SEQ ID NO: 3669 - DNA, 35411 bp, Xenorhabdus sp.; identical to SEQ ID NO: 3660
  CDS (5763)..(6701)

SEQ ID NO: 3670 - DNA, 35411 bp, Xenorhabdus sp.; identical to SEQ ID NO: 3660
  CDS (6704)..(7123)

SEQ ID NO: 3671 - DNA, 35411 bp, Xenorhabdus sp.; identical to SEQ ID NO: 3660
  CDS (7149)..(8876)

SEQ ID NO: 3672 - DNA, 35411 bp, Xenorhabdus sp.; identical to SEQ ID NO: 3660
  CDS (8919)..(9353)

SEQ ID NO: 3673 - DNA, 35411 bp, Xenorhabdus sp.; identical to SEQ ID NO: 3660
  CDS (9542)..(12313)

SEQ ID NO: 3674 - DNA, 35411 bp, Xenorhabdus sp.; identical to SEQ ID NO: 3660
  CDS (12336)..(12857)

SEQ ID NO: 3675 - DNA, 35411 bp, Xenorhabdus sp.; identical to SEQ ID NO: 3660
  CDS (12924)..(13517)

SEQ ID NO: 3676 - DNA, 35411 bp, Xenorhabdus sp.; identical to SEQ ID NO: 3660
  CDS (25159)..(25773)

SEQ ID NO: 3677 - DNA, 35411 bp, Xenorhabdus sp.; identical to SEQ ID NO: 3660
  CDS (25826)..(26065)

SEQ ID NO: 3678 - DNA, 35411 bp, Xenorhabdus sp.; identical to SEQ ID NO: 3660
  CDS (26698)..(26793)

SEQ ID NO: 3679 - DNA, 35411 bp, Xenorhabdus sp.; identical to SEQ ID NO: 3660
  CDS (26972)..(27238)

SEQ ID NO: 3680 - DNA, 35411 bp, Xenorhabdus sp.; identical to SEQ ID NO: 3660
  CDS (27782)..(28081)

SEQ ID NO: 3681 - DNA, 35411 bp, Xenorhabdus sp.; identical to SEQ ID NO: 3660
  CDS (31241)..(31561)

SEQ ID NO: 3682 - DNA, 35411 bp, Xenorhabdus sp.; identical to SEQ ID NO: 3660
  CDS (31611)..(31967)

SEQ ID NO: 3683 - DNA, 35411 bp, Xenorhabdus sp.; identical to SEQ ID NO: 3660
  CDS (32084)..(32524)

SEQ ID NO: 3684 - DNA, 35411 bp, Xenorhabdus sp.; identical to SEQ ID NO: 3660
  CDS (32934)..(34004)

SEQ ID NO: 3685 - DNA, 35411 bp, Xenorhabdus sp.; identical to SEQ ID NO: 3660
  CDS (34168)..(34386)

SEQ ID NO: 3686 - DNA, 35411 bp, Xenorhabdus sp.; identical to SEQ ID NO: 421
  CDS (16588)..(17526)

SEQ ID NO: 3687 - DNA, 35411 bp, Xenorhabdus sp.; identical to SEQ ID NO: 421
  CDS (12035)..(13630)

SEQ ID NO: 3688 - DNA, 35411 bp, Xenorhabdus sp.; identical to SEQ ID NO: 421
  CDS (10620)..(11762)

SEQ ID NO: 3689 - DNA, 35411 bp, Xenorhabdus sp.; identical to SEQ ID NO: 421
  CDS (6802)..(7293)

SEQ ID NO: 3690 - DNA, 35411 bp, Xenorhabdus sp.; identical to SEQ ID NO: 421
  CDS (5454)..(6107)

SEQ ID NO: 3691 - DNA, 46407 bp, Xenorhabdus sp.; identical to SEQ ID NO: 141
  CDS (603)..(1319)

SEQ ID NO: 3692 - DNA, 46407 bp, Xenorhabdus sp.; identical to SEQ ID NO: 141
  CDS (2665)..(3546)

SEQ ID NO: 3693 - DNA, 46407 bp, Xenorhabdus sp.; identical to SEQ ID NO: 141
  CDS (4237)..(4770)

SEQ ID NO: 3694 - DNA, 46407 bp, Xenorhabdus sp.; identical to SEQ ID NO: 141
  CDS (7915)..(9582)

SEQ ID NO: 3695 - DNA, 46407 bp, Xenorhabdus sp.; identical to SEQ ID NO: 141
  CDS (15082)..(15738)

SEQ ID NO: 3696 - DNA, 46407 bp, Xenorhabdus sp.; identical to SEQ ID NO: 141
  CDS (21551)..(22402)

SEQ ID NO: 3697 - DNA, 46407 bp, Xenorhabdus sp.; identical to SEQ ID NO: 141
  CDS (22409)..(22834)

SEQ ID NO: 3698 - DNA, 46407 bp, Xenorhabdus sp.; identical to SEQ ID NO: 141
  CDS (29762)..(31003)

SEQ ID NO: 3699 - DNA, 46407 bp, Xenorhabdus sp.; identical to SEQ ID NO: 141
  CDS (31033)..(34728)

SEQ ID NO: 3700 - DNA, 46407 bp, Xenorhabdus sp.; identical to SEQ ID NO: 141
  CDS (34795)..(35289)

SEQ ID NO: 3701 - DNA, 46407 bp, Xenorhabdus sp.; identical to SEQ ID NO: 141
  CDS (41002)..(42156)

SEQ ID NO: 3702 - DNA, 46407 bp, Xenorhabdus sp.; identical to SEQ ID NO: 141
  CDS (42200)..(42655)

SEQ ID NO: 3703 - DNA, 46407 bp, Xenorhabdus sp.; identical to SEQ ID NO: 141
  CDS (46226)..(46405)

SEQ ID NO: 3704 - DNA, 46407 bp, Xenorhabdus sp.; identical to SEQ ID NO: 285
  CDS (44501)..(44965)

SEQ ID NO: 3705 - DNA, 46407 bp, Xenorhabdus sp.; identical to SEQ ID NO: 285
  CDS (42218)..(42865)

SEQ ID NO: 3706 - DNA, 46407 bp, Xenorhabdus sp.; identical to SEQ ID NO: 285
  CDS (41277)..(41402)

SEQ ID NO: 3707 - DNA, 46407 bp, Xenorhabdus sp.; identical to SEQ ID NO: 285
  CDS (36442)..(36762)

SEQ ID NO: 3708 - DNA, 46407 bp, Xenorhabdus sp.; identical to SEQ ID NO: 285
  CDS (34047)..(35279)

SEQ ID NO: 3709 - DNA, 46407 bp, Xenorhabdus sp.; identical to SEQ ID NO: 285
  CDS (32456)..(33841)

SEQ ID NO: 3710 - DNA, 46407 bp, Xenorhabdus sp.; identical to SEQ ID NO: 285
  CDS (31446)..(32423)

SEQ ID NO: 3711 - DNA, 46407 bp, Xenorhabdus sp.; identical to SEQ ID NO: 285
  CDS (28302)..(29147)

SEQ ID NO: 3712 - DNA, 46407 bp, Xenorhabdus sp.; identical to SEQ ID NO: 285
  CDS (27770)..(28276)

SEQ ID NO: 3713 - DNA, 46407 bp, Xenorhabdus sp.; identical to SEQ ID NO: 285
  CDS (26896)..(27567)

SEQ ID NO: 3714 - DNA, 46407 bp, Xenorhabdus sp.; identical to SEQ ID NO: 285
  CDS (25471)..(26664)

SEQ ID NO: 3715 - DNA, 46407 bp, Xenorhabdus sp.; identical to SEQ ID NO: 285
  CDS (22798)..(23058)

SEQ ID NO: 3716 - DNA, 46407 bp, Xenorhabdus sp.; identical to SEQ ID NO: 285
  CDS (21363)..(22778)

SEQ ID NO: 3717 - DNA, 46407 bp, Xenorhabdus sp.; identical to SEQ ID NO: 285
  CDS (21029)..(21355)

SEQ ID NO: 3718 - DNA, 46407 bp, Xenorhabdus sp.; identical to SEQ ID NO: 285
  CDS (19731)..(20966)

SEQ ID NO: 3719 - DNA, 46407 bp, Xenorhabdus sp.; identical to SEQ ID NO: 285
  CDS (17727)..(19028)

SEQ ID NO: 3720 - DNA, 46407 bp, Xenorhabdus sp.; identical to SEQ ID NO: 285
  CDS (9569)..(10489)

SEQ ID NO: 3721 - DNA, 46407 bp, Xenorhabdus sp.; identical to SEQ ID NO: 285
  CDS (8530)..(9531)

SEQ ID NO: 3722 - DNA, 46407 bp, Xenorhabdus sp.; identical to SEQ ID NO: 285
  CDS (7789)..(8451)

SEQ ID NO: 3723 - DNA, 46407 bp, Xenorhabdus sp.; identical to SEQ ID NO: 285
  CDS (6564)..(7664)

SEQ ID NO: 3724 - DNA, 46407 bp, Xenorhabdus sp.; identical to SEQ ID NO: 285
  CDS (597)..(1343)

SEQ ID NO: 3725 - DNA, 45355 bp, Xenorhabdus sp.; identical to SEQ ID NO: 436
  CDS (1067)..(1681)

SEQ ID NO: 3726 - DNA, 45355 bp, Xenorhabdus sp.; identical to SEQ ID NO: 436
  CDS (4129)..(4608)

SEQ ID NO: 3727 - DNA, 45355 bp, Xenorhabdus sp.; identical to SEQ ID NO: 436
  CDS (4969)..(5298)

SEQ ID NO: 3728 - DNA, 45355 bp, Xenorhabdus sp.; identical to SEQ ID NO: 436
  CDS (9272)..(9418)

SEQ ID NO: 3729 - DNA, 45355 bp, Xenorhabdus sp.; identical to SEQ ID NO: 436
  CDS (9518)..(9880)

SEQ ID NO: 3730 - DNA, 45355 bp, Xenorhabdus sp.; identical to SEQ ID NO: 436
  CDS (10499)..(10807)

SEQ ID NO: 3731 - DNA, 45355 bp, Xenorhabdus sp.; identical to SEQ ID NO: 436
  CDS (11634)..(12182)

SEQ ID NO: 3732 - DNA, 45355 bp, Xenorhabdus sp.; identical to SEQ ID NO: 436
  CDS (14957)..(15844)

SEQ ID NO: 3733 - DNA, 45355 bp, Xenorhabdus sp.; identical to SEQ ID NO: 436
  CDS (18925)..(25968)

SEQ ID NO: 3734 - DNA, 45355 bp, Xenorhabdus sp.; identical to SEQ ID NO: 436
  CDS (25965)..(26501)

SEQ ID NO: 3735 - DNA, 45355 bp, Xenorhabdus sp.; identical to SEQ ID NO: 438
  CDS (45028)..(45354)

SEQ ID NO: 3736 - DNA, 45355 bp, Xenorhabdus sp.; identical to SEQ ID NO: 438
  CDS (39057)..(40118)

SEQ ID NO: 3737 - DNA, 45355 bp, Xenorhabdus sp.; identical to SEQ ID NO: 438
  CDS (37991)..(38842)

SEQ ID NO: 3738 - DNA, 45355 bp, Xenorhabdus sp.; identical to SEQ ID NO: 438
  CDS (36840)..(37949)

SEQ ID NO: 3739 - DNA, 45355 bp, Xenorhabdus sp.; identical to SEQ ID NO: 438
  CDS (34315)..(34443)

SEQ ID NO: 3740 - DNA, 45355 bp, Xenorhabdus sp.; identical to SEQ ID NO: 438
  CDS (31353)..(33074)

SEQ ID NO: 3741 - DNA, 45355 bp, Xenorhabdus sp.; identical to SEQ ID NO: 438
  CDS (30527)..(31234)

SEQ ID NO: 3742 - DNA, 45355 bp, Xenorhabdus sp.; identical to SEQ ID NO: 438
  CDS (2978)..(3340)

SEQ ID NO: 3743 - DNA, 45355 bp, Xenorhabdus sp.; identical to SEQ ID NO: 438
  CDS (2262)..(2954)

SEQ ID NO: 3744 - DNA, 45355 bp, Xenorhabdus sp.; identical to SEQ ID NO: 438
  CDS (1303)..(2058)

SEQ ID NO: 3745 - DNA, 49018 bp, Xenorhabdus sp.; identical to SEQ ID NO: 119
  CDS (28)..(432)

SEQ ID NO: 3746 - DNA, 49018 bp, Xenorhabdus sp.; identical to SEQ ID NO: 119
  CDS (497)..(1045)

SEQ ID NO: 3747 - DNA, 49018 bp, Xenorhabdus sp.; identical to SEQ ID NO: 119
  CDS (1026)..(1589)

SEQ ID NO: 3748 - DNA, 49018 bp, Xenorhabdus sp.; identical to SEQ ID NO: 119
  CDS (1596)..(2321)

SEQ ID NO: 3749 - DNA, 49018 bp, Xenorhabdus sp.; identical to SEQ ID NO: 119
  CDS (2666)..(4063)

SEQ ID NO: 3750 - DNA, 49018 bp, Xenorhabdus sp.; identical to SEQ ID NO: 119
  CDS (4159)..(4446)

SEQ ID NO: 3751 - DNA, 49018 bp, Xenorhabdus sp.; identical to SEQ ID NO: 119
  CDS (4790)..(5083)

SEQ ID NO: 3752 - DNA, 49018 bp, Xenorhabdus sp.; identical to SEQ ID NO: 119
  CDS (5190)..(6041)

SEQ ID NO: 3753 - DNA, 49018 bp, Xenorhabdus sp.; identical to SEQ ID NO: 119
  CDS (6241)..(6360)

SEQ ID NO: 3754 - DNA, 49018 bp, Xenorhabdus sp.; identical to SEQ ID NO: 119
  CDS (6840)..(7997)

SEQ ID NO: 3755 - DNA, 49018 bp, Xenorhabdus sp.; identical to SEQ ID NO: 119
  CDS (8182)..(8592)

SEQ ID NO: 3756 - DNA, 49018 bp, Xenorhabdus sp.; identical to SEQ ID NO: 119
  CDS (10186)..(10722)

SEQ ID NO: 3757 - DNA, 49018 bp, Xenorhabdus sp.; identical to SEQ ID NO: 119
  CDS (11274)..(11849)

SEQ ID NO: 3758 - DNA, 49018 bp, Xenorhabdus sp.; identical to SEQ ID NO: 119
  CDS (24651)..(25625)

SEQ ID NO: 3759 - DNA, 49018 bp, Xenorhabdus sp.; identical to SEQ ID NO: 119
  CDS (25830)..(26282)

SEQ ID NO: 3760 - DNA, 49018 bp, Xenorhabdus sp.; identical to SEQ ID NO: 119
  CDS (26313)..(26771)

SEQ ID NO: 3761 - DNA, 49018 bp, Xenorhabdus sp.; identical to SEQ ID NO: 119
  CDS (26794)..(28143)

SEQ ID NO: 3762 - DNA, 49018 bp, Xenorhabdus sp.; identical to SEQ ID NO: 119
  CDS (30042)..(30923)

SEQ ID NO: 3763 - DNA, 49018 bp, Xenorhabdus sp.; identical to SEQ ID NO: 119
  CDS (31207)..(32190)

SEQ ID NO: 3764 - DNA, 49018 bp, Xenorhabdus sp.; identical to SEQ ID NO: 119
  CDS (32198)..(32494)

SEQ ID NO: 3765 - DNA, 49018 bp, Xenorhabdus sp.; identical to SEQ ID NO: 119
  CDS (34034)..(34642)

SEQ ID NO: 3766 - DNA, 49018 bp, Xenorhabdus sp.; identical to SEQ ID NO: 119
  CDS (36267)..(36572)

SEQ ID NO: 3767 - DNA, 49018 bp, Xenorhabdus sp.; identical to SEQ ID NO: 119
  CDS (44233)..(44811)

SEQ ID NO: 3768 - DNA, 49018 bp, Xenorhabdus sp.; identical to SEQ ID NO: 119
  CDS (45731)..(46024)

SEQ ID NO: 3769 - DNA, 49018 bp, Xenorhabdus sp.; identical to SEQ ID NO: 119
  CDS (46255)..(48597)

SEQ ID NO: 3770 - DNA, 49018 bp, Xenorhabdus sp.
  CDS (39051)..(40376)
taattttttgattacattaagttgcaatcaaatgagagtattaaaggaataatctgtattccggcgttttttataataaatcttgatacatacacaaaatatttgccagtaatctggagagtattgttcaatcattaatagtccggtggtttggccacaaccaccgggcgggtatggatgaaagggcgtgaaatatacctgattggttcgctgtctttattttcgtgacgaaaaaagaagtgtgctttttaataaacaagttgtgaatccaggtagattaaaaatgaaataatatgagagggaataaaaataattagaaagttactcataaactatttcatgaactttcaaagtatttctgagttaattatatatcccccactcatatttgagtgagggcgtattcatgcagagaaattatttattgtcccttgtttttgatgcgcagcagacggatagcattcgctgtcaccagtgctgtagcacctgaatccgctaacacggccatccacaatcctgtaatccccagtaagctggtgataaggaatatagccttcaagcctaatgcgatagtgatattctgacgaatattgtagtgtgttgcacgtgacagagtaataatttccgccagaccagtcagccggttatgagttagtgcggcatcagctgtttccagcgcaacatccgtaccacttcccatcgcgaccccaatacttgatgctttcatcgccggtgcatcgttaataccatcaccgaccatcatcgttttgtgtttttcattaagctgcataaccgcagtgactttgtcttccggtagcaatcctgcccgataatcaatatttagctgacccgcaatagctgccgctgcccgggggttatcgcccgttagcatcactgcattgacgccttgacgcttcagggactggatagcttcaatggcatcctgacgcaaagtatcctgcatggcaatcagaccaataaactgcccatcctgaacaatggcaacggttgttttaccgctgtcttccagttcaataacccgttgtttccattgtggtgataaaacattttcagaaagccgtccgggggcagagaccagtatcttctgccctgataactgaccttcaatcccaataccggcaagggctttgcggttctccgcttcgacaactgttatacctttattttccgcttcattaagaatggcttttgccagcggatgatgagatccactttctaccgaacccgctaatgccagcaatgtttccacactgatattttccacgggttcgacattcgtaacctgaggctttccttcagtcagtgtaccggttttatccagtgcaattgtggtgatgctgccgagttgctctaatgcagcaccgcctttgatgagtgcaccacggcgagtggcagcggcgagggcggaagtaatagcagcaggcgttgaaataaccagtgcacaagggcagccaatcaatagcagggtcaggccgcgatagatccacatatcccacggttcggcaaaaaacaggggaggtatcacgataacaagtgccgagagcaggataatcagcggcatatagatacggctgaatttatcgataaagcgctcaatcggagcacggcgttcttcagcttcttcaattaactgtaggatacggtcaatggcgttgtgtcccggttcagaaacaacctgcatttgcactgatctatcaatcgaaaggcaaccggctgcgactttttccccttgctggcgttcaacagggacagattctcccgtcagagcactttcatcgaaactggcaaacggattaagaagctcagcatctgtaggcaagcgagcacccggagcgatttcaataatgtctcccggacgcagatcagcggcaggaacctttttcttgatgccaccttttacaagtagtgcctgttcgggaaccagtgccatcagagcgctgacacctcttcgagcacggcctgcggcataaccttctaagatttcgcctaacttgaacagtaaaatcaccattgcagcttctgaagtagcgttgatgaacaatgcaccgatagccgctacagtcatcaatgtttcaatggcaaagaaagaaccggaacggaacaacctgatggctttgattgcgataggatataacccaatcaagaccgtaatgatgaaggcgatttttccggcaggagcactcattttagcgatgactccgctagcggccatcaataccgcaagaaggagaatcggagagaatgttttccagaggctggttgctggtggcagtttagatgttgaatcggtttctttgatttcaaaacccgcttgctttaccgccttgacgacatcagcccgaatatctgaatctgcatctacaaccagcttttcggttgcgaataacaccttgacctgtttaactttatccagtcttttcactgcattttcgattttgcctgcacaactcgggcaatccataccctgaatcatccagttaaaacgctgtctggcgatcagttcagcgggaactgtatcctgtacagggcgtgcgtgagtatgcgggcaacttccgccatgatgatcatgcgaatggcttttatgatgggagtgggcatgatcatgggagtgttgatgctttgtatcacgtgtacgtgattgcttactttcatttcttaggctggaagaaccctgcaaggccctttttggggacgagatagagccacgctgcaattgtttatgttttttggaaatagagaacataatggcctctcaatgatgtttattcaggttgattaccattaactctacactttagagttcactccagagtcaaataaaaaaagcaattattttgatgaattgtgctattaccgatggggtctgctatgtagcagacagcgttgtaattggaagaaatggcaagaatatctgtgtattgaagtgaggcgttgatatcaacgcctcacttaggatgagaataaagcaatgatttaaataatcagtgaacggataatcaaaaaatgcccgataaaacggcaggaggctacgattgcttttgatagtttaaaaggaaaacggtattggctaatcatgctgatgctgtgcgcaaaaagtaacagaattgctccgaccatagctgagagacggctttcattaccgagcgcaaaatattgttctccggcaacccaaaccataatgagcaccataacccaggtatccagcacccgccagcgtaattgatccagacggctccagatgaccaacatcactacaatgcctaccaccaatagaattaatggcagtggaaagaataagtggaaactcatatgcagggcgaagctgatggtatagagcaaataactcagaaatagcgcgacgaatgagaatagcaaatacttactggggagcattcggagtgagtcagaaagcagggcggtgataaggcctgcaataatcaggtagccggaagcttcaaggtttggagcctgaaatgcccataatagcagaagcagcatcgtgaccggatagaacacccattgctgccatttgataccacgataggcggcatcaatatataaccatccagagaagaacacagcaagaaatggccaactcatatttttcctttccttaaatgttcagcgcctgttttatcaggaattgctgtttatgatggggataaagcgagagtaccaactttaattttatattaacgagaaggtaacgttttattatcaaaaggaatgtacgtcaatgagtaatcgtgtggcgtaagtttggcgtataaaagggaaggccactttttgcggtttctgccccagtcacattgttgcttatatggctggggagttgctgttcagtactatttgttatttaccgggaaaatgaaggtattattttttttccggccggttttttttctgccatgacaataactcaaataccccgaaaaagaagattttagtttgcaaccagccagaaagtttttggtctttcggctgagagtgttttaacaacaaaagttggaaagcatgcatgactacggtaaaaaccatagcgatatccataaaatactttaatggcttagggaagggttgaaccagatttaggatcataatcccccagacacaaaccataattgctcttcccaattggataaacatcattgactccagaattgtatttaaatagccagaccgtcatttactggcggcgaatatataacctgtatgcaacctgaccggcaatcttttcccggtgtaagtgccagtttgcagggactgctgtcgcggcagattcagattctgcttcgacataaacccagctttccttagccagccatccgttagtttccagcaagtttatggtctcttccagcattccttttcgaaatggtgggtcaaggaaaatgatatcaaagggcgttccggcctgattgagatgttgtagcgtattgttttgtatcaccttgccgttgtctgctttcaatagcgctaaattattcgatagctgttttgctacattacgatcgtactcaatcaaagtggcactgtttgcataacgtgataacgcttcaaatccgagtgctccgctgccggaaaaacaatccagacagtcagccccctgaatgacgggcattaaccagttgaacagagtttctcggacacgatcggttgtcggacgcagcccctcactatcaggaaccggtaattttcttccgcgccattttccgccaataatacgaatttgccctaaagacgagcgctgtggttttttagtcatagttacataaattaattatttgtcatcgccgtaatattatctactgcttatcaggccttgatggtgaataaaaagacgaggatcaggaaacccattgattaatttaccacgaaatcctcaatagaatatgtgttgtggtgagatgaaaatgttagactggattttatcaccattagaacctatctctgtaggcgtaattgttaaaatagagacctaacagatttcaatttatgtcacagacaacaaagaggcaacttgaaatatgaagagtatagcgtctattggtctgagttcttgacttatcccgataagaactgatggcctgaaataaaggtaattccagtcagtttctggtgtaggttgttataacgccataattaaccgcgaggagtgtagtggccgatggcaaaagaaaaaaaaagaggtttcttctcttggttcggacttggtcgtcaggaaaagaagcaacaagaagaacaaattgaacaagaaaagctggcagcggcagaagcggaacaacagcgtttagcggaagaagtcgcgcgtcaggcggcggcagaagcggaacagcagcgtttagcggaagaagtcgcgcgtcaggcggcggcagaagcggaacagcagcgtttagccgaagaagcggcgcgtcaggcggcagcagaagtggagcaacaacgtttagcggaagaagccgcgcgtcaggcggcggcagaagcggagcaacaacgtttagcggaagaagcggcacgtcaggcagcggcagaagcggagcaacaacgtttagcggaagaagtcgcgcgtcaggcggcggcagaagcggaacagcaacgtttagcggaagaagccgcgcgtcaggcagcggcagaagcggaacaacaacgtttggcggaagaagccgcgcgtcaggcagcggcagaagcggaacagcagcgtttagccgaagaagcggcgcgtcaggcagcggcagaagcggaacaacaacgtttagcggaagaagccgcgcgtcaggcggcggcagaagcggagcaacaacgtttagcggaagaagtcgcgcgtcaggcggcagcagaagcggaacagcaacgtttagcggaagaagccgcgcgtcaggctgtagaacagtcttccttacctaaagagcaggaacgtccgactaaagaaggtttttttgctcgtctgaaaaaaagtctggtaaaaacccgccagaatttgggggccggatttttaggattattccgtggtaagaaaattgatgatgatctgtttgaagaactggaagaacagttactgattgctgatgttggtgtcgaaacaactcgcaagatcattagcaatttgacaactcacgccagccgtaaagaattgaaagatgcggaagcgttatacgtaaaactaaaagaagaaatgtcaggtattctggctaaggtcgataagccactggaagttgggggtaaatcgccttatgtcattttgatggttggtgtgaatggcgttggtaaaacgacgacaattggtaaactggctcgccaataccagtcacagggtaaaaccgtcatgctggctgcgggtgatactttccgtgcagcagcggtggaacaattgcaggtttggggtgagcgtaacaaaatcccggtagttgcacagcataccggtgccgatccggcttccgtcatttttgatgctattcagtcagctaaagctaaaggtgttaatgtcctgattgcggataccgcagggcgtttacagaataaagcgcatttgatggaagaactgaaaaaaatcgtgcgggtaatgaaaaagctggatgaagaagctccgcatgaaattatgctgactttggatgccagcacaggtcaaaatgcagtcagtcaggctaaactattccatgaagcagttggtttgaccggtatttcactgaccaaattggatggaactgcaaaaggtggcgtgattttcgctattgcggaccaattcgaaattccgatccgctatattggtgttggggaaggtatcgaggatctccgtccatttaaggctgacgattttatagaggctcttttcacccgggaggattaactatcaatgattcgctttgaacaggtcagtaaagcctatctgggaggacggcaggcactacaaggggtggatttccaccttcgtccgggagaaatggcatttttaaccggtcattcaggagcggggaaaagtacgcttctgaaacttatttgtggcatagaacgcccgagtgccggttatatctggtttggcgggcatgatgtcagccgattaaaaacccgtgagatccccttcttacgccgtcagatcggtatgatttttcaggatcatcatctactgttggatcgcactgtattcgataatgtagccatgccattgattatctcaggcgccagtaccgaagatattcgtcgacgggtatcggcggcactggacaaggtaggcttgctggacaaagcgaaaaatttcccgattcagctctccggaggggaacaacagcgcgttggtattgcccgcgctgttgtgaataaacccaccgttctgctggcggatgagccgacggggaatctggatggtgaactatctgagggtattatgcgcttgtttgaacaattcaaccgggtcggtacgacggttcttatggcgacgcatgacaccgctcttattgagcgcaggaattatcgtatcctgaccctgaatcagggacgtatgcaaggagagcatcatggttaagcctgcccgtcattcaacgaaaaaaacggtttctcccaaatcccgctccaaatcgctgaaagggggatggcgcgtacagtcacgttatgcatggaaaagcacactgtctgatatgttattccagccactggcgactttgctcaccatcatggtgatagctatttcgctgacattaccgagtgtattttacatcgtctggaaaaacgttaatcaggctgtggaacaatggtatcccgtaccacaactcacagtgtatctggataaatcactgaatgacgtcagctctaaccagctgattgaagaactgaaagcaatggatggcgtgaagtcagtgaactatctgtcccgtgaggaggctgtgaatgagtttcgcgcttggtcagggtttgccagtgccttagatatgctggaggaaaatccgttgcctgcggtagcgattgtctcccctaaactggattttcagaattcacaggcgctgacaacattacgtgaccgtgttgcacagctaaaaggtatcgaagaagtcagaatggatgatggctggtttgcccggctgacggcactggctgaccttattggccggattgctgcggtaataggggggctgatggtcgttgcgctgcttctggtgattggtaacagtgtgcgtttaagtattttcagccgtcgtgaaacaattaatgttatgaaactgataggggcaacggatgggtttatccttcggccttttctcaatggaggggcattactgggaattctgggagcgatcctttcgctgcttctttcgtacctgctagtctggaaactttccagcgttgtcactgaagttgccagcgttttcggcaccactttcaagttatacggcctgggttgggatgaatcactattactggtactgatttcaggtatgattggttggattgcagcatggtttgcgactgtccagcatttgcgtcgtttcaggcctgaatagaacacttttgttggacttatggtgaacttttaggcttaatcatagtcgaagaaactgttattgttttgtatactttgtatgtgtgggcatacaatgcagataatttgaatatgatcctcacgatggtaaaatagactcatctttggcctgaaaaaatctaataggttgattcaggaaagtttaaaagaccactaatttagtttgagagaatttgaatgacaaaagaaatgcaaactttggcattagttccgcaaggtagtttggaagggtacatccgtgcttccaatgcttatcctatgctctctgcagaagaagagaaggaactggcagaaaggctgcattaccagggagatctggatgcagcaaaacagctgattctgtctcacctgcgcttcgttgttcatgttgctcgcagttatgctggttatggtttgccgcaggcggatctaattcaggaaggcaatatcggcctgatgaaagcggttcgtcgatttaatccggaagtgggcgtacgtctggtgtcttttgctgttcactggattaaggcagaaatccatgaatacgtactgcgtaactggcgtattgtgaaagttgcaacgacaaaagcgcagcgtaagttattcttcaatttgcgcaaggctaaacagcgtctgggctggttcagtcaggatgaagttgatttggttgccaaagaattaggggtgaccagcaaagatgttctggagatggagtctcgtatgtcggcgcaggatatggcatttgatatgccatctgatgacgacagccatgataatccgccagctccggtactgtatttgcaggataaagcgtctgattttgcggatggcattgaagaagacaattgggaaaaccatgctgcggataaacttactgtagcaatggaaaagctggatgaacgtagtcaggatattatccgttcccgttggctggatgatgacaacaaatcaactttgcaggaactggcagataaatatggcgtatccgctgaacgggttcgtcagctggaaaaaaacgccatgaaaaagttacgaatggcaattgaagcgtaatttacacagctagctgagcatgaacgatatatatttatgctgaacacatgcaatagcagattaaaaggcgataatttagttatcgctttttttatgcgcgttatttatataaatgagttatgcgtatatacacaatggattttaagatgcgtcgcggcggcaagggagagagtcaccgggagcatagataatcgtatgtttataaaaacggtgaccggggtgaacgagtgcggccaacaaagaggcaacttgaaagacgaagtgtatagtaatcttttggcttcagctaataatgaagtcattgaggataatgacaagatgacgactgtttctgctattggtgctattggtgctattgctgcattgtttgtttctatctttctgatattaagaaaagtttctcctgtttatggcatgatggccggagcgctgtttggcggtttgattggaggtgcagatctgatacagaccgtcaatttgatggtcacaggggcacaaggaatgaccaatgctgtcttacgtatattggccgcaggtgttctggctggtgtactgattgaatccggtgcaaccagtaccatagctgaaactattgtacgcaaggcaggcggtaaacgggtcttattggctttagcaattgcaacaatgctattaacagccgttggggtatttattgatgtggcaatcattaccgttgcaccgattgctctggcaatcgcccatcgggctgatttatcaaagatgtcgatcttacttgccatgattggcggaggtaaagccggaaacgtcatgtctcccaatccaaatacgattgctgcatcagaagcttttcatgtccctttaacatcgttgatggtcgcaggtattctccccgggctattcgggttagtaatggcttactatctttcaggaagagtgataacgcgggggtataaggtcagaagcgaagagctgacaatgaccgcacaagaatctcttccctcttttatggctgcaatttcggctcctgccattgccatttttttgctggctttacgtccggttgccgatatcactattgaccctttaattgcattgcccgtaggaggattggctggtgctattattatggggcattggcgtcaatcaaatcgctttattctctctgggctgagccgtatgtcgcctatagctatcatgctattagggacggggacactggtaggcatcatcgctaattctgaactgaaagaaatattgatccacgggataacagcatcaggtctgccagcctatttactggctccggtttcaggggctttaatgtcaatgacaacagcatccaccaccgcgggtacagctgttgcttcggctgtttttgcacctacgttactcgatttaggtatcagtgcattagcgggagctgcgatgttacatgcaggtgctatcgtactggatcagctgccacacggcagttttttccatgcgacaggaggcagtgtatatatgcagttacacgaacgcctgaaattattgccatatgaaacgctggtgggcttaactatcgcttttatctcaaccttaatctttggcgtatttggttttgcgggttagataaattgcgggagagagaaattattatgaaaattgtaattgctccggattcatttaaggaaagtttaagtgcaatgcaggtagcggaagcgatagagcagggatttagggaaatcattccgcaggccgattacatcaagttaccaatggctgatggtggagaaggcacggtagaatcaatggtggctgcgacaggaggaaaaagattcacatgtacagtcactgatcctctggggcaacctgttgaggctttttggggattactgggtgatggaaaaaccgcagtgattgaaatggcagctgcttcaggcctgcatttggtgccactggcacagcgtaatcctctgataacaacaagctatggtacgggggagctaattctggcggccctggatcatggtgtcgaaaagctgattttaggtattggtggtagcgcaaccaatgacggtggtgccggaatgatgcaggcacttggggcaaatttaacggatggcgataaccgtcctttaccctttggtggggttgcgctaacacgtttggaaagtattaatctcacaaaccttgatcctcgtctcagtcagttagaaattaccgtcgcctgtgatgtcactaacccgctatgtggtgaatcaggagcatctgcggtatttgggccacagaaaggcgcgacaccagaaatgattaatatactggattcagctttgctccattacgggatgaaaattaaaacagtaacaggaattgatgtgcttgatgctgccggagctggtgctgccggaggtatgggagcctctttactcggttgtttgaatgcaagattacagtcgggtgttgaaattgtacttgatactctgaagctggaaaaagcaattcagggcgcagacttggttattactggcgaaggacatatggacagccagactatatatggaaaaacacctattggtgttgcacgcatagccaacaaattcggtatacctgttatcgcattagtgggaggaatgagtaaagattataatgttgtccatcaacatggactgactgctgtattttctattatccctgaagtttgcactcttgctgacgctttagctgacagtaccgataatctgcatgtattggctcgtaacattgcatcggtttggtacatagctcgtgcacataaaaaagaaggcggcgattgagaaagtgaataagtatccagtagagtcagaagcccacatgtttttcagtttagtgcgggctggcaggcttctgacggcgggttattccccatctaacaaccattttttcctataattgtttcagcaatgggaatatattgagtatccagtttattaacaatgccttccttgctctctttttcaaaacagtcttcaaagaaccaggaaatctgtgtttccaattccagacagatggcaaccagatgagtaatattgattcgattggttcctctttcataacgcgaaagttgttgctggctgataccaatttgtttcgctaaggcagttgccgtgatccctaactctttccttttctgttgaattctttgcccgactagtaggtttgcatcttcttccatatcttatcctttcatctttaaatcagtaagttatggcgttatcaaggataattgccctggagcttaaaaatgactcagttttccttcgtcattgtgcacgacataggaaataccctgacggatttaccatcgttcatggtatgcctattgttacacctgattcgccgttttgttttccgacatgcgctttgtttttttaatgaaataaccttttttattaacgtcttgtaaaaaacagaacctttactgaggcaaggtagactcttccatgatgcaaaccacgtttctctattttgttattaccttgcttcttgcaactgcttttcctcgtcattgagcaaaacagcactccgttcttctcatatgaggaataatgaacaggccttaaaacgttaagtttgttatttttatatacataacatattgaatttaaattaaatttaattaattaaatctataaaaacccaataatataattttttataaacaaatcgccattatttggcatatttttgatttttaaagaagctttctaaggttagaaactaaacaaaatataccaaactgtttggtttggatttataatctacattatctatatggtatagaattaagttctgtatatgaaaggatgatgtaatattaattctggttaatttgggtgctattgagttatgataattaacaatttgttatcattaatactatttgaaagagattaaatatgtgaataacaaaaaaaattcatatattataataaattaagtggaatgttatttggtatgtaatgaaatttgacttaagtaatgttatataggattatgtttacagtttggtataaaatgttttgttttttaataaaattttacagattttggttaaataaatatattttaatctttcattggatgattgttgcaaaattaaaaattttaattagaaaatattacttataaaaaccttttccgctaaattgtcttttatttcgcataaaatttcagtttactcgcacttttgaacatttcagatacagttcatttttttatcaatgaatttatgccatttctttgttttttaaataaaatcaatgtattgaacttattggtgcaagtaaggtattttttatttaattacacgtgtttactttataaactcaattgttagaaaagctgtttatttagagctttcctcataaaattgactgaaagtaagtaaaagacactgatttctatctcatcatctgaccatgcgcatattaatataatgaggacttttgtatgaagagatggtgaagattatctaattcagcctattatataagctgaaaaataaaccttatttaatagccgataattttctcatctaacggtatatgttgattgatttatcgccacctaacttattttcaccccatttaattcagaatatctgcatgaaatatcaagagtgacatttgagagataatacgttcaccaggattaaatatttattcgggatagtaataagatgcgataatttagagcaaaattacgccagctagataattactggcgtttatactcatatggttaccgaagtagattgcataatcagtgaatacagatagcaactggtttttgacggcttatggttcatcagccctgacttgttctctaatagcatcatgcacttcattaaaattaacctcagcatctggattttgttcggttaaaacttcagttagtgcctgagcaaatgagtgggtctcgattggcggtaactcgctattccaattgatcgcaactgttgggctattcggatcattcagcaatgcacggataataccaatatactcggactggcattcagcccagccttcatcagtggatgcccaaaaccagcgtgtaagcgcaaagtggtaccacagatcgtcccatccgctataaaccattcgtaacagtggggcgagcatgagcgtccagtttttagcttcctgttccgtgatatattgcagcttgcatccgttcaggcacagcatactgaaacgaacatagtcccatgccaaatattggatattttgaatatcgttttcattgtcatacatcatggtataacgccagatgatttcctgcttatcgtatgcattcatatcactttgctgaatgcccgctaaaatttcatcaaattccggttttgataattcactgagttcatctcgcattttgtaataatcagcagcatgcccgttaaccattagtttaaataactggaaaactagatcttgccgattttcaattccccaggctgatgacaaaccagcgtcatcctcttctggagaataatcattacaattccatccattaaagtaggcatagggagcacccagtatcatgccccaatcagaggttaaaaaaggctgtgggttatgagggagatatatttcgtttctttcctctggtatatcatttgcattttgtgccgaattttttatatgcgtcagtgtatcttgatcaaatataattatcaccattgtagataacgagatcacattgaaactcatcaataagatagtacaagtattcagcaccgaattgatgaaggttttcaggattattctcgatagattctgcattatgccatgaagccggattttcttccgaaaggtaagcaacaatataaggtctggaatgaaactcaggatcttcctttatcgaaaacgagtaggaacctctctcctcagaaactgggctgataagccaaaaatctgatgaatgaaatatattcaaaaactcgataaaaagttttctcttttgctcttctgatgttgaactatgcaattcaatccatgtctctattaatttgtctgacataaaaataatatccttaatgagtaattgaaacctatctgtattataaaattaaaattatttttttatggcgttaattggatgataaattatctgatataggaagagtagaaatgagagttagtgtgttcttaattaagttcaccattctaatggtgagatttctattttactaatataaaagaaataacttatcatactaataatgacgattaattatgttttactcactgattcttaatgaaatagcgataaactgaaattttattattggctatttccttttagtactattagcatccgccggacttaataaaacaagagagatatggataataggcgaacccaaattttaacgcggaatgctcttaaggattaattataagggtttatgaatattttatttatttgtagtcgaaatcaatggcgtagtccgacagcagagcaaatatggcgtaatgatgtaaattggtctgttcgatctgcaggtacaagcagtaatgctaaaaagcaggtgacacctgatcttattcgttgggctgatattatttgtgtcatggaacagaagcataaaaatcggttaaaagctgtattttcccgtttgcttaaatctaagccgatccatgttctcgatattccagatgattatctctatatggatccacagctgataaagattcttgaagatgtagtacctgtttatatagcaaaaaatcactatctgacactttaacgtactgagataaaaagaaacttttttgttctcatagctttttatttgtttccaagttttccctctgcctacttgctcatacttagcgaatataaacatttttccatgtataaacatttgtataaacagaaataaaaaaagcacttccccaaaagagaaagtgcttcttaaacagcaagttactagactaggattagttcatgccgtattttttcagtttcttacgcagagtaccgcggttgattcccatcatcagcgctgcgcgggtttggttaccacgggtgtattgcatcaccatgtccaacagtggttgctctacttcagccagtaccagctcatacaggtcattgacgtcttgaccattcagttgagcaaaatagttcttcagtgcttgtttaactgagtcacgcagaggtttttgagttacctgatcttgtgaatttacagtagcaacggttagtacgtcagaatttacgcgttgttcgaacatagttctgtcagctcttttctttatttacgcaaaaattttcgaagtatgcttccaacacctccagctgttcgctggcatcctcaatggcgttgaatgagcgccgaaactggtcatcaggagcatgttccttgagataccaagatacatgcttacgtgcaatacgaactcctttgccttgaccgtaaaagtcgtgcagttctcgtacatgctcgttcattaaacgctgcacctcgccaaggggcatcggtgacagcagttctcctgtttccagataatgctggatttcccgaaagatccagggtcttccctgagcagcacggcctatcatcagggcatcagccccggtgtattcaagcactgctctggcttttagcgggtcagtaatgtcgccattagcaataattggaatagcaacagtctgcttaactgtccgaatgttgtcatactcagcttcaccattaaacagacaagaacgagtcctgccatgaatggtaagcgcctgaataccacaacgttcagccaattgggcaatttctacacagttacgttcttccggtgaccatcctgtacggatcttcaatgtaacaggtacatcaaccgcattgactaccgcagaaaggattttttgaaccagttctggataacgcagtaatgctgagcctgccaatttacgattaaccttcttggctgggcaccccatattgatatcgatgatctgagcaccattgtcgacgttgattttcgccgccgctgccatctcatcgggatcactaccggcaatctgtacagaacgcactccgggttcgtcgcgatgaaccatacgtagccgggatttatccgtcttccagacctgaggattggaagaaagcatctctgagactgtcatacctgcacccatggtgtagcatagtgatcgaaacgggcgatccgttatgccagccataggggctgcaataagacagtttttcaactggtattgtccgatacgcataggcgaagaaagagtggccaactgtgactaagggcgcgtatattacgcatttttcacaagatatgaaaggccaaactttgagcgaaacggtattttaacggaatttttccagttgattttttcaaatttttctatttatcctttaataacattaagttacgtatttttgacgaaatttattgttacctatatttctcatgacaaatagtatgtattaccaccaatttgtcccccagaggatcattttagtggataatcctgtttttcaatagtagtttgttgattattttttaaccccggtaatgcggcaccattcttcttgttcggcgattggatcgataataaattcattgctataggcttcagcaacaccttcagcctgacttgccagtacaccggacaagcctaataatccaccagattttggtaacgaaccgataacaggagccagttcacgcagcgggccagccagaatgttggcgatagcaacatcacattctaaattgtcaggttgatctttagacagatagagtgtcagtaactcagaaacgccattacgctctgcattatcccggctcgcctgaattgcctgagggtcgatatcaatgccgatagcatgtttggctcccagtttcagggctgcgatagccagaatgccggatccacagccgaagtcgatgacggttttaccttgcaggtcaaggccatccagccattgcaggcaaagagaggtggttgggtgtgttccggttccgaaggcaagtcccggatccagcataacgttaacagcatccggttcaggcacttcccgccagcttgggcagatccacaggcggttaccaaaacgcattgggtggaagttgtccatccactcgcgctcccagtctttatcttccagctgttcaattttgtggagaaaacctttacccagttgaggaacctgctccagttggctgacgacagctttcatatcggtttctgcatcatacaacccaatgacatcggtatctccccataaacgggtttctcccggcagaggttcaaaaattggcgtatcgtggctgtcctgaaaggtcacggacactgcgccactttctacgagttcatcaccgagtgattcagcttgttgtcccgtggtgtttaatctcagttgtatccaaggcataaaaattctcttttaaacgcaatatgtatgaaaaataattaaaaataaggctaaaaaaatatcgccgtcactgtgatgcggcggtttgttgtatctgtttgggagtaaacagatttcctattccgaatgccaataagctcagcagcaatgatggcacaatgggatggaatccgaggaggttaatgctaaagctggctaatagggtatagcttattgctcctgtcagcatggaagtcagcgcgccatgtgcattggctttctcccagtacaggcccaataccagtggccagaggaacacagcctgtaatccgccgaaggccagaaggttcagccagatcagcatttcaggtggttgccatgcagccagcagcagtagtattcccagaaacagggtagaaaaactggagatacgggcgagtttcttctcctgtttgatctgctgcgggaacaaatttaaatagagatctttaacgatagtggctgaagattgcagcagttgggcgttaattgttgacataatggctgccatcggcgcggccagaaagatcccggcagcgataggcggcaggacggtgatcatcagggttgggatcacttgatctggaattgtcagatcggggatgatcgcacgacccagtgctccggcaaggtgcatcccaaacatcaggatagccatgacaatagtgccgatgataataccacgatggacagctttgctgtcgcggtaagaaatacaacgcacagcggtatgtggcagcccgataacgccaaagcagaccagtacccagaaggaggccataaaagggccgttaagaatattgtcagcaccgtggggagagacgagattaggatcgatagtacgcagtgtcgagaccgcttctgacagtccacccgctttatagatcgtgccaacaagcagtaatactgttcctaacagcataaccagcccttgtaaggcatcattaaggacactggctctaaagccgccaaatgcagtgtagagagcgatggaaaggccaaaaatcagcagacccgtaccgtaaggaataccggctgcggcttccagcaggcgggcaccgccaatgaactgtactgtcatggcgccgacaaaagcgactaacaggctcacgctggcaaaccagaccagaatacggttctgatagcgcgcatatagcatgtcattgagtgtcacggcattataacggcgggcgaggatagcaaatttcttccccagtacgccgagggagagccagattgccggcagttggatcagggataacagcacccagccgataccatatttgtaggctgcaccgggaccaccaatgaacgagctggcactgatatatgtcgctgtaatggtcatcgccagtacaaaaccacccattgagcggctgccgagaaaatattcattcaggaattcacccgtctggcggcggcgataggcatagaatgagagcagaaaaaccagtgccagatatcctaccagaggcagaatgacttcattttgcatcttcatcctccagaggaacttctttgaagataaatgtcaccatcatccagcacaggatgatgaaaagtgcaggtaatgctaaacaagccagttcgaaccagcgcggtaatccggttaatccggttgtatcactgggtagataggcgctcagtagccaacccacaagataagctaacgtcaggaatacggcccaacgcgcttctttatgagattgaacaaatcttttgtccattgattctccgggaaagcagaaaaataaaggaaggaattgtacggtaacagccagatttattcagaagaaaatgtgcgacaaaaaccatgtcataaaaaatcccatcttgaaaagatgggattttatgcagaatggtgctattagaaaaaagccttacttatcatgtaagcccagtttcttctccagatagtggatattggttccgcctttctggaagttttcatcattcatgatggacatctgcaaatcgatattggttttgatgccatcaatgatcagttctgccagtgcgttcttcatacgcgcaatcgccacttcacgggtttctccataagtgatcagcttaccgatcatggagtcataatatggcggtacggtatatcctgcataaatgtgggattcccagcgcacgccgaacccacctggagagtggaaatgggtgatttttcccgggcttggcaagaacgtttttgcatcttcggcattaatacggcattcgatagcatggcctttgatgacaatatcttcctgcttgatggacagtggcatgccagaagcaatgcgtagctgttccttgatcagatcaacgccagtgatcatttcggtaacagggtgttcaacctgaatacgggtattcatctcaatgaaatagaattcaccgttctcatacaggaattcaaacgtacccgctccacgatagccgatttccatacaagcgttggcacagcgttcaccgatgctgcggcgtaattccgcagaaatacctggtgcaggagcttcttccacaactttctggtgacgacgctgcatcgagcagtcacgttcagcaagataaagagcattgccctgaccatcagccagtacctgaatttcaacgtgacgagggttttcaaggaatttttccatgtaaaccatgtcattattgaaagcagctttagcttcagcacgagtcatggcaatagactgttccagctctttatcactgcggacaacgcgcataccacgcccgccgccgccgccggaagccttgatgatcaccggataaccgatgcgctgtgcgatcgatttgttcttctcagtatcatcacccaaagggccgtcagaaccaggaacgcaaggtacaccggcttttttcatggcgctgatggcagaaactttatcacccatcaggcggatagtttctgctttcgggccgataaaggtgaaaccggaacgctccacctgttcagcaaaatcagcgttttcagacaggaatccataacccggatggattgcctgtgcacaggtgatttcagccgcagaaatgatagccggaatattcaggtaactttttactgatgcagcagggccaatacagaccgtttcatctgccagcaggacgtgtttcagatcacggtctgccgcagagtgcacagcaacagttttgatcccgagctccttacaggctctcaggatacgcagtgcgatttcaccgcggttagctatgactattttctcaagcatgggtttttcccgcgtgatgcgcttattcgatgatgaccagtggctcgtcaaattcaacaggttgaccgtcttgtgccagaactgccttcacgacgccggttttgtcagcttcgatctggttcatcattttcatggcttcaacgatgcacagggtatcgccctgattaacatgctgaccgatttcgataaaaggtttcgcatccgggcttggagaacggtagaacgtaccaaccattggggaacgaacggtgtgaccgctgatctctgctgcggctggtgctgccggagcagcaggtgccggtgctgcaacgggtgcaggctgttgaacaggcgcagagatgtattgctgagtgatcggcatgccctgaacagccgtagtacggctgatgcgaactgattcttcaccttcagaaatttccagttcagaaatgccagattcttcaaccagctcgatcaatttttttatcttacgaatatccatgagtgtgattccgtactctatttatgtaaattagttggattttgacaagcggttgaccgctgcctgtaatgcaaaactatagccatcagcacccaaaccacagatcacgccaactgcaatatcagaaagatatgaatgatggcggaatggctcgcgggcatgcacattagagaggtggatctcaatgaatggaatatccaccgccagaagtgcatcgcgtaacgctacgctggtgtgcgtgaatgccgcaggattaatcagaataaaatctgtattcccccgcgcagtatgaattctctcaatcagttcagattctgcattggattgcagatggaataattcaatacccgactggtgagcttcttgtgacagtttgctgacgatgtcatcaagcgttaacttgccgtaggtctctggctctcgcgttcccaacagattcaggttgggaccgttcaagagtaaaatgcgaaacttgtctgccattgtgcgggtatctccggcaatctgtcaacaatcgttcaagataactcgatgacagcaatttgtcatctttttctattatcaatatttgtaaatttgacgataaagcccgacattataaacatatcgtaacatttagcagcaaaatactggtcttatcagcttttcgggcttgattttattagacttacgcttatcggcatagtttcagcggatctttactactgttctgcctgttgactgattgtttaccaacttattagcgtgttcgatcacctgatctaatgaaatttcgtttgcggtctgttgataaaaagattccggcaacagtttttgtaaccgctcccagatctttggtctatcggcggccgatactattgctgactcaacaccctgtaagcggacattacgcaggataaatggcatgacagtggtaggcagattgatatcactcgccatcccgcaggcagctactgtgccgttatgcgatacctgagccagcagtttggccagaattgtaccaccgacagtatcaataacacctgaccagcgctgtttttccagcgggcgagcgggttggctgaagtctgaaaccggcagaatttcttttgctcccagagaaagtaaatattcctgactttccggtttgctgctgatagcgaccacagaatatcccaacagagagagcaaagtaattgccgtgcttccgactccgccagtggcacctgtgactgcgatttcgccgctttcaggggttatacctccctgttccagcgccataatacataacatggcggtgaaaccggctgtgccgataatcattgcttgtctggtacttaaacccggaggcaatggtgtcagccattcacctgagactctggcctgttctgccagaccaccccaacgattttcacccacaccccagccggttaataaaacctgctgtccgatatgaaaacggggatcttctgagtgacgaacaacgccggaaaagtcgatccccggaatcatcggaaactcgcggatgattttccctttgccggtgatcgcaagtgcatctttataattgagggttgaccagtgaatatcgacgatgacatcaccgggtggaagttgggttgtgtcaatattctgaatagaagctgataatgtatcgcgctgttccagcagtaatgctttcataggttctccctctgatggattttgggtatgacaccatcacgattctcatgatttcattttttgtgacattctcaatatagataaaattaaaaatgcagaaataggcagtctgcaatattgtgatgaatagtcgcaaaacagtgattgctgatttttattcggggtacatgctgaaagataaatatgcctgataatgatttcaatattgataattaacttattaataatgactttgtttttatatcttattggttcagtaatcaacagatttatccgccgattacaggtttataagtgacgatgaaggacaatttttcttttgagtgctgaagataaagcgggtatttaatgaatcatcttttttgccgggcttattggggcgtgatattagctagagatggcaaaagaaatcaaaatatttgagaaaaaattaatttttgttgaacttgctgaaatcattataggtcaacatagaaaaagtgaatcagtaacatcgcgggatgcactatatacactataatgttggtttttagggcatttggacattttagggttcagtgacggggttattggtggaattaacccatttttatgcagtttttttctgctctgtcagaaaaaagtaacgtagaatatcgtgtttctgatgtgaataacgtagccactttcattgaagtagtaaaagtagttaatgatgcgccttgtcgctgcttcatgtggttggtagagtagacggacaacatccgtccccagcttgcaggattatcctttcgttatgttaaagaaatttcgtggcatgttttccaatgatttgtccattgacttgggtactgccaatacccttatttatgttaaaggtcagggaattgtcttggatcaaccctctgttgttgctatccgacaagacagggccggttcaccaaaaagcgttgcagccgtggggctggaagcaaaacagatgttgggacgtactccggggaatatcgcagctatccgaccaatgaaggatggtgtgattgctgatttttatgtcacggaaaaaatgttgcagcattttattaaacaggttcataacaacagttttatgcgtcctagcccgcgcgtactggtttgtgtaccagtcggggcgacgcaggttgagcgtcgggctattcgtgaatcagcccaaagtgcaggagcacgcgaagtctttctgattgaagagccaatggcggcggcaatcggtgcaggtttgcccgtttcagaagcaacgggttcaatggttgttgatatcggtggtggtacaacagaagttgcagttatctccctcaatggcgttgtctattcttcttctgtccgtatcggcggggatcgctttgatgaagcggttatcaattatgtccgccgcaactacggttcattgattggtgaagcgacagcagaacgcattaaacatgaaattggttctgcgtacccaacggatgaagtccgcgaaatcgaagtacgtggccgtaaccttgctgaaggtgtaccacgtagtttcacactgaattccaatgaaattctggaagccctgcaagagccgctgaccggtattgtcagtgccgttatggtagcactggaacagtgcccgccagagctggcttcggatatttcagaacgtggcatggtgctgaccggtggtggcgcattgttacgcaatcttgatcgcttgctgatggaagaaacaggtattcccgtgattgtggctgaagatccactgacctgtgttgccagaggtggcggtaaagcgctggaaatgatcgacatgcacggtggcgatttattcagcgaagactgaaagtaactctgcgagctgggaggcgtgtttatcagtgcctccttgctgtttatccaaaagtgtatcgtttatgactcttttattgtttatgacacgaaaccgctcaataatgcgcaacttatgaagccaattttcagcagagggccctccctacaattacgactcttttttgctgttgctattgccattattctggttgtggtagacagcaggtttgattttttccataaagtccgtagctatatggatacggcagtgagtcctttttattttcttgccaatggtccccgccagtttttagatggtatttctgattctctgactgcccgcaaacaacttgaactggaaaattactccttgcgcaatgaattgcggttgaaggacagcaaattattactgctgggccaattaaaacaggagaatatccggttacgttcattactgggttcacctttgcgtcatgatgaacacatgatggctactcaggtcattgcccgtggtctggatccttaccgcgatcagattgttattgataaaggtgcataagatggtgtttatgaagggcagccggatgttagtgatcgcggggttgtcgggcaggttgtttcactaagccagctaagtcgccgggtgttactgatttgcgatccgattcatgccctgcctgttcaggtattacgtaatgatatccgggtgatcgctggtggtacaggctgtgccgatgatctgcaccttgaaccattaccgagtgacacggatatccgggtcggcgatgaactggtgacttctggtctagggggaagattccctgaaggttatcctgtggcagtggtctcttctgtcaagatagataatcagcgggctcatactgttattcacgcccgtcctttggccgagttacgccgcctgcgttatctgctgctggtatggggaccggataataacccctctgaaccgttgccgccttctgaagtatatcgagccgcaaatgagcgcatgaaacagttgttgccatacgtattgccaaatccggctgatgaaaagcctcactctttgccagaaggttcaggtggagaggataataaaaaagaggataacagaaagaaacccgtggccggacaaccaccttcaatcgccccatcagttaataaaccattagctacggagaataactgatgagtcagtatcacggacgtggtctctgggttgtctggttgtctttcttgatagcaatggttttacagagtatgccgtggccggaacaagtcgatgtattccggccaactctgccagtgttatgccttatctactggctgcttgctattcctcatcgtatcagtgtcggcaccgggtttattctgggtatcctgattgatttattgcagggcagtattcttggtgcgcatgcactggcttttagcctcgtgagttttctggttgctttcaaatttcagctcattcgcaatatggcactctggcaacaatcacttgttgtgatgatactctcaacattgataaacctctgtgttttcctgactcacgctctgatcctacagactattttccattctgaagtattctggaatggtgtggtcaatggtattctctggccctggctattcttattaatgcggaaaatccgccgtcaattttcagttcgttaaaggcgggttctactttttaatgaacagcttttatataaatgaaccgcttttaaatgaactgacagaaaggatgactcactatgaaaactctttacttggcttctggctcaccacggcggcgtgagctggtggaactgctggattttaattttcagatcctgacaccacaggttgaagagaaatggcaggaagaagagtctccgcagcagtatgtcgaacgattggccagagaaaaatcaaaggcgggtgtggcaattgcgccggatgatctccccgttctgggcgctgatacaattgttgtgctgaataatcgtattctggaaaaaccccataataagcaacatgcagcggaaatgttacaggcgctgtcaggacagcagcatcaggtcatgacggctgttgctttatcgaacagtcagcataccttaagtgagttagtgattacagatgtgatatttcgccatttatcccaacgtgaaatacaggaatatattgcaactggggaaccaatagataaagccggcgcttacggtattcagggtaaaggcggttgttttgtcagaaatattaatggcagttaccatgctgttgtcggcttgccactggttgaaacgtatgaattaatcacacgatttttggcgttagctgatgggaagggtcacttatgacagcagagttattagtcaatgtaacaccatccgaaacgcgggttgcttatatcgatggcggtattttgcaggaagttcatattgaacgggaagctaaacggggaatagtcggtaatatttataaaggccgtatcagccgggttttacccggaatgcaggcggcttttgttgatatcgggctggagaaagccgcctttttgcatgcttcagatattgtgcctcatacggaatgtatcgcaggcgaggagcggaaaaactttaatgtcagggatattgctgagctggtcagtcagggtcaggatctgctcgttcaggtcgtcaaagatcccctcggcaccaaaggggcacgactgacaaccgatatcactctgccttcacgctatctggtttttatgccgggtgcctcccatgttggtgtttctcagcgaattgaaagcggagaagagcgcgataggctgaaatccatcgtgatgaattattgcgatgaacatggcgggtttattatccgcactgccgcagaaggggtaagaaaagaggagattgagcaggatgctgcatttttgaagcgcctgtggagcaaagttattgagcgtaaaaaacggaatatcacgaaaacgaaggtttatggtgagctggcattagcacagcgtattttacgtgattttgccgaagattctcttgatcgcatccgggttgactcccgccagacctacctgcaagtgcaggagtttattgatgagtatatccctgaaatgaatgccaagctggaacattatcagggaaatcagccgatattcgatctctgtggcgtggaaacggaaattcagcgcgcactggagcgcaaagtagaattaaagtcgggtggctatctgattatcgatcaaaccgaagccatgacgaccattgatattaataccggtgcttttgttgggcataggaatctggaagagactatctttaatactaatattgaagcgactcaggcgattgcacgtcagttgaggctacgcaatctgggcgggatcattattattgattttatcgacatggctgacggggaacaccgtcgtcgggttctcgcttctttggaacaggctctaagtaaagaccgcgtgaaaaccaccatcaacggcttttctcagcttggtctggtggaaatgacgcgcaaacgtacgcgggaaagccttgagcacattttatgtgataattgcccgacttgtcaggggcgcggcaccgtaaaatctgttgaaacggtatgctatgaaattttacgggaaattgtacgtgttcatcgcgccattaatgccgatcgttttctggtctattcttcccatgctgtgagtgaagcccttaaaggagaacactctcacgctctggctgaggtagaaatctttgttggtaaatccgtaaaagtacaggctgaacagctgtatagtcaggaacaatttgatgttgttatgatgtaatcgtccattttttgagtaaatagcgtgctgacaatcaaggagaaatgagtgaagcgactgctcgggatattattagcgacagccgcaataatcattatcattgtggctttgtttgtcagcgggttacgttttttcctgcctcatattaatgattatcgccagcaattggcgcgccagatttcagcgttgaccgatgtttccgtcaagataggttatatcagtggtcgctgggagccatttggcccacaactggaagtccgggatcttcatgcaacaaacgaagaaacggatattaaagccaaaaaagtgacgctttctctggatgtctggcgctcattattacagcggcgctggcacttccgtgacctctctttttatcagcttcaggtggattatgataagccactgtttgatggcgaaagtgaacagcagttacccaaaccggataagctatcttccctgtttctcgaacgttttaattatttcgaattgcatgacagtagcctgacttttcctactccatcgggagaaaaagtcagattattgttaccgcagctggcatggctgaataaagacaaccggcatcgtgcagaggggcatattaacctgtcttcgattaatgggcaggaaggtgttgtacagattaaatttgacctgaaagatattaatcatgttttagatagcggcactatctatttacaggctgatgatattgatatgcggttgtggctcagccgatggttaaaagacaacaccggcctggaaaatgcccgttttagtctggctaactggattaccctgaaaaacgggagaatcgagaacgggcatttacaactcaggcgcgggtatgtcaactggcatgtgggggaaaagaaacatcagctcaccgtccatgatctgcttttgcaaatgcgtcgtcagggagaaggctggctgttcgatatcccaaatctggaaagcctgaacactaatggtcagcagtggcttgcaggtcgtcttgccgccttatatatcgcgaaggcaaataaatatcagaacaaagatcactggcgtattcgggctgaaaatattcagcttgaacggctgagtggcatgttgccgctgatgtcacctgtgactccggagatcgtcaatgactggcagcatcggcagccaaaagggctaattcaccgctttgcccttgatgttacgcctgaactggccgatagcacggatattgctgtcaaatggcaggatgtcagctggtctcgctggaaagagttgccttcagtgaatgattttagtggcacgttggcgggaaataagcagcaaggaaacttcatatttgagttgaaaaacagtctcattgattaccggcaaatgtttcaggcaccatttgatattgccagtggtgcagggaagatcgaatggaaaagtgatcaggaaggtttgaaaatatggagccaggggctggacttgcaggccaaatcattatggataaacggcgattttaattatacagaacttaggaataagcccccgaagcttgaaatgctggcagggatccgcgtcgaggatgcaggcgaagcatggcgctattttcctcaaaccctgatgggaaaatcactgacagattatctgacgacagcgttaattaaagggaaagtcgataatgctacgctgatttttcagggtaaccctcatgacttcccattcaggcataacaatggccaatttcaggtgtgggttcccctgcgcaatgcaacatttaagtaccaaccagactggccagctctgtttgatcttaatgctgatttgaatttccgtaataacgggttatggatacaggcagataaagcgaaactgggtaaagtcgatggttcccggatctctgctgtgatcgctgattataataaagaaaaactcttaattgatgcggatatttccggagacggcaaagatattcacgactattttcaccatagttcattatccgatactgtcggaagtgcgctggataatttacagcttagcggaaaggttgatggcaatcttcatctggatatacatctggaagatggcacaactgatgccagtggtgaagtgatgctgaaagatactgaactctttattcagccactgaacagtagaatgaagcacctcagtggcaagttccgctttgataacggaaacttgcaaagtgatagcctttccactaactggcttggtaatcctctgtcattacggtttacaacgcagcattcaggtcaacattatcaggttaatgttgacctgaatgctggctggcctgtggcaacgctaccggaattgccggcagaaatacgccgccagctatcagggcggcttgactggcagggaaaagtgaatattaccattccctcaaaaggtgagggtttgcaacatgaattatcacaacagggcgcaaaatatcaggttgcaatcaatgctgatttgtcacatatcaacagcacgttagacgggctggaaaccgcctctttgcagaaatggaatgatctcaatattcaggctgaaggggatgataatcagcttaggcttaccggttcattagggaacagatataaattcaatagccaatggtcattggagaaaggttatacccgtttacagcggggtattctgaacacagataagaatggcattcccgcgttacctgaaaaatcaatgctagaactgaatttacctgatattgagggtgataaatggttggcactgcttggaacattggaaaccaaatccggaacgggtgttgctttcagttggcctgagttatttgaaattacaataccttctttgaatatcggcgggcagcgttggcataatcttatactgagtgccagcaaacaatctgatagtttgcatattaacgcgatcggagaagaaattgacggcgatttgtgggtttattcggataggatatggcagggagcgtttaattatctctattataatccggtgttcccgggcagcgctgccaatgatggtaactcgctggcttcaagcgcagcggatacgccaaaatatgattttcgtcattggccaacattaaatgtgagatgtaatgaatgctggctggccggatcgaaaatcggaaaaatttcaggaacggtcaaaccggaaggcaacacactggttctgactgatggccgggtagaaaatagtgctggtaaattgacattatccggtcattggagtgaaagtaatgagggaaactatactcgggctaaggggcaaatatcagggggaagtttagatgatatggctgcttatctcgggttcattattcccattaccggtgccccatttaagtttgattttgatcttaactggaaggatacgccgtggcagcctgatattaaaacgcttaatggccgcctgacagggacactgggcaaaggcacaatagcgaaactgggcgcaggcagagcaggacaactgttgaggctggtcagttttgatgctttattgcgtaaattacagttggatttcagtgacacattcagtgatgattttaactttgattctatgcgtggcgatgcacagctaaaaaatggggttatgtatacggataacttccatattgatgggctggaagctgatatcgatgcaaaaggtcagataaactttattcagcgtcagctcaatatggagttggtgatcaccccggaaatatcagccacagtaggtgtggcaaccgcttttgcgattaaccctatggcaggtgctgctgtttttgcagcggcgaaagtgttaggcccgttatggagcaagatctcagtcattcgctatcgactaaccggcagtctggaacaacctaaaattgatgaagtcttacgtcagcttaaggagaataaagggtcatgaggaatgtcaatgttgcactcttacaattatgcagtggtacaaacatcaaacataatttagcgcagattgaacagcagattaagcaattgcctaaaactgtaaagctggttctgaccccagagaatgccttactgtttgcagacgctgatgcttatcgcgaacatgcagaagaacagggaacaggccccttacagcaggctgtgcgtgaactcgcacagcattatggtatctggttactgattggttcaatgccgatgatcagtcgggaagatccgagccgtattaccagcagtagcttattatttgatgatcagggtgaaatccgcgcccgctatgacaagatccacatgtttgatgtcaatatcaaggatgaacacggttcttataatgaatcttccatttatcagcgtggtgaacacattacggttgttgatacacctgtcggccgtctgggaatggctatctgttatgatctgcgttttcccggcctgtttcaggcactgcgggaacagggcgctgaactgatttctgtaccagccgctttcaccagactgacaggtaaagcgcactgggaaccacttttgcgtgcccgcgcaattgagaatcaatgtattatactggctcctgcacaggtcggtgtgcacggcacccgcagaacgtgggggcattcaatggcagtgagtggctggggggaaatcattaagaaaaatcctctgagtgtctgtgcactccagctcaatatccggcgagacagcctgactcacatgcgtgaacaaatcagagtggtgaaacataatcgcttccgtccgcaactgacttctttgataaaaaagaatacaaatttagataaagagtaaacactatgagtttaacttatgtcagtgaacatttactgactgacaatggcctgaatcataacgacttgttttctgtattagggcagttggcagaacgccgccttgattatgctgatctctatttccagtccagctaccacgaaacgtgggtattggaagatcgcatcatcaaagatggatcctataatattgatcagggagtaggtgttcgggctgttagcggcgagaaaaccggttttgcctatgctgatcagatcactctgaatgccttgcagcaaagtgcacaggcagcgcgcagtattgtcagagaaataggaaatggcactgcccatacactgggagcagtgacacataacgttttgtatccggcagtggatccgctgcaaagcatgagtagggaagagaaaatagctctgttgcaccatgttgataaaattgcccgtgcggaagaccaaagagtacaggaagttaatgccagcctgagtggtgtttatgagcaggtactggttgctgcgacggatggcactctggccgctgatatccgtccgctggtacgtctttctgtcagtgtactggtcgaagaagacggcaaacgcgagcgtggctccagtggtggcggtgcccgctatgggtatgaatatttcttgcaagacactgacgggcagacgctggcagaacaatttgcccgtgaagctgttcgtatggcattagtgaatctttcagctgttgctgctccggcgggagcgatgccggttgtactgggcgcaggctggccgggcgttttactgcatgaagccgttggtcatggtctggaaggtgattttaatcgccgtggcacctctgttttctctggtcagattgggcagaaagttgcttccgagttatgtactgtggttgatgatggcacgattgaagggcgtcggggttcattatctattgatgatgaaggggttccggggcaatacaatgttctgattgagaacggtattttaaaaggttacatgcaggacaaactgaatgcgcgtttgatgggggttgctccgacggggaacggtcgtcgtgaatcttatgcccatttgcctatgccacgtatgactaacacttacatgctggcgggtaactctacaccagaagaaattattgccagtgttgatcgtggtctgtatgcaccgaattttggcggtggtcaggtggatatcacgtcaggtaagtttgtcttctcaacatcagaagcgtatttgattgaaaacggtaggatcaccaaaccggtaaaaggtgcaactctgattggctctggtattgaggcgatgcagcagatttccatggttggtaatgacttagcccttgataaaggtgttggtgtctgtggtaaagagggtcaaagtgttcccgtgggagttgggcagcctacattgaaactggataacctgaccgtaggcggaacagcttgacactttttggtgtgatttgatccattaagtgcaagaggtcattatgaaaaagagcgtactggcaggtgtattgctgcttctggctgttatctctattgtcttttttaaagacacggggttatctggtagcgggaaaacatcgaaaaatacggtgatagcggaagagacaaccagtctgcacattgatgttctgactgaacagcatcgggttgctagctatctgaaacagcatcacaaattgcctgattattacattacgaagaaacaagcccgtcgtttgggctgggaaccccgtaaaggtaatttatgagcatccgtaccgggaaaagcaattggtggggacaggttcagcaaccgagagcataaactgccagatgaagccggacgccagtggtttgaagcagatgtgaattataactgtgggcgtcggggtagtgaccggttactctattctaacgatgggctaatctatctcacgcttgatcattataaccatttcacaaggctggaatgagaatatgaaaaaagtggaattcgattttaaccatatccctgatttaacaactttctataatcagttcagggagcgtttcgatcttagcgaccattttggtgctaatttggatgcgctctgggatgtggtaacaagtgaaattgagttgcctgttgatattacctttatccatctggatgtgcagaaaaaaccacattttgcagcgctggtgcttttgtttgaggaagccgaagaagagctggaaggggaactcaagtttgatgtgatgaattaacttttcccttcttatacacttcgtctttcaagttgcctctttgttggctgcgctcgttcacctcagtcacatagttatctatgcttctggggatgaactcccttgccgccgcgatgcatcttgaaatccattgtgtatattacaccgctacattggctgaaatgtggcggtgtttctatatagttctatatagctagagccagcggttatttattcacaacgtgactttcatcgccagagaaataacgttcaacattcttaaatgcgttgtcaaaatagatgtcatagcagctttttgtgacataacctatgtgcggactgcacaggacattatctcgttttaataatgcgtggccggcattccaaatcggttcaacatcaaaaacatccaatgcagcaaagcccggcgtacccagatcaagcgctttctctagagcgcctgcttctataagcgctgatcttgctgtattgactaataccgcactgtttttcatatgagtaagatcagtcaatgtgacattgcctgtcgtctctttaaccagacgctgatgcagggtaataacatccgatgttttaaagaaatcttcacgtgactgaggaacaatcaggccatcctgacgggctttttcctgtgagcgttctgaaccccacacttgaaccttcatatcaaatgcccgtgcatatctggcaacccgttgaccaatatttccatacccgagaataccaagggttttttcagccacggtatcccccagttcagtttgccattgaccttttttcatcgactccactaaagcgacgaatttgcggatggaactttgaattaacaaccaggttaactccgctgcggcaacaggagaaccggctccttctacgacagcaatgcccctctgtttacataaatccagatcgatattgtaagctaccttacctgtctggctgatcagttttaaattgggggttttagataagaacttctcatcaataattgttctttcacggatcaatatcagtgcgtcagccttagaaagtaactcactggctttcgggtcgcgatcaattgcaccgaggctgacgacgtcaaaatcacggttttgatataaagcctgaatctgttttgttgcagattgataatcatctggaataacaacgagaggcatgtgaaatatcctttatgtgagttcagataatgaaaagcaagtaaggttatctcatttttgttacattttcgtaatatttaaccggaagtgttaaattaagcaattttaatatgatggtgggacaagagaaaagaaagttaccgccatttctttaagaaatggcgatctgagtatcatactgttccagataattctttcaggtactgaaaaatctgtcggtaggattttggtggtttgctcgctgctttttctttttttgcattacgcaccagcgttcgtagttgctggcgatctgtatgcggatagagtgtcacaacttcttcaagcgcgttgtcactttccagtaatttatcccgcagttcttccaatttgtgcaggatcacaacctgttggttatgccggtttttcagtttatccaatgcgatagtaattggctctggatcgcgggcacgtaatagtttgcctatcaattgtaactggcgacggcgaccttcacgtttgattctctgtgccagctcaatagcggccagcaaatcttcatccaacgggatgcgctccagttcgcttttgctcagttcaaccagttctgctcccagctttttaagctcttccgcatcccgcttgatttcacttttactgacccagattatctcttcttcttcctcttcagcaggataattgtcgagccaatcttcaggctgctttgccataattgttttccttctaaaaaggccggataaggtgcactttggaacatgaccaatttcccggtgggtgttaacatcttctaatattgtctattgtaactgggaaaattgcctgattaccactcggcattaatactgaaagccggaatatagcacttttcctgataaattcccttttaatttaaatggttatggttaattaatgatagttaccaatcaacaaattgcggagcagcgtaagcaactggaagaggctgtttcccatgctctggaattagcgaaagcaggttgcgatgctgcggaagtcgcggtcaataaaacaacggggatcagcgtcagtacccgtttcagtgaagtcgagaatgtagaatttaacagtgatggcgcattaggcatcactgtttataatcagcagcgcaaaggcagcgcatcatctaccgatttgagtccggaggctattgctcgtactgttcaggcggctattgatattgcccgttatacttcgcctgatccttgtgctggcccggcagacaaagagttattagcgtttgaagcgcctgatctggatttgttccaccctgctgatttggatgctgataaggcgattgagctggcagcccgtgcagaacaggcggcactacaggccgatcagcgtattactaataccgaaggtggtagctttaatgcccactatggcatccgcgtctttggtaatagtcatggtatgttgcagagttactgctcaagccgctattccacatctagctgtgtgattgcagagcaagacggcaatatggagcgcgattatgcctataccgtgaaccgtcgctttgatgaattgcagtcaccagagtgggttggtcaggagagcgcgcaacgtacattgtctcgtttaggggcacgtaagctttcgacgatgaaagcaccagtgatcttttccgcagaagtggcgaccgggctgtttggtcatttggtcggagcgattagtggcagtagcatctatcgtaaatcctcctttttgttggacagtctgggtaaacaaatcctgccttcgtggctgacaattgaggagcagcctcatttattgagagctttggcttcaacaccttttgacagtgaaggcgtacgtacactgcctcgtgaaattattaaagacggtgtattacagtcatggctgatgacgtcatactctgcccgtaaactgggtctgacaagtactggtcatgcaggtggaattcataactggcgtatcgaaggtcaggggctgggttttgatggactgttgcgtgaaatgggcactggtctggtggtgacagaactgatgggacagggtgtcagcgcaataacaggagattactctcgtggcgctgccggtttttgggtcgaaaatggcgaaattcagtatcccgtcagtgagataaccattgcaggcaatctgaaagatatgtgggcaaatatggtaacaatcggcaatgatatcgaaatacgcagtaacattcagtgtggttcggttctgttgccggaaatgagtatcgccggtcaataagggatactcaatcaacaacagccagtctggtctactgggctggctgtgagttaacggtgatattcacccgctgcttctggttgataaagtatttctagtacttttatccgtgttttttcaccattcggcaattcccacgtgatctcgtcattgacccgcaatcctaaaagtgcagcacctaaaggtgccatgacggatagctgttttgtgctgtcctgtagcgatgccggataaacgagagtacggatacgctcttcattattgctaaaatcaatgaatttaatttcactgttcatcgtaacaatatctgctgggatttctgctggcggtaagatttccgctctgtccagttcatcgttcagtgcatctgcgatgctggtattggcaaatgcggcttgttccaacagagaatctaaacgttctgcatctaattcattaataatgatatttggttttttcataccacgctccaaattaggctcaatacaaaataacaccccgcaacgcaaggaggggggtgttattttcaatgtgattaaagtgatattaggctgttctgtcatgaaaataaagagatcatgatcacgaactgtttggtgctgctaatgaaacaaggttcagccagatattatgacaggttataaattataggcctgtgacggtgatcttcgggttggtttcgccaaagattgaggtcagttcaacaatgtgcatgccgctccatttttgaatgtcagcctgagtaatttcttcgttaccttgtttacccaaaatcacaacttcatcgccactcttaacttcaggcagatcagttacatcaatcatcacggtgttcatggaaacgcggccgacaaccggtgcacgatgcccgttaatcagaacataggctttgtttgacagagcagtgctgaaaccatcagagaaaccgactggcaggttagcaaggatagaatcacgcttcaggatgtgagtgttgtcgtagcttacaccattgcctttagggtatggtttaacagaagcaacgcgggtttttacctgaatcagaggtttgaactccggatggctgtcttgcaagatgccgtacaatgcgctgccaacgcgagccatatcaaactgggcttcaggtaaactcagtgaagcaaaagagctggatgcgtgcagagtgatttcgtctcttttcaggtttgcttctttaattaaccaggcagtttgttcgttgaagtttttgatactttcgcggatcacattcaggtcagtgagagcatggtggctcatgatgccaaccaatttcaggttaggcagcttagcaatttgcagtgcttcctgtttgccctgttcggttttcatttccagtccattacggctcatcaaaccggtgttcagcgctaagtgaacacggatctctttaccatgttttttagctacggcatcaatagctttagcgctttccagatcgccaaccatctcttccatgtcatagctcagcgtgctttcaatttcatccgccattgctgcgcggacgcgtaccagctggccggtaaaaccactatcacgcacgatacgggcttcttcattactggtgatcccaacacaaggtactccggttttaatgattgacggcatcagcagaccgagaccataaccataagcatcacctttcagaatggcacatattttggtgtctttgttcagggtttctttcagtgtttggatattgttttcgaaaatggtggtgttgatttctacccaggcattgttgttaacagcaacacgtactgcctgcgtattatctaaagaaagcacaggtgctgcctgagctgcgccctgacataaagtcaatccaagaaagatagctaatgtagtcttattaaaacgcatgaagtaaatctccagtttatgaactgtacgtataactcttcgtgtataaaatctcgttaatgataagttttttctaaactgatttcatagggttaagttattgatggataacatttattgttacctaatgactatttgtaaatagtcggaatgttcagcttatttaattagcaaaacttctcaatatatctttgctcataaatttataattagaatatatgaaggttattttatcttttgttggttttaaatatggcttttgtttctgttattacagactagaaagcagtattaagagaaaaataaagagagtcaggtgttatgaactgaatgagaaaggaaggagaaaatagagaaaagtgtgatggagggtctgtgctacaaacaggcaaaatcgtgtaagtttattcttcgtcaaagccggaattgaataacgccacaatcgctgacaaagcctgttgttcatcaactcccgttgcttcaacttcaatgtagctaccttgttcagaatcgagcatcaacatggctatgacgctgtgagcttcggcctgaacattgttgctgttgcgcagaatgacctgagactgaaactgctgcacgagatcgtgcagcttcatggcaggccgcgcatgcataccgagtcggtttttaatctcaagtctctgtttgactgtcatggcctgctctatataaggttacttacataaggttacttacataaggttacttacgtttttccagtgtacgatggcgtgactgaacgttcttaccacgggaacggaagtaatcagctaattgttctgctacgtaaactgaacgatgtttaccaccggtacagccaatggcaactgtcaggtagctgcgattattggtttccagcatgggtaaccatagctcaaggtaactgcgggtctggtaaataaagttatgtacttcggtatgacgatccaaaaatgcagcaaccggacgatccaacccagtcatagggcgaagttttgggtcccagtgtgggtttggcaggaaacgtacatcgaaaacataatctgcatcaatcggaataccgtgtttgaagccaaaagactcaaacaccattgtcagttcacgttcacgcttgcccaataaacgcgtcctgagcatttcagccagctcatgaactgacatttcagaggtatcaatgatcagatctgcccgggaacgcagaggttccagcaaatcgctctctttgtcgatggcactttccagtgacaggtttttgcttgagagtggatgcaggcgacgggtatcactgtagcgacggatcagagtgttacgatctgcgtcaagaaacagaagctgtggtgaaaagctgtccggtaattttgtcagtgcttcttcgaaaatttctggggattccggcatattgcgtacatcaatactgactgccgctgaaatatcacgttcagccagtgtattagccagctctggaagtagtactaccggcaggttatccacacagtagaaccccatatcttccagcgcacgcagggctacggacttaccagaaccagaacgaccgctgactatcatcagcaccatgaaatgactcccctttattttgcggttcatgagaaccgccgtcgtttataccttctgggtatattgcttttcaacaatcaattgtaaccgtaattgtaattgttatttattcagtaataattttgtataattcttcatcactttgtgccgagcgcaggcgacgacagaaatttttatctgaaagacgctttgcgatcaaggacagtgaatgtaaatgtacctgacactgattagatggaaccaataaagcaaacagcaagtcaacaggctgattatcaatagcatcaaacgtaatcggttgttccagatgtaagaatacaccaacagcattatctgaactctcggtctccagtttgccgtgaggaatggcaatcccgttgccaataccggttgttcccaccttctcacgggaaaggatggcttcaaatacggcactctctggtaaattcagctgctttgatgccagctcgctgataatctctaaggcgcgcttcttactcgaacagggtatgttattacgcgtacattcggatgaaagcactgagcttagtggtaaatctgtttcgttgttcatttctttattcgcttagggctttaataccgaatgcctgagttcacacatccggtactgaggcactgttattaccattaagccttcaggtgcatatagcagcctgaaggccgttagttggttacaaatggaacagtgagaatcttatgacagccctgttgtctgaaagctattaatgttgtctcaatttacttttgtgtttggtcaattgacgagtcagtttatcaacaagtgcatcaattgccgcatacatgtcttcatgctctgaactcgcatgcaactcacctccattgacatgcaccgtggcttcagcgattttctgcactttttccacccggaggatgacctgaataaggttaatcttatcgaaatattgatccagtttgccgcatttcgtattcacaatgttgcgtagtgcatcagtgatttcaatattgtgacctgtgatattgagttgcatagtgttttccttctctctccgttgtctttcaggctgtctctttgttggtggttagccgcctcgatacaacctgaaattcatagggtctgtgttattcaaaccaactttttacgctgatttgaaggcgggatggataacgactctctatattttgcgacagttcgacgagctacctgaataccctgttcggcaagtaggctggtcagcttactgtcactcagtggtttggccgggttttctgccgtgaccaattttttcaccagtgcccgtattgctgtagaagaagcttcgcctccgctgtcagtgttcacgtgactggagaaaaaatatttcaattcaaaaattccccgtggactatgcaaatatttctgggttgtcacacgggaaatggtggattcatgcatatcaacctgataggcaatatctgccagtaccagtggtttcatgtactctgcgccatgctcaaagaaatcctgctgccattccacaatgcagttactgacctttaataacgtctcattgcggctctcgagactttttatcagccacttagcttcctgtaggttattgcggataaacaggctgtcactctcattctgagattgttgccccagtgcagcatagtgctgattaatgcacaagcggggaatgctatctgtattcagcctgacctgccagcgttcattttctttctggacgagtacatcggggatcacgtattcggattcaccggtattgaccattaacccgggccgaggctccagtgactgtatgatagcaatagcttctttcagagcactctcttttaatttactctggcgcaataaatttcggaaatcccggttgcccagcagttcaagatacttgctggtaaccagtctggcttcgttcaggtagggagtttctatcggcaacagtgaaagttggatgagcaggcattcacgtaagtcacgtgctgcgactccgatgggatcaaaatgttgtacccgtttgagtacggcctcgatttcttccggtgtcagttcatcattgccgatgctaataaggatatcctcgacagaggcggtcaggtagcctgtctcgtcaatagcatcaatgattgatgtggctattgctgaatctgtttccgtaaagggcgtcagctcagcctgccacgtcagatagtcctgtagtgtctgggtggtttccccctgatagacggggaaatcatccgcactgtagtcactgcgcgttcctgaagatgtaccggcgctgtaaatttcatcccagctggtatcgaggggtaattcttcaggcatattcttttgttcaagcgcttcgagggtatccataaccgttgtttcggtatctgaataatcctgagcatcaatttcctgaagtgtgtcttcctgttcaagcaggggattcgtttccaaagccagttgaatctcctgctgaagttcgagcgtagaaagttgcaacaaacggattgcctgctgaagttgtggcgtcatcgtcaattgttgactgagtttgagttgcaaactttgcttcataacgttttcacttcctcctgaactgatcctttagtactcctgaatggattcccctcgaactgatatacacttcgtctttcaagtcgcctctttgttggctgcgctcgctcaccccggtcaccgtttttatcaacatacggttagctatgctcccggagattactgagaggctcctgcctctcaccggaggccagcctttggctggacaaattcgttcccgacgaatttgtcattctcttgccgccgcgacgcatcttgaaattcattgtgtagtttccctgaactctgcctgacaatgagccttaaagacggaagccttcacccagataaacacgcttaacctgttcattgttaaggatgtcttctggtgtgccgtgagcaatcagatgcccttggctgacaatataagcgcgctcacaaacatccagcgtttcacggacattatggtcagtaatcaggacgcccagaccataatcccgtagatgttgaatgatctttttaatatcaaggactgagattgggtcaacacccgcaaaaggctcatccaacaggataaatttagggtttgctgccagtgcccgggcgatttccacacggcggcgctcaccaccggacaatgactgaccgaggctgttacgcaaatgggcgatatgaaactcttccatcagctcttcagcgcgctctttacgctgttgctgattgatatctttgcggatttcaaggacagccattaagttatcgtatacgctcagccgacggaagatggaggcttcctgaggtaagtagccgatgccccggcgggcacgttcatgcagaggcagcaggctgatatcttcatggccaatggtattagtacccgcttcgcggggcccgataccaacgcccatataaaaagttgtggttttacctgcaccatttggccctagcaggcccacaatttcacctgatttcactttcaggctgacatcctcaacaaccctacgtcctttgtaagactttgccagattgtctgcgtttaatattgccatacgtcgttatttactctttttatgaacttcagtgctgttagtaccggtattgttaacacccaggcctttttcctgtaactgagaaggcaacaggacggtggtaacatgcttacctttatcactaaaggcttccatttgttgtgttggcactaaataggtgattttatcgcctttgatattgctgtcgagctgttcaaggtaagcattacccgtcagtgtgatcagctcattattcatctcatagcgcatcttcgaagcatggcctttgataggtttaccatcatcctgcaattgataaaatgttgccgggttaccataagcttcaataaccgttttttttgaatccccgtcaggacgggtgacaaccaccttatctgcatggatatcaatcgaaccctgctttacaataacattatccgtaaatgtggcaatgttccccgttaaatccagtgattgtctggctgaatcaatggtaatgggtttttgggtatcatctttcagtgccagtgcaggcaaactgactgcaaccagtgtactggcaataaaggtattacggattaggttcttcatgtggaatctcatattgagtggtcaccttttcaatcagttcagcagttttatctcgcaggttgccgcgcattttcatcccaacagatctcagaccgacaccttctaatgtaattttatcgtcggatgccacatcctgcgtcacaagattgacggtcgcgttttctgttgtaatacgtttcagttgtgatgcgtcattcaggctatctacctgaacatccccatataagtagagcatattatcatgggtaagtttcgctttattggcacgtactgtccatgttgccggtggtggtgtggatttactgttagcatcaaacgttgttaatactggcttggtaaaccaagtcagctttgtttccgtataattcttaacatcatcggcctctagtttgtaaaccagtttaccttctggatcataaacaaatgtagtggcttcttttgtttgataagtcgggtaaccctcatccaaaacgggtgaggaggcgtcttcatttgaattggataaattccagccaatcaatgcaagcacaattaaagtcagtattgcgatcagccaggattgagttctgctcattcttttttcagttcatgtgttatatggataaacctttggcatcttccagcttgttctgagcaaaaagcaccaaatcacaaagttctctgactgcaccgcgaccaccggcaatccgagtgacataatctgctttgggtagcagtagcgggtgggcatctgctacggcaacagataagccgacttttgccattacaggccaatcgataaggtcatcgccgatataggcaacctgttcaggctgtagcgctagtttatccaacagttcctgatacgccaaaaccttatcgttctgaccttggtaaagatgtgtaataccaagagtttttgcacgatcttccagcaatttggcctggcgcccggtaataatggcaacttcaaggccagaagtgattaaacagcggatgcccgtaaccatcacgcacattaaaggcttttcagttcttcaccctga

SEQ ID NO: 3771 - DNA, 49018 bp, Xenorhabdus sp.; identical to SEQ ID NO: 3770
  CDS (36694)..(36963)

SEQ ID NO: 3772 - DNA, 49018 bp, Xenorhabdus sp.; identical to SEQ ID NO: 3770
  CDS (36327)..(36485)

SEQ ID NO: 3773 - DNA, 49018 bp, Xenorhabdus sp.; identical to SEQ ID NO: 3770
  CDS (34730)..(36175)

SEQ ID NO: 3774 - DNA, 49018 bp, Xenorhabdus sp.; identical to SEQ ID NO: 3770
  CDS (33864)..(34724)

SEQ ID NO: 3775 - DNA, 49018 bp, Xenorhabdus sp.; identical to SEQ ID NO: 3770
  CDS (30373)..(33867)

SEQ ID NO: 3776 - DNA, 49018 bp, Xenorhabdus sp.; identical to SEQ ID NO: 3770
  CDS (27420)..(27851)

SEQ ID NO: 3777 - DNA, 49018 bp, Xenorhabdus sp.; identical to SEQ ID NO: 3770
  CDS (25117)..(26187)

SEQ ID NO: 3778 - DNA, 49018 bp, Xenorhabdus sp.; identical to SEQ ID NO: 3770
  CDS (16113)..(16331)

SEQ ID NO: 3779 - DNA, 49018 bp, Xenorhabdus sp.; identical to SEQ ID NO: 3770
  CDS (11197)..(12354)

SEQ ID NO: 3780 - DNA, 49018 bp, Xenorhabdus sp.; identical to SEQ ID NO: 3770
  CDS (9896)..(11170)

SEQ ID NO: 3781 - DNA, 49018 bp, Xenorhabdus sp.; identical to SEQ ID NO: 3770
  CDS (8723)..(9577)

SEQ ID NO: 3782 - DNA, 49018 bp, Xenorhabdus sp.; identical to SEQ ID NO: 3770
  CDS (7554)..(8507)

SEQ ID NO: 3783 - DNA, 49018 bp, Xenorhabdus sp.; identical to SEQ ID NO: 3770
  CDS (6869)..(7534)

SEQ ID NO: 3784 - DNA, 49018 bp, Xenorhabdus sp.; identical to SEQ ID NO: 3770
  CDS (5915)..(6862)

SEQ ID NO: 3785 - DNA, 49018 bp, Xenorhabdus sp.; identical to SEQ ID NO: 3770
  CDS (2551)..(2721)

SEQ ID NO: 3786 - DNA, 52812 bp, Xenorhabdus sp.
  CDS (84)..(485)
gctctcaagttctttattgccgccgggttaggactacttcccctgctaaagctcatccaactcagtcaaaaaacggagtccgtatgcaatcagaaaaagaattaattgctcaccgcagcctaatcgagcttcctcaatggatagaagaggtatttactggccgggaaggtcatccatccgcgatgaagaaactactgggcagttttcccactgatttcaggatgataacaatgaaaggccaaagtatcggtctgactgaagtagaaaacctgtttcgtcacaatataggcacccggcctcaactacgcattgttatcgatgcctgtgaaacattagctgaaaccacagaaagcgtgatatgccgctatcgcgaaactcaacataatacaggcactacgctggttcgctggtccacagtcattatagatattcatgcggggcaaccttactggcgctatctgcacgaaacagccattgaggaataaaaaaagaagtattattcaatcaatcaacataagttagccatacttattgcctttcaagttgcagctttatgggctgcagcttgaagcctggaaagtatatattctacttttatcttttatcattgtttaatgaaaacctgcccttataaaatattaaagacagaggaaaataaaatattcaatatattgaaagtcattttctttcgatgtatgaatgatgttactgatgaataacatcattcattttaacacgaaaagaatattgccatttattataagacaatgaaacgatacttgattggatcaaagaatttgaaagaacaatatttaaaaaacagataaatcaatttaattaaaaattaagaaaggggaatgatgatgtcattagaaatggttactgcttaccgtaaatcaaatgctctattttcttttgtagacagtgaagcgccattacatttaagcactcaagatggcaaaacagtggaacaacttgctcagctatgcaatgtttatcaggatagattccatcggttattggactatatgcaaacactcaatgtgttaataaaaaaagaagataagttttatctcaccgaacaatgggcatcactcagtaaaccagacagctttgaaacgttatatataaaattcgaattagaccccgctttctggagcacctgggcacaatacagctcatcattaagaaaaaataataataaatctgcttttgaaattacccataatgaatcattcttcgattatctcagtgatgagaaaaataaaaaaataaaaataacttttgataatttaatggcgaaaatgaccaatatgatgaatgaatatgttattgatcgcctgcctttaaataacacctcttcatttattgatattgggggcggagtgggttcttttgcaaaaaatataaaaaggcattatccccatattcagtgttatgtcatggatcaatatgattttaccgagcaagaatcagaaggcgtgactttaattaatggcaatttcttttctgctattccatcaggatatgacgtttattgtatgaaaggtgttttacatgactggccagataatcaggttatccatcttctcaaaaactgccatcaagctatgcgggaagattctgtcttatatgttatcgatatgatcaaagaaccagatgaaacagcatcatttgatttgtatatcgatacccttctgttaggccggaaacggaatcagtctgaatttgaatttgtggcaaaacaggccggattctctattacaaatatctacaatctgaatttctctaccgtaaatggcagccagtacattattgaaatgaaaaagtaaatttactctgaagtaacagctatgtcgctatgactactcgtgtaatccggctgaacggcgtaataccgactcacaaacggagtctatgcgaattgattgatattcatgcagggcagcccgccgacacaacctgcatgaaacagctattgtggggcagaaaatgcagcagtatccgatctgcaatattcgtattctcagtgacacgatccgggagtttactttggaggcgccagaatgggaactcgctgcgttaacacccggcagtcacttccgctggttgatgcccgacaatattggtacacgtagttattcctgcgtgatgttgacgataccaacagccacactgacatttgccatccaactcaataccgcttctgccagtagccaatatttacagagcctgaaggtaggtgacagcgccaggcttgaggggccatttaaccactttccacagctctccgcacctgagggcgggcgggatatagtgattgcaggaggcattggcataacccccatcatcggcatcatagcgcgcctcattgctatgggaaaacacccggaatgtcactaccttatctcttcacaagcacaggctgtctacgcaaccgaattggcaactctcgccgcttcacatttttatctacacagtacagaagagcaaaaggtctgtctttccggattattgggcgcattacaagcctgcgatcggctgcatgtatgtggtcctgtgcgcctgctcaatgccgtgttggactactgtgataaccaccattttccacggcaacacattgcctttgaacttttcaccacaccaacaattaaagctgatatcgccgagacgggttacgaagtagaagcagcagaatcaggtatcaggctacaggtcgcagctggccagtcactactggatgcactggaaacggcaggattagagccactgtatgattgccggcgcggggaatgcggtctatgtgcactaaaagtgatcgaaggtgacgtcgagcaccacgatttcattatgacaccgcaagaagcgactacctcccgaaccatttatccctgtgtttcccgagcaaagggaagcttccttaaactagcattgtgaatcgttttatgaataaaaatcttatatttcgcggaacagaaattcacaaatctgcatatctcgatgaggctatattcatcaccgagcaaaataccgtctttatgcagagctggctctatctgtgccacggcagccagatccccacaatcggtgactatttcacaactgaattagcatcacagccattagtcgcgattcgccagaaaaataatgaaataaaagtactttataatcgctgcccacataaaggcgtaaagatcttaccggaaaccagtggtaacagtgggcgttttctgcgctgtccctaccatgcctggacattcaaaccttcaggtgaattactcagcatcccggtaaaaaccgaatatgatcccggtgtactgtccgagtgcgaagccagcatcggtatgaaagccgttgacaatgtagtgtgttatcgcgatttcatctttgtacgactgagtgatcagggtctgccatttgatatcttcttcggcgatgctctctcgacgctggacaatatgatcgatcgctcccctaaaggagcattacgagtcattggtgtaccactgcgtcatcgtcatcattgtaactggaagatggtgatagataaccaaactgacacttgtcaccctatggtggcgcatgaatcttcagcaggagaagcgattaatctctgggctcaggctgatcagcagggtgctcaacccacagcggtggagcttttggcacctcttatgtctccccacacctttttttctgagatggggatccgcatctgggctaatggtcatgggcacaccggtgtcagtaattccatccataaagactattcagaaatccccgattactgggaaagtatggtggagagttatggtgagaagcgggcacagcaaatcttgaacgatacacgacacaataccgtgtacttccctaatctggtcgtaaaagggcctatccagacgttacgcattattcgtccggtttcctccagcgagactgttgtcgaatcctggattctggagctggtaggggcaccacaaaagatgctagagcgtactatacagtacaacaacttaatcaactccccctgttcaatagtggcgcatgacgatgtggaaatgtatgaacgcgctaccgaaggactaaaaagtcaggctaacgagtgggtcaatatcgctcgcctctatgatcctgcggaacgctgggatcgaaccactcaaatgtcaggaaccagtgaaggcgcaatgagaaacttttattccatgtggcaacgtatgatggagggaggcaatggagaataacaatgtcatacagaccctgactgatttgatttatcacgaagcctggctacttgatgaacagaaatttgacgactggttcgctttgctggcggaggaatatacgtggtggattccatcacgacacgatcaacttagcccgctgacagagtcttctttactgtatgaggatcgctttgttacacaactgcgtattaatcgacttcgtaatgcgcgtaatttttcgcagcagccacgcagccgctcacagcatctgctccagcgccccattatcagctggactgaaggagaacagagtgccagtggcgttagtcaattactctacagcgaaagtcgtggtgacagagagtggcattacgccgcacgtctcgaacaccagtttcactggcgtgaaggacaatggctgatcagcggacgcaaaaccgtcttacttaatcttgcgcgccctttcgccagtttgcagttgattatctgagactcaatcatgacaacaaatgatatctcatctgcccaaaccccctcatttccgtttatcgacacgctatttgactatgcagcctttttagaacaagttgaatcacagcaagctattgggcatttacctgactgtcagcagcatcaacatattgccatcgttggtgctgggctaagcggcttggttgctgcccaggagttgttacgtgctggcgtacgcaacatcaccttgtttgaagctgagccggggcgttatggcgggcgtttattgagcacacgctttaatccagatataccacagtacatcgcagaaatgggggctatgcgctttcctccaacttgtgtaggcctgtttctactcacgcgagaaaagttctggcttaaagagaaattaccacacaccattttgacggatactctggcaaaaggcgtctaccataaaaatcaacaaaatgctggatctgagtctagtatggtttttgtgatactgacagttgtatgaaaaatatatctcgaggatattaagttgctacagaaaatataaataataaacttctgcgattaatatattcaattataaatagacctttcaattaatactaaaattcctcctattatttaaaaatgctatttctcacgggcaggaataaataatgaaataggcatatcaaatattgatacaagattctgtatgattcagagttaaacattagaaaaacagattgattattatatttctatttggaataatgcgcggcaaattaggactgacaataaactataaaactggataaagcacgtttacccagtcaaaaacccaattaagatagtttaaaaataactttaaaaacggtcagaaccttccaacatcattcttcaacaaagcctcagggattaattattagtacaaatgatttatatcggataacgaaataaatctattagaaatcattacatccaaaatatgagcagacaaatttattaacctttattgggacatggatcccaagattgttctgttcaaaaaaatgagtcttaactatgcaaaacttaacccatgttaaagcactatgtgctttagcagatccttatcgtgcctgtgccgatcatgatgcgttatttaatgatgccatgcgtgaactgacgttatatcactgtgagcatactccgggctatgaacagtggctggcaaataatggtttgaataaacaatctgtaatggcaatggatgactggtcagccctgccacctctttttgccaattatttcaaacgtaatttgatcgtgagcaacagctcggtagatgctttggagttaacgtcctcaggcacaaccggacaaaagagccgtatgcactatgacaaccgaagtattacggctgcgcagaatatggtggatcgtatttttaattattatggctggaatacacctgaccagccctgcaattatcttctactcagttatgaacctgccggagccatttctttgggaaccgcttataccgatcagtttctgtgtaagtatgcaccggtaaaccgctcctactatgccctgcgtcataacggtaaaagtaatgagttcgatcctttcggtacaattaaggccttacaggaatttgctgaagaagggctgccagtgcgtattttcggctttccggctttcctgtggtttaccctgcaaagaatggagcaaatggggctacccccactgaaattacatccggattcactgctgtctctgggtggtggctggaaaacgcattccgataaagcaatctctaaacaagaactgtaccaacgattggaaaaacaattaggtatcccgaatgtccgctgtcgcgatggctacggttccgttgaacatccagtgccttatatggagtgttctcaccatcgtttccatgttccggtctactcacgagtctatatccgtcataccgctaatatgtcacggcagccttatggcgaaccgggttttctgcacttcgtctctccttttatcacttccagcccggcgcacagcatcgttatgagtgatctggcggtactgcatcccggaagtcagtgtggctgtgagctggatactgattggtttgagttgcttggtcgtgctggtaccagcaaaagtcgtagttgtgctattgccgcttcagaattgataaaagaggcctgagatgtcttccatagaaaatattaatgagcagctttctgtagaacagctggcaaaacaaaaaattgcaaaattaagtgcacgtttaccagagcttctggcacggcctcatactgcggaacaagtgcttgagtgtgcacaacgctttgccgatcatcttgccgatatggatgatcaccctctttttgatgccaaaacacgtgaagcattaattgctttctgtcagcgtgaagcgttacaggctaagctggagcgggaactgggaaaagacgcattttccctgcgtcggtttgattataaccaaaaccgctatgagtcatggaagccactggggttggtcgttcatatcacaccttccaatgctgcgctgcttccttttatggctgtgctggaaagtttactggtcggcaatatcaactggctacgtccgagcagcagtgataaaggctttagtgaacaacttctgcatgcgttccttgctcatgacatttccggtgatttagctgatcgcgtcgctgttctgttgttacctgccacacagctgggaacgttgttaagtcaggccgatgctgtttctgcctggggcggagactctgcattatcttccattcgtagccagctgccagccggctgccgctggatagactggggacaccgtatcagttttgcctggctgaaccctgatgtagtcaatgatgctcaactggatgcgctggcagatgatatttgttgttatgaccagcaagcctgttccagtccgcaatgcctgctggttgatagtgatgatccggccgttttgcagaatatcgggcaacgtatggcagccgcccttgagcgtcgttccggattgcatcctgcattgcaggcagatgtacaggaatccgctgaaattaccactcagatggcatttcagcatctcgatttcgccttcgctccggtaaatggcaaactctggcaaaacgatggatggcgggtagtatggcgacatgagcaggagctggcggcttctcccctgttccgttcattacagttacgcccggcaccccgccagaaattatgttctattctgcgcccgtggcgtaatcacctccaaagctgcgctttgattacccgtcaggaagatatcgctgaaatgagccatgctctgttcgctgcgggagtcagccgcatagcctctgccggtcagatgcataatggctatagcggtgagccgcacgatggcgtttatgcattgtcacgccttgccaagcgggtttctgtcagcctgcctgcgggtacgctggatggctgtgcgcatctgaatactcctccctcccgtccatacgggctggataacctgccagtcatgaataaggcagattttcaggcactgactccaaacgaaaaaggccgtttgtacttccgtagcggaggcagcagcggagcaccaaaactggcggcttacagctattccgattatcacacacaaatgcagtccgccgctgacgggatattcgcttgcgggcttgagcctgctacagaccgggtcatgaacctgctgtacggcgggaagctatatggcggcatgatgagtttcttcacgattctggataagctggatgtcgctcaatatccaatgggcggccccactgacagtgatttcagcgaaatagcggacttaatcatacaggaacgcattaatacactggtcgggatgccaagcacgatacaccgattattcctgagtgaagccgacaagctgcgccaatatggcggagttcgtaaactgtttttgggaggcgagcacctgaatgttggtcagcggaattttctgaatgaattcggcatcaccctgatacgttcagcagcctacggttcagtagatgcaggcccattaggccacggatgtaccgccagcgaagatggtgttttccatttaatggctgatacccaatggctggagatccttaacattcatgatgataaacccgtagcagaaggggaaaccggtcgtctgatatttacctctcgccaccgcgaggcgcaatccgtccagcgctatgatttaggcgatctcgggcactggatcactgaaccttgttcctgtggcctaattacgcctcgtttccgacttgttggacgtaatggtgctttactgcgtgtcggcagtatttttatcaatctggctgaattgtcagaacagctggaaacgcctgtgcaatggataatcgatcacaacgaagaaggtatcggtggtatccagttattgattgaaaatcctgatgttgccacagtccgccaatatttattggatctggagcagaattcaaaaattaaggaagttatcgacggtggaatgttgaatctggatgttacattttgcccagtatcagaatttcgccgaaatgctcatagcggaaaagcaccattgttcattgacttacgtaaatcctgattaagtgaagcgaatatcatgaaaagcatagcgttaattgatctgttcaatcatgtacgtaagcattctgtttattatcgggaactctacaagtccgttcctgataactggacgctacaagatttacccttagtcgaacccggcaattactgggtcggctcagaaaatttacaaacgtggccggtgcttaccgccccactggaaggggggcatgtgtttaaaacgggtggctcaaccagtgatggtcggctgtcggttttcagccagcaagagtggaaagcatttatccagtcttttggcaaagctgttgcccgtcaactccagccgggagatcgcgtcgccaatttgttttttgcgggcgatctttataccagtttactgtttattcatggtgcattgtctaactcatcattacctattgtggagtttcccttcacttgtaaagtcgatgacaatttgctggctcacaacattcagcatcacaatatcaatgtgctggcaggcgttcccgtccagctcatccgctttgctcaatatctgaaagaaaacgggcagactctgccaatggtagaaaccattctgtttggtggcgagagcctgtttgaagggcaaatcgcagcaatgcggcaggttttcccgcaggctcgctttggttctgtaggctgtgccagtgttgacggtgggttaatcggctttgctgatcccgaatgtgggccgggagaacatcgggttttcagtgaagagactattattgaaattattgatgaggttactcatgagcccatcacggaaccggggcaccggggaatgctggtggttaccaacctacaacggcaactaatgccggtactccgctatcctaccggcgatctggcctattggtgtgaacctgagcagacccatcgtaagtttgcacttcaggggcgtgccaatcagggctaccggatcagagtgggtgatctttctttattccctgacgacttagcaactcagttgtcaccgcaaaccgaactactcgcctggcaattggtgctatctcaggaagagtcggaagacaaaatcaaattattggtggccagccctgaacccattaatatcgagaaaatacgccataatatgctgctggcatttccgggtctgaacacagcacatttccggcaaaatatgctggagattgttcaaaccaatatcgatgcaatgtatacccacccgcgttcaggcaaattgcagcgggttgtggatctgcgtagttataattgaaggataaaatttatgacgacttttccttcagctattttggattctgctattcagatccgcagctaccaatcgggtgacagtaaatatatcagcaaattattccgtgatatttacggtgattcgtatgtctatcctgatatctatctacccaaattgatagacgattatcagactacaggaaaatggtattccgctctggctttttctcaggggcggctgattggccatgcatcacttgtcaaggatgcggttcagcaggctcaggcagagctggcgctggttgtggtgtacccagaatttcagggcaaaggtattgctacctctttggggaattatttatgccactatgcgaaagaacagcaatatcgtttgctgacgataaaacaagtttgttcgcatatgaaaagtcagtatttagcccagaatctgggcttttattcaaccgcgctgatgctggattatgtcgattctcccttcgggttaccggaacctgaaagcattgttcagggtattttgccactgaaatcgtttccattgcctaaactgaattggccgcaatcctggcagaactgggccaaccagataagccaatatattggtgagtcatcacctgatcaacaacaaaggggctgtagcccttttacttccggtgcatacgcgacttcccagataaaagggcgacgtctggaaatcacattgtatgaagctgatacagactttttatctgagatcatagattacccggctaatcagttaatctatctgaaacttccggctagtgaagaagcactacagttctacccacaattgcaaagaggcggattccgttttgccggactatgccctgatccccaagaagggtggtttttgctctggctacggggttaccaaccaacgctctatcagttttccgatatcagcatacagcatctctaccaaatggaattgggagaaacggcagggcactcacgacaaccctgcgtaagtgaactgattccgggttaaaacagctcgtctaactgctcgaagaattcacgcttggctgcgttatcaaagtcgccaagcgtattaagaaactccgcggctatatccactgaaatctcttcacgcaagttacggtgcacaaatgcgatatccagccagcgatcagccacacctccccgcccaagatcaataaaatacaaatcgtcatgttcatcaacgaagatattgctgtcacagagatcaccgtgagaaaacactcgctcctcactgggtaaagtggcagatgcttcagcaaactctgcggagtcgttattccctgccactgattaagatcatattgctcagcacacaaaccgtgattcagaaaatactcaagctcattgagacgaaatcccgcgccagaatcaaacggacaatcaacaataggcacagactgcatctggcgaacagcttcgtgaaacagttccagtaccggctgccgagcattgagccgttcgtataatggcttaccgggaacagcgcgggagatcataaattcacctcctgaattttctgccacacagacaacttccgcgacattcaggcgatcagccagccaatccaatactgaggcttcccgcatgacactgtaagtcgtactggcataaacagaaggagagtatttgagaaaaaaccgatcattcccacgtatgaagctgtaaacacggcaaggagattcgccaattttatcagggattaaagcagaattgccgataaaacagtcaatagatgggggcagtttaggcagcatttatcttccttttgtcatttgaatgacctaaacacaatttaatttacaggcttgccatcgagctactctatgttcacttatttctgccattttcttaactagattcgtcaagattctgatcagaaagccgatcaggatctaattttggtcagaaaaacactttacaaatgatattgagaacgattatcattattaacactttcagtgcaccaccttcagggtcatgtgaaagtacgacattgctcacattgcttccagtgtttactttatagccagcatcttgatgttggcttttttttatgcttaatatcctctttttattattcaaaatttttgatcattaatattaaatttctaatatttcatatttaattccatcaactagtctatgaaaaaatgttgagggattttgaagatgatttacctacgtaaggcttcagaacgaggccacgctaatcatggctggctggatagctggcacactttttcatttgcacattattatgatgccaacttcatgggcttctctaccctaagagtcatcaatgaggacctgattgatggtggtcaaggatttggcatgcatcctcatcgtgatatggaaattctgacttatgttctgtccggtacagtagaacatcaggataatatgggaaatctgggacaaatatcagcaggcgagtttcagataatgagcgcgggtactggtattcgccactcagaatataatccacatcatgataaccctcttcacttataccaaatctggattatgccagcagaaaataatctgacgccccgctatgaacaacgccgctttgagccggaaaaaaaccaccagctcatactttcacctgatgcccgtgatggttcattaaagatatttcaagatatgacgttatggcgccatacattgaaacgtagtgaaaggtacgaatatcatatagaaaaaccgcgaaaaatctggcttcaagtggttcgcggcgaaatcgatgtcaacggtgtaaaagcagggattagcgacggtatcgctatcagggatgaatccgacattcagataaccgcaaatcaacagagtgaaatcttattgtttgatctgccgcctaattgatcactcttccaaaaagtaagaaacgtcatagcgataaaccccgctagtttttcaacggggtttgttaataacttgaagtgggatcgttctcccactttatttaatgcaggtagtctgaaattcttacaacttcggcccagcttttaccaatgcagcgccagcggcggtatcggtatatttgtcgaagttattaatgaaacgctcagccagatctttggctttaacatcccactccgatttatctgcataagtattgcgtggatcaagaataccgctatcaacgcccggcaatgtcgttgggacagtcaggtcaaaaatcggcaattcgacggtatctgcatcttcaatatcgccacttaggattgcatcaataatcgcgcgggtatctttgatagagattcgtttgcctgtgccgttccagccagtgttaaccaaataggcttttgcaccggatgcctgcatacgcttaaccagcacttcagcatactgtgtcggatgtaacgacaggaatgccgcaccaaaacacgcggagaatgtcggcgttggttcagtgacaccacgctctgttccggcaagtttagcggtaaaaccagacaggaagtgatactgagtctgttctggcgtcaggcgggaaacaggaggtaatacaccgaaagcatcagccgtcaggaaaataactttagttgcgtgtccggcttttgataccggcttaacgatattttcaatatggtagataggataggaaacgcgggtattttctgttttagaaccatcgttgaaatcaaccgaaccatctgccagcacggtaacattttccagcagggcatcacggcgaatagcgtgataaatatctggttcagcttctttcgacaggttgatggtttttgcataacaaccaccttcaaagttaaatacgccgtcgtcatcccagccatgttcatcatcaccgatcagtttacgtttcggatcagtggaaagcgtggttttacctgtaccggaaagaccaaagaaaacagcaacatcaccctgctcacccacgttagcggagcaatgcatggaagcaatacctttcagtggcagcaggtagttcatcattgagaacatgccctttttcatctcaccgccataccaagtaccaccgatcaattgcattctttctgtcaggttaaaagcaacaaagttttcagagttcaggccctgctctttccattgtggattcgtgcacttagcaccgttcatcacaatgaagtccggcgtgaaatcgatcagctcttcatccgaagggcgaataaacatgtttttgacaaaatgagcctgccacgccacttctgtgatgaaacgcactttcaggcgagtatccgcattcgccccacagaacgcatcgaccacaaacaaacgtttgcctgaaagctgctgagtaactaaccccttaagatgagaccaggtttcctgactgagaggtttattatcgttcttaccttttccctgatctgcccaccacactgtatcgcgagtcacttcatcacgtacaatgtatttatctttaggagaacgccctgtaaaaatcccagtatctactgcgacagcgccaaggttggtcaatgttcctttctcatatccctgtaaagaggatttagtttcttcagaaaataacaattcatagcctgggttatagataacttcgctgatatcacgaataccataaaccgcaagctcctgcgcagtaacgcctgtaacgctcatttattgctcctgatcagttagatttaatctctgtctcagccggaaataataaataattatgactaattaaccgcgattgttatcaaaaaattgaaatcttattattttttttagtgttatatgagacacaggacacgaaacaaaaagtttttaataatcagaaccacccgcatagcgggtggtttgctctggccctataagggcatgttaccgactgcgcctaaatgacgcggctttctcttcgttcaagctaagtgtctttgcttctttggcttaccccttgaaggggtcgttatactctcgtgtacttaatttatcctgaagtaaatctgacttttcttgctctctgatatatttacggattgtggcttcattcagccccactgtgctgacgtagtacccttccgaccaaaacttccggttgccaaatttgtattttaaattggcatgtttatcaaatatcatcaacgagcttttaccttttaagtaccccataaaactggaaacacttattttcggggggatactcacaagcatatgaacatgatctggcattaaatgtccttcgattatttcgactcctttgtacttacaaaggcttcgtagaatctcacctatacttgaacggattttattgaagatgacttttcgtctatatttcggcgaaaagacgatatggtatttacacagccactttgtatgcgctgagctttgtgctttaattcccataaacacctttccttatttaagttacggatattagcttgtacatctatatcgtaacggaaaggtgtttttcttggtataacctttgaactccacccgcaaagcgggtggttttatgtttaagacgctaacgcgacttaaactggctaaagccataatcataaccacccgtataacgggtggtttgctcttgccctataagggcttgttaccgactgcgcctaaatgacgctgctttctcttcgttcaagctaagtgtctttgctgctttggcctaccccttgaaggggtctacatgctctttactactcaatttatccgagattaaatccgacttttcttgctctctgatatacttttgaattgtcgcttcatttagccctaccgtactgacatagaacccttccgcccaaaactttctgttgccaaatttatattttaaattggcgtgtctatcaaagatcatcaacgaacttttacccttcaaaaattccattaaggttggaacccttagcttttgtggaatactcaccaacatatgaacatgatctggcatgagatgactttcgattatttccacacctttatacttacaaaggtctttgaggatctttcccacacttgaacgaatattattaaaaatcactttccgtctatatttcggcgaaaagacgatatggtatttacacagccactttgtatgcgctgagctttgtgctttaatgcccataaacacctttccttatttgagttacgaatattagcttgaacatctatatcgtaacggaaaggtgtttttcttggtataacctttgaactccacccgcaaagcgggtggttttatgtttaagacgctaacgcgacttaaactggctaaagccataaataaaaagggcgatatattcgccctaatcgtttatttttcttttcaataaatacgttatttcttcgcggcggctcgcacttctgttacgctttttccaccaactccccagttatccgtttctacttcatcaatgatgacaaaagtggtggccgggtttttgccaagtacatccaccagcagctgggttgcaccttcaatcagttgttttttctgttcagcagttgccccttcgcgggtgattttgatgtttacgaatggcatatatgactccttgtagttttttataaagtgcttctggtgaagcagtctcgttttgtcactcttttttctctgcggtggctatccacgcagcacagaatagggtcagtcgggcaaaaaaatagaaaaatgccatcaggccaataacagaaccaaaagcggcgccagaaggtgagctggcaaggcgtggtagcatcattgtcataatcgatttaatgatctcaaacccgatagcagccattaaggttccctgaaacagggctttccgttcgggctgatggcgtggcaggatccacaatatccacaggaataacagataattggctgaaatggaaatgaacatgccaatggatgtccatgctgggcgaagccactctatattctctaagccaagggcatgaactatgcttgcctgcgcagatccggcaatggaattcagggaaagtgttatgactaacgcaaataacaggccaaacagggagaaaacgtcacggatatattgaaagtagattttctctttatcttcatgagtgcgttcccagacgtcgcgggactgggcacggattgcttcacgcagattgccgacccagttcacgccggaatagagcgcaattgccagacctgttaatccaacggttgttctttgccttatggcggtatccacgctgtttttcagcgtattcgccagtgagggatcattgatactattagcaattccattgatgagtcttgtcagcaagtcggggttggaagccagcacaaaacccgcgatggcaaaagagagcatcagtatcggaatcagtgacagaaaggaaaaataagtaatagcagcaccaaactggctacccattctgtcgttgaaacgctgtgctgcccggattaagtgggcaatgaatgggatatgacggatatagttgccaaggcggatcgtcactgaaagggcttttttcccaccattcagccccttctgtaatggtgtactgatagtttccttattgatatatttccttttttttaagtcagtgggcattacatcctcttaattctggtcgtatttgatatatgccataatatccttttcattcacaatggcatttggtactggctattatttagtgatgccaatttatagcggagttttatcttttgctcagctttttccaatgctatcggagacatatatgcgatcagtgtttcaagatctttcgtttttttaatgacctcaaacttctttgccttattgatgaatactgcgctgaatttattctgcaacagtagttcaatcacgttgctcagagtgcctgtgctcttcgcatcccataccatcaggccataatcggcctcttccgccattttcagatctttcgccgtaaagaatgcacgcgttccttttgcatatgctgaatctatgacacgaacaggccaggagcccagattattccgtggcgtattgctgctgctgaatacggttgtttgatggcttcccatctctagtagcagtttctgaatagaggaatctgcgccgttggcatcgcccacaacaacgttgtagcgggagttcacaattttccgtatgcgctctgtgacgagtgggtcgaggtttttgattgtgatagatccagcgataaaaacggttgtcattttacctccaagtcaatgttgcgacataaatgctcttaaccttactatagctcgaaagtgcattgcaggctgcttccattgtagcaccggtatggaacagatcatctactagcagtacgttccattttccttcatttttgatggtatcttcaattgaaaatgaattaccaatagcttcctccttttcctctttatttgataaatttttgagagaagttcctccggtagctttaagcaggataccatcgaagaatgggctatttatcaatctagctacttgttttgctagttcgctgacaggctgaacttttctgatatttgacgctggcataggaatgacaaaaccgattttaggaaagtaaggtttaactatttcctccacaatacaatgagaaagttggttaatatattgaaaattattatgatattttagctgataaagtgcctagccaatttcggttctgacggtatcgaaaatcggatgcccagctccgttgtaacccaaaaaggtactacctaccgtgtgtttatccagtgcatatcccagtgtccagtttcctattatttttctcaggctaactttcatcatgtatcccgttattgtatattttttgtttgctgagaaattactacgcaaacgtagtgtcttcaatttcattttcacatatacaatcgttgggaaaactaaaattaaataaataagttaatgattatatttatttgtttatatacattttttgtgtttttatgattaacggcatcatgtttatgatgccgtttgtattaagattcgtgaatataactcagagtgtgatcaattaatccaattgatgtcctttgattccactatgtgtgatcggggtttctgtattgtggctttcgtttttcacgaaaggaattttacccgaaaaaacatctttctgagctgctgcggtgaaatctgcaattgagtcaggtaagttaactcccatgtttttgcctctgtcgtgacccgttatagattggtgagcgatttgctgcgtattcatggagactgttccttgagtactgtcaatccggctaccggtcaggtaggttctgcccgcgacattcagattaaccccgttagcaccgttcagggttgattgctcaccaacggtttcctgatcaagtgtgttgtaattgcttttcagttttccgttgtaatttttaaaagcagcagtcagacgatctgtcaggcttggcgcttccgtgtttgtcttatcatcgttagttgcagcgatttccggagagttattgtccgcaatcggtaatgtcgctttatggctgctatcacctttgactgttctgctataccctaatctgctatctaatccgatattcaggctgtcggttttatttttcaggctttcaacgttgaggttgccaccaatattacccgtgacctgatctgcgttgatgttgctgcctttgagtgaggtattccgagcactggtcagtgtgacgttaccaccagaaacctgattgttgtggtaagtcaccttattcagtcgatcaacaccgaattttacttcaccgcctatattgtatttgttatcgatgatgcggttaccagcctctccattgccggcgttaccatcgccaccttcattattacgcactgtgttagccatactgcctttgcctttagcgccaaagttccagccattgttgttgactgcatcatgagctgaggccagttcaatcctgccacgttgtgccgtcagatcgacctgcttgccagaaacgttcgtgccttgcagagtcaggttatttgcagcattcaggtttacattctgtccgcctgtaattgtgccggtttgagcgatatttctattctgctggctggtgttatagccggcaccggcactgccactgaagtttttgccatccgggttagttcctacagtcagagaaagttctccgttataaccataactgtttttttcctcacggttggtggcctgttcaaactgaatatttccgccggcattaacgtttgtctgaccattaccaccgttcatggaagtgccctgataatgtgcgtttctggtgacctgaacgttaatgccattctgggcgttgatttcactgccaaccgcgtttctgttatgggtggattctgcctgataactgccactccctttaccgttgacagaaagatcgctgccggtgctggtgtaaacgcgcatacgggcatcgccaaccgtatttgatgaactgctgctttgctggttgtaggcggcttcactggtatggctaccggcagtcagggatgcattacctttattggcctgatatttcgttccttgatcgtaaagatcgccattggtgttgattctgatgtcgcctgctttaacggtggtgacgacagcgtttgattgatggttgctggagtaatgactttttccgttcatctccagttcaagcccgatattcggtaatcctgtttttgcgatagaagtatccagctttccgtttgttgctgctttcgccgttttttccatagggcgagttgtggcgctgtaatcggctgaaccgctgatttcgccaccaacctgcatttgtcttgtggagtctgattcggtgttggctgttgctacatttcggatgctgccggcattcgcctgataagttccctgtacctgatattgagtgccttgttgtttcagttctccctgagcgttcagttcaaggttgccattaattcgtgcttctgaaaccaccgcagtagtgcggttccgggaatgaccattatcagaataaccaccttcagcaccgccgccgaatttatccataccaccggtggcgaagactcctccacgcactttagcctgcgaattactgctggaagagctgttttctgcggctgtcagagcaatgttgttacctgcaattctggcatcaccctgtgttgtgaccaccctgccactatcaatagtgacatttttacctgaattaatagtaattgtgcggccatttaactcagcctgctgctgtgtggtggtatgagttttctggttatcaagagtatgctcaaaacctgcaccggcacggtattgcttatcttttgtgtcatgagcgtaatactgccagtcaaggttgtttttctcctgttggtgctcagttttttcaccataggcaagcacgttgatattgccggatgtattgatattcagctcaccagcacttttcgccagactgccgataacattgatatctttatcactgattaatttcaggtcagcatcagagattaactggctaccggtgctggtttgctggtttgtctgttcctgattggaatttttggtgatgttaaagatggtgccttttctttcatccacttttttataggtattactgacggagttatcgatggttaagtcaccgtcattagcttcaacataggctccctgtcgtgcttttaccttgctgccagtaatggtgacgccatctattgcactcagcagtaaatgcccgtctgcgctgagatcagaggcatggtgtgtttctactttatcgtggttgtctttgttgctgccaccggcaaggccaccccatttacgcttatttttctcagtggcatgctcatcaacgagggattgcacagtcacttttgtctgttgtcccgccgaaacaatcatgtttttgcctgaatgtactttagaaccggtaatttcagcattggcacctgcattgatgcctaaatcgccgcctgcattcagttcactgctgacgagtctttgggttgtgtcgatagttgcccaatcgccggtttgtaatcccattccatcgttctttctgtaacccttttcgagttttctttctgactcgactaaaccagccagttttacatcctgcttagcagaaactgaaatctggttgccagcggtcactttactgcccaatatttctgcattgccttcactggctgtcaggtgaacattgttccgtgcattgagagtattgccttcatactgatacttttcactctcattggtgacatccttctgccaggataactgccagttgttatcggtgttttgatctcgttggtgtagctgctgaccgtccagtttcagattagcgccagtcagtttgatattatctccatcaatatcggttgccattatctgattatctttgcgggcaatcagtgtgatgtttttaccggtcaattgagtacgggcaacggactcattaatctgttcctgagaggtatgagcaccgctaaaagtactttggtgattaccttcccctgttttttgtaatgatgatcggttgaggtgcccctgcgcccgcaagtttttgccctgtaatgtgatatcgccgccctgcaagtttgccgcttctaattccacatcaccgtgggaggcaatataaatatcgtcaccggcttgcatcttgctccgtagattgacgccactgccttctgcggtattcaccagacggatacgcccagcctgcatactaccgaagtaatagctgtcgagcgctccagcctccggctgttttgaatccaatattctgccatctgcggcaatctggttatttccggtggtaatattgagcgctttgggcgtgatcacttttcctctgatatcgattcggggcgcgataaggttcaggacatcattatgggtcagtcccgaatttctgatattcagggcatttttattattgaagttattgaatccttgcagaatgccattctcaaccagcggattgccgaccaccagcgaagcctgattggtgttgataaagccacagccgttacaggtaataccgttggggtttgctagtatatagtcggcagccatgccgaaaacttcctgtttgccgagtaagagtgaagggttacggctgatcacttcattcagaatgacgctggcggcctgtccgttcaaattactgttagctgataattgtccggctaattccgactgtccattaaccagtgagttatttaacaccgctcccatttggttgacgttaaaatcctgatactggttatgtgatagtcctgattcggaaggagacacgatattgattaccgtggcgcctgtttcagcaatgctgacgtctggtcgatgagctgcatcaccaccgggagtgatgccactggcaaagctggttgaacaggtagccagaattatcgccattgatgccgcaagttttcccgtaggagataatcggaatatttttcttttcatactattacctctgtttactttctgtcatgtgaatgtgcagcatcccggggagaaattctccctgattggctgcggttaaaaatagttattattcaggtggctaaaataaataagaaaagcgggttaatagctgtataggctcacttttatttctgtcctgatgagataatgttttgccacggctcacctcaatatccgccagaaagtgttgatggcgtaaggccgctccgacactgaatcctgcgttgcttctccacgatgcttcctgccggttatggcttttaacctggccgacatcggctccgacacgcaaagtcagtgaactttcaggcaaaggtattgcgtaagataaggtgtttctcagataccagccgttatcagcggagagggtatttttgctgaaccctcgtaccgcattgcgatcggtaatattgagccattcaacgccggggagtccatttgggctgtattgggtataaaactggctgttaaggcggtatggcacagtaaacagtttgaaattctggtgtaaattgacagacagctttcctttggtgaatcgcgtattcaggttatgagtggctgtctgggcactgagccacggtgttccctgctcaatgccggtgtcaaaagtgataagtccatttggaataatttgtaagtggcttattcccagtgagagcaccgctagtttctgactactgacgttggatttggattcatcgaaataggtgttggaatccttgtaaacgaattgagtgttgagcgtcgaaatctgtgattgattgcggtgaaagagccagtctatgcgcataccggattgctgagagtttccgctcagttttaatgagttgtgttgcaactttagctgatttttatattgggaatagctggtaaaaccgctgaaagtgacagcaccataaggcagcgaatagaacaatgtcgccgcccgattatattgggtgcggggtttatcaatggtgctgaccccattgacgctgacgaaatctgacagcccgagcggactatcaaagctggcattcagtctgctgatccatttaccggtacttttttgcccgtagttatccgttattgcagagagatgccacggtgtggaatgccggttatgcagcctgacgatagagccgccatttactgtgccgggcagaatatcgagtgttgttttattcgattgcagacgatttgactgatccagcccctgatccaactgattcaggtttagtggctgattaataagcccggggaataacatccggctattaacccagcggtcaccaccttcgatagcttcgacgaaaccttcaatgacactgagccctaactccctattataattagggggaatgaattgcacccgggcagtaatgtagcctttggcgatatacagattagtgatttctgctgtcagtctattaatagcattgctggtaatacaccgttcgggcagtgcgctgagtgtatccagttcagtcagagaaagcagggtaataccctgaagataaactccgctgatatccagacatgccggtgtttccgtcagcactggagagacagtttgtggtgaaagggtatcggagcgttcgataaatccccggtagcgacgctgttcaatgagctggtctatttcccgtgaactatcctgtaaggttcttctggcttcgtctacaggtagtacagcatcaggtgcttctggcagtgcgctggcctgaagggatacagataataagataaaaactgccgtccttttgaacatcgtagcacccaaatggctatggttgagttggattgcgcatacctttcgtctttctggttattcctgaaaaacccttaggtatatatagttattctggtttactaattaatcattaaagcatataaattattttattttgctctgattactggttgtcgtttgttctatttgattatttatagttatatatttaacttaattatttaccataacccattttggttatgttttgttgggtggtttggaattaactcaaatttcaaataattaatgagggaggtataggctattttttataaagatagattcaacagaaagtgacattggttattaataaaacatgttattattaatttatatatttttatttattataaaaataatcactatttaaaaatctttcttgcagaaaaaaacaaaaaataaaatataaatgagaaaaaggagatttaaatcaaattaacaggagggtgttcatttggggaatataattcagccaatggataatacccattggctgaatatttatttatggctttagccagtttaagtcgcgttagcgtcttaaacataaaaccacccgctttgcgggtggagttcaaaggttataccaagaaaaacacctttccgttacgatatagatgttcaagctaatattcgtaactcaaataaggaaaggtgtttatgggcattaaagcacaaagctcagcgcatacaaagtggctgtgtaaataccatatcgtcttttcgccgaaatatagacggaaagtgatttttaataatattcgttcaagtgtgggagagatcctcagagacctttgtaagtataaaggtgtggaaataatcgaaggtcatctcatgccagatcatgttcatatgttggtgagtattccaccaaagctaagcgtttcaagctttatgggatatttgaagggtaaaagttcgttgatgatctttgatagacacgccaatttaaaatataaatttggcaacagaaagttttgggcggaagggttctatgtcagtacggtagggctaaatgaagcgacaattcaaaagtatatcagagagcaagaaaagtcggatttaatctcggataaattgagtagtaaagagcatgtagaccccttcaaggggtaggccaaagcagcaaagacacttagcttgaacgaagagaaagcagcgtcatttaggcgcagtcggtaacaagcccttatagggcaagagcaaaccacccgttatacgggtggttatgatttttctaatagccaaaaaatctcaaatcattttatagaaataggttgttcctgagaattcacctttatcattaatgacataattcagaatttgtccgacttcaacaaagccacattttcgataaaggacagaagcgggatcatttgtgcgggtatccagtatcaataaactacgttgatgccgctttgccacacgttccagttcttccattaacatattgccaattccacgccggcgataggttgtgtgtaccatgagtttttctacgtcagctcgatgtttcccattcttttttctgcaaagactaagttgtaccgagcccgcgattttgtcaccttccattgccactaatagcaagcgatgaccagatacaacatctgtttcgacatcttgccagtattgcgctgcctcattcactcccaatggtgaaataaatccgatagatgcaccattttcgacacagttatgcagtaatttaatgagttcatgacatttagtattgatggagtttaatagcgtgatgttcggaactgatattgaattcaacgtaggggtgctttttgtcatttattattaagtccagaatgagtaacgattaaacactatataagtaactctattctgcacataagaaaatataagaaggaatcacgaaatgaacaacagaattaaaataatacatggtgatattaccaaaattgctgttgaagctattgtcaacgcggcgaatagctctttgctaggtggtggaggcgttgatggtgtcattcatcgggctggtggaaaggccattctggaagagtgcatgcaaattagggcaaagcagggtggttgtgatattggcgaagcggttatcaccggagccgggaatttaccggcgaagtatatgctccatacagttggcccttgctggaacggagggagcggtaatgaacctgaattattgaaaaaggcctatgtaagctgttttgatcttattgagcaatacaatattgagacggtttccttccctaatatcagtacaggtatttaccgttttccaaaaaaactggccgcggaaattgctttggaggtgattcactcccgtttgtttgataatcaaaatatcttacaagtgaatcttatctggattgatgacgaaacctatatcatttatcggtctttaaattacacagctacctgcatcaaattgttatttggatcacaaagtatttttactcagaggaaattatcatagctggcttgctatcatgctccaaatcagcagaaaaacgggcttttccgatcttgattcgttcattaattatcgtgtctaatacatggtttcttattgcgcaaattacgagatgaaatcactcttaatttgcgcaaactaacctccggttatacacaatggatttcaagatgcgtcgcggcggcaagggagtaaatccccgggagcatagataaccgtatgtttataaaaacggtgaccggggtgaacgagtgcagccaacaaagaggcaacttgaaagacgaagtgtataggtgtattcacttgaaaatacgtcaaaacggcgggataaatcaaagaattgatgctaaacggaaattaagatagttttcgtttatatggcattaatgattgcggtttgtatgctgcgctgcgaaaattagttctagttcactaacgcttttatccgacttggagtaaagaatgaccactcgtaaaacccttgctaatgctatccgcttcttgagcatggatgctgtgcagaaagcaaaatcagggcatcctggtgcaccgatgggaatggctgacattgctgaagttctgtggcgcgactatctgaaccataaccctgtcaatcctcactgggctgatcgtgaccgttttgtattgtccaatggccacggttctatgctgatttacagcttgttgcacctgactggttacgatgtttccatcgacgatctgaaaaatttccgtcaactgcattccaaaaccccgggtcaccctgaatatggctatacagcgggtgtagaaacaacaaccggcccactggggcagggtattgctaatgcagttggtttcgcaatcgcagaacgcacactggcagcacaatttaaccgtccgggccacgatatcgtcgatcaccatacttatgtattcatgggcgacggttgtatgatggaaggcatttcccatgaagtttgctctttggcgggtacgctgaagctgggcaagctgattgctttctatgatgacaacggcatctctattgatggtgaagttgaaggctggttcactgatgatactgctgcccgctttgaagcatatggctggcatgttattcgtggtgtagatggccatgattctgacgcaattacagcagcaatcgaagaagcacgtaaagaaacaggcaaaccatctctgttaatgtgcaaaactgtcattggttttggttcgccaaacaaagctggtaaagaagagtgtcacggtgcgccattgggagatgctgaaatcgaagcaacccgcaaagcactgggctgggaacaccctgcttttgaaattcctcaggatatttatgctggctgggatgcgaaagaagccggtaaagcaaaagaaagtgcatgggatgcaaaatttgccgcttatgctgaagcatatcctgaactggcagcagaattcagccgccgtaccagcggtgaactgccagaaaactgggaagctgaatccaaggcatttattgaaaacctgcaacagaatccagcttctattgccagccgtaaagcgtcacaaaatgctctggaagcatttggtaaggttctgcctgaattcatgggtggttctgctgatctggcaccaagtaacctgactatgtggtctggctccaagcctctgaacgaagttcaggacggtaactacattcattacggtgttcgtgaattcggtatgtctgccatcatgaacggtatcgccctgcatggtggttttgtgccttatggtgcgacattcctgatgtttgttgagtatgcccgtaacgcagtacgtatggctgcgctgatgaaaatccgtagcatctttgtatatacccatgactctatcggtctaggtgaagatggcccgacccatcagcctgttgagcagattgccagcttgcgtgtcacaccaaatatgagcacatggcgtccatgtgatcaggtggaatctgcggttgcatggaaatatgcgattgagcgtaaggatggcccgacttctctgatcttctcccgccagaatctggcacagcaggaacgtaccgctgagcagctggcaaacattgagaaaggtgcttacgttctgaaagattgcgcaggtcagcctgaattaatcctgatcgcgactggctcagaagttgaactggcagtgaaagccgctgatcaactgagtgcagaaggccgtaaaatccgcgttgtttccatgccatctactgatgcattcgacaaacaggatgcagcatatcgtgaagctgtacttcctgccgctgtttccgcgcgtgttgtggttgaagcaggcattgctgattactggttcaaatatgttggtatcaacggtgctatcgtcggtatgaacagctttggtgaatcagcaccggctgacgcactgttcaaagagtttggttttacggttgaaaatgtcgttgcgaaagcggcagcactgctgaaataacaatataccttcaatggatttcgggttgcttcgaggcgaagcctataaagaggcaacttgaaagatgaagggaattaagcgcatctgcatcaaactttgagctgatgcgctctttttttgttcaaaatacttttattatgctattaacgatccttgctattagcccttttttctcgtagtcttcccttataactagctgaaccgtttcagttatcgcatgcaaaatgtcttgtctgtcacaatctgattaattttatgatgaatcatccgtacaatttgcacctgctcagttatcctaagccgttgcgtgacaacagagaaattcagggagtaacatgacaatcagggtagcgattaacgggtttgggagaataggccgcagtgtcctgcgtgcgctctacgaatccgggcgtcgggctgaaattgaagttatcgccatcaatgagctggctgatgcggaaggtgtcgctcacttattgaaatatgattccagccatgggcgttttgcatggaatgtgcgcctgaacaagataggtttgaataatacagtcttgcatgtgggagatgacagtatccggctgtttcatcaacccgatatttcggatttaccgtggaaagaactgggtattgatatcgtactcgattgtaccggtaagtatggtgaacgcatcgatggggaagcccatcttgccagtggtgctaaaaaagtactgtttgcccatccgggaggaaatgatctggatgcgactgtggtatacggtgtgaatcatgaactgttgtctgcggaagattgcatagtttctaatgcatcctgtacgacaaattgcattattccgattattaaagtgttggatgatgcgttcaatattgaatcaggaacggtgacaacaatccacgcatccatgaatgatcaacccgtgattgatgcctatcacagtgacctgcgtcgaacccgggcagccagccagtcgattatacctgtcgatactaaactggccgcggggatcactcgtatcttccccaaattcagtaaccggtttgaagctatttctgtacgggttcctaccatcaacgtcacagcgattgatttgagtgttacagtcagtgctgccgttaatgtcagtgaggtaaaccagctactgcaaaaatcagcagtgagttcgtttcgtggtatagtggatttcaccgatttgccgttggtctcaacggattttaaccacgaccctcacagcgccatcgtggatggcacacaaacaagagtgagcggaaaccacctgattaaaacacttgtttggtgtgataatgagtggggctttgccaatcgtatgcttgacacaacactggcaatggcttctaaaggtttcaaataaacgggtttcaaataaatcgtctgttgtatcgataatattgtgtcggattttgtgagatcagatgttattaaattaaatatgattgaacaaacggcatacagcaggggattgagtaattttatagagaatcaatgagaggattcaccatgtctgtaattaagatgactgatttagatctggcgggtaaacgagttctgatccgggctgatctgaatgtgcctgtaaaagatggcaaagttacctcagatgcacgtattcgtgcgtctttgccgacgatcgaggctgcgctgagtcagggagccaaagtcatggttacttctcacctgggacgcccaactgagggagagtacaacgaagagttttcactacaacctgtcgttgattacctgaaagcagcactttcttctcctgtccgtctggaaaaaaattatctgaatggcgttgaagtggcggaaggcgaattagttgttctggagaacgttcgctttaacaaaggtgagaaaaaagacgacgaaacattatcaaaacagtatgccgcattgtgtgatgtttatgtcatggatgcctttggtacagcccatcgtgctcaggcttcaactcacggcgttgctaaatttgcgccaattgcctgtgcaggtccattgttatccggtgaactggaagctttggggaaagcattgcataaccctgctcgtccaatggtcgcgattgtgggtggctctaaagtttctactaaactgactgttcttgattcactgtccaaaattgctgatcagcttatagttggtggtggaattgccaatacttttgttgctgctgaaggccacaatgttggtcgctccctgtacgaagatgatctgatcccggaagcgaaaaaactgctggaatgttgtgatattcctgtacctactgatgttcgtgttgcgacagagttttctgaaacggctgaagctacattgaaatcaaccagtgaaattaaagatgaagagcagatcctcgatttgggtgatgcttctgctgaacgtctggctgaaatcctgcaaggtgcaaaaaccattctctggaatggcccggttggtgtatttgaattcccgaatttccgcaaaggaaccgaaattattgcccgtgcaattgcagagagtgatgctttctcaattgcaggtggcggtgatactttagcggcaatcgatctttttgagattgctgacaaaatctcttacatctctacaggtggtggtgctttccttgagtttgttgaaggcaaaaaactacccgctgttgtgatgctggaagaacgtgctaacagtaactaagttaagtaactcgttgtgatagcaggcagtatttactgcctgctcaatgtcaatacaggaccacgtaacatgtctaaaatttttgatttcgtaaaaccgggtgtcatcactggtgatgatgttcaaaaagtctttgccatcgcaaaagaacataattttgccttaccggcagtgaactgtgtcggtactgattctatcaatgctgtgttagaaacagcggcaaaagtacgtgctccggtaatcatccagttttccaatggcggtgcagcatttgtagcaggtaagggcctgaaggctgaaggtcagcaggcggcgattctgggcgctatttctggtgcttatcatgtgcatcaaatggcagagcattatggtgtgccggtgatcctgcatactgaccactgcgcacgcaaattactgccgtggattgatggtctgttagaagcgggtgaaaaacactatgctcagacaggcaaacctctgttctcttcccacatgattgatctgtcagaagagtctctggaagaaaatatcgagatttgtagccagtatctggcgcgtatggcgaaaattgacatgacgctggaaatcgaattgggttgtactggtggtgaagaagatggtgtcgataacagtcatctggatagctcctccttgtatactcagccagaagatgtagcttatgcgtatgaaaaactgaacgcgattagcccacgttttaccattgcggcatctttcggtaacgttcacggtgtatacaaaccgggtaacgttaaactgacgccaaaaattctgcgtaattctcaggactatgtttcagagaaattcaacctgccacacaatagtctggattttgttttccacggtggttctggttctaccgcagaagagattcaggaagctgtcagctacggcgtagttaaaatgaatattgacaccgatacccaatgggcgacctgggaaggtattctgaactactacaagaagaatgaaggctatctgcaaggtcaattgggtaacccagagggcgcggataaacctaataagaaattctatgatccacgtgtgtggctgcgtgctggtcaggtttcaatggaagttcgtctggaacaggctttcaaagaactgaatgcggttgatgtgctgtaatttccatactgattggcatggattaaagtcgctttagtcgattaacgtttcttagttcccgcccgttattttcatgatcaacgggcgggaatttttttaatgaaaccgaattaaatcagttaggctcttgcgccatctttcataatacggttcagccatggcaccatgaaagccataaccacggcaacaatgagagtggcaatacctattttaccgaatacgcccgtatatatcggcagcgtttgcagagggtcggtaacaccttccggtgccgcagtaaaggttgctatatagcttcccaatactgatgcagcagcctgagataagaaccacatacccagaataaaccctgtcagatagctgggaacaaacgcagcaaccattgccagccctaatgcactgatcatcaattccccgatactctggaacaggtaaaccagtacgataaaccacggtgaagtcatgccatgttcatcggcgaacaggccggaagcggctgctgtcagaaagccaagagaacacaggaacataccgacggtaaacttcgttggcatagaaaaatctttgccttttgctcccagacgggtgtaaagcacagccagaatcgggctggcgacgatgatccagaatgggttcagagcttgaaagctgatagggttaatattaaaaccgaagatttgggtattaacattgttgatggcaaagaagttgagggaagttggcatttggttgtacagcataaagaacacaatagcctgaatcatcaggataaatgctacaaacatcttattgcggccgactttatcctgtttgaatgcctgccagaagaaaatcaccacaacgatagctgaaattgccataagaacgagattagcaatatctatattgtgcaatagccacgcacagacccctaccatcactgctgagccgagtaaaactaaaaatagggttatgtagttaagaggggcatggtctggctcagagccgatgtcatgtaccatacggcggcaggcgatgtaaaccaacagagcgataatcaggccgataccacagatattataggtaacagcatagccatatttttcagcaataacgggagcgagagaaagagaaaccagagaaccaagattgatggacatatagaatagtgtaaaagcgccatctaaacgtggatcttgtggctggtagcacttagccagcaggcttgcgggattagctttgaacagaccattaccaaccgcgacagttcccaaagcataaaaaatcagttctggttccataatggaaaggccaatcagaaagtagcctattgccagtataatagcacccagaatgatggttcgttttgttcccagcaagtggtctcctacataaccaccgatggaaatcaaaccataaaccagcgcagtaaatgcaccgaaggtaataaatgcctgtgtttctgaaaaaccaagctgtttaacgaagtaaacagcgagaatgccttgaacgccgtagtagccaaatctttcccataattctacaaaaaaaatcatgaaaaagggcttcggttgatcccataaaccgactggagcggttttattcatagtaattgcctctgttagttgtcataccaatggacaatacatccagagcttatactgttgttaacataaaagtaacataatgtattgcacgggttgtgtttttgtttaattattcagagtgatcgaaagcgcgggaggttaatatactggcataatatcttctcagtggttgatcacactaatgtaaaaattaataccagatttgacagaatattcactaaattaataggagaaatcacataataatggtttaagtgttcgtaaataaagcaacttgatggttgttcgctcttttttttccattcttattgataaagtaactactcaaaaggtgtacgcagaaagttttgaacactaatatcaatatattaattttatgttatatatttagtttttttgtttgttcctgcatgagatcgagctacataaaactacacgttttatataatttatcatatttattaaataataaatcagtttttgggatggcttatcatcgctgattcggtcagaaaaccggttatgcccaatgaattttgagttgcatcatcgaaggaagtagctaaaccgggaacggactttccaaccaaatgaagcgggattgaacagccaacaaagagatcattttaaagacaacagtgatataaaatgggagtgacactatagaatatatggagcaagagtgaaatataataaacaaactccacctactatattaacaaatcggcttacgatgctgaagtttatttttcttgcagcaaatataacaatataaccaaatgataataaccagattgttgtaataataatatggatagaagcaagaataataaaatttaatacactaatatagtcagatgttaaaaaaccaggtactacagtaagatagagtaggatcgcttttatattcagaatgttggcgatataggcgtcttttattgttgcaaccttcgtccctttttctgtcatttttttaccggaataaattccgttctttattaatatacaagagagatagattagataaattgttcctatgatttttatagcatgcataataaggggatattttgtcactataccggtaacacctaggccaaccagtaatgcatgcgtgtaaatgcctaaagctgtcccgattatgatggaaagcaagccttttattccactgttaatagcatttgccatgccgagggtaaaacttgctcagggggataaggcgataggtaatatcgtaagaataaagcctgaaatattcaaaattccacccgtatattaatgactcttgtcggaatgtctatgacgttgagatcccattgattatatacctaataaattttgagttgaattatggtggcatgagaatgataaattagtcgggaactcattggcccagctaacaacgtgacagcctgaaagacgatggataaaagcgagttgagaaagtaaagggctttacgtccttgcccttatacctaattttaacttttagcttcacgtcaaactgcggtagccagagttttgttcatcacctgatgaaaagcacgcttaaaataaatcagcccgtggccttcttccagaacatgaagctgtttgatttcgaccagataaacattgtgtgtgccgatttcctgtacctgttcgatgcttccttccagactggcaagtgttcctttcagcatgggttgccctaatgagcctgtgtgccagatatcccagctgaagcgttcttccatactggcttcagtcatacctgcaaaatggcgggccagcaattcctgctcatgattcaggatattgacacatagctggccattaccctgaaatacctgattcatagcactgttacggtttatgcacaccatcaaagttggcggagtatctgtcacggagcatactgccgtcgctgtcataccgcaacgcccggccgggccgtcggttgtaataatattcaccgccgcggaaaggcttgccatcgcatctctgaatagcaagcgatgttcattttctaaagacatcataagtctcctgctactcatttatttcagtagcgtatctaataaatttatatcattgttgttgtgtaagtgggggcttacccagccatttacatcataatcagagagacactgatccaccagctcagtcatttttttcatattgccagaaccatacgcatggcgcaggcattgcaggcgaatttcatcctgactaccagcatagttgatttcatacaattcatggcgcccgccaaattcactgccaatggcatcccacattagtttcagaattttaatgcgttcaacatgatcaatgccatttgaaccccggacatatttctcaaggtactgactaatttcaggattattcatatcccgtacactggatggtaaataaattaatccactggttacattactttcaatgatatttttaatttttgtataagccattggtgccatgacccgataagtctgtattgcctgagtgtccggtaggtaggctccaccttcccacggttttgcttctgcccacattgcatctgtcagcgaccagaacagattgcgccacgctacgacttcacccaaatcagcctgaacacccctaaaatccaccacaccagtacattccaggctcttttgcagtaagccggtgataaagtccagtttaacggccagacgtacacaggcctgcataggaaacagacgggcgaagccactttgaacggcccaattacgtgcgcgatcaaagtcacgataaattaacacgttttcccacggaattaacactttatccatcaccagaatggcatcattttcatcaaaccggctggaaagtggataatcaaaaggtgatccggtcgcacctgccgtcagctcataagaagctcgggagattaatttgacgccgtcagaatccattggtgcgacaaacatcagggcaaaatcagggttatcacccatgacctgcgctgagccgaaaccgataaaattatagtgagttaaggctgaattggttgccacgactttggcaccgctgacaataatccccgcatccgtttctttttctatctggataaaaacatctttaacctgatcggccggtttatgacgatcaatcggagggttgacgattgcatggttaaaataaagcgcattttcctgaatgcgtttataccaactgcgggcattatcggcgaattgcccataaaactcaggataagcccctaaagcacaacaaaatgccgctttataatccggtgtacgtcccatccagccatagctctggcgtgaccattcagcaatggcatcgcgttgctggcggatgtcatctggactggttgcgaaacgaaagaatttgtgagtataaccgccgctgccggtatcagtatcccaacagagaatgtcatgagtctttggatcatgcagagcgtcatataattggctgatagaggcagcagcattgcgaaaagcgggatgcgtcgtcacatccttgacccgtttgccatagatataaatttcccgcccatcctgtagtgactgcatatattctttactggttaacggacgtgttttatcggcacgaaaatcttctggtttcatagctacctcatcatccgaagccttccattctgatttgttatcttaatggtaggttaagtgttaaataaatgttgacttatatatttaattgaagcgactgagggagaatatctgaagagactttcagaagaactgcaggtacttttcggtaaaacgggtgatttgttacgtaaatgtgatcagctttgtgttttgatataagcgttccactcagaagttatatctgaatgtgattgtattttatgatgatggtattttatggttatttgacgttattttctcgccagatactcggtgaacacccttccagccgattaaaaaaccgggcgaagtaagccgggtctttgaatcctaattggtatgccacttcaaatactgggctatcactgaacaacagtaaccgttttgcttcccttaattgacggtcaaagatcaatctcttgggaggacgatttgcaaaccggcgacacatatctttcaggcgtgattctgtaattcccagaatctgagcatactctggtacagtaagatgttggctgtaatgctgatcgaccagttggttaaaacgctggaagagtttcagttctcctctgactccaccagcacgatgatcttcaaggggaatactgcgtaaaagaaaagtaaacagggattgtgccaagaaagtcagtgactgctcgcggccggcaaattgattggctgattcacgcctaattaatgcccagtagtgattgaatgtttccagttcgtccggtttatcggcaatggaaaggcagaaagccggaatatcaatcagttcccgatgtgccggatagagcgagttaagcagtggggtaattaactcctgacgcacagtcagtacataaccatcggtgccttcctgcgtaaaaaatgcatggggtacggaagggggagtcaggataaacagcggagcctgtaccgagtaacggagatcgtccaattgtaattcaatccggccggtgaccagatagtgcagctgaaaaaagccatcatggcgatgggcctgcatatcacgaccaaaaaatgcggccattcgaccaaaagtctgataatggacatcatctgatccctgagtttcatcataatctttactgatatcaatattgctaataacttcgctgtttatctggctggctgacattaatttattcccttcaaggtggtcatcaggatattttttgagacgtcgtaaattagacaaattttatgatcttgcgtgtttcattgggatcagcagaaccattagtgccccgatcaccagcagcccggcgacaaaatagagaccagagttaaaattgccggtctgatctttcagccacccgatcaataaagggctgacagccgaacccacattacccgtcgcattgatcaccgcgatcccaatagcacgtgctcgcagactgatggattgatcgggcgtcgtccagaatactgccatcgcagtaaacgagccggttgatgccatgatgatgcctaaaagctgtatcatgctgttgcctgtcagtgacgtcaggatccagcccgcagccgcaaacaaaaaaggcagagctgtgtgcatttttcgttcttgcaggcggtctgaccgacggctccagtagatcatccccaaaatagtacagaactgaggtatagctgttagcaggccaataacggtgtgactgcttccctgattgaaactctgcataatttgtggcgtccagatattaatggcgctcagcgtattggtcaggcagaaataagcgaaggtgtacatcaggacaatcggggtaaaaatttcacgccacaggctggtttttgcgtgtgaaggttcagcgtgtgctaaagaaactttatcgttctctatcatttcctgtaggcattttttatcttcatttgtcagccattttgctttctctggtgaatcatccagataaaaccagacgacaatacccagcagaacagaggggaagccttccagaaaaaacagccactgccagccacgcagatcccagatgccgtccatttccagaatataaccggatgccagtgaaccaaatgccattgtgacaggcatagcaatcataaacagggcattagcacgggcacggtaataagccggaaaccaatatgtcagatagaccagaataccgggcagaaaaccggcttctgcaatcccgaccagcatacgcaggatatacaggctggtgggaccggtcgcaaacattgttgcggtggaagcaattccccacagcaccataatcgtggcaatccagcgtctggctcctacaatgcccagcatgatattactgggaataccaaaagccacataagtcacataaaacagtgttgcagctaacccgaacatggtcgatgtaagacccagatcttttcccatcgttaaaccggcaaaaccaatattgatacgatccagaaaagaaaagatgaacaggacaaacagaaacaggatcaggcggcgaaataattttttgataacactttgctgctgtgccgtgaggtttttatgtgaatagtctggtgcatcatgtttctgtatggcttcaggtgagctgctcatggttgtgacctttttattgattaatatgcagcgttggatacagacgatacggtgttttcctgtcctttaccgaaatgtgccgccagcgaactggctgcattggagagcagtgtggtatcaacaccaacggcaataaacttcacaccgagatccagatagtgctcagccgcttcagtattggtcatcaatatcccggcagctttgcctgctgtgttgatttgcctgatagcttgttcgatcgtcgccttaacttcggggtgttgggggttaccgtggtgccccatgtcagcactgagatctgcggggccgataaatacaccgtccacaccttcaatcgtcagcatctctgacaaattattcaaagcctcacgggtctccacctgaatcagcacacacatttcttcattggcacgagccagataattagggatacgattccagcgcgaagctcttgccagtgcactgcctacaccccgaatgccttccggcggatatcgggtagcccgtaccgcttcacgtgcctgctcagcattctgaatcatcgggatgagcagtgtctgagcaccgatatccagcagttgcttgataataaccggatcgttccacggcggacgaacaatcggctggcttggataggcagcaatagcctgtaactgattcagggtggaagagatatcattgggggcatgttcgccatcaattaatagccagtcaaagccggttcccgccagaatttcagcactgtatgaactacaaagcccaagccataatccgatttgtggctgccccgattgcagggcctgtttgaatctatttgtcagttgatccatgagtgcaccttatactccgattttttaagtaaatttttaattcatttttataccagactgatttttaagaaaaataacagctcactgaacctaatgcgccataatccacatgaaatgtatcccctttgcgggctgcaactggtcgggtgaaagagccactcagtatgatctggcctgcttcaagctggacaccgtgtgatgccagtttattagcaagccatgcaacaccactggcaggatggtcaagcactgctgctgctacgccggattcctcaactacaccattgcgatagagcagagcgctgacccatcttaagtccagttcatggggtttgatggggcgtcctcccataatgacgcccccatttgctgcattatcagaaatcgtatccacgactttacgcgggcgctgggtttccggatcgatgttatgacagcgggcatcgatcagctccagtgccggaataacgtaatcggtcgcattgtaaacatcaaacagtgtacagttcgggccttgcagcggttttgccagtacgaatgccaattccacctcaatgcgcggaacaataaaacgttcgcagggaatatggctaccgctctgaaaaaacatatcatccagcagtgcgccataatccggttcttcaatttgtgaactgagctgcatggctctggatgtcaggccaattttatgtcctttcaatacccggccttccgccattttcatactgacccattcacgctgaatggcgtatgcatcctcaatggttatttccggataatccagtgagatttgacggatctgtttacggtctttctctgccagatataaacgacgagcaacctgtgatacgacttcttgctgtagcatatgtgtcaaactcctttggtttataatcctccgaaacagaggtatttcacttccagataatcttctatgccgtagcgcgacccctcacgccccagaccagactgttttatgcccccgaacggaacagcttcgttggaaatcagcccttcgttaatgccgaccatgccgctttccagcgcttctgctacacggtaaatcctgccgatatcgcgggaataaaagtaggcagccagcccgtactctgtgctgttggcaatgcgaatggcctcttcttcatcccggaatttgaacagggcagccagagggccgaatgtttcttcatgggcgacttgcattgtttcatcaatatcagccagtacggttggctcaaagaacaggccacccagtttatgggattttcctccggtcagaagccttgcaccacgggaaacggcatcactaacatgcgcctgaactttatctatcgcagcctgattaatcagagggccctgctgtgaggagctatcactggctggtccaacatgcagttctctggctgcctgagccagacgctcagcaaatgcctcgtaaatgttttcctgaaccaggatccggtttgcgcagacacaagtctgaccgctgttacggaatttcgctgccattgcacctttaactgcggcatctaagtcggcatcatcaaaaacaataaaaggtgcattgccacctaattcaagagagagttttttcaccgtatcggcgctttgtgccatgagcaatttacccactcgtgtcgatccggtaaaagagagtttgcgtacgatagggcttgaagtcagggcttccccaatcgctttggcatccattccggtgacaatattaaagacacccgctggaactcccgcttgctcagccagaacaaccagagccagtgcggaaagcggggtttctgcggccggcttcaggacgacagtacaacctgcggccagtgccgggctgacttttcgggtaatcatggcattagggaaattccacggcgtaatggctgcaaccactccgatgggttgcttgatggtggatgtgcggcaacccggcatgggggaagggatagtttcaccgtaaatgcgtttgccttcttctgcaaaccattcgataaaacttgcaccataagcaatttcacccatcgcctctgcatgggacttcccttgctcgatactcagcagttcggccagtgttttctggttatcgatgaccagattgaaccactgcctgagtatctggctacgttttttggctgtcaggtcgcgccatgcaggaagcgctttttcggcagctttaatcgcacgatgagtttctgctgcccccatatcactgacattggcgatgatgtcaccagtagcagggttggtcacagcaaaggtggctttattgtctgcatcaagccatttcccgtcaatgtaaccctgctgacgcaataacagggaatcgtgtaatacagcatcaagatggtttgtcatggttttctcttcatttaacaattacgttgaatttcagttacttttaatttcagtaacatcgaattatggcactcataatgtcttagtttttgatttaaaaagtttatgaacattattggatttataattcagtattggatcaagttcttccattgtaaaagagagaccaaggtaacgctgtgccattaaatcggcaaaatgagctttgatgagtgaaaacagcatttccccgactttctggcaatcttcagcgctgcgtcctgcaccgattttcagcgtcatgtgaacgaaagcgtaatcctgttttccatctgccatttgccacgtatccagccaaatagcccggctgcggatcccggcctgagggaaaatgccggtatcagcaagcgcctgattcactttcgcaaacagttccggtaaattggcttctttgcggatattttcggtacattcagcataaaaatgtggcatagctaactcctgtcagacggaagttgtctggttaacagaatgtggtaatgggaaaacagcattcacctgtcctgttcctgaactggcaaataattccgtgagaaactcaaccttgccgtcatatttatcccagccaagcagcccgagtaacatgacggtatcgtgcatattgccttcaccccgacagtagagggcatattcaggcagcatgtcgcaaaactccctgaagcgaccttctttccaaagtttgacaacccggttatccatctgctcatcaaactcgcgggtatagctgttcatgccttcttcggcacgttgatcatcgataaagctgtgggagagtgaaccgctggccagcacggcaacggtgccatcatatttctcaatagcccgtaaaatggcttctcccaacttacggctatcttcgaaagcatgaacagtacaaaaagccgaaattgaaataactttaaaatggcgatcactattcatatagcgcattggcactaatgtgccatattccagtgtcaggctggcaatctcatgtgattttgcacgaacccccatctggcgcgcttcttctgcgatcatccgtcccagttcgggatttccgtcatactcataactcatatcgcggataaaatgcggtaattcattactggtataaatgccggagaaatgttctgcacagttaatatggtaggcactatttaccagccagtgggtatcaaacacgataatggtatcgacacccaattcccggcagcgacggctgatttccttatgcccgtcaatcgcactttgccgacagccatagtgtttacccggcaattcggacagatacatggaaggtacatgtgtaatttttgctgctaacgctaacttgcccataaatcctcactcagtatcaggatgatgaaaagcggttaacgctggaagagatatacccgccatcattcagtctgtaatctgaattccctcggatatatctcttttcttagatcaaagtccccagcgaggaatgggatgatttcccattgaaatacaaacatttttcacttcagcaaaaacttcaaagctatattctccgccttcccgtcctacaccggaggcttttacaccaccaaatggctggcgcagatcgcgtacgttctgggaattgacgaagaccatgccggcttcaattccctgtgccagacgcaggactttgctcacatcctgagtccagatataagatgccagaccatattccacatcgttagccatacgaagaccgtcttcttcactcttgaatggcagcagacaggcgaccgggccgaaaatttcttcctgtgccacacgcatccggttatctacatcggcgaggacggttggtcgcaggaagtgaccatttttcaggtgatcaggcaggtctgccggtttatccggccctccggttaacagcgttgcgccttcttcaatacccagttggatataaccggaaactttctcccagtgctggtggctgatcaggctgccgacctgagtattcagatcctgtggatcaccgacgcgcaggcggctggcacgttctgcaaaacgcttcacaaattcaggataaatgctttcctgaatgaaaatacgggagcctgctgtacagcgttcgccattgagggaaaaaatggtgaacagggcagcatctaacgcacgttcaatatcggcatcttcaaaaatcagtaccggcgatttgccgcccagttccatggagtattttttcagccctgagttctgcataatcaggcgaccggtagctgtcccgccggtaaaagaaacggcacggacatcatgatgttttaccagtgcatcacccgcagtattgccatatccctgtaccacattcagtactcctgcggggataccggcttccagagccagttctcccagacggttagcggtcagtggtgaaagctcggacattttcaggactgcggtgtttcccagagccagacagggggcaactttccatgtggcagtcatgaacggcacattccacggggaaattagtgcgcagacgcctacaggctggataagggtataattcagcatcttgtcatcgacgggataagtgcgtccgttcatctgctgacaagtttccgcaaagaaatcgaaattgtgggaagcgcgtgggataaggacattttttgtctgatgaattggcaagcccgtatcgctggtttccattgccgcaatttcaggtacattctggtcgattaattctcctaaacgccgcatcaggcgagcgcgttctttcattggggtatttgcccatttaggaaaagcgtcttttgcggcagccaccgcctgatcaatttcttcttttccgccagaagcgacttctgccaatacctcaccggttgcgggattgactgtttcaaaataggtactgctgccaacgtttttaccgttgatccaatgattaattgtggtcatgacaggctttcctcatatgcttgctggctgacaatatgatttaccagacgtccgataccttcgatttccacaatcacttcatctccgggaacaacatcggataaacctttgggcgtgcccgtggcgatcatgtctcctggctgtaatgtcatgaaatcgctcagataggcaatcagaaagggaatatcgaagatcaaatctgcggtggtaccacgctggcgtaattcaccattaacccaggtactcaggatcagattatgcggatcggcaacttcgtgcttatcaacaatccacggcccgatgggcgttaacgtgtcacggctttttactcgcagattggggcgataataattctccacataatcacgaacggcgtagtcgttacagagggtatagcctgcaacgtaatccatggcattagctctggaaactttgtgggctggcttaccaatgacaacaactaattctgcttcataatgcatatattccacattatcaggacggacggaaacctgacggtggcctgtgaaactgttagctgccttgataaataccagaggctcctccggcggcttaaattccagctctgtggcatgatcggcataattcagacccaatgcgaacagtgttccggtggctggcggaagccatacaacatcaagcccgctgatccggctgccatcaggtagcagtacattctcctgctcatcaacagtgacatgtaaatcctgaccctgatagtgaattctggcgtgtttcatgcctgacctccggccaatacaacggtgttttgtaaaatgggaaaaccatcagccctgattgtgacagtatcattgggatgcagagtggcacgttggtgaggcgttcccagcagaatgacgtccccttcattcagggtggtaaagtcgcttaatgcggataaaagttctgatgcggaacgcaccagatcatgagttgaccagcgatcaacttcctgcccgtttatctcggtgatgatgtccagtgagtctatagtcttcacatccgacatctgaccaattgggcaaaaaccatcgcggcattttgcttttatggcagggcgataaaatgaagtctccggtaagctgacttcgttagccagtgcataaccggctatgtattgttcggcatctttggcagaaactttgcgggcagctttgccgacgttatttgtgctgataaacagtgccagcgtcgcaccgctttgcaccgtttccccaatgggatggggaataacatcaccggacgtaatcactgtattacggggtttgataaaccaaactggagtttgaggaagcgcgttatatggcgctttgtgaaatgccttacgccaaaaatcgagctgactgttgtggttgagagcgacggcaaagacggtgcctttcattaacaactccttgcaagctgagcgatgtatcgcaagataaattattaacatattaataaagcaagaagcgatgatgttcaatatgttaagttaattgttaattttaattgtgatctctgtaacaacattctgttaatgattatttttagtacataaagatcaagccgttatattatctaatagggtcatttggtattgtgtttaactttctgttaactttttgtggcaaaataattttatttatttgttaatattgaattctttttcctttgtggatagttatgagcatgttagtcttttcgactttaatgttgtctataatcggtagcgcatgcgttcaacttatagagaattacccgtggttaacttaagagtcacctttacttatgcatgaatccctgacattagcattacttcaagctcgggaaacctcgatgggttttttccgcccgatattgaagagttataatttgactgaacagcaatggcgtattgttcgcgtactcgcaagcagtcgctcgattgattttcatgatttggctaaccttacctgtatcttacgcccaagcttgacgggcattctgacccgcatggagcgtgatggtcttatctttcgcttaaaaccaatgaatgaccagcggaagctgtacgtttctctgactccggcaggtcaggagctgtatgaacaggcaaaaggagaagtcgatgaaggctataaagcaattgaagctgctttttccccagaaaaattagctcagttgttagaattgttggatgatcttatttctatcggcaaccattcccaaaccgatatagatgaaaacgaagaatagtcagcacatatttgtattaatatattaattaatcaaatctctccataataagagaaagagcaccggaataaactggctgttatttttttgaacagtttattgcggtgttttctttgaattaagaaaaatttggcagcctgatcgtattatagattttatttataatgccgtattttcataaaatatgtttatgttaaaacacctctgaatgaaataacccataataaatattgattattgactcaaagaatgaatagagtgtgattggtgattatttgaatgaaaaaataatcaaagtttataagctaacggaaataattaattttttatgagggattattttctgcttcattaagcaatatatttcaggctgcaacccgtcagccaacaacctgaaattaatatccccgtcgtctttcaagttgcctctttgttggctacgctcattcaccccggtcaccgtttttataaacatacggctatctatgctcccggggatgaactcccttgccgccgcgatgcaactcgaaatccatagggtataggatgattatccggcattttcctgccggtaagccaaagcgacagccagtgattgcaccagacataacgtggcagactgggagcggaatgcatcaacttttgcttccttcaccacaaaacaaacatcgttaaaactcgctaatgggctgatttggctgtcagtaatcacaatctgttttgctccagcctgtgcagctctttcactgaccatcacggtttcttcggcatagggggtaaagctgatggaaacaactacatcatttgccccaatcatattcatttgttcgcggaacatacctcccagaccatctaccagcaaagggcgacattccagatggctcagggcataggttaagtatgatgcgacactgaacgagcggcgcagcccgataatgtagatatttccggcatttgccagtaaatctactgccttatttaagtcttctgccggagtacgggcggcaagttgctgcatcgcctgcccattggaatgggcaaattcctgcaaaatatgtagtgggtcttccacttgctggttatcaccatccagtgctctgaacaagcgggcacggtcagtataactggcggtttcttctaccagattcatgcgaaataactgtttcatctcattgaacccgttgaagtcaaaggcattggcaaagcggataagagtagaaggtggaacatcggcttcttttgcaataaccgcaaccgtatcaaatgccacgctattggtattatccagaacatatcttgccacttgctgtaaccgcttacttaactcgtcataacgcgagcgaatttgttcctgtagttcgggcagattcgatgcagcagacataatgtctccctaataaattgtaattgcaaaaaaatagcgtgttgatcacattaataaaatagtatttcaattcggattgaaaatgaaatggatatttcatatatctttagcatcgtgattcaattcataatgattcaactcatcttacgtggttcagcctgtatgtggttaggcctatacacaatggatttcaagatgcatcgcggcggcaagggagttcatccccaggagcatagatagctatgtgactggggtgagcgagcgcagccaacaaagaggcaacttgaaagatgaagtgtatataattgtattgagagaggctcaaaatggaacagattaaaaattttattggcgggaaacttatcagtagtcaaagtgtacgaaccttacctgtttttaaccctgcaacggggaaatcaattcggcaggttgcattgagcacagcccatgaaacaaaatctgctatcgaatctgcccatcaggcttttgaggagtggtctaaaacctcgccattgaaaagggcacggatcatgttcaaatttaagtcactccttgaggagaatcagtcaaagctggctcgtctgatttccgaagaacatgggaaaatctattctgatgctgtgggagaactgacccgtggccttgaagtggttgagttcgcctgtggcattcctcacttacaaaaaggcgagcactcagccaatgtaggggcaggagtggatagccattccctgatgcagccactgggcgtatgcgcagggatcaccccatttaattttcctgctatggttgcaatgtgg

SEQ ID NO: 3787 - DNA, 52812 bp, Xenorhabdus sp.; identical to SEQ ID NO: 3786
  CDS (858)..(1832)

SEQ ID NO: 3788 - DNA, 52812 bp, Xenorhabdus sp.; identical to SEQ ID NO: 3786
  CDS (1981)..(2937)

SEQ ID NO: 3789 - DNA, 52812 bp, Xenorhabdus sp.; identical to SEQ ID NO: 3786
  CDS (3039)..(4241)

SEQ ID NO: 3790 - DNA, 52812 bp, Xenorhabdus sp.; identical to SEQ ID NO: 3786
  CDS (4231)..(4713)

SEQ ID NO: 3791 - DNA, 52812 bp, Xenorhabdus sp.; identical to SEQ ID NO: 3786
  CDS (4723)..(5214)

SEQ ID NO: 3792 - DNA, 52812 bp, Xenorhabdus sp.; identical to SEQ ID NO: 3786
  CDS (5754)..(6884)

SEQ ID NO: 3793 - DNA, 52812 bp, Xenorhabdus sp.; identical to SEQ ID NO: 3786
  CDS (7261)..(9315)

SEQ ID NO: 3794 - DNA, 52812 bp, Xenorhabdus sp.; identical to SEQ ID NO: 3786
  CDS (9334)..(10575)

SEQ ID NO: 3795 - DNA, 52812 bp, Xenorhabdus sp.; identical to SEQ ID NO: 3786
  CDS (10975)..(11580)

SEQ ID NO: 3796 - DNA, 52812 bp, Xenorhabdus sp.; identical to SEQ ID NO: 3786
  CDS (12765)..(13460)

SEQ ID NO: 3797 - DNA, 52812 bp, Xenorhabdus sp.; identical to SEQ ID NO: 3786
  CDS (26557)..(26862)

SEQ ID NO: 3798 - DNA, 52812 bp, Xenorhabdus sp.; identical to SEQ ID NO: 3786
  CDS (27785)..(28216)

SEQ ID NO: 3799 - DNA, 52812 bp, Xenorhabdus sp.; identical to SEQ ID NO: 3786
  CDS (28676)..(30670)

SEQ ID NO: 3800 - DNA, 52812 bp, Xenorhabdus sp.; identical to SEQ ID NO: 3786
  CDS (31006)..(32040)

SEQ ID NO: 3801 - DNA, 52812 bp, Xenorhabdus sp.; identical to SEQ ID NO: 3786
  CDS (32187)..(33353)

SEQ ID NO: 3802 - DNA, 52812 bp, Xenorhabdus sp.; identical to SEQ ID NO: 3786
  CDS (33369)..(34499)

SEQ ID NO: 3803 - DNA, 52812 bp, Xenorhabdus sp.; identical to SEQ ID NO: 3786
  CDS (50182)..(50628)

SEQ ID NO: 3804 - DNA, 52812 bp, Xenorhabdus sp.; identical to SEQ ID NO: 3786
  CDS (52633)..(52812)

SEQ ID NO: 3805 - DNA, 52812 bp, Xenorhabdus sp.
  CDS (41084)..(41236)
ccacattgcaaccatagcaggaaaattaaatggggtgatccctgcgcatacgcccagtggctgcatcagggaatggctatccactcctgcccctacattggctgagtgctcgcctttttgtaagtgaggaatgccacaggcgaactcaaccacttcaaggccacgggtcagttctcccacagcatcagaatagattttcccatgttcttcggaaatcagacgagccagctttgactgattctcctcaaggagtgacttaaatttgaacatgatccgtgcccttttcaatggcgaggttttagaccactcctcaaaagcctgatgggcagattcgatagcagattttgtttcatgggctgtgctcaatgcaacctgccgaattgatttccccgttgcagggttaaaaacaggtaaggttcgtacactttgactactgataagtttcccgccaataaaatttttaatctgttccattttgagcctctctcaatacaattatatacacttcatctttcaagttgcctctttgttggctgcgctcgctcaccccagtcacatagctatctatgctcctggggatgaactcccttgccgccgcgatgcatcttgaaatccattgtgtataggcctaaccacatacaggctgaaccacgtaagatgagttgaatcattatgaattgaatcacgatgctaaagatatatgaaatatccatttcattttcaatccgaattgaaatactattttattaatgtgatcaacacgctatttttttgcaattacaatttattagggagacattatgtctgctgcatcgaatctgcccgaactacaggaacaaattcgctcgcgttatgacgagttaagtaagcggttacagcaagtggcaagatatgttctggataataccaatagcgtggcatttgatacggttgcggttattgcaaaagaagccgatgttccaccttctactcttatccgctttgccaatgcctttgacttcaacgggttcaatgagatgaaacagttatttcgcatgaatctggtagaagaaaccgccagttatactgaccgtgcccgcttgttcagagcactggatggtgataaccagcaagtggaagacccactacatattttgcaggaatttgcccattccaatgggcaggcgatgcagcaacttgccgcccgtactccggcagaagacttaaataaggcagtagatttactggcaaatgccggaaatatctacattatcgggctgcgccgctcgttcagtgtcgcatcatacttaacctatgccctgagccatctggaatgtcgccctttgctggtagatggtctgggaggtatgttccgcgaacaaatgaatatgattggggcaaatgatgtagttgtttccatcagctttaccccctatgccgaagaaaccgtgatggtcagtgaaagagctgcacaggctggagcaaaacagattgtgattactgacagccaaatcagcccattagcgagttttaacgatgtttgttttgtggtgaaggaagcaaaagttgatgcattccgctcccagtctgccacgttatgtctggtgcaatcactggctgtcgctttggcttaccggcaggaaaatgccggataatcatcctataccctatggatttcgagttgcatcgcggcggcaagggagttcatccccgggagcatagatagccgtatgtttataaaaacggtgaccggggtgaatgagcgtagccaacaaagaggcaacttgaaagacgacggggatattaatttcaggttgttggctgacgggttgcagcctgaaatatattgcttaatgaagcagaaaataatccctcataaaaaattaattatttccgttagcttataaactttgattattttttcattcaaataatcaccaatcacactctattcattctttgagtcaataatcaatatttattatgggttatttcattcagaggtgttttaacataaacatattttatgaaaatacggcattataaataaaatctataatacgatcaggctgccaaatttttcttaattcaaagaaaacaccgcaataaactgttcaaaaaaataacagccagtttattccggtgctctttctcttattatggagagatttgattaattaatatattaatacaaatatgtgctgactattcttcgttttcatctatatcggtttgggaatggttgccgatagaaataagatcatccaacaattctaacaactgagctaatttttctggggaaaaagcagcttcaattgctttatagccttcatcgacttctccttttgcctgttcatacagctcctgacctgccggagtcagagaaacgtacagcttccgctggtcattcattggttttaagcgaaagataagaccatcacgctccatgcgggtcagaatgcccgtcaagcttgggcgtaagatacaggtaaggttagccaaatcatgaaaatcaatcgagcgactgcttgcgagtacgcgaacaatacgccattgctgttcagtcaaattataactcttcaatatcgggcggaaaaaacccatcgaggtttcccgagcttgaagtaatgctaatgtcagggattcatgcataagtaaaggtgactcttaagttaaccacgggtaattctctataagttgaacgcatgcgctaccgattatagacaacattaaagtcgaaaagactaacatgctcataactatccacaaaggaaaaagaattcaatattaacaaataaataaaattattttgccacaaaaagttaacagaaagttaaacacaataccaaatgaccctattagataatataacggcttgatctttatgtactaaaaataatcattaacagaatgttgttacagagatcacaattaaaattaacaattaacttaacatattgaacatcatcgcttcttgctttattaatatgttaataatttatcttgcgatacatcgctcagcttgcaaggagttgttaatgaaaggcaccgtctttgccgtcgctctcaaccacaacagtcagctcgatttttggcgtaaggcatttcacaaagcgccatataacgcgcttcctcaaactccagtttggtttatcaaaccccgtaatacagtgattacgtccggtgatgttattccccatcccattggggaaacggtgcaaagcggtgcgacgctggcactgtttatcagcacaaataacgtcggcaaagctgcccgcaaagtttctgccaaagatgccgaacaatacatagccggttatgcactggctaacgaagtcagcttaccggagacttcattttatcgccctgccataaaagcaaaatgccgcgatggtttttgcccaattggtcagatgtcggatgtgaagactatagactcactggacatcatcaccgagataaacgggcaggaagttgatcgctggtcaactcatgatctggtgcgttccgcatcagaacttttatccgcattaagcgactttaccaccctgaatgaaggggacgtcattctgctgggaacgcctcaccaacgtgccactctgcatcccaatgatactgtcacaatcagggctgatggttttcccattttacaaaacaccgttgtattggccggaggtcaggcatgaaacacgccagaattcactatcagggtcaggatttacatgtcactgttgatgagcaggagaatgtactgctacctgatggcagccggatcagcgggcttgatgttgtatggcttccgccagccaccggaacactgttcgcattgggtctgaattatgccgatcatgccacagagctggaatttaagccgccggaggagcctctggtatttatcaaggcagctaacagtttcacaggccaccgtcaggtttccgtccgtcctgataatgtggaatatatgcattatgaagcagaattagttgttgtcattggtaagccagcccacaaagtttccagagctaatgccatggattacgttgcaggctataccctctgtaacgactacgccgttcgtgattatgtggagaattattatcgccccaatctgcgagtaaaaagccgtgacacgttaacgcccatcgggccgtggattgttgataagcacgaagttgccgatccgcataatctgatcctgagtacctgggttaatggtgaattacgccagcgtggtaccaccgcagatttgatcttcgatattccctttctgattgcctatctgagcgatttcatgacattacagccaggagacatgatcgccacgggcacgcccaaaggtttatccgatgttgttcccggagatgaagtgattgtggaaatcgaaggtatcggacgtctggtaaatcatattgtcagccagcaagcatatgaggaaagcctgtcatgaccacaattaatcattggatcaacggtaaaaacgttggcagcagtacctattttgaaacagtcaatcccgcaaccggtgaggtattggcagaagtcgcttctggcggaaaagaagaaattgatcaggcggtggctgccgcaaaagacgcttttcctaaatgggcaaataccccaatgaaagaacgcgctcgcctgatgcggcgtttaggagaattaatcgaccagaatgtacctgaaattgcggcaatggaaaccagcgatacgggcttgccaattcatcagacaaaaaatgtccttatcccacgcgcttcccacaatttcgatttctttgcggaaacttgtcagcagatgaacggacgcacttatcccgtcgatgacaagatgctgaattatacccttatccagcctgtaggcgtctgcgcactaatttccccgtggaatgtgccgttcatgactgccacatggaaagttgccccctgtctggctctgggaaacaccgcagtcctgaaaatgtccgagctttcaccactgaccgctaaccgtctgggagaactggctctggaagccggtatccccgcaggagtactgaatgtggtacagggatatggcaatactgcgggtgatgcactggtaaaacatcatgatgtccgtgccgtttcttttaccggcgggacagctaccggtcgcctgattatgcagaactcagggctgaaaaaatactccatggaactgggcggcaaatcgccggtactgatttttgaagatgccgatattgaacgtgcgttagatgctgccctgttcaccattttttccctcaatggcgaacgctgtacagcaggctcccgtattttcattcaggaaagcatttatcctgaatttgtgaagcgttttgcagaacgtgccagccgcctgcgcgtcggtgatccacaggatctgaatactcaggtcggcagcctgatcagccaccagcactgggagaaagtttccggttatatccaactgggtattgaagaaggcgcaacgctgttaaccggagggccggataaaccggcagacctgcctgatcacctgaaaaatggtcacttcctgcgaccaaccgtcctcgccgatgtagataaccggatgcgtgtggcacaggaagaaattttcggcccggtcgcctgtctgctgccattcaagagtgaagaagacggtcttcgtatggctaacgatgtggaatatggtctggcatcttatatctggactcaggatgtgagcaaagtcctgcgtctggcacagggaattgaagccggcatggtcttcgtcaattcccagaacgtacgcgatctgcgccagccatttggtggtgtaaaagcctccggtgtaggacgggaaggcggagaatatagctttgaagtttttgctgaagtgaaaaatgtttgtatttcaatgggaaatcatcccattcctcgctggggactttgatctaagaaaagagatatatccgagggaattcagattacagactgaatgatggcgggtatatctcttccagcgttaaccgcttttcatcatcctgatactgagtgaggatttatgggcaagttagcgttagcagcaaaaattacacatgtaccttccatgtatctgtccgaattgccgggtaaacactatggctgtcggcaaagtgcgattgacgggcataaggaaatcagccgtcgctgccgggaattgggtgtcgataccattatcgtgtttgatacccactggctggtaaatagtgcctaccatattaactgtgcagaacatttctccggcatttataccagtaatgaattaccgcattttatccgcgatatgagttatgagtatgacggaaatcccgaactgggacggatgatcgcagaagaagcgcgccagatgggggttcgtgcaaaatcacatgagattgccagcctgacactggaatatggcacattagtgccaatgcgctatatgaatagtgatcgccattttaaagttatttcaatttcggctttttgtactgttcatgctttcgaagatagccgtaagttgggagaagccattttacgggctattgagaaatatgatggcaccgttgccgtgctggccagcggttcactctcccacagctttatcgatgatcaacgtgccgaagaaggcatgaacagctatacccgcgagtttgatgagcagatggataaccgggttgtcaaactttggaaagaaggtcgcttcagggagttttgcgacatgctgcctgaatatgccctctactgtcggggtgaaggcaatatgcacgataccgtcatgttactcgggctgcttggctgggataaatatgacggcaaggttgagtttctcacggaattatttgccagttcaggaacaggacaggtgaatgctgttttcccattaccacattctgttaaccagacaacttccgtctgacaggagttagctatgccacatttttatgctgaatgtaccgaaaatatccgcaaagaagccaatttaccggaactgtttgcgaaagtgaatcaggcgcttgctgataccggcattttccctcaggccgggatccgcagccgggctatttggctggatacgtggcaaatggcagatggaaaacaggattacgctttcgttcacatgacgctgaaaatcggtgcaggacgcagcgctgaagattgccagaaagtcggggaaatgctgttttcactcatcaaagctcattttgccgatttaatggcacagcgttaccttggtctctcttttacaatggaagaacttgatccaatactgaattataaatccaataatgttcataaactttttaaatcaaaaactaagacattatgagtgccataattcgatgttactgaaattaaaagtaactgaaattcaacgtaattgttaaatgaagagaaaaccatgacaaaccatcttgatgctgtattacacgattccctgttattgcgtcagcagggttacattgacgggaaatggcttgatgcagacaataaagccacctttgctgtgaccaaccctgctactggtgacatcatcgccaatgtcagtgatatgggggcagcagaaactcatcgtgcgattaaagctgccgaaaaagcgcttcctgcatggcgcgacctgacagccaaaaaacgtagccagatactcaggcagtggttcaatctggtcatcgataaccagaaaacactggccgaactgctgagtatcgagcaagggaagtcccatgcagaggcgatgggtgaaattgcttatggtgcaagttttatcgaatggtttgcagaagaaggcaaacgcatttacggtgaaactatcccttcccccatgccgggttgccgcacatccaccatcaagcaacccatcggagtggttgcagccattacgccgtggaatttccctaatgccatgattacccgaaaagtcagcccggcactggccgcaggttgtactgtcgtcctgaagccggccgcagaaaccccgctttccgcactggctctggttgttctggctgagcaagcgggagttccagcgggtgtctttaatattgtcaccggaatggatgccaaagcgattggggaagccctgacttcaagccctatcgtacgcaaactctcttttaccggatcgacacgagtgggtaaattgctcatggcacaaagcgccgatacggtgaaaaaactctctcttgaattaggtggcaatgcaccttttattgtttttgatgatgccgacttagatgccgcagttaaaggtgcaatggcagcgaaattccgtaacagcggtcagacttgtgtctgcgcaaaccggatcctggttcaggaaaacatttacgaggcatttgctgagcgtctggctcaggcagccagagaactgcatgttggaccagccagtgatagctcctcacagcagggccctctgattaatcaggctgcgatagataaagttcaggcgcatgttagtgatgccgtttcccgtggtgcaaggcttctgaccggaggaaaatcccataaactgggtggcctgttctttgagccaaccgtactggctgatattgatgaaacaatgcaagtcgcccatgaagaaacattcggccctctggctgccctgttcaaattccgggatgaagaagaggccattcgcattgccaacagcacagagtacgggctggctgcctacttttattcccgcgatatcggcaggatttaccgtgtagcagaagcgctggaaagcggcatggtcggcattaacgaagggctgatttccaacgaagctgttccgttcgggggcataaaacagtctggtctggggcgtgaggggtcgcgctacggcatagaagattatctggaagtgaaatacctctgtttcggaggattataaaccaaaggagtttgacacatatgctacagcaagaagtcgtatcacaggttgctcgtcgtttatatctggcagagaaagaccgtaaacagatccgtcaaatctcactggattatccggaaataaccattgaggatgcatacgccattcagcgtgaatgggtcagtatgaaaatggcggaaggccgggtattgaaaggacataaaattggcctgacatccagagccatgcagctcagttcacaaattgaagaaccggattatggcgcactgctggatgatatgttttttcagagcggtagccatattccctgcgaacgttttattgttccgcgcattgaggtggaattggcattcgtactggcaaaaccgctgcaaggcccgaactgtacactgtttgatgtttacaatgcgaccgattacgttattccggcactggagctgatcgatgcccgctgtcataacatcgatccggaaacccagcgcccgcgtaaagtcgtggatacgatttctgataatgcagcaaatgggggcgtcattatgggaggacgccccatcaaaccccatgaactggacttaagatgggtcagcgctctgctctatcgcaatggtgtagttgaggaatccggcgtagcagcagcagtgcttgaccatcctgccagtggtgttgcatggcttgctaataaactggcatcacacggtgtccagcttgaagcaggccagatcatactgagtggctctttcacccgaccagttgcagcccgcaaaggggatacatttcatgtggattatggcgcattaggttcagtgagctgttatttttcttaaaaatcagtctggtataaaaatgaattaaaaatttacttaaaaaatcggagtataaggtgcactcatggatcaactgacaaatagattcaaacaggccctgcaatcggggcagccacaaatcggattatggcttgggctttgtagttcatacagtgctgaaattctggcgggaaccggctttgactggctattaattgatggcgaacatgcccccaatgatatctcttccaccctgaatcagttacaggctattgctgcctatccaagccagccgattgttcgtccgccgtggaacgatccggttattatcaagcaactgctggatatcggtgctcagacactgctcatcccgatgattcagaatgctgagcaggcacgtgaagcggtacgggctacccgatatccgccggaaggcattcggggtgtaggcagtgcactggcaagagcttcgcgctggaatcgtatccctaattatctggctcgtgccaatgaagaaatgtgtgtgctgattcaggtggagacccgtgaggctttgaataatttgtcagagatgctgacgattgaaggtgtggacggtgtatttatcggccccgcagatctcagtgctgacatggggcaccacggtaacccccaacaccccgaagttaaggcgacgatcgaacaagctatcaggcaaatcaacacagcaggcaaagctgccgggatattgatgaccaatactgaagcggctgagcactatctggatctcggtgtgaagtttattgccgttggtgttgataccacactgctctccaatgcagccagttcgctggcggcacatttcggtaaaggacaggaaaacaccgtatcgtctgtatccaacgctgcatattaatcaataaaaaggtcacaaccatgagcagctcacctgaagccatacagaaacatgatgcaccagactattcacataaaaacctcacggcacagcagcaaagtgttatcaaaaaattatttcgccgcctgatcctgtttctgtttgtcctgttcatcttttcttttctggatcgtatcaatattggttttgccggtttaacgatgggaaaagatctgggtcttacatcgaccatgttcgggttagctgcaacactgttttatgtgacttatgtggcttttggtattcccagtaatatcatgctgggcattgtaggagccagacgctggattgccacgattatggtgctgtggggaattgcttccaccgcaacaatgtttgcgaccggtcccaccagcctgtatatcctgcgtatgctggtcgggattgcagaagccggttttctgcccggtattctggtctatctgacatattggtttccggcttattaccgtgcccgtgctaatgccctgtttatgattgctatgcctgtcacaatggcatttggttcactggcatccggttatattctggaaatggacggcatctgggatctgcgtggctggcagtggctgttttttctggaaggcttcccctctgttctgctgggtattgtcgtctggttttatctggatgattcaccagagaaagcaaaatggctgacaaatgaagataaaaaatgcctacaggaaatgatagagaacgataaagtttctttagcacacgctgaaccttcacacgcaaaaaccagcctgtggcgtgaaatttttaccccgattgtcctgatgtacaccttcgcttatttctgcctgaccaatacgctgagcgccattaatatctggacgccacaaattatgcagagtttcaatcagggaagcagtcacaccgttattggcctgctaacagctatacctcagttctgtactattttggggatgatctactggagccgtcggtcagaccgcctgcaagaacgaaaaatgcacacagctctgccttttttgtttgcggctgcgggctggatcctgacgtcactgacaggcaacagcatgatacagcttttaggcatcatcatggcatcaaccggctcgtttactgcgatggcagtattctggacgacgcccgatcaatccatcagtctgcgagcacgtgctattgggatcgcggtgatcaatgcgacgggtaatgtgggttcggctgtcagccctttattgatcgggtggctgaaagatcagaccggcaattttaactctggtctctattttgtcgccgggctgctggtgatcggggcactaatggttctgctgatcccaatgaaacacgcaagatcataaaatttgtctaatttacgacgtctcaaaaaatatcctgatgaccaccttgaagggaataaattaatgtcagccagccagataaacagcgaagttattagcaatattgatatcagtaaagattatgatgaaactcagggatcagatgatgtccattatcagacttttggtcgaatggccgcattttttggtcgtgatatgcaggcccatcgccatgatggcttttttcagctgcactatctggtcaccggccggattgaattacaattggacgatctccgttactcggtacaggctccgctgtttatcctgactcccccttccgtaccccatgcattttttacgcaggaaggcaccgatggttatgtactgactgtgcgtcaggagttaattaccccactgcttaactcgctctatccggcacatcgggaactgattgatattccggctttctgcctttccattgccgataaaccggacgaactggaaacattcaatcactactgggcattaattaggcgtgaatcagccaatcaatttgccggccgcgagcagtcactgactttcttggcacaatccctgtttacttttcttttacgcagtattccccttgaagatcatcgtgctggtggagtcagaggagaactgaaactcttccagcgttttaaccaactggtcgatcagcattacagccaacatcttactgtaccagagtatgctcagattctgggaattacagaatcacgcctgaaagatatgtgtcgccggtttgcaaatcgtcctcccaagagattgatctttgaccgtcaattaagggaagcaaaacggttactgttgttcagtgatagcccagtatttgaagtggcataccaattaggattcaaagacccggcttacttcgcccggttttttaatcggctggaagggtgttcaccgagtatctggcgagaaaataacgtcaaataaccataaaataccatcatcataaaatacaatcacattcagatataacttctgagtggaacgcttatatcaaaacacaaagctgatcacatttacgtaacaaatcacccgttttaccgaaaagtacctgcagttcttctgaaagtctcttcagatattctccctcagtcgcttcaattaaatatataagtcaacatttatttaacacttaacctaccattaagataacaaatcagaatggaaggcttcggatgatgaggtagctatgaaaccagaagattttcgtgccgataaaacacgtccgttaaccagtaaagaatatatgcagtcactacaggatgggcgggaaatttatatctatggcaaacgggtcaaggatgtgacgacgcatcccgcttttcgcaatgctgctgcctctatcagccaattatatgacgctctgcatgatccaaagactcatgacattctctgttgggatactgataccggcagcggcggttatactcacaaattctttcgtttcgcaaccagtccagatgacatccgccagcaacgcgatgccattgctgaatggtcacgccagagctatggctggatgggacgtacaccggattataaagcggcattttgttgtgctttaggggcttatcctgagttttatgggcaattcgccgataatgcccgcagttggtataaacgcattcaggaaaatgcgctttattttaaccatgcaatcgtcaaccctccgattgatcgtcataaaccggccgatcaggttaaagatgtttttatccagatagaaaaagaaacggatgcggggattattgtcagcggtgccaaagtcgtggcaaccaattcagccttaactcactataattttatcggtttcggctcagcgcaggtcatgggtgataaccctgattttgccctgatgtttgtcgcaccaatggattctgacggcgtcaaattaatctcccgagcttcttatgagctgacggcaggtgcgaccggatcaccttttgattatccactttccagccggtttgatgaaaatgatgccattctggtgatggataaagtgttaattccgtgggaaaacgtgttaatttatcgtgactttgatcgcgcacgtaattgggccgttcaaagtggcttcgcccgtctgtttcctatgcaggcctgtgtacgtctggccgttaaactggactttatcaccggcttactgcaaaagagcctggaatgtactggtgtggtggattttaggggtgttcaggctgatttgggtgaagtcgtagcgtggcgcaatctgttctggtcgctgacagatgcaatgtgggcagaagcaaaaccgtgggaaggtggagcctacctaccggacactcaggcaatacagacttatcgggtcatggcaccaatggcttatacaaaaattaaaaatatcattgaaagtaatgtaaccagtggattaatttatttaccatccagtgtacgggatatgaataatcctgaaattagtcagtaccttgagaaatatgtccggggttcaaatggcattgatcatgttgaacgcattaaaattctgaaactaatgtgggatgccattggcagtgaatttggcgggcgccatgaattgtatgaaatcaactatgctggtagtcaggatgaaattcgcctgcaatgcctgcgccatgcgtatggttctggcaatatgaaaaaaatgactgagctggtggatcagtgtctctctgattatgatgtaaatggctgggtaagcccccacttacacaacaacaatgatataaatttattagatacgctactgaaataaatgagtagcaggagacttatgatgtctttagaaaatgaacatcgcttgctattcagagatgcgatggcaagcctttccgcggcggtgaatattattacaaccgacggcccggccgggcgttgcggtatgacagcgacggcagtatgctccgtgacagatactccgccaactttgatggtgtgcataaaccgtaacagtgctatgaatcaggtatttcagggtaatggccagctatgtgtcaatatcctgaatcatgagcaggaattgctggcccgccattttgcaggtatgactgaagccagtatggaagaacgcttcagctgggatatctggcacacaggctcattagggcaacccatgctgaaaggaacacttgccagtctggaaggaagcatcgaacaggtacaggaaatcggcacacacaatgtttatctggtcgaaatcaaacagcttcatgttctggaagaaggccacgggctgatttattttaagcgtgcttttcatcaggtgatgaacaaaactctggctaccgcagtttgacgtgaagctaaaagttaaaattaggtataagggcaaggacgtaaagccctttactttctcaactcgcttttatccatcgtctttcaggctgtcacgttgttagctgggccaatgagttcccgactaatttatcattctcatgccaccataattcaactcaaaatttattaggtatataatcaatgggatctcaacgtcatagacattccgacaagagtcattaatatacgggtggaattttgaatatttcaggctttattcttacgatattacctatcgccttatccccctgagcaagttttaccctcggcatggcaaatgctattaacagtggaataaaaggcttgctttccatcataatcgggacagctttaggcatttacacgcatgcattactggttggcctaggtgttaccggtatagtgacaaaatatccccttattatgcatgctataaaaatcataggaacaatttatctaatctatctctcttgtatattaataaagaacggaatttattccggtaaaaaaatgacagaaaaagggacgaaggttgcaacaataaaagacgcctatatcgccaacattctgaatataaaagcgatcctactctatcttactgtagtacctggttttttaacatctgactatattagtgtattaaattttattattcttgcttctatccatattattattacaacaatctggttattatcatttggttatattgttatatttgctgcaagaaaaataaacttcagcatcgtaagccgatttgttaatatagtaggtggagtttgtttattatatttcactcttgctccatatattctatagtgtcactcccattttatatcactgttgtctttaaaatgatctctttgttggctgttcaatcccgcttcatttggttggaaagtccgttcccggtttagctacttccttcgatgatgcaactcaaaattcattgggcataaccggttttctgaccgaatcagcgatgataagccatcccaaaaactgatttattatttaataaatatgataaattatataaaacgtgtagttttatgtagctcgatctcatgcaggaacaaacaaaaaaactaaatatataacataaaattaatatattgatattagtgttcaaaactttctgcgtacaccttttgagtagttactttatcaataagaatggaaaaaaaagagcgaacaaccatcaagttgctttatttacgaacacttaaaccattattatgtgatttctcctattaatttagtgaatattctgtcaaatctggtattaatttttacattagtgtgatcaaccactgagaagatattatgccagtatattaacctcccgcgctttcgatcactctgaataattaaacaaaaacacaacccgtgcaatacattatgttacttttatgttaacaacagtataagctctggatgtattgtccattggtatgacaactaacagaggcaattactatgaataaaaccgctccagtcggtttatgggatcaaccgaagccctttttcatgattttttttgtagaattatgggaaagatttggctactacggcgttcaaggcattctcgctgtttacttcgttaaacagcttggtttttcagaaacacaggcatttattaccttcggtgcatttactgcgctggtttatggtttgatttccatcggtggttatgtaggagaccacttgctgggaacaaaacgaaccatcattctgggtgctattatactggcaataggctactttctgattggcctttccattatggaaccagaactgattttttatgctttgggaactgtcgcggttggtaatggtctgttcaaagctaatcccgcaagcctgctggctaagtgctaccagccacaagatccacgtttagatggcgcttttacactattctatatgtccatcaatcttggttctctggtttctctttctctcgctcccgttattgctgaaaaatatggctatgctgttacctataatatctgtggtatcggcctgattatcgctctgttggtttacatcgcctgccgccgtatggtacatgacatcggctctgagccagaccatgcccctcttaactacataaccctatttttagttttactcggctcagcagtgatggtaggggtctgtgcgtggctattgcacaatatagatattgctaatctcgttcttatggcaatttcagctatcgttgtggtgattttcttctggcaggcattcaaacaggataaagtcggccgcaataagatgtttgtagcatttatcctgatgattcaggctattgtgttctttatgctgtacaaccaaatgccaacttccctcaacttctttgccatcaacaatgttaatacccaaatcttcggttttaatattaaccctatcagctttcaagctctgaacccattctggatcatcgtcgccagcccgattctggctgtgctttacacccgtctgggagcaaaaggcaaagatttttctatgccaacgaagtttaccgtcggtatgttcctgtgttctcttggctttctgacagcagccgcttccggcctgttcgccgatgaacatggcatgacttcaccgtggtttatcgtactggtttacctgttccagagtatcggggaattgatgatcagtgcattagggctggcaatggttgctgcgtttgttcccagctatctgacagggtttattctgggtatgtggttcttatctcaggctgctgcatcagtattgggaagctatatagcaacctttactgcggcaccggaaggtgttaccgaccctctgcaaacgctgccgatatatacgggcgtattcggtaaaataggtattgccactctcattgttgccgtggttatggctttcatggtgccatggctgaaccgtattatgaaagatggcgcaagagcctaactgatttaattcggtttcattaaaaaaattcccgcccgttgatcatgaaaataacgggcgggaactaagaaacgttaatcgactaaagcgactttaatccatgccaatcagtatggaaattacagcacatcaaccgcattcagttctttgaaagcctgttccagacgaacttccattgaaacctgaccagcacgcagccacacacgtggatcatagaatttcttattaggtttatccgcgccctctgggttacccaattgaccttgcagatagccttcattcttcttgtagtagttcagaataccttcccaggtcgcccattgggtatcggtgtcaatattcattttaactacgccgtagctgacagcttcctgaatctcttctgcggtagaaccagaaccaccgtggaaaacaaaatccagactattgtgtggcaggttgaatttctctgaaacatagtcctgagaattacgcagaatttttggcgtcagtttaacgttacccggtttgtatacaccgtgaacgttaccgaaagatgccgcaatggtaaaacgtgggctaatcgcgttcagtttttcatacgcataagctacatcttctggctgagtatacaaggaggagctatccagatgactgttatcgacaccatcttcttcaccaccagtacaacccaattcgatttccagcgtcatgtcaattttcgccatacgcgccagatactggctacaaatctcgatattttcttccagagactcttctgacagatcaatcatgtgggaagagaacagaggtttgcctgtctgagcatagtgtttttcacccgcttctaacagaccatcaatccacggcagtaatttgcgtgcgcagtggtcagtatgcaggatcaccggcacaccataatgctctgccatttgatgcacatgataagcaccagaaatagcgcccagaatcgccgcctgctgaccttcagccttcaggcccttacctgctacaaatgctgcaccgccattggaaaactggatgattaccggagcacgtacttttgccgctgtttctaacacagcattgatagaatcagtaccgacacagttcactgccggtaaggcaaaattatgttcttttgcgatggcaaagactttttgaacatcatcaccagtgatgacacccggttttacgaaatcaaaaattttagacatgttacgtggtcctgtattgacattgagcaggcagtaaatactgcctgctatcacaacgagttacttaacttagttactgttagcacgttcttccagcatcacaacagcgggtagttttttgccttcaacaaactcaaggaaagcaccaccacctgtagagatgtaagagattttgtcagcaatctcaaaaagatcgattgccgctaaagtatcaccgccacctgcaattgagaaagcatcactctctgcaattgcacgggcaataatttcggttcctttgcggaaattcgggaattcaaatacaccaaccgggccattccagagaatggtttttgcaccttgcaggatttcagccagacgttcagcagaagcatcacccaaatcgaggatctgctcttcatctttaatttcactggttgatttcaatgtagcttcagccgtttcagaaaactctgtcgcaacacgaacatcagtaggtacaggaatatcacaacattccagcagttttttcgcttccgggatcagatcatcttcgtacagggagcgaccaacattgtggccttcagcagcaacaaaagtattggcaattccaccaccaactataagctgatcagcaattttggacagtgaatcaagaacagtcagtttagtagaaactttagagccacccacaatcgcgaccattggacgagcagggttatgcaatgctttccccaaagcttccagttcaccggataacaatggacctgcacaggcaattggcgcaaatttagcaacgccgtgagttgaagcctgagcacgatgggctgtaccaaaggcatccatgacataaacatcacacaatgcggcatactgttttgataatgtttcgtcgtcttttttctcacctttgttaaagcgaacgttctccagaacaactaattcgccttccgccacttcaacgccattcagataatttttttccagacggacaggagaagaaagtgctgctttcaggtaatcaacgacaggttgtagtgaaaactcttcgttgtactctccctcagttgggcgtcccaggtgagaagtaaccatgactttggctccctgactcagcgcagcctcgatcgtcggcaaagacgcacgaatacgtgcatctgaggtaactttgccatcttttacaggcacattcagatcagcccggatcagaactcgtttacccgccagatctaaatcagtcatcttaattacagacatggtgaatcctctcattgattctctataaaattactcaatcccctgctgtatgccgtttgttcaatcatatttaatttaataacatctgatctcacaaaatccgacacaatattatcgatacaacagacgatttatttgaaacccgtttatttgaaacctttagaagccattgccagtgttgtgtcaagcatacgattggcaaagccccactcattatcacaccaaacaagtgttttaatcaggtggtttccgctcactcttgtttgtgtgccatccacgatggcgctgtgagggtcgtggttaaaatccgttgagaccaacggcaaatcggtgaaatccactataccacgaaacgaactcactgctgatttttgcagtagctggtttacctcactgacattaacggcagcactgactgtaacactcaaatcaatcgctgtgacgttgatggtaggaacccgtacagaaatagcttcaaaccggttactgaatttggggaagatacgagtgatccccgcggccagtttagtatcgacaggtataatcgactggctggctgcccgggttcgacgcaggtcactgtgataggcatcaatcacgggttgatcattcatggatgcgtggattgttgtcaccgttcctgattcaatattgaacgcatcatccaacactttaataatcggaataatgcaatttgtcgtacaggatgcattagaaactatgcaatcttccgcagacaacagttcatgattcacaccgtataccacagtcgcatccagatcatttcctcccggatgggcaaacagtacttttttagcaccactggcaagatgggcttccccatcgatgcgttcaccatacttaccggtacaatcgagtacgatatcaatacccagttctttccacggtaaatccgaaatatcgggttgatgaaacagccggatactgtcatctcccacatgcaagactgtattattcaaacctatcttgttcaggcgcacattccatgcaaaacgcccatggctggaatcatatttcaataagtgagcgacaccttccgcatcagccagctcattgatggcgataacttcaatttcagcccgacgcccggattcgtagagcgcacgcaggacactgcggcctattctcccaaacccgttaatcgctaccctgattgtcatgttactccctgaatttctctgttgtcacgcaacggcttaggataactgagcaggtgcaaattgtacggatgattcatcataaaattaatcagattgtgacagacaagacattttgcatgcgataactgaaacggttcagctagttataagggaagactacgagaaaaaagggctaatagcaaggatcgttaatagcataataaaagtattttgaacaaaaaaagagcgcatcagctcaaagtttgatgcagatgcgcttaattcccttcatctttcaagttgcctctttataggcttcgcctcgaagcaacccgaaatccattgaaggtatattgttatttcagcagtgctgccgctttcgcaacgacattttcaaccgtaaaaccaaactctttgaacagtgcgtcagccggtgctgattcaccaaagctgttcataccgacgatagcaccgttgataccaacatatttgaaccagtaatcagcaatgcctgcttcaaccacaacacgcgcggaaacagcggcaggaagtacagcttcacgatatgctgcatcctgtttgtcgaatgcatcagtagatggcatggaaacaacgcggattttacggccttctgcactcagttgatcagcggctttcactgccagttcaacttctgagccagtcgcgatcaggattaattcaggctgacctgcgcaatctttcagaacgtaagcacctttctcaatgtttgccagctgctcagcggtacgttcctgctgtgccagattctggcgggagaagatcagagaagtcgggccatccttacgctcaatcgcatatttccatgcaaccgcagattccacctgatcacatggacgccatgtgctcatatttggtgtgacacgcaagctggcaatctgctcaacaggctgatgggtcgggccatcttcacctagaccgatagagtcatgggtatatacaaagatgctacggattttcatcagcgcagccatacgtactgcgttacgggcatactcaacaaacatcaggaatgtcgcaccataaggcacaaaaccaccatgcagggcgataccgttcatgatggcagacataccgaattcacgaacaccgtaatgaatgtagttaccgtcctgaacttcgttcagaggcttggagccagaccacatagtcaggttacttggtgccagatcagcagaaccacccatgaattcaggcagaaccttaccaaatgcttccagagcattttgtgacgctttacggctggcaatagaagctggattctgttgcaggttttcaataaatgccttggattcagcttcccagttttctggcagttcaccgctggtacggcggctgaattctgctgccagttcaggatatgcttcagcataagcggcaaattttgcatcccatgcactttcttttgctttaccggcttctttcgcatcccagccagcataaatatcctgaggaatttcaaaagcagggtgttcccagcccagtgctttgcgggttgcttcgatttcagcatctcccaatggcgcaccgtgacactcttctttaccagctttgtttggcgaaccaaaaccaatgacagttttgcacattaacagagatggtttgcctgtttctttacgtgcttcttcgattgctgctgtaattgcgtcagaatcatggccatctacaccacgaataacatgccagccatatgcttcaaagcgggcagcagtatcatcagtgaaccagccttcaacttcaccatcaatagagatgccgttgtcatcatagaaagcaatcagcttgcccagcttcagcgtacccgccaaagagcaaacttcatgggaaatgccttccatcatacaaccgtcgcccatgaatacataagtatggtgatcgacgatatcgtggcccggacggttaaattgtgctgccagtgtgcgttctgcgattgcgaaaccaactgcattagcaataccctgccccagtgggccggttgttgtttctacacccgctgtatagccatattcagggtgacccggggttttggaatgcagttgacggaaatttttcagatcgtcgatggaaacatcgtaaccagtcaggtgcaacaagctgtaaatcagcatagaaccgtggccattggacaatacaaaacggtcacgatcagcccagtgaggattgacagggttatggttcagatagtcgcgccacagaacttcagcaatgtcagccattcccatcggtgcaccaggatgccctgattttgctttctgcacagcatccatgctcaagaagcggatagcattagcaagggttttacgagtggtcattctttactccaagtcggataaaagcgttagtgaactagaactaattttcgcagcgcagcatacaaaccgcaatcattaatgccatataaacgaaaactatcttaatttccgtttagcatcaattctttgatttatcccgccgttttgacgtattttcaagtgaatacacctatacacttcgtctttcaagttgcctctttgttggctgcactcgttcaccccggtcaccgtttttataaacatacggttatctatgctcccggggatttactcccttgccgccgcgacgcatcttgaaatccattgtgtataaccggaggttagtttgcgcaaattaagagtgatttcatctcgtaatttgcgcaataagaaaccatgtattagacacgataattaatgaacgaatcaagatcggaaaagcccgtttttctgctgatttggagcatgatagcaagccagctatgataatttcctctgagtaaaaatactttgtgatccaaataacaatttgatgcaggtagctgtgtaatttaaagaccgataaatgatataggtttcgtcatcaatccagataagattcacttgtaagatattttgattatcaaacaaacgggagtgaatcacctccaaagcaatttccgcggccagtttttttggaaaacggtaaatacctgtactgatattagggaaggaaaccgtctcaatattgtattgctcaataagatcaaaacagcttacataggcctttttcaataattcaggttcattaccgctccctccgttccagcaagggccaactgtatggagcatatacttcgccggtaaattcccggctccggtgataaccgcttcgccaatatcacaaccaccctgctttgccctaatttgcatgcactcttccagaatggcctttccaccagcccgatgaatgacaccatcaacgcctccaccacctagcaaagagctattcgccgcgttgacaatagcttcaacagcaattttggtaatatcaccatgtattattttaattctgttgttcatttcgtgattccttcttatattttcttatgtgcagaatagagttacttatatagtgtttaatcgttactcattctggacttaataataaatgacaaaaagcacccctacgttgaattcaatatcagttccgaacatcacgctattaaactccatcaatactaaatgtcatgaactcattaaattactgcataactgtgtcgaaaatggtgcatctatcggatttatttcaccattgggagtgaatgaggcagcgcaatactggcaagatgtcgaaacagatgttgtatctggtcatcgcttgctattagtggcaatggaaggtgacaaaatcgcgggctcggtacaacttagtctttgcagaaaaaagaatgggaaacatcgagctgacgtagaaaaactcatggtacacacaacctatcgccggcgtggaattggcaatatgttaatggaagaactggaacgtgtggcaaagcggcatcaacgtagtttattgatactggatacccgcacaaatgatcccgcttctgtcctttatcgaaaatgtggctttgttgaagtcggacaaattctgaattatgtcattaatgataaaggtgaattctcaggaacaacctatttctataaaatgatttgagattttttggctattagaaaaatcataaccacccgtataacgggtggtttgctcttgccctataagggcttgttaccgactgcgcctaaatgacgctgctttctcttcgttcaagctaagtgtctttgctgctttggcctaccccttgaaggggtctacatgctctttactactcaatttatccgagattaaatccgacttttcttgctctctgatatacttttgaattgtcgcttcatttagccctaccgtactgacatagaacccttccgcccaaaactttctgttgccaaatttatattttaaattggcgtgtctatcaaagatcatcaacgaacttttacccttcaaatatcccataaagcttgaaacgcttagctttggtggaatactcaccaacatatgaacatgatctggcatgagatgaccttcgattatttccacacctttatacttacaaaggtctctgaggatctctcccacacttgaacgaatattattaaaaatcactttccgtctatatttcggcgaaaagacgatatggtatttacacagccactttgtatgcgctgagctttgtgctttaatgcccataaacacctttccttatttgagttacgaatattagcttgaacatctatatcgtaacggaaaggtgtttttcttggtataacctttgaactccacccgcaaagcgggtggttttatgtttaagacgctaacgcgacttaaactggctaaagccataaataaatattcagccaatgggtattatccattggctgaattatattccccaaatgaacaccctcctgttaatttgatttaaatctcctttttctcatttatattttattttttgtttttttctgcaagaaagatttttaaatagtgattatttttataataaataaaaatatataaattaataataacatgttttattaataaccaatgtcactttctgttgaatctatctttataaaaaatagcctatacctccctcattaattatttgaaatttgagttaattccaaaccacccaacaaaacataaccaaaatgggttatggtaaataattaagttaaatatataactataaataatcaaatagaacaaacgacaaccagtaatcagagcaaaataaaataatttatatgctttaatgattaattagtaaaccagaataactatatatacctaagggtttttcaggaataaccagaaagacgaaaggtatgcgcaatccaactcaaccatagccatttgggtgctacgatgttcaaaaggacggcagtttttatcttattatctgtatcccttcaggccagcgcactgccagaagcacctgatgctgtactacctgtagacgaagccagaagaaccttacaggatagttcacgggaaatagaccagctcattgaacagcgtcgctaccggggatttatcgaacgctccgataccctttcaccacaaactgtctctccagtgctgacggaaacaccggcatgtctggatatcagcggagtttatcttcagggtattaccctgctttctctgactgaactggatacactcagcgcactgcccgaacggtgtattaccagcaatgctattaatagactgacagcagaaatcactaatctgtatatcgccaaaggctacattactgcccgggtgcaattcattccccctaattataatagggagttagggctcagtgtcattgaaggtttcgtcgaagctatcgaaggtggtgaccgctgggttaatagccggatgttattccccgggcttattaatcagccactaaacctgaatcagttggatcaggggctggatcagtcaaatcgtctgcaatcgaataaaacaacactcgatattctgcccggcacagtaaatggcggctctatcgtcaggctgcataaccggcattccacaccgtggcatctctctgcaataacggataactacgggcaaaaaagtaccggtaaatggatcagcagactgaatgccagctttgatagtccgctcgggctgtcagatttcgtcagcgtcaatggggtcagcaccattgataaaccccgcacccaatataatcgggcggcgacattgttctattcgctgccttatggtgctgtcactttcagcggttttaccagctattcccaatataaaaatcagctaaagttgcaacacaactcattaaaactgagcggaaactctcagcaatccggtatgcgcatagactggctctttcaccgcaatcaatcacagatttcgacgctcaacactcaattcgtttacaaggattccaacacctatttcgatgaatccaaatccaacgtcagtagtcagaaactagcggtgctctcactgggaataagccacttacaaattattccaaatggacttatcacttttgacaccggcattgagcagggaacaccgtggctcagtgcccagacagccactcataacctgaatacgcgattcaccaaaggaaagctgtctgtcaatttacaccagaatttcaaactgtttactgtgccataccgccttaacagccagttttatacccaatacagcccaaatggactccccggcgttgaatggctcaatattaccgatcgcaatgcggtacgagggttcagcaaaaataccctctccgctgataacggctggtatctgagaaacaccttatcttacgcaatacctttgcctgaaagttcactgactttgcgtgtcggagccgatgtcggccaggttaaaagccataaccggcaggaagcatcgtggagaagcaacgcaggattcagtgtcggagcggccttacgccatcaacactttctggcggatattgaggtgagccgtggcaaaacattatctcatcaggacagaaataaaagtgagcctatacagctattaacccgcttttcttatttattttagccacctgaataataactatttttaaccgcagccaatcagggagaatttctccccgggatgctgcacattcacatgacagaaagtaaacagaggtaatagtatgaaaagaaaaatattccgattatctcctacgggaaaacttgcggcatcaatggcgataattctggctacctgttcaaccagctttgccagtggcatcactcccggtggtgatgcagctcatcgaccagacgtcagcattgctgaaacaggcgccacggtaatcaatatcgtgtctccttccgaatcaggactatcacataaccagtatcaggattttaacgtcaaccaaatgggagcggtgttaaataactcactggttaatggacagtcggaattagccggacaattatcagctaacagtaatttgaacggacaggccgccagcgtcattctgaatgaagtgatcagccgtaacccttcactcttactcggcaaacaggaagttttcggcatggctgccgactatatactagcaaaccccaacggtattacctgtaacggctgtggctttatcaacaccaatcaggcttcgctggtggtcggcaatccgctggttgagaatggcattctgcaaggattcaataacttcaataataaaaatgccctgaatatcagaaattcgggactgacccataatgatgtcctgaaccttatcgcgccccgaatcgatatcagaggaaaagtgatcacgcccaaagcgctcaatattaccaccggaaataaccagattgccgcagatggcagaatattggattcaaaacagccggaggctggagcgctcgacagctattacttcggtagtatgcaggctgggcgtatccgtctggtgaataccgcagaaggcagtggcgtcaatctacggagcaagatgcaagccggtgacgatatttatattgcctcccacggtgatgtggaattagaagcggcaaacttgcagggcggcgatatcacattacagggcaaaaacttgcgggcgcaggggcacctcaaccgatcatcattacaaaaaacaggggaaggtaatcaccaaagtacttttagcggtgctcatacctctcaggaacagattaatgagtccgttgcccgtactcaattgaccggtaaaaacatcacactgattgcccgcaaagataatcagataatggcaaccgatattgatggagataatatcaaactgactggcgctaatctgaaactggacggtcagcagctacaccaacgagatcaaaacaccgataacaactggcagttatcctggcagaaggatgtcaccaatgagagtgaaaagtatcagtatgaaggcaatactctcaatgcacggaacaatgttcacctgacagccagtgaaggcaatgcagaaatattgggcagtaaagtgaccgctggcaaccagatttcagtttctgctaagcaggatgtaaaactggctggtttagtcgagtcagaaagaaaactcgaaaagggttacagaaagaacgatggaatgggattacaaaccggcgattgggcaactatcgacacaacccaaagactcgtcagcagtgaactgaatgcaggcggcgatttaggcatcaatgcaggtgccaatgctgaaattaccggttctaaagtacattcaggcaaaaacatgattgtttcggcgggacaacagacaaaagtgactgtgcaatccctcgttgatgagcatgccactgagaaaaataagcgtaaatggggtggccttgccggtggcagcaacaaagacaaccacgataaagtagaaacacaccatgcctctgatctcagcgcagacgggcatttactgctgagtgcaatagatggcgtcaccattactggcagcaaggtaaaagcacgacagggagcctatgttgaagctaatgacggtgacttaaccatcgataactccgtcagtaatacctataaaaaagtggatgaaagaaaaggcaccatctttaacatcaccaaaaattccaatcaggaacagacaaaccagcaaaccagcaccggtagccagttaatctctgatgctgacctgaaattaatcagtgataaagatatcaatgttatcggcagtctggcgaaaagtgctggtgagctgaatatcaatacatccggcaatatcaacgtgcttgcctatggtgaaaaaactgagcaccaacaggagaaaaacaaccttgactggcagtattacgctcatgacacaaaagataagcaataccgtgccggtgcaggttttgagcatactcttgataaccagaaaactcataccaccacacagcagcaggctgagttaaatggccgcacaattactattaattcaggtaaaaatgtcactattgatagtggcagggtggtcacaacacagggtgatgccagaattgcaggtaacaacattgctctgacagccgcagaaaacagctcttccagcagtaattcgcaggctaaagtgcgtggaggagtcttcgccaccggtggtatggataaattcggcggcggtgctgaaggtggttattctgataatggtcattcccggaaccgcactactgcggtggtttcagaagcacgaattaatggcaaccttgaactgaacgctcagggagaactgaaacaacaaggcactcaatatcaggtacagggaacttatcaggcgaatgccggcagcatccgaaatgtagcaacagccaacaccgaatcagactccacaagacaaatgcaggttggtggcgaaatcagcggttcagccgattacagcgccacaactcgccctatggaaaaaacggcgaaagcagcaacaaacggaaagctggatacttctatcgcaaaaacaggattaccgaatatcgggcttgaactggagatgaacggaaaaagtcattactccagcaaccatcaatcaaacgctgtcgtcaccaccgttaaagcaggcgacatcagaatcaacaccaatggcgatctttacgatcaaggaacgaaatatcaggccaataaaggtaatgcatccctgactgccggtagccataccagtgaagccgcctacaaccagcaaagcagcagttcatcaaatacggttggcgatgcccgtatgcgcgtttacaccagcaccggcagcgatctttctgtcaacggtaaagggagtggcagttatcaggcagaatccacccataacagaaacgcggttggcagtgaaatcaacgcccagaatggcattaacgttcaggtcaccagaaacgcacattatcagggcacttccatgaacggtggtaatggtcagacaaacgttaatgccggcggaaatattcagtttgaacaggccaccaaccgtgaggaaaaaaacagttatggttataacggagaactttctctgactgtaggaactaacccggatggcaaaaacttcagtggcagtgccggtgccggctataacaccagccagcagaatagaaatatcgctcaaaccggcacaattacaggcggacagaatgtaaacctgaatgctgcaaataacctgactctgcaaggcacgaacgtttctggcaagcaggtcgatctgacggcacaacgtggcaggattgaactggcctcagctcatgatgcagtcaacaacaatggctggaactttggcgctaaaggcaaaggcagtatggctaacacagtgcgtaataatgaaggtggcgatggtaacgccggcaatggagaggctggtaaccgcatcatcgataacaaatacaatataggcggtgaagtaaaattcggtgttgatcgactgaataaggtgacttaccacaacaatcaggtttctggtggtaacgtcacactgaccagtgctcggaatacctcactcaaaggcagcaacatcaacgcagatcaggtcacgggtaatattggtggcaacctcaacgttgaaagcctgaaaaataaaaccgacagcctgaatatcggattagatagcagattagggtatagcagaacagtcaaaggtgatagcagccataaagcgacattaccgattgcggacaataactctccggaaatcgctgcaactaacgatgataagacaaacacggaagcgccaagcctgacagatcgtctgactgctgcttttaaaaattacaacggaaaactgaaaagcaattacaacacacttgatcaggaaaccgttggtgagcaatcaaccctgaacggtgctaacggggttaatctgaatgtcgcgggcagaacctacctgaccggtagccggattgacagtactcaaggaacagtctccatgaatacgcagcaaatcgctcaccaatctataacgggtcacgacagaggcaaaaacatgggagttaacttacctgactcaattgcagatttcaccgcagcagctcagaaagatgttttttcgggtaaaattcctttcgtgaaaaacgaaagccacaatacagaaaccccgatcacacatagtggaatcaaaggacatcaattggattaattgatcacactctgagttatattcacgaatcttaatacaaacggcatcataaacatgatgccgttaatcataaaaacacaaaaaatgtatataaacaaataaatataatcattaacttatttatttaattttagttttcccaacgattgtatatgtgaaaatgaaattgaagacactacgtttgcgtagtaatttctcagcaaacaaaaaatatacaataacgggatacatgatgaaagttagcctgagaaaaataataggaaactggacactgggatatgcactggataaacacacggtaggtagtacctttttgggttacaacggagctgggcatccgattttcgataccgtcagaaccgaaattggctaggcactttatcagctaaaatatcataataattttcaatatattaaccaactttctcattgtattgtggaggaaatagttaaaccttactttcctaaaatcggttttgtcattcctatgccagcgtcaaatatcagaaaagttcagcctgtcagcgaactagcaaaacaagtagctagattgataaatagcccattcttcgatggtatcctgcttaaagctaccggaggaacttctctcaaaaatttatcaaataaagaggaaaaggaggaagctattggtaattcattttcaattgaagataccatcaaaaatgaaggaaaatggaacgtactgctagtagatgatctgttccataccggtgctacaatggaagcagcctgcaatgcactttcgagctatagtaaggttaagagcatttatgtcgcaacattgacttggaggtaaaatgacaaccgtttttatcgctggatctatcacaatcaaaaacctcgacccactcgtcacagagcgcatacggaaaattgtgaactcccgctacaacgttgttgtgggcgatgccaacggcgcagattcctctattcagaaactgctactagagatgggaagccatcaaacaaccgtattcagcagcagcaatacgccacggaataatctgggctcctggcctgttcgtgtcatagattcagcatatgcaaaaggaacgcgtgcattctttacggcgaaagatctgaaaatggcggaagaggccgattatggcctgatggtatgggatgcgaagagcacaggcactctgagcaacgtgattgaactactgttgcagaataaattcagcgcagtattcatcaataaggcaaagaagtttgaggtcattaaaaaaacgaaagatcttgaaacactgatcgcatatatgtctccgatagcattggaaaaagctgagcaaaagataaaactccgctataaattggcatcactaaataatagccagtaccaaatgccattgtgaatgaaaaggatattatggcatatatcaaatacgaccagaattaagaggatgtaatgcccactgacttaaaaaaaaggaaatatatcaataaggaaactatcagtacaccattacagaaggggctgaatggtgggaaaaaagccctttcagtgacgatccgccttggcaactatatccgtcatatcccattcattgcccacttaatccgggcagcacagcgtttcaacgacagaatgggtagccagtttggtgctgctattacttatttttcctttctgtcactgattccgatactgatgctctcttttgccatcgcgggttttgtgctggcttccaaccccgacttgctgacaagactcatcaatggaattgctaatagtatcaatgatccctcactggcgaatacgctgaaaaacagcgtggataccgccataaggcaaagaacaaccgttggattaacaggtctggcaattgcgctctattccggcgtgaactgggtcggcaatctgcgtgaagcaatccgtgcccagtcccgcgacgtctgggaacgcactcatgaagataaagagaaaatctactttcaatatatccgtgacgttttctccctgtttggcctgttatttgcgttagtcataacactttccctgaattccattgccggatctgcgcaggcaagcatagttcatgcccttggcttagagaatatagagtggcttcgcccagcatggacatccattggcatgttcatttccatttcagccaattatctgttattcctgtggatattgtggatcctgccacgccatcagcccgaacggaaagccctgtttcagggaaccttaatggctgctatcgggtttgagatcattaaatcgattatgacaatgatgctaccacgccttgccagctcaccttctggcgccgcttttggttctgttattggcctgatggcatttttctatttttttgcccgactgaccctattctgtgctgcgtggatagccaccgcagagaaaaaagagtgacaaaacgagactgcttcaccagaagcactttataaaaaactacaaggagtcatatatgccattcgtaaacatcaaaatcacccgcgaaggggcaactgctgaacagaaaaaacaactgattgaaggtgcaacccagctgctggtggatgtacttggcaaaaacccggccaccacttttgtcatcattgatgaagtagaaacggataactggggagttggtggaaaaagcgtaacagaagtgcgagccgccgcgaagaaataacgtatttattgaaaagaaaaataaacgattagggcgaatatatcgccctttttatttatggctttagccagtttaagtcgcgttagcgtcttaaacataaaaccacccgctttgcgggtggagttcaaaggttataccaagaaaaacacctttccgttacgatatagatgttcaagctaatattcgtaactcaaataaggaaaggtgtttatgggcattaaagcacaaagctcagcgcatacaaagtggctgtgtaaataccatatcgtcttttcgccgaaatatagacggaaagtgatttttaataatattcgttcaagtgtgggaaagatcctcaaagacctttgtaagtataaaggtgtggaaataatcgaaagtcatctcatgccagatcatgttcatatgttggtgagtattccacaaaagctaagggttccaaccttaatggaatttttgaagggtaaaagttcgttgatgatctttgatagacacgccaatttaaaatataaatttggcaacagaaagttttgggcggaagggttctatgtcagtacggtagggctaaatgaagcgacaattcaaaagtatatcagagagcaagaaaagtcggatttaatctcggataaattgagtagtaaagagcatgtagaccccttcaaggggtaggccaaagcagcaaagacacttagcttgaacgaagagaaagcagcgtcatttaggcgcagtcggtaacaagcccttatagggcaagagcaaaccacccgttatacgggtggttatgattatggctttagccagtttaagtcgcgttagcgtcttaaacataaaaccacccgctttgcgggtggagttcaaaggttataccaagaaaaacacctttccgttacgatatagatgtacaagctaatatccgtaacttaaataaggaaaggtgtttatgggaattaaagcacaaagctcagcgcatacaaagtggctgtgtaaataccatatcgtcttttcgccgaaatatagacgaaaagtcatcttcaataaaatccgttcaagtataggtgagattctacgaagcctttgtaagtacaaaggagtcgaaataatcgaaggacatttaatgccagatcatgttcatatgcttgtgagtatccccccgaaaataagtgtttccagttttatggggtacttaaaaggtaaaagctcgttgatgatatttgataaacatgccaatttaaaatacaaatttggcaaccggaagttttggtcggaagggtactacgtcagcacagtggggctgaatgaagccacaatccgtaaatatatcagagagcaagaaaagtcagatttacttcaggataaattaagtacacgagagtataacgaccccttcaaggggtaagccaaagaagcaaagacacttagcttgaacgaagagaaagccgcgtcatttaggcgcagtcggtaacatgcccttatagggccagagcaaaccacccgctatgcgggtggttctgattattaaaaactttttgtttcgtgtcctgtgtctcatataacactaaaaaaaataataagatttcaattttttgataacaatcgcggttaattagtcataattatttattatttccggctgagacagagattaaatctaactgatcaggagcaataaatgagcgttacaggcgttactgcgcaggagcttgcggtttatggtattcgtgatatcagcgaagttatctataacccaggctatgaattgttattttctgaagaaactaaatcctctttacagggatatgagaaaggaacattgaccaaccttggcgctgtcgcagtagatactgggatttttacagggcgttctcctaaagataaatacattgtacgtgatgaagtgactcgcgatacagtgtggtgggcagatcagggaaaaggtaagaacgataataaacctctcagtcaggaaacctggtctcatcttaaggggttagttactcagcagctttcaggcaaacgtttgtttgtggtcgatgcgttctgtggggcgaatgcggatactcgcctgaaagtgcgtttcatcacagaagtggcgtggcaggctcattttgtcaaaaacatgtttattcgcccttcggatgaagagctgatcgatttcacgccggacttcattgtgatgaacggtgctaagtgcacgaatccacaatggaaagagcagggcctgaactctgaaaactttgttgcttttaacctgacagaaagaatgcaattgatcggtggtacttggtatggcggtgagatgaaaaagggcatgttctcaatgatgaactacctgctgccactgaaaggtattgcttccatgcattgctccgctaacgtgggtgagcagggtgatgttgctgttttctttggtctttccggtacaggtaaaaccacgctttccactgatccgaaacgtaaactgatcggtgatgatgaacatggctgggatgacgacggcgtatttaactttgaaggtggttgttatgcaaaaaccatcaacctgtcgaaagaagctgaaccagatatttatcacgctattcgccgtgatgccctgctggaaaatgttaccgtgctggcagatggttcggttgatttcaacgatggttctaaaacagaaaatacccgcgtttcctatcctatctaccatattgaaaatatcgttaagccggtatcaaaagccggacacgcaactaaagttattttcctgacggctgatgctttcggtgtattacctcctgtttcccgcctgacgccagaacagactcagtatcacttcctgtctggttttaccgctaaacttgccggaacagagcgtggtgtcactgaaccaacgccgacattctccgcgtgttttggtgcggcattcctgtcgttacatccgacacagtatgctgaagtgctggttaagcgtatgcaggcatccggtgcaaaagcctatttggttaacactggctggaacggcacaggcaaacgaatctctatcaaagatacccgcgcgattattgatgcaatcctaagtggcgatattgaagatgcagataccgtcgaattgccgatttttgacctgactgtcccaacgacattgccgggcgttgatagcggtattcttgatccacgcaatacttatgcagataaatcggagtgggatgttaaagccaaagatctggctgagcgtttcattaataacttcgacaaatataccgataccgccgctggcgctgcattggtaaaagctgggccgaagttgtaagaatttcagactacctgcattaaataaagtgggagaacgatcccacttcaagttattaacaaaccccgttgaaaaactagcggggtttatcgctatgacgtttcttactttttggaagagtgatcaattaggcggcagatcaaacaataagatttcactctgttgatttgcggttatctgaatgtcggattcatccctgatagcgataccgtcgctaatccctgcttttacaccgttgacatcgatttcgccgcgaaccacttgaagccagatttttcgcggtttttctatatgatattcgtacctttcactacgtttcaatgtatggcgccataacgtcatatcttgaaatatctttaatgaaccatcacgggcatcaggtgaaagtatgagctggtggtttttttccggctcaaagcggcgttgttcatagcggggcgtcagattattttctgctggcataatccagatttggtataagtgaagagggttatcatgatgtggattatattctgagtggcgaataccagtacccgcgctcattatctgaaactcgcctgctgatatttgtcccagatttcccatattatcctgatgttctactgtaccggacagaacataagtcagaatttccatatcacgatgaggatgcatgccaaatccttgaccaccatcaatcaggtcctcattgatgactcttagggtagagaagcccatgaagttggcatcataataatgtgcaaatgaaaaagtgtgccagctatccagccagccatgattagcgtggcctcgttctgaagccttacgtaggtaaatcatcttcaaaatccctcaacattttttcatagactagttgatggaattaaatatgaaatattagaaatttaatattaatgatcaaaaattttgaataataaaaagaggatattaagcataaaaaaaagccaacatcaagatgctggctataaagtaaacactggaagcaatgtgagcaatgtcgtactttcacatgaccctgaaggtggtgcactgaaagtgttaataatgataatcgttctcaatatcatttgtaaagtgtttttctgaccaaaattagatcctgatcggctttctgatcagaatcttgacgaatctagttaagaaaatggcagaaataagtgaacatagagtagctcgatggcaagcctgtaaattaaattgtgtttaggtcattcaaatgacaaaaggaagataaatgctgcctaaactgcccccatctattgactgttttatcggcaattctgctttaatccctgataaaattggcgaatctccttgccgtgtttacagcttcatacgtgggaatgatcggttttttctcaaatactctccttctgtttatgccagtacgacttacagtgtcatgcgggaagcctcagtattggattggctggctgatcgcctgaatgtcgcggaagttgtctgtgtggcagaaaattcaggaggtgaatttatgatctcccgcgctgttcccggtaagccattatacgaacggctcaatgctcggcagccggtactggaactgtttcacgaagctgttcgccagatgcagtctgtgcctattgttgattgtccgtttgattctggcgcgggatttcgtctcaatgagcttgagtattttctgaatcacggtttgtgtgctgagcaatatgatcttaatcagtggcagggaataacgactccgcagagtttgctgaagcatctgccactttacccagtgaggagcgagtgttttctcacggtgatctctgtgacagcaatatcttcgttgatgaacatgacgatttgtattttattgatcttgggcggggaggtgtggctgatcgctggctggatatcgcatttgtgcaccgtaacttgcgtgaagagatttcagtggatatagccgcggagtttcttaatacgcttggcgactttgataacgcagccaagcgtgaattcttcgagcagttagacgagctgttttaacccggaatcagttcacttacgcagggttgtcgtgagtgccctgccgtttctcccaattccatttggtagagatgctgtatgctgatatcggaaaactgatagagcgttggttggtaaccccgtagccagagcaaaaaccacccttcttggggatcagggcatagtccggcaaaacggaatccgcctctttgcaattgtgggtagaactgtagtgcttcttcactagccggaagtttcagatagattaactgattagccgggtaatctatgatctcagataaaaagtctgtatcagcttcatacaatgtgatttccagacgtcgcccttttatctgggaagtcgcgtatgcaccggaagtaaaagggctacagcccctttgttgttgatcaggtgatgactcaccaatatattggcttatctggttggcccagttctgccaggattgcggccaattcagtttaggcaatggaaacgatttcagtggcaaaataccctgaacaatgctttcaggttccggtaacccgaagggagaatcgacataatccagcatcagcgcggttgaataaaagcccagattctgggctaaatactgacttttcatatgcgaacaaacttgttttatcgtcagcaaacgatattgctgttctttcgcatagtggcataaataattccccaaagaggtagcaatacctttgccctgaaattctgggtacaccacaaccagcgccagctctgcctgagcctgctgaaccgcatccttgacaagtgatgcatggccaatcagccgcccctgagaaaaagccagagcggaataccattttcctgtagtctgataatcgtctatcaatttgggtagatagatatcaggatagacatacgaatcaccgtaaatatcacggaataatttgctgatatatttactgtcacccgattggtagctgcggatctgaatagcagaatccaaaatagctgaaggaaaagtcgtcataaattttatccttcaattataactacgcagatccacaacccgctgcaatttgcctgaacgcgggtgggtatacattgcatcgatattggtttgaacaatctccagcatattttgccggaaatgtgctgtgttcagacccggaaatgccagcagcatattatggcgtattttctcgatattaatgggttcagggctggccaccaataatttgattttgtcttccgactcttcctgagatagcaccaattgccaggcgagtagttcggtttgcggtgacaactgagttgctaagtcgtcagggaataaagaaagatcacccactctgatccggtagccctgattggcacgcccctgaagtgcaaacttacgatgggtctgctcaggttcacaccaataggccagatcgccggtaggatagcggagtaccggcattagttgccgttgtaggttggtaaccaccagcattccccggtgccccggttccgtgatgggctcatgagtaacctcatcaataatttcaataatagtctcttcactgaaaacccgatgttctcccggcccacattcgggatcagcaaagccgattaacccaccgtcaacactggcacagcctacagaaccaaagcgagcctgcgggaaaacctgccgcattgctgcgatttgcccttcaaacaggctctcgccaccaaacagaatggtttctaccattggcagagtctgcccgttttctttcagatattgagcaaagcggatgagctggacgggaacgcctgccagcacattgatattgtgatgctgaatgttgtgagccagcaaattgtcatcgactttacaagtgaagggaaactccacaataggtaatgatgagttagacaatgcaccatgaataaacagtaaactggtataaagatcgcccgcaaaaaacaaattggcgacgcgatctcccggctggagttgacgggcaacagctttgccaaaagactggataaatgctttccactcttgctggctgaaaaccgacagccgaccatcactggttgagccacccgttttaaacacatgccccccttccagtggggcggtaagcaccggccacgtttgtaaattttctgagccgacccagtaattgccgggttcgactaagggtaaatcttgtagcgtccagttatcaggaacggacttgtagagttcccgataataaacagaatgcttacgtacatgattgaacagatcaattaacgctatgcttttcatgatattcgcttcacttaatcaggatttacgtaagtcaatgaacaatggtgcttttccgctatgagcatttcggcgaaattctgatactgggcaaaatgtaacatccagattcaacattccaccgtcgataacttccttaatttttgaattctgctccagatccaataaatattggcggactgtggcaacatcaggattttcaatcaataactggataccaccgataccttcttcgttgtgatcgattatccattgcacaggcgtttccagctgttctgacaattcagccagattgataaaaatactgccgacacgcagtaaagcaccattacgtccaacaagtcggaaacgaggcgtaattaggccacaggaacaaggttcagtgatccagtgcccgagatcgcctaaatcatagcgctggacggattgcgcctcgcggtggcgagaggtaaatatcagacgaccggtttccccttctgctacgggtttatcatcatgaatgttaaggatctccagccattgggtatcagccattaaatggaaaacaccatcttcgctggcggtacatccgtggcctaatgggcctgcatctactgaaccgtaggctgctgaacgtatcagggtgatgccgaattcattcagaaaattccgctgaccaacattcaggtgctcgcctcccaaaaacagtttacgaactccgccatattggcgcagcttgtcggcttcactcaggaataatcggtgtatcgtgcttggcatcccgaccagtgtattaatgcgttcctgtatgattaagtccgctatttcgctgaaatcactgtcagtggggccgcccattggatattgagcgacatccagcttatccagaatcgtgaagaaactcatcatgccgccatatagcttcccgccgtacagcaggttcatgacccggtctgtagcaggctcaagcccgcaagcgaatatcccgtcagcggcggactgcatttgtgtgtgataatcggaatagctgtaagccgccagttttggtgctccgctgctgcctccgctacggaagtacaaacggcctttttcgtttggagtcagtgcctgaaaatctgccttattcatgactggcaggttatccagcccgtatggacgggagggaggagtattcagatgcgcacagccatccagcgtacccgcaggcaggctgacagaaacccgcttggcaaggcgtgacaatgcataaacgccatcgtgcggctcaccgctatagccattatgcatctgaccggcagaggctatgcggctgactcccgcagcgaacagagcatggctcatttcagcgatatcttcctgacgggtaatcaaagcgcagctttggaggtgattacgccacgggcgcagaatagaacataatttctggcggggtgccgggcgtaactgtaatgaacggaacaggggagaagccgccagctcctgctcatgtcgccatactacccgccatccatcgttttgccagagtttgccatttaccggagcgaaggcgaaatcgagatgctgaaatgccatctgagtggtaatttcagcggattcctgtacatctgcctgcaatgcaggatgcaatccggaacgacgctcaagggcggctgccatacgttgcccgatattctgcaaaacggccggatcatcactatcaaccagcaggcattgcggactggaacaggcttgctggtcataacaacaaatatcatctgccagcgcatccagttgagcatcattgactacatcagggttcagccaggcaaaactgatacggtgtccccagtctatccagcggcagccggctggcagctggctacgaatggaagataatgcagagtctccgccccaggcagaaacagcatcggcctgacttaacaacgttcccagctgtgtggcaggtaacaacagaacagcgacgcgatcagctaaatcaccggaaatgtcatgagcaaggaacgcatgcagaagttgttcactaaagcctttatcactgctgctcggacgtagccagttgatattgccgaccagtaaactttccagcacagccataaaaggaagcagcgcagcattggaaggtgtgatatgaacgaccaaccccagtggcttccatgactcatagcggttttggttataatcaaaccgacgcagggaaaatgcgtcttttcccagttcccgctccagcttagcctgtaacgcttcacgctgacagaaagcaattaatgcttcacgtgttttggcatcaaaaagagggtgatcatccatatcggcaagatgatcggcaaagcgttgtgcacactcaagcacttgttccgcagtatgaggccgtgccagaagctctggtaaacgtgcacttaattttgcaattttttgttttgccagctgttctacagaaagctgctcattaatattttctatggaagacatctcaggcctcttttatcaattctgaagcggcaatagcacaactacgacttttgctggtaccagcacgaccaagcaactcaaaccaatcagtatccagctcacagccacactgacttccgggatgcagtaccgccagatcactcataacgatgctgtgcgccgggctggaagtgataaaaggagagacgaagtgcagaaaacccggttcgccataaggctgccgtgacatattagcggtatgacggatatagactcgtgagtagaccggaacatggaaacgatggtgagaacactccatataaggcactggatgttcaacggaaccgtagccatcgcgacagcggacattcgggatacctaattgtttttccaatcgttggtacagttcttgtttagagattgctttatcggaatgcgttttccagccaccacccagagacagcagtgaatccggatgtaatttcagtgggggtagccccatttgctccattctttgcagggtaaaccacaggaaagccggaaagccgaaaatacgcactggcagcccttcttcagcaaattcctgtaaggccttaattgtaccgaaaggatcgaactcattacttttaccgttatgacgcagggcatagtaggagcggtttaccggtgcatacttacacagaaactgatcggtataagcggttcccaaagaaatggctccggcaggttcataactgagtagaagataattgcagggctggtcaggtgtattccagccataataattaaaaatacgatccaccatattctgcgcagccgtaatacttcggttgtcatagtgcatacggctcttttgtccggttgtgcctgaggacgttaactccaaagcatctaccgagctgttgctcacgatcaaattacgtttgaaataattggcaaaaagaggtggcagggctgaccagtcatccattgccattacagattgtttattcaaaccattatttgccagccactgttcatagcccggagtatgctcacagtgatataacgtcagttcacgcatggcatcattaaataacgcatcatgatcggcacaggcacgataaggatctgctaaagcacatagtgctttaacatgggttaagttttgcatagttaagactcatttttttgaacagaacaatcttgggatccatgtcccaataaaggttaataaatttgtctgctcatattttggatgtaatgatttctaatagatttatttcgttatccgatataaatcatttgtactaataattaatccctgaggctttgttgaagaatgatgttggaaggttctgaccgtttttaaagttatttttaaactatcttaattgggtttttgactgggtaaacgtgctttatccagttttatagtttattgtcagtcctaatttgccgcgcattattccaaatagaaatataataatcaatctgtttttctaatgtttaactctgaatcatacagaatcttgtatcaatatttgatatgcctatttcattatttattcctgcccgtgagaaatagcatttttaaataataggaggaattttagtattaattgaaaggtctatttataattgaatatattaatcgcagaagtttattatttatattttctgtagcaacttaatatcctcgagatatatttttcatacaactgtcagtatcacaaaaaccatactagactcagatccagcattttgttgatttttatggtagacgccttttgccagagtatccgtcaaaatggtgtgtggtaatttctctttaagccagaacttttctcgcgtgagtagaaacaggcctacacaagttggaggaaagcgcatagcccccatttctgcgatgtactgtggtatatctggattaaagcgtgtgctcaataaacgcccgccataacgccccggctcagcttcaaacaaggtgatgttgcgtacgccagcacgtaacaactcctgggcagcaaccaagccgcttagcccagcaccaacgatggcaatatgttgatgctgctgacagtcaggtaaatgcccaatagcttgctgtgattcaacttgttctaaaaaggctgcatagtcaaatagcgtgtcgataaacggaaatgagggggtttgggcagatgagatatcatttgttgtcatgattgagtctcagataatcaactgcaaactggcgaaagggcgcgcaagattaagtaagacggttttgcgtccgctgatcagccattgtccttcacgccagtgaaactggtgttcgagacgtgcggcgtaatgccactctctgtcaccacgactttcgctgtagagtaattgactaacgccactggcactctgttctccttcagtccagctgataatggggcgctggagcagatgctgtgagcggctgcgtggctgctgcgaaaaattacgcgcattacgaagtcgattaatacgcagttgtgtaacaaagcgatcctcatacagtaaagaagactctgtcagcgggctaagttgatcgtgtcgtgatggaatccaccacgtatattcctccgccagcaaagcgaaccagtcgtcaaatttctgttcatcaagtagccaggcttcgtgataaatcaaatcagtcagggtctgtatgacattgttattctccattgcctccctccatcatacgttgccacatggaataaaagtttctcattgcgccttcactggttcctgacatttgagtggttcgatcccagcgttccgcaggatcatagaggcgagcgatattgacccactcgttagcctgactttttagtccttcggtagcgcgttcatacatttccacatcgtcatgcgccactattgaacagggggagttgattaagttgttgtactgtatagtacgctctagcatcttttgtggtgcccctaccagctccagaatccaggattcgacaacagtctcgctggaggaaaccggacgaataatgcgtaacgtctggataggcccttttacgaccagattagggaagtacacggtattgtgtcgtgtatcgttcaagatttgctgtgcccgcttctcaccataactctccaccatactttcccagtaatcggggatttctgaatagtctttatggatggaattactgacaccggtgtgcccatgaccattagcccagatgcggatccccatctcagaaaaaaaggtgtggggagacataagaggtgccaaaagctccaccgctgtgggttgagcaccctgctgatcagcctgagcccagagattaatcgcttctcctgctgaagattcatgcgccaccatagggtgacaagtgtcagtttggttatctatcaccatcttccagttacaatgatgacgatgacgcagtggtacaccaatgactcgtaatgctcctttaggggagcgatcgatcatattgtccagcgtcgagagagcatcgccgaagaagatatcaaatggcagaccctgatcactcagtcgtacaaagatgaaatcgcgataacacactacattgtcaacggctttcataccgatgctggcttcgcactcggacagtacaccgggatcatattcggtttttaccgggatgctgagtaattcacctgaaggtttgaatgtccaggcatggtagggacagcgcagaaaacgcccactgttaccactggtttccggtaagatctttacgcctttatgtgggcagcgattataaagtacttttatttcattatttttctggcgaatcgcgactaatggctgtgatgctaattcagttgtgaaatagtcaccgattgtggggatctggctgccgtggcacagatagagccagctctgcataaagacggtattttgctcggtgatgaatatagcctcatcgagatatgcagatttgtgaatttctgttccgcgaaatataagatttttattcataaaacgattcacaatgctagtttaaggaagcttccctttgctcgggaaacacagggataaatggttcgggaggtagtcgcttcttgcggtgtcataatgaaatcgtggtgctcgacgtcaccttcgatcacttttagtgcacatagaccgcattccccgcgccggcaatcatacagtggctctaatcctgccgtttccagtgcatccagtagtgactggccagctgcgacctgtagcctgatacctgattctgctgcttctacttcgtaacccgtctcggcgatatcagctttaattgttggtgtggtgaaaagttcaaaggcaatgtgttgccgtggaaaatggtggttatcacagtagtccaacacggcattgagcaggcgcacaggaccacatacatgcagccgatcgcaggcttgtaatgcgcccaataatccggaaagacagaccttttgctcttctgtactgtgtagataaaaatgtgaagcggcgagagttgccaattcggttgcgtagacagcctgtgcttgtgaagagataaggtagtgacattccgggtgttttcccatagcaatgaggcgcgctatgatgccgatgatgggggttatgccaatgcctcctgcaatcactatatcccgcccgccctcaggtgcggagagctgtggaaagtggttaaatggcccctcaagcctggcgctgtcacctaccttcaggctctgtaaatattggctactggcagaagcggtattgagttggatggcaaatgtcagtgtggctgttggtatcgtcaacatcacgcaggaataactacgtgtaccaatattgtcgggcatcaaccagcggaagtgactgccgggtgttaacgcagcgagttcccattctggcgcctccaaagtaaactcccggatcgtgtcactgagaatacgaatattgcagatcggatactgctgcattttctgccccacaatagctgtttcatgcaggttgtgtcggcgggctgccctgcatgaatatcaatcaattcgcatagactccgtttgtgagtcggtattacgccgttcagccggattacacgagtagtcatagcgacatagctgttacttcagagtaaatttactttttcatttcaataatgtactggctgccatttacggtagagaaattcagattgtagatatttgtaatagagaatccggcctgttttgccacaaattcaaattcagactgattccgtttccggcctaacagaagggtatcgatatacaaatcaaatgatgctgtttcatctggttctttgatcatatcgataacatataagacagaatcttcccgcatagcttgatggcagtttttgagaagatggataacctgattatctggccagtcatgtaaaacacctttcatacaataaacgtcatatcctgatggaatagcagaaaagaaattgccattaattaaagtcacgccttctgattcttgctcggtaaaatcatattgatccatgacataacactgaatatggggataatgcctttttatattttttgcaaaagaacccactccgcccccaatatcaataaatgaagaggtgttatttaaaggcaggcgatcaataacatattcattcatcatattggtcattttcgccattaaattatcaaaagttatttttatttttttatttttctcatcactgagataatcgaagaatgattcattatgggtaatttcaaaagcagatttattattattttttcttaatgatgagctgtattgtgcccaggtgctccagaaagcggggtctaattcgaattttatatataacgtttcaaagctgtctggtttactgagtgatgcccattgttcggtgagataaaacttatcttctttttttattaacacattgagtgtttgcatatagtccaataaccgatggaatctatcctgataaacattgcatagctgagcaagttgttccactgttttgccatcttgagtgcttaaatgtaatggcgcttcactgtctacaaaagaaaatagagcatttgatttacggtaagcagtaaccatttctaatgacatcatcattcccctttcttaatttttaattaaattgatttatctgttttttaaatattgttctttcaaattctttgatccaatcaagtatcgtttcattgtcttataataaatggcaatattcttttcgtgttaaaatgaatgatgttattcatcagtaacatcattcatacatcgaaagaaaatgactttcaatatattgaatattttattttcctctgtctttaatattttataagggcaggttttcattaaacaatgataaaagataaaagtagaatatatactttccaggcttcaagctgcagcccataaagctgcaacttgaaaggcaataagtatggctaacttatgttgattgattgaataatacttctttttttattcctcaatggctgtttcgtgcagatagcgccagtaaggttgccccgcatgaatatctataatgactgtggaccagcgaaccagcgtagtgcctgtattatgttgagtttcgcgatagcggcatatcacgctttctgtggtttcagctaatgtttcacaggcatcgataacaatgcgtagttgaggccgggtgcctatattgtgacgaaacaggttttctacttcagtcagaccgatactttggcctttcattgttatcatcctgaaatcagtgggaaaactgcccagtagtttcttcatcgcggatggatgaccttcccggccagtaaatacctcttctatccattgaggaagctcgattaggctgcggtgagcaattaattctttttctgattgcatacggactccgttttttgactgagttggatgagctttagcaggggaagtagtcctaacccggcggcaataaagaacttgagagc

SEQ ID NO: 3806 - DNA, 52812 bp, Xenorhabdus sp.; identical to SEQ ID NO: 3805
  CDS (40632)..(41153)

SEQ ID NO: 3807 - DNA, 52812 bp, Xenorhabdus sp.; identical to SEQ ID NO: 3805
  CDS (37610)..(39229)

SEQ ID NO: 3808 - DNA, 52812 bp, Xenorhabdus sp.; identical to SEQ ID NO: 3805
  CDS (37145)..(37336)

SEQ ID NO: 3809 - DNA, 52812 bp, Xenorhabdus sp.; identical to SEQ ID NO: 3805
  CDS (35737)..(35943)

SEQ ID NO: 3810 - DNA, 52812 bp, Xenorhabdus sp.; identical to SEQ ID NO: 3805
  CDS (34764)..(35681)

SEQ ID NO: 3811 - DNA, 52812 bp, Xenorhabdus sp.; identical to SEQ ID NO: 3805
  CDS (34201)..(34656)

SEQ ID NO: 3812 - DNA, 52812 bp, Xenorhabdus sp.; identical to SEQ ID NO: 3805
  CDS (33717)..(34097)

SEQ ID NO: 3813 - DNA, 52812 bp, Xenorhabdus sp.; identical to SEQ ID NO: 3805
  CDS (33510)..(33653)

SEQ ID NO: 3814 - DNA, 52812 bp, Xenorhabdus sp.; identical to SEQ ID NO: 3805
  CDS (28865)..(33280)

SEQ ID NO: 3815 - DNA, 52812 bp, Xenorhabdus sp.; identical to SEQ ID NO: 3805
  CDS (27097)..(28764)

SEQ ID NO: 3816 - DNA, 52812 bp, Xenorhabdus sp.; identical to SEQ ID NO: 3805
  CDS (25417)..(25812)

SEQ ID NO: 3817 - DNA, 52812 bp, Xenorhabdus sp.; identical to SEQ ID NO: 3805
  CDS (16728)..(18194)

SEQ ID NO: 3818 - DNA, 52812 bp, Xenorhabdus sp.; identical to SEQ ID NO: 3805
  CDS (14707)..(15228)

SEQ ID NO: 3819 - DNA, 52812 bp, Xenorhabdus sp.; identical to SEQ ID NO: 3805
  CDS (13126)..(14688)

SEQ ID NO: 3820 - DNA, 52812 bp, Xenorhabdus sp.; identical to SEQ ID NO: 3805
  CDS (11994)..(12863)

SEQ ID NO: 3821 - DNA, 52812 bp, Xenorhabdus sp.; identical to SEQ ID NO: 3805
  CDS (10551)..(11900)

SEQ ID NO: 3822 - DNA, 52812 bp, Xenorhabdus sp.; identical to SEQ ID NO: 3805
  CDS (9721)..(10530)

SEQ ID NO: 3823 - DNA, 52812 bp, Xenorhabdus sp.; identical to SEQ ID NO: 3805
  CDS (8853)..(9656)

SEQ ID NO: 3824 - DNA, 52812 bp, Xenorhabdus sp.; identical to SEQ ID NO: 3805
  CDS (7360)..(8832)

SEQ ID NO: 3825 - DNA, 52812 bp, Xenorhabdus sp.; identical to SEQ ID NO: 3805
  CDS (6889)..(7287)

SEQ ID NO: 3826 - DNA, 52812 bp, Xenorhabdus sp.; identical to SEQ ID NO: 3805
  CDS (6001)..(6876)

SEQ ID NO: 3827 - DNA, 52812 bp, Xenorhabdus sp.; identical to SEQ ID NO: 3805
  CDS (4600)..(5889)

SEQ ID NO: 3828 - DNA, 52812 bp, Xenorhabdus sp.; identical to SEQ ID NO: 3805
  CDS (3722)..(4426)

SEQ ID NO: 3829 - DNA, 52812 bp, Xenorhabdus sp.; identical to SEQ ID NO: 3805
  CDS (3018)..(3665)

SEQ ID NO: 3830 - DNA, 52812 bp, Xenorhabdus sp.; identical to SEQ ID NO: 3805
  CDS (1017)..(1634)

SEQ ID NO: 3831 - DNA, 52812 bp, Xenorhabdus sp.; identical to SEQ ID NO: 3786
  CDS (52729)..(52812)

SEQ ID NO: 3832 - DNA, 28660 bp, Xenorhabdus sp.; identical to SEQ ID NO: 286
  CDS (1237)..(2175)

SEQ ID NO: 3833 - DNA, 28660 bp, Xenorhabdus sp.; identical to SEQ ID NO: 286
  CDS (18092)..(18343)

SEQ ID NO: 3834 - DNA, 28660 bp, Xenorhabdus sp.; identical to SEQ ID NO: 286
  CDS (12713)..(13150)

SEQ ID NO: 3835 - DNA, 28660 bp, Xenorhabdus sp.
  CDS (752)..(2206)
tcggaccatgtgctctaaaggtcaggcgcagcctgacgcccgccctttggtgaattggatttctcgaaggcgtccagccgagataaatccaagaggtcgaagacctatattattgttttcgttcagaaaaacaataatatgataaaattattcaccgaataattttatgcccttatattgaaaaaatcctttttttcaatatgttataagaaattaccgcttaatgcggttttttcttatatatcaatatattataattataatatattgaattcctttcttacttttcctttttatatactattttatatactatttcatatgttattttatgtgatattttatacaaaataagtatatctaataaaatagtacataaaataatataacaatttcaactttcaccttcgttaacatcttaaaagtagccataaaaacattaacaatgtacaatttttcattacattttttacagagaatactaatgatgaatgagaaccagctagaatttttagcccacatattgaacaatatttaccctacatatttttatctttggcttggtgctttatcattgatttgtatatttaccttcacaggatatatagaaaaatcaggtgataaatcaaccactcagttaatagttgaaaccataagaaaaaaactattagtagcttatattttaataacattcatgttttttatcacaatgtatgttatttcatttattgcattaggtaaaaacaaggataatgcagatcattacatggatatgttattttcaaaatttgaatatgtagaaatcctaagcataagtacattcttaaatataatagctgttcttctattaccatatattttggtgtttgttaacagacgttacatcaaaccaaaaatatcagctttatttagaaagtatagagtatctcaaacatcagacactctatctgacgtaagaatagaacatgataaaaacaaagcaaaagaatttaaccctgaatcattttataaaaatggtgaaatttttttaggcttagacgaagaagaaaacccaatatatattacagacaaggagttttgcggtacaaatataaaagtattaggagcaacgcaaacgggtaaaggtgttatacagggtgtattgctagatcagtcaataaaaaaaggatggggttcagtattcattgatcaaaaaccagaccattttatttatacgataatgtgtaacgcagcaaaaaaagttaacaggaatattatagtttttgatgcaaacgaatttagaggtgtatcttacgaaccttttttacacggtaataaaagagatagaatttctagattacacacagcatttaatttagataatggaggaacagacgcagatttttacaaaagaaaagccagaaattgcattacaaaaatacaacatctttgggatggtaaaatagacagtctatctcgtttattgaaaggtgatcaccctgaattatccgacaatgataatgaattcattagaacttatgccgatgcaatcacagaatgtataaatgaatggaaggatttaacatccattggacaatctcagaacatattaaatatttacgacatagtgagacatggaaaagttatctacatcaaaggaaatttgaaagataaaacagtaaaatctatttgtagaaatattctgactgaattatcacaggcaattattgaaatctcaccagataaacataattatatagctgtcgatgaaatcagatttattatttcttctgaaatagccggagcactagcgactatacttgctagtaatgcaaatatgagcattgcatatcaagaaagagacgacttattaaacatagatgatgaatcagatgctgtgtgtaaatcaataatgaaaagtaccgaaacaaacacaaacataactatagttcaccaatgttatagcgaaacagccgaatggatctccggtaattctggaacaattgctaaaagtttaactaaactggaagaagtagacactgacggctttggcgctgaaagttggggcggtaagcgtatgataggacaagataaagagtatttaatacctgtaaacaccattttatcattacctgctagagtaagcgtcttacaaagaataggaagtctgagtaagattttacatacttgctggatatcaatagatgaaaaaatgccattgccaacatgcgaaaaaataattgaagataaaaaggttaagaataaaaataaagtcaatacaaaagaaaataatttcattgatatatcagaactggattcagttaaagaactgttatcatcaaaccctataaaaatgaaagaagaagaaaaaacaattagaacagaaccaaaagaaaaaaatgtagaacataatgaaatcaaacaaaataaaagagaggttaaaattataaccaatccatttggggcacaaaatgagtaaattaattagactggctaaacctcaagactatcaatttaatgataaaataaatttatatgagttgagttttgacaagcgaccagttcaaggcactcgctgcgaagatcccaagataggagcagaactatataacagacaacgaatgaaattcgcacaatcattacaaaaaaaatggcaacctaatagcctaaattttagcgaagttttccgctgggctatagagcgaggaacgccggaacaatgccaaatgctttgggatctgtatcatactactactgatgatgattacacccggctagcgatacgtttaaatcgaactatcaaagatgctgatctttcagtaatacttctctttactgggaaaaatagaagaataatcaaaaacatagagatgttagaacaattaaatgaaaaaagagggctgcaatgagaagaacagaaataaaaatagaatttcatgatataaaaagtttaatatcatggagttataatttttctgatttaccagtaagacgatctattcctgatggagaaagcactttattttatttagagcgtttttttactgccagtaaagctaaaaaatatcggagtaaatcacattttgcaaaatgcgaactttcaaagcaagtaatgccagaaattgaaaatttactagctgatagcttaaatgagtatcaaaaagctaagaatatcctacaaaaaacggttaaaccgctaccatttaaagaagtaattcaaaaagagtctaaacaacatatacatgaaacaaagattgatattcttccctgtgctcctgcattaacgttcattcgtataaatcagctatgcgacgaatgtattactttgctaaagcaattacagctaagcggaaatataacaactaaagaatattatcaacaaagaaacaatatttacaagtcactaaataagttaagaactaaaataaaagaatatgtaaatgcagtaggtgaaaaagtcagagaaataaaagaataaccctcgcaaatcaccattaaaagccgtcagtgatcgcaaactagacggctttcaaccaacattatttaattagattaaaaataaaaccgtcttttataactcttaaatgtttcatttaagagtaaattaaatattttcatcttttttaagctatacttatatgatgaattttataaaaaacatcatgttaaaacttggatatcttcatgattaaaataacatcagcactagatgaaaattttattaccgatgctaattcattagtaggtaaccgcatcaaaatactgcgtaaagaagtaggcatatcatcaaaacttttagctacgcggattggtacatctcaacaacaactatccagatatgaaaggggaaccaatcgaatatatataaatcatcttgtttcaattagcacggagctaaacactcctattagttggttttttatagattgtattgatattgaagtaggaaaaaaaaacagcacatccccacttttatttatagaagatgcagatttaaaagaacgtttcgataagatctggcctcgcttgtcacatcagcaacgccgaacgctcattttgtttttagataatcacaaatagtagctacaatgatagcattttgaaagataccggctcaccctggctgttataatcgatagtaattcgaacggggccagctctctggaagaagaaaaaatgatagtaatccaaaaatgtttgtagtaaccgcatagataaaaaaagggaaatcaaagatttcccttatgactcaaagattatctaatcttagactaaataattttgatgtactctgagcatcataacgaagtcagataattctatacactcatactcctgagcattccaaattttcatacaatctagaataacttctctggttcgcaaattaatatttgcatgaataatcatggattcttccgtataccatgctttaagtaagcgaccattagtagtacaagtagtcatattcaagttagcaataacaccagttctttttagctcaataatacattgttctaagcgatctagcgtttcgtaacctctgtaataactcattgcatcaatgccgaatgggttattaaattctgtaaggttgaagtttaagttagaaaaaataatttctttaaacataacagatccttatacgggttgttatgatgccgaagcaacataacattgcccgacatagaaattttaagttgatatattaggcgattaatccactggttacgcctgctgtggattcaataatcctatcattgctattaagggaataaaagaagttattatgaatttaatagagatctgcaataaaaatttttattgcagatatttatatctattgatgggttgtgaacgaaaatttgacgattttttatcacatagaagttgaactagctaagaggggttgaggagtcgaaaatctgtgatccttaaaataaatataccaaaatcttgacttaatcacaatttactcatttaaatttactcaattttggttaagtttttagatgctttagcactgataatcagaaaatttagttaatgaaaatttacaggctgtttttctttattccaactacgaggatcaacattagattcaagaaatcgcctaatatctgcaataatcgctctacatttgcctatcttttctttatctaacttatgctcttcgctgagttccttttcttcaattgcatcaaacaaaatgtataaacacaatccagcaacaaaacaccgcccttcaccgaatgactcaataaacgccgctacttttttttgtaattgtggttttgagtcctcccatgacaaattttttaagtaatcagagataaaattacacaagtcataattacaattcatattattacctgacatacaaacacctctgtaatcaataattcgaaaaaaagccctataaatagggctggcagcaacaacgaagtctatatttaatatttattgtaattatttattttggtattattccctgatgttactaatatctttacaagggtttatctctactatttagcaaactaagatactcacaggggatctagaacccaatagagaatctagtgtgcattctgtaacagtgatagataatagtcaagataaacgtaaaaattatgaaatgaataaacaacgactatttgaagccagaaaagcaaagggactttctcaacgaaatttaggggaaaaattagggttagatgatgcagaagcagccagaaccactatctctaagtatgaatgtgggcgctccgctcctatatatagcactgtttgtaaattagccgatatccttgacgttcctccgtgctatttttatatagatgatgatatcttcgctgaacaggttttaaatctgtacaggaaaactaataccccattagaaaatgaattaatgacggctaaaagcaagatattagaatatgaaaacacttttaaagccatgatcgagctaatgccaaaattaaagtaacaagagacaagacagccccccccgaaaaaatggggcgttctgtcaaaaaagttaaaaaaaggagcataaagctcctttttttctatgttcaaattgtaattattacgatttaaatcgtgtatcaagttagattttccttgattcaaggatactttgattcttttgagaatcatctaaaaaaaggtgataagccgtaatacatgctttcactattgtagttttattttgtcctgttctcattgcttcttcttctaacatatcaataaatttctgtggcaaacggaacgtagaagcaatagtgttaccattgctaggacgtttatcaccatcaagaataaaacgtgcaatagctgaatttgtagtcttttctatagctgtattatctagactaatatccggttttttaagtgtaatcttagacatgcttccctcttagtatatgcacaaacacacatacataatacatacatcgtacatataatgatagcacaacgtacatacatagtacatacatcgtgcatataatgatagtacaatgtacatgcatcatacatacaacaacagtacaatgcgcatacattaagtacccattacaggtatttctagagataaaacaagccttataacaatcctatttcttttaccatcagttcaatctgtgctttagcttttcccaaactaggagcacgagttacatcgtgaacaccagccccaacattgcaagcgttttcaaaaacgtctagctcagaaatcctagtttttagaggttgaatccatatctgatcactttttaactctttttcaagtgctattgcatcaattattttatgtggttttacgcgagtcatgagcacccagggttttaatttggggttagccatattttgtacttttcgtacagtttccgtgactgatgttagtgtttctttttcaaagtttgaagatggtttaactaaagtaatcattatatcagctacagtaattgcgctacgatattcagagctgtcatgtcctgcacaatcaactattaacacgtcacaaagggcttcaagttttttaatttcattactcacatttccatatgcctcataaacaggaattgtagataatccttcttgtttacgtttgttaccccaattaacaagatcgcggtttttatctgttttaagcagaatagttttttttcctttatcacttaacattactgccgtattaactgcggttgtgcttttacctactccacctttatcagaagcgaaaactataacagccataactacctcttttttttgaaatacatcgtatgtatattgtatgtacattgtgtttcttacgtatgaatatagaccaaatgaaatactttgtaaatacaataacaatacatttttgtatgtacaataacattacaatgtattatcattgtatgtacattatgtttcttttttggtaaaaagtaaattagatcacttataatccatataatgtaaggagttgtgtaacaaacaatactcgtgagttttctcgcatagagagactaaaaatttaagattagctaattgattagtagataaagtaaaaatacaattttatttaatggagtatataatgacttttatgattattatgttattgtttctcgctcttggtatggtagccttaattttagggatacattcggcatggaaaggaaaaatattaacaggattgttaaactttattttctctatagtatttatgtttgtatcaatatgttacttcgttaattttgatgaagttaataaattacgtgaagaaaaagaaaaagaaaaagaaacagcatcaatgattagccctgaaattaaaacatgcgatcccatttataaaacaataaaagaatatggttattttaatagttatctttttatctgtaaggatggcacctcgttaagcgtagataaaaaccaatatgaatacaataacattaaatttgaagaaccatccgaaaatcaaattgataaacttattaaaattctttcaagaataatgccgttccttgtgatgttttgtatagcaatggtaataatcaccatatgtaaaaaaagttactactagtatcacttaaaaaataaaaacctgtgaatttccagatatatttgtaaattagcacacatttcagcttgttacctttatatcaatgatagatgaaagttattccccaatgaaatacactgtattaccattgtacatacagtgtatttctttatgggtaaattatgaaaatatcgcttttagcagtattttgaacgcaaatttatcaatgttaaaaaaatgttacaaatgcactattgttgtgcatttctgcaaaaaatttgcttctctgtatgcgggggaaaatgggcaggtaaaacggttcttttgtcgatttgaggacagagtgacggcgtaacgccccaaagggcggctaaactttgcgatttaacataatggctcttaagcgccccgcttttttcgggggcgctctgcaaaatctacggaggttatacactaataattttatggccagaaaggatctaacaaccactgagctatcaaacgccgggatgttgcatctaacaccgaagcggcttctcttatatcaaattcactatctttgccaaaccataccatcataaagaatttagccattattatctctccatgactaagagtctccagcctagttaataactcttccttattgcaggctttcctttctatgtcccaaaatggggttaatgttggatagtcagatagcatgaaaaagaaacgtttatatgaatctatttcagggataacttcatgcgtggcagaacctcgaaaagtttcttttagtgcttttttgaagtcttcaccagaaaaagatttaacattctcatttttattcatcagttttatttttccaaattatatttaatataaatctgtagtgtttgcagagcaaagaaacttatcgggattgggattataaaccggatttctataagttcaaaaaacccgaacatacatgaattctagcacattatactaattaccgtttgatatttcgattaaacattctttctcttctattaatgcttgttgataagattctttgttgactacaatccctctgtctttagcataatcacaaagaattttcgcttcaatttcattaagttttgatatgtactccaataaatcaccaatcaatttactggcgtaaatttcataatgtaaaccgcatattttactagcagattctgacattctatcaaacaaaattgatacggctattttacttttctctattgagtgaatatcattaataaatgtgattttatccataatggctcttaaatgcccctctttttgcgggaacgctctgcaaaatccgtagcgtttgcagagcgaaaaaatttatcatgattgaaattctaaaccggacttttattagttcaattagagggcgcgtaataattttggatgttttttagtccattctgagcttttttgtgtatcatgaagtaaccaataacaataatgacgaccattattaatgcacctgttaaccctaattttttcatcatatccctctatattcgctttttacaaaaaattcggatcaaataccgatacgcgctaacgccaagcacacagccaaaacaaataatcgaaagcataacacctaagatttgcattaacctgagcatattatcaatgtaactatcatcatagtttctgactaatgcagcggcaacagatactatcatcaagaacaatcccatatataatatttggcgtacagaacgccgttcagcagcctcttcttctattcgataatcttcaatttgttgttgagtcatgtgcttttcaaatttattcatagttattgttacctcatattgttatttttattaacgctctctatttataaaaaaagaattaatttcattcctgtcattatattttataatgcttttagaattgaaagtagccataaaaaaatctctaaattccttatcagtagagcatatttcaaagtaatctaatagcatttgcgggggcattgctttttttgtattcaaaatcgccataaaataattaataaaaacagaacaagaaagaaaaataaaaataatagctataggagatattgaatcaataaaataaacggaagtaattataataaaagcgatcggagtataaacaattaatgttagatataaaaatttatcattatatttatcatgctcatttatttttttaagtatatccatttctaaattatttttattaaatttaatattttctttcattgctaatttcctgttttaaaagaattaatattaactgtaatgataacggcaagatgctatttctaatcctttatctgtgacgcgataaactagcctgtgttcgtccgtgattcttcttgaccaaaaccccgttaagtgatgttttaatggttctggctttccaatgcctgtaaatggtgttctcttgatgtttttaattagctcattaatacgtttaaccatttttttatccgtttgttgccagtcgagataatcattccatgattcttctgaaaaagttaaattcattcctgaatatccacctcaatccctttaccattgttgagcgcctctatagagtccatcaagtgacgcgcattagccggagagcgtaaaagataggatgtttcttctaatgcgcgatattcatcataggacaacataacacaagccggagagcttttctgtcgtatgattttgataggaactcggtcatcagtacactcattcatgagtgctgcaaagttttgtctcgcttcactgtaattgatagttttcatttctcatactcactagttgttgtgtaatttatagactatacaccaaaaaaaaataagtacaagtatttgtacttatcttgtgccatgtaacataatggctcttagatgccccccttttatagccagggcgctacatataggaaaatttcactggggttatttcgtgttttttacgtagctttctatcggtaaaatatttttgaaattgtctttatcaaccctgaataaagatattttcgctgattttaaaatatcattgaagtctatatcacgattgatgcgtttatctgccctgtgggtatgatcatcaagctctattgcgcatagcaccttacctgtttttatttccataatcacaaaatcacaatgccagcgacttattttattaaataatgactgccattctgatgatcgggctttgtaaatatcagtattaaccttaacgatgtcagccagtcgcacttgagctagaagatggtaacggctatccaaatccttttggatttcattaaaaacatgcaattcagtttttgtcatgacagatttagataaatatccgttctcaacagaaaatttcttcttgctacctattgaattatttttttctttagaacctttagcctttcccattacaataataactacagttattataataacaaatataattattccattcatgtattacttctcttgttataaacaataaaatcaccgcttaattttagcttttggcctatctcattacaatgattaaccttaatccggctaaaatgccgatacgctctaacactctgcaaatctagggcaatctgatattactttcgatcaaataattcccccgtgtttaatatgaacatctaaattaaaacccttaaaaataaaataatctggatcatagagtacgaggaaacgcggtaagataaaaaccactgataatacgaggaatattattttcttacttattttttttgctttaaaagtcagataaaaaaagaataacccaaaaataacaaaaacaggccacaaagcggctccagataaagttgtatacaatagagcatataactctaaaacaggtaatacatgttccatatagtaataacctcattatcaggtaataattaactaaaaataaatacaggtacataataaaaaaagaaaagaaaaaaatccaaattaatcagaaattactatcgattataacagccagggtgagctggtatctttcaaaatgctatcaggtgctatattgttgttttgatttgcgaagcaaatataaggggcgagagaatgcctaaaaagcatcaggaagctgaatcgccccgaagcagagcattagacacacttgcgttagaaagtgcgtctaatgcgattacaagagcaataataagcatagaaccttcccctgtcctatagagccatcttatatagcatgtaaaaagtggtgaatttgagccttcaaagaacgcagttagccgacagaatagcgtagctatgaatggcggatgtactgcgcgtatgagcgttagcgaattacgggcacaactgtaatgactggactagaccacttatctgagcggcagcggtaaaaccgcttgcaagcgaagtcatttatttcttttttatgagtgaagcaatgggggatttatcccccttgctaactccctatgtaatagggtcgtttgttcagtaataaatcgcgaatttaattatataagcatacacatttgcgaatttaaatgactgcgtttcaatcaatcatataaaatttatgtcaaaacaccgtttttagtttcgctaatcaaaaaatcaagacgggggagggattaaaaaatgagcagaaatatttaaaaaacaacacgaaaaccgccaaaagaggcggtgcttatttaatacattcattatttatcaggaagatgttttacataagcccgtaatagttcattgcctgaaagctctggatataaatttttaatctcgttttcaaatgaaatttttcgagccatagggtgtttttgtacccacttttgataaatattatggttaacttgattttcatcgggtttaggttctgttgcttcaatgagttttttacgatgctctaaggctttaattgcgtgttctttctctttttttagggcttcatcatcgcctaacactaaccgtttaactttaagaagtaatttttttaaagagtgtttattatcaagagatgcaacattagaacgcgccaaacgtaatgtatgttcagtataaatacgctgatgatcttttcttaatccttttttttccatccaacgcctgaagcgtataattatttctctaagctctgatagagaaaaacccagacctgtgaaaaactcagatttcaaccaaatgcgctgggctttatactttttagtttcggaatctttgtctctatctacataaatcatgccagccgcctcccaatcgagaatcgcaagccgtatagggtcataactctttcgaccattatcatactggtaaagttgcccacaaagactagctagcttttcagttgaacacatgacttcaaaaagatatgggctatcgggattgtagtcagcataagcaatcattgctaacgctaactcggagaaagtttctcgacgctcagaacgtatagaaacacgctgattacgttcacagcgttgcttatagagtggggtgttacgattccagtcgtgtattttcaatgcaccagccaaacggcgaacagggactattttaggtaagccccccgtatattttggggtgtaatggcggtggatcttctttttgttatgcggttgttctacattatacattcaagcccgcacttaggccgaacacagagtattgcaatctattagacatgtatttatactccctactagaacaaaattcttctagtagttctatattacccccgtaatttctgtgacatccggccaaagttgaaacagtgttacggggttttcattttcaggtgattattttatcaccttaccctgacacacttccggctgtgtccaccaatatataaagaatctatcacttcaaccgcagatgatcaagattctactcccatttttgactctctcgctcaagcaataatgttaagtaagcggatcgcgtatagccttcttttttacaaaaagctaccagcttatctctcaaatcttgagggataaaaactcttaactctttatcattattagacatttttttttctttgtatcgtctattgtaatcattttgtgtctgcggagaacctttcctatactcgcgttttttcgcaacgttgaccgaattaggcattaaatactcctttcattacacccggttatagatacaaaaatatctacataatctaactcttattgtttagtaaccttacgacaacacaccgaaaaaacgcaaattttttacgcgggtcattcaatttagcattatccctataatcactatcattatattgagaataaaaaataaaaaatataaaatgatagcaattaagagtacaggcatagatcaaacatcaactttactatcataaaagggagtaacaagtgggaacattaactataagaaccaaaccagaacatgaaacaatgatagctaaactttctaaagagcttgaaatcaatactgcatcacaaacgctattatatattttgatggactacgaaagaatcaacacactattgaccgacagaacaaaattactagaaaaccaacaacaagaactagataacatcaaagagaaaatagagtcttacaagctggcacatcgtgatctatttggaatttgatagtattttcatggataccggctttttttaaatggcgaactgataacaaaaaaggctaaataacctggaggaatatagtcaaaatgatggcgataaaaatctaaatctcagacagcaacgcaacttgttgcgttgctgggctgggattcaccaactgagcacagcgaaggcggtagactgcattttaaaggccatttctcatatcatccattaacgtattgtaaagttgtgaatttttattgagatctatattttctataccaaaacgatttattaccttttggtaatgttctaatgttaaggataatgaatttttttcatataaatttgagtataaaggttcttcgtcttcctttggagattctataactaaaaagaaatattttagttttttatcccatccaattaaaacttttagatcactattttgggtttttccagttaaccaatgctgactcatgatttacactccttgtagattttcagaggaatagaaaaaaacatgtacacttaaaaccactgaaaaaaattcttttttcccctccgacaaattaacaaaagtaggcgaatgctcagaagctacctttactaattcatctgtattagttttaaaactcgttatgaatgggcgaatttcatttaaaatatgtcttattatttccatcccttcatcatttagctctttctctattagtaacaactcttcaaattcatcaacagttagtaacgtgttcattattttctcttattacttatgtcattaattataaattggtatcattcatctactcaatagcattatcaaaccactttcccgcaggttctttattcgtttcttttctgtcataagaaccacgagattttagagtccagtcagatgatcctacatatcttatatttaaatctgtatattcatgatttacatagttgttacagtatgtaggtaaattagggttgattctgaaatagtaaattctattgcaatgcggatcactcctaccgccgccgcctgtgcatctcgttacatatttctcttcgtataactcattatttaaaacgctggctttgcaacgttcagcagaattagaaatcacatcgattaatgatgacatattttcttctttggattcaggacaaagttttaaaaaattaattcttttttggatggttttccacggttttttgtcacgaatattaaaaaatctatttaatgatggtctacattcttgtggtctatgaccagatgacaaacaaaggatcgcttcacaagctaacttttcatctcccgttagaaaatcaatagctgttgaatcatcagcaaatgaataacatgaaatagaacacaatagaattgataatatttttctcatgaaattggcctgtaaatgttattggtaaaattttatcattgctaccgccttcgctatgctcagttggtgaatcccagcccagtaacgcaacaagtagcattactgtctgtgatttatatttaatctgcatcctctcctaatgtcgtcattatatttttcacaaacttttttgtttctttataaggtggaattccgccgtatctttttaccgctccctctcctgcattatacgcagctaatgctattttcacatcatcatatttgttgattaatctagctaatagtgcagtgcctattttaacattatcatcaggatcataagggtctatattatgtggcttcgagttaacatccattaattgcataagtccttttgcgccttttttgctgatagcatcttttttaaactctgattcttgtttgattagagccataaccaaagtaggatcaacgtcatattttatagcatatttattaacaatgtcttttatttctttgcttgcttcaaattttatatctttatattcaccgcttttagatataacattctttatttcttttgatgcctctttttgaatatcataataatagttaaaatctttcaattgcgtggtgcttccccaacgtccttgcattgcagaaacccattcataactccctatttcatcatcataaaaatcatatgaatcagataatgcccccatacttaggggcaataacattataatcaaaaaaagatttgattttatcatggtaatattcttataggcttatagtctattacttgtgattcatttcctatagcttctggagcggttagatcacgataaattacatgggttttattgagttggtaaaggtgatccttaccactatcaaaagtagtttttgtacatcctaataaattactaacaaccaatactaataataatcttttcattacctgtgccctttctcaaaagaaaccaacctatgagacggatcaataataattgtattattgatgccgattaataattgcaacgcatcaataatcggcatcgttctatttaatttcattgacataggcaaccgctgattcattaatacattcgctgttgttggtgccggatactccgtaactaatttataccctgtaggctctaatatatattgaaccgcttcacgaacagtagatatttccttcgggaatacagttcttgtatatgcgcttaacgggtcgataaatcttggctgatattgttgtgattttgataactctattttttgtttttcttgtgcaaaatttcctttcacatcaattttagtgttttccaccgcaaaagaagaaatagagaacatagataatgacagaataaaactaaatttagtcaatgtaattttcataaatacttccccacggtttcacgaagatttcatcttctgtaattattctaattggctgccctgcatttaaagttacagtaggtacaacctgtaaatatttttgtgttaatcctccggcttgggttcttgctccagccccaaaattgccagcaaaagtttgatcactatttccccctgaaccctcatagcttgttttagttcctataagagcgtatgcagcaacaccaaaaaattgagctaagaaatggcggtctacatcatcccctttaaccgcaggtattcccattcgatctaatccagtagttttactaaaatcaatgcgatccccgttaggtagaactaaccatgacggcaaaaaagccagtcggttttgaagaacttcattcacccctgatgctctcactactttgataatcacttctgaacctttcggcgctaatatatttgtattggaagcgtcgtaaatatcatgcgtaatcatcgctttcatgcttccgccctgataatcagaaatagcactcatggttgtaatgccattaattacagtgccaactggtatttttactaatccgtcaactgatgcgttataggggttatcattggtataaccaactatattattagaaacagcattgttcatttgattatcagttaatctttcactcacattagcaaaattacctccagataattccgtattaattacgccattagtattgggaatatttcttctagcttccgctaacttactcggaatgtttgctttatcaattgctatatttttttctaaatctgatattttttgttgtattaccgatctctgctttcctattccttttataatatcatcattacttctttctgagctattagcaacggagtagccagaactgcttgcataagcattacccccgttattatttgatgattgtgaatcaaaatttcttttatcatatctagctcttaacgccctgctcacttcctcagcggcgaatctttcacgcatcttttccggtgtgttctgattttcttttatatcatttgagtttgaatatggagcaaatctagttgtatacggtgattgcctatgaccattatcagttaattgattacctgttctagactctccccccgttttttcttctcctgattgattattcgctttattcaattttaacgaattttgagaaatagcctcttctttatctttagcaaagatattttttaaatcttgagcctgtacaccgttagagttagtagttgtttctacttgttcttctgagccgctcgttttttttgtattacttcgagttgcaacagaatatataaagtttaaaagcaacactaaaaatacagcgccaaaaaccaacaaaaaatatagctgtgtttttttcttgtgtgttgacggtttttcatctattcgtttttctctttcctccatgattaaccctccccattagtaccattatcagccctaacgacttcgattttttttccgtctagagttaaagtgaatttaggatatattcctgacatctgataaagatgataagcttcatcatattttgttggtatgatagccgcttctcctccaacctcagcagtaacagctaataacccccgattaggtttagagatgcgaatatatgtaaatcttccatcatcataaacatcagaaatgatattcttaccaataaacccttttccagtattccagttataacgggtataaataaaatatctgtatcgttgtaatgcctcggcaactaattttttattttcttgctcatgcgttctttgcatcgcatttatttgctgttgtaaacgggtaacttcttgtgatgaattaccgcctgtaagagtgctagttagtgctcgcctatcgtttgtagtaataccagagcgattaataataacgcattgttgattagcctctgaactaactctattagcctcaatatctaaagcctctccattagaaagaaagattgtaatcattgatttttttccttcaacttctccacttgttggctgaatagtaacttgatttgctgcccctgctgcattccagagagaattagaagaaaaaggatcttttgtaactaaattagtaccttctggcaactgaatacgagtacctagatataaagctgaatttactttaattatgctgccaggtttccaatgtacttggatacaccccgctgaatttgcattaacagcactcaaaagcaaagatatagctgtgaacagtttaattttatttttcataatcatattatttcttcttctggttgttcaataataacaataccgatagggttaacattcagccagtttaattcttgcttagctaaaactgatttagacaataaagaccattgtaatttcaatcgtattgattcttttttcaaagaaactccgtttttgtctttgtacgttttttcaaaaactaacgttgttctaattacaggctttgtttcagaatcaaaaacaccatctattacatcataatgatctacatctatcattttaatactgacattctgagagtcaggattagataaaatatctttaattttctttcttgcattaaatcccttttcatcgataaattctcctgcaagtcttgcagacataaaaactgatgcttctccgtaatcttgctctattgtttctttatgaataccgaatctttttcttatatatctatccagtaaagaattaactaaaggggttgttactacttgttcatcctctggtagaaaatcttttactgaataagttccattaggctgaaccttgataaaaacaacttcacgtgttttttttgtttgctcaaccaaagagctgacagaactcccctgataaatattcacacaaaccaaaataatagcaccgataagaaagaaatttctatctttcttcaactctcctactctatcacgaaaagtttttttatttaaactatctacttctttttttgaaaacatgattagttaaccttattcttatagaagagcagctatttttttagccaatgctgtagcgccattatttaaaccactacctgccgaacccgaaccaccacttaaaaacattgctgcaagtttaaaactaccaaatatcataattgcagcgataaaaataaatgccactaatgcaaataaagtcgatatattatcttcggcaaattgtattgctttataagctgtaaaatcagatcctacaacatcatataacccttgagattttgcaacagcatttaatgatgctttcattattaccaaacatataatagatgttatttttaagaaaatagaagccacaccccataaaaaaatgaattgtaccaacttcataaatatagaatgcgtgaaccgacaaacaataaaaggaatacacaggacacctacaactttagcaagggccattcctgtaatcaaccaaatttcagcaaaatagatagcaatagctagtaccccagttgctatataccaaaatatagagatagtaatcaaattcatcgcatcaaaaataccaacagtaggtaacatgatagtgttaacaaatgaattataaatagcatcaggcgcagcccctcctattgctgaatcatacatcatctgccccaattgattacacgctccataaattgtatcagcgatctgagcatatccagcatacaaagaaaaatatgagataactaaaattgaggttacaatagttggcactatctcagccgttctaatccatgtaacaatattccatgccaacatacaaaaagctaaaaataatgctaatgccaaagaccaatttttgatacctgaattattaagtatggcattaatggcgttatttatttcagactcaaattctgcatgtagcaaagaggtgtctgtagccgcataactggaaaatgtagagaaaattgataataaaaaaaacgttaaaaatatatagtttttattttttttagacaaaacaccccccttatagatttttaaaatctacattaattaagattaaaaaccaataaaatctattaaatactgtttccttttctggcgacaatctgttttgctgaaaccataccttgattagctgttaaaccctgaaaatattttttcaaaataaaattagcctcagaatccaattgatatgtatataactttccattccagtactgaatattagattcatctttttttacttgcttttccaactctaccaatttttttaattctgatagtgcttgttctttagtaagattagagtaatgtttttccatataatcctccccccctctaaccaacggtattttttctaatgactgttcatcagcatattgtgagcaagctattttgttaccattagcaatgatttttttactttggcactcttttagtaatgttgttcttaatacagatcttttctctgcttcttttttttcttccacatcaacataattagctatagatgcggaagaaaacgccattaaaataaaagacaagataatttttttattcattttttgattttctccagttgttgctttgttcttctttcttctgctttagccatattattaaaataatggtctgccaatctatcgctaaatttcatagattcagcttgttgcgtttgcatagtgtgaaactgatataataactgttggttttgttctgcaagaaattggatagatgccgttgtattgttatctacttggttttcaagccttcttctatccatttgtgtaagttttttagcctgttccgctaaatttccctgtaacgaaataacataagcatctctagttattccctctgcaacttttctttgtcggtattcaaaaacttgttgtgctctgtttctatcatccccgctaaaaggaatatcagctaacatacttgcgtattcctcatcagtcataccatagccatttaacaacctatttctttctactgcatcatcccagggtctataaccggtattagtacgaatagccgttgaaccatagagcggatcgtgtctattagcagccctagctaattcattcagccattcttcaggactcatgccctcaatgctgtcttttaatgctcttgcatcggtaagaatttgattataatcagctaacatctgatcatactgtctaagtgcattagcaagttcttctttactaagaagagtttgcgttatatattcatcgtaatttttcagatcctgagtaagttttgctagttgatgcaaagcattagtagcatcacctacaggaataccagcagcatatgccatatgaccagcattcagaaaagatactattaagcattttatcaataaattacgcataatattctacctctttcagttcttcttctgtctctaaaatagtagggggtaatttatttattctttttacaatgtttaaaattgcctgatctgcgttacattcacctgattgcattttctgccattcttttttagcttctgatgcttcataggcttctgaggtacaaatcgcgtattgctctgcttctacaaataaattaacgacttttgaaatattcagctcaggtatttttatataaatttgctgatttctttttaaatccttaattattcctacttcctcttcgggcatttcaaaggcatctacatatttagaaacgactccttctgcatcagcagcaaacagaaaaacactagcggaacttcttaatgttgaccactccggcaaatttgagtagtgctcagggctttgagtccaaaatgacatacctccgccgtgtttaaaccacgtcctagctttagctatagcaaattgagccgttccctcaacagatagagtatattgagcttcatctatttctaaaattttaggcgttgttctgtattgatctgattcaaataacctaactactctaaaaaatatttcaccatgcaccaacttagccaaactctcattatctttaactaatgacaaattatagacagctacaggcttattaattacccctatggcatcttctttacagtcaaataaatgagaattaacaccatcatcaacaaattgagatatctttcttctaatggaatcaccacatttagctacaagtgcagataatgacggcgtacttagataggaagagttctctgaaaacttcatttctagtaaatttcttatattattcgttattaattctatttcttctggtgtaaaagaattattattctcgtcatttagagaacacattgctttcatttgatttataacatgattgataaatactctatcatctttattctgagcagtagaaaataaattaaagccttttttatcttctttacttaaagtaaaagctgatgcgatctcaccgaagaaattagccatcggtatggagccttcatctacatctatacaactatatataccctcaaatttggcaaaatgtgaagccacacagtttttcagaaaagtttttcctgaccgtgtagctccacatccaatagttaatagtttttctttcacttttggagagtagaaaaaaggcacccgatcttctgattcaaatatataaaatgcttcttctgtttcatttaaacctgacgcccattcttttacgccagtgtgagatttaaaaaataacgatgccgccccatattgcatgttgttaagagatattgagcgataattgtttgttgggtaacaaggttgtaacatataataagcactaagtaatgctacagactcccacacaacttgcatactcattgttaaacgtctattcaaatcattgcaagttttcagtagttcatctttatcagtatgatataccgctaccccatattgacatattgcaagccgttcatcagaataattaatatgatctaactcctcttgcatttctcttaacattttattgttatttaatgctttttcttgttgtattgctccagtattatctgttaatagatccgttattttcacctgagaacgtgctagttcattagatttattagtcaacatcatcgaacgcttaaagcctgtcaatggattataacgcccataaataacataattaccttgagctaaaacaggtttatcatcccccgatgcaaatgcacataacggcgtaaattcatcccctatttttataatactggctaatctaacatagataggtttaacaccactgattttaagaagatcgattcctttatagttcacaatctccaatttatcactatcaatagtatatgaatcccattcatcagcaggggtatattcaaaattatcagttaggtagtcaaaattaaaggtggcaaaaaatttatgtagtttaaaagtttcattgtgtgacagtatattattaccatcagacataaatgctaatcttgcattaagtgttgataacgtatctttcagtaaatcgcattgtcttgaaaactcgtctttatctaacaaaattccgtcaaaattagatatcgttttctttaccttatacaaagcctctttatcaaagagactattaaataaattccttaaaaaagaagcagaaaaaatttttcctaactcataggacggttttatctcaataaaccacactaagcgagagctattcagctttctaacattgttcaaaaaagcctgacgatttttactcaatttatcactacgttcagagctacgcggttttaactttattttggcattttcagcatggatataatactgagttataatcgcttctattggcaaaagacgaataatgctacctagcaaatgtgaaattaattttttacggctttcagttaatcccgttggatcacagcccactaattcgattgcccctacagcattaccattgtacgtaaaaatagtatcattgttaggttcgatcccagctaagttaaaattttcattaaactcttttgccaatcccatttttatatccctatcatttaggcttgcaaccaagcaaccaataacccaagattaaagatcccaatagccccaacacaagccctcataataaaccccagcgcagcactggctttaggggcaagagtccataatgcaatagcaagacaccccgccataaatgcgataaacaaagccccaggcccaccaacgaagttaattatatcttgcaaccattttgtaattttatttaaaaaaccctcatccgattgaggtagcttgatagtcccatcagcagcaacagctagccacgcaggagccattaaagcaagtccggcataatatttagcttttttgaaaattttacatattgttgatttcatctatatttttccttagagattaaaaaaaagaaacattacgcttcttatagcccctgttatacacaaaagaattagaaaaatagccattaatccacgctctatgtgcttgcggatcttctttaaataagaatttcataggcacaaaagaaataagtaaaaaaatagccaatgacaatagagaaatgatactaaaaaacttaatagccaaaatcacagcaaaaatgtttataaacagaagaatgataaatacttctgatggtataccaaattttaatctatgtttataaaaaacttttgcgttccgtagtgaattatcacggttcaccatcttttaaaatgccccaaatagtgtattttaagggagtttatacgtgttttttttatttatgctcactttgatttgtaatgaatttcattacattctactttaagtcaacacgaaggggaagactttgcagtcacttttttataacaattacatacagcgtattttagacacgacagagctagatactttagtaaagattggggagtatttaggctcacatagacacagagttaacgatttcaaatacggcggtattagagcaaccgccgacgagtgtgaaaaaatagcgcaaattttaggcattacatttgaagaggtattttttacgcaatgtttagaaaaagctaaatctagtaaagataaggaattatttcataaatacataaataaacacacaaaaaagcctaaaaaacgcaaaaaaatacataagaaaaactaatattttataaacttccctttattggctgaatatgaaaatattgttttaggttctccgttaattatttcaacaatatcagtaatctttcggccaattttatgatctctgcgacattgaataacaacatttatttcacttttaactaaatttcccgccgttgcaaaatcaatattgagttggcttgaaataagccattgcattttatttaatgctcctataggtgtacttgaatggattgttgccgcgtttcctgttgttccgctaacacatactaagtaaaatgctacaatagcttcccctgtcctaatttcccctacccacacccgatcaggctgcgccctaagagttgtatttactaattgtggcaaactgctattaatatcattacgatgtggagattctaacgctatccctaaaggaaagtatctattgatatgtaattcttgtgtatcctctgctgttatcatcctttcatttcgatcaatataagatgccaaaaacctaagcaatgaagttttacccgatcccgtattcccagcaactaaaaatgactttctttcttttatcatatttacaaggtaatcaaatatttcctcattgaacattccaccggatagaaaatcatttttatctaaaaatactttaggggcttttcttaacgatactgtagtaccttgaggagatatcaaaggggaagtagccattattctggaaccatcaggaaacctggcatctaaaataggctctattatatcaccagctttataagatgaatttttaccgtaaggttgttttagcactgtagctatttggctaacccaagaattcaaagaactttcagaattaaaattacaatttgatttttcaggcttaccatttttatacacccatatttcatcatatctatttattaaaatatctgttactgaatcatctttataaagtccaataataggaatcatttcatcatgcacttgatcccaagcgcaagcgtctaattgattaaatacctcaacctcaccaaatacatattttctaacgtccattattcacctatctagaatttaaaagaatcaataaccataaagctaatcaaattattttgctggacttccgccggatcaaactcactaatctttttaagtttacctgaaaaaaaatcgtaagttccccaaacatcttttttataaattgaaatatatttattcattattctttcatcatcaaaaacataacaaaccatattaaatcttttctgtttccaatctctataatgttgtaagaaattatattctatttgtgattctcctttctggtttagctcaacttcgatagccattatgatattatcgttagtatgaaccattagatcaggtcttctattgaattgcaatacacttaattcagactctgatttataagacgaaaatttatctaaattatctatcataaatttttgaatagttaaagcatggacaatattaggaaaggatagctttttcctaaaagtgaacttagaatctggctcgcaatactttgcaagttcaaagccatcatttgttaatgtaattattttagacaaaaaaccagctttgctattttcaacaaccatattatcgatgataagattattaaaaaaccttgattgagaatggtaattaacccccagataactactgattaattttttagttgaaaagccaaatttagccagtagcaaaacaactttttttcgcttttccatcgataaaattttattactcacagccatcgtaagaactccgtataacaagaaaaaatccttagattttttcgggtaaaggttttaaagcagtgataaaacattattgattgccccggcaatcgataaagatagaaaagcctccaaaggcttttttatcggtgttctttattattgaccgttcagggaaataataaagctggcaacgccagttatcacgaccgcacgggcgggcgtcagggtgagcctcgtgtttttgaggcgtcacctgaccaccaccctttaggcgggcaaaggcgaagcctgaagcccccttgagttgatgtgagaaaggttaggtgagctttagcgaacactaatctttctcacatcttcgaaagggtcgcaaagcgacgcctttaggggggtggtcaggcgcagcctgacgcctttagagcacatggctcgagca

SEQ ID NO: 3836 - DNA, 28660 bp, Xenorhabdus sp.; identical to SEQ ID NO: 286
  CDS (17295)..(17621)

SEQ ID NO: 3837 - DNA, 28660 bp, Xenorhabdus sp.; identical to SEQ ID NO: 3835
  CDS (3706)..(3909)

SEQ ID NO: 3838 - DNA, 28660 bp, Xenorhabdus sp.; identical to SEQ ID NO: 3835
  CDS (2601)..(2888)

SEQ ID NO: 3839 - DNA, 28660 bp, Xenorhabdus sp.; identical to SEQ ID NO: 3835
  CDS (14438)..(14638)

SEQ ID NO: 3840 - DNA, 28660 bp, Xenorhabdus sp.; identical to SEQ ID NO: 286
  CDS (24215)..(24415)

SEQ ID NO: 3841 - DNA, 28660 bp, Xenorhabdus sp.; identical to SEQ ID NO: 286
  CDS (22270)..(22566)

SEQ ID NO: 3842 - DNA, 28660 bp, Xenorhabdus sp.; identical to SEQ ID NO: 286
  CDS (21425)..(22072)

SEQ ID NO: 3843 - DNA, 28660 bp, Xenorhabdus sp.; identical to SEQ ID NO: 286
  CDS (19429)..(19650)

SEQ ID NO: 3844 - DNA, 28660 bp, Xenorhabdus sp.; identical to SEQ ID NO: 286
  CDS (17958)..(18095)

SEQ ID NO: 3845 - DNA, 28660 bp, Xenorhabdus sp.; identical to SEQ ID NO: 286
  CDS (15106)..(15936)

SEQ ID NO: 3846 - DNA, 28660 bp, Xenorhabdus sp.; identical to SEQ ID NO: 286
  CDS (14613)..(14756)

SEQ ID NO: 3847 - DNA, 28660 bp, Xenorhabdus sp.; identical to SEQ ID NO: 286
  CDS (11336)..(11713)

SEQ ID NO: 3848 - DNA, 28660 bp, Xenorhabdus sp.; identical to SEQ ID NO: 286
  CDS (10627)..(11286)

SEQ ID NO: 3849 - DNA, 28660 bp, Xenorhabdus sp.; identical to SEQ ID NO: 286
  CDS (7986)..(8255)

SEQ ID NO: 3850 - DNA, 28660 bp, Xenorhabdus sp.; identical to SEQ ID NO: 286
  CDS (6976)..(7221)

SEQ ID NO: 3851 - DNA, 28660 bp, Xenorhabdus sp.; identical to SEQ ID NO: 286
  CDS (5969)..(6739)

SEQ ID NO: 3852 - DNA, 83080 bp, Xenorhabdus sp.; identical to SEQ ID NO: 423
  CDS (1362)..(1466)

SEQ ID NO: 3853 - DNA, 83080 bp, Xenorhabdus sp.; identical to SEQ ID NO: 423
  CDS (1931)..(2044)

SEQ ID NO: 3854 - DNA, 83080 bp, Xenorhabdus sp.; identical to SEQ ID NO: 423
  CDS (5826)..(6755)

SEQ ID NO: 3855 - DNA, 83080 bp, Xenorhabdus sp.; identical to SEQ ID NO: 423
  CDS (7060)..(8658)

SEQ ID NO: 3856 - DNA, 83080 bp, Xenorhabdus sp.; identical to SEQ ID NO: 423
  CDS (8720)..(10027)

SEQ ID NO: 3857 - DNA, 83080 bp, Xenorhabdus sp.; identical to SEQ ID NO: 423
  CDS (10097)..(11929)

SEQ ID NO: 3858 - DNA, 83080 bp, Xenorhabdus sp.; identical to SEQ ID NO: 423
  CDS (17551)..(19197)

SEQ ID NO: 3859 - DNA, 83080 bp, Xenorhabdus sp.; identical to SEQ ID NO: 423
  CDS (37881)..(38108)

SEQ ID NO: 3860 - DNA, 83080 bp, Xenorhabdus sp.; identical to SEQ ID NO: 423
  CDS (40567)..(40932)

SEQ ID NO: 3861 - DNA, 83080 bp, Xenorhabdus sp.; identical to SEQ ID NO: 423
  CDS (41695)..(42120)

SEQ ID NO: 3862 - DNA, 83080 bp, Xenorhabdus sp.; identical to SEQ ID NO: 423
  CDS (42334)..(44166)

SEQ ID NO: 3863 - DNA, 83080 bp, Xenorhabdus sp.; identical to SEQ ID NO: 423
  CDS (46006)..(47196)

SEQ ID NO: 3864 - DNA, 83080 bp, Xenorhabdus sp.; identical to SEQ ID NO: 423
  CDS (47516)..(47770)

SEQ ID NO: 3865 - DNA, 83080 bp, Xenorhabdus sp.; identical to SEQ ID NO: 423
  CDS (51566)..(52747)

SEQ ID NO: 3866 - DNA, 83080 bp, Xenorhabdus sp.; identical to SEQ ID NO: 423
  CDS (52894)..(54438)

SEQ ID NO: 3867 - DNA, 83080 bp, Xenorhabdus sp.; identical to SEQ ID NO: 423
  CDS (54451)..(55341)

SEQ ID NO: 3868 - DNA, 83080 bp, Xenorhabdus sp.; identical to SEQ ID NO: 423
  CDS (60395)..(63112)

SEQ ID NO: 3869 - DNA, 83080 bp, Xenorhabdus sp.; identical to SEQ ID NO: 423
  CDS (63809)..(64582)

SEQ ID NO: 3870 - DNA, 83080 bp, Xenorhabdus sp.; identical to SEQ ID NO: 423
  CDS (64583)..(65644)

SEQ ID NO: 3871 - DNA, 83080 bp, Xenorhabdus sp.; identical to SEQ ID NO: 423
  CDS (65655)..(66293)

SEQ ID NO: 3872 - DNA, 83080 bp, Xenorhabdus sp.; identical to SEQ ID NO: 423
  CDS (66690)..(67574)

SEQ ID NO: 3873 - DNA, 83080 bp, Xenorhabdus sp.; identical to SEQ ID NO: 423
  CDS (67808)..(68230)

SEQ ID NO: 3874 - DNA, 83080 bp, Xenorhabdus sp.; identical to SEQ ID NO: 423
  CDS (69800)..(69910)

SEQ ID NO: 3875 - DNA, 83080 bp, Xenorhabdus sp.; identical to SEQ ID NO: 423
  CDS (76490)..(77044)

SEQ ID NO: 3876 - DNA, 83080 bp, Xenorhabdus sp.; identical to SEQ ID NO: 423
  CDS (77689)..(78471)

SEQ ID NO: 3877 - DNA, 83080 bp, Xenorhabdus sp.; identical to SEQ ID NO: 423
  CDS (81171)..(82235)

SEQ ID NO: 3878 - DNA, 83080 bp, Xenorhabdus sp.; identical to SEQ ID NO: 423
  CDS (82241)..(82918)

SEQ ID NO: 3879 - DNA, 83080 bp, Xenorhabdus sp.
  CDS (70367)..(71008)
gtgcgctctaaaggactagccataaaagttagatgttgccaactttcaagcttctccaacctcaggtgaatcgggtttcttaacattagtcgttactcatgatgcctaatttgcgccgaagtttacctgaaaatcaagaatatccacatatttccgcctcaattaaagacttttctgcattgtttgcctaaaaaacgctctatttgaggctattccatcagcccaacgggtcggttcaggtaacctatatcctttcatacagtgttcaacccaaccaatggcgctgtcaatactgaccttatgaccaatggaaatatagagtggattacacctttttttgctccgccagaccaaacctatctgttcaccatgatcgatcagtggctgacgatttcctactacttctccgacaggagcatgttcaccacacaggcgacttttagctaccccgattgtcggaacatctaccagcaaaccaaaatggctggcaatgccgaaacgtcttgggtgagctattccctgaccatcaaccatcaccagatcaggacgtaagtttaacttaccccatgctgcgatcaatgccggatattcacgaaatgagagtaaaccgggaatatagggaagtacagtcgccattctcgctatttggtattcggccagcttaagagtgggataatgtaaaacagcgatggcggcacgggttatcgtgccgttttcttcaaacccaacgtcagcgcctgcaatgaattccgggataaaagaagctggaagcacatcatggcgaatcacctgctgtgctttttctatctgctcttgacgtagtgcttgagtgttgtacatagaacctattgatggtatttcgctgataatcggtgcactgcttcgacaaaagcccctgcatgctctggcggaacgtcctgatgaataccatgccccagattgaaaacatgcccattacctgtaccaaagtcttgcaggatggtcgaaacttcctgttcaatccgtgctggctgagcatacagcatagatgggtccatattcccctgtagggcgactttatctccgacacgacgacgagcatcagcaatattcgttgtccagtccagcccaagcgcatcacagccagttgcagccatcgcctcaagccattgccctcccccttttgtaaatagggtgacaggtactcggcggccttcatgctcgcggatcagcccatcgacaatcttatgcatatatcgcagggaaaactcctgataatcgcgctgggacaaaacaccgccccacgtatcgaaaatcatgacagattgtgcgcctgctttaatctgagcattcagatatagaataacgctatcagccaatttatccagcaacagatgaagtgtcgtcggctcagcatacatcatggctttaatcttagtaaacgccttactgcttccgccttcgaccatataggttgccagtgtccacgggctgccggaaaaaccaatcagaggaacctgccctgccagtgccttgcgtattgcacggacagcatccatgacataacccagctccatctccggatcaggaacaggtaactttgctacatcggcatggttaaggattggcgactgaaaacgcgggccttcaccggcttcaaaatacagccctaatcccattgcatcaggaatggtcagaatatcggaaaacagaatggccgcatccagaggaaaacgtcgcaaaggctgaagagtcacttcacaggccagttcagtatttttgcacaacgagatgaaatcccccgcctcctgccgtgttgctttatattcaggtaaatatcgtcctgcctgccgcatcatccataccggagtgatatcaactggctgacgtaataaggcacgcagataacggtcgtttttcaactcattcatgacaggctcccttgattatcgacaaaaagcgcccgcatgataacacgtcaaaagcctaacttccgtcgtgactgccaataaataaacgttcggtcatcaatcaacaacctaagatgaaaaaaatttatgtatgggctcacaaaaccaggaacaagagctaggcactccggtctattgctctcattatgttaaccttgtgttacaggtatgtagcgcgttggcaatctggtatctcacattgccataatccttcaccgttcgcgcttttcagttaatcgttggatgaattggtttacgttagttaattgacggtcgttcatgggctttcgttaagcggccatagtcaatcgactgtctcaaagctcttataaagtcatttttattgataaataacctataaagtttacatggaggagtttcgactgatgcgtttatccattttagtactggctattggcttagcattaagcactcaggcacaagccgaagaaaataaacggggctctgaccacactagcgtatcaggtggccagataaaggaggtaagtgtgaccgataaagttgaccaacaacaagataagaataatcctttcttctataccagcgtactccccttccaggctcctccgtttgataaaataaaagaaacagattactcacctgcaatcacagccggcattaaacagaagctggaagaagtggagaagatcgccaataatcccgccccacctgactttgaaaatacctttatcgcactggagaaaaccggcacgacgctggatcgggtaacaaacgtattttgggcgatgacctcagccaatacgactgacgggctgcaaaaactcagtgaagaaatgtcaccaaaactggcggcaatgaatgatgagattatgctgaacagtaaactgttcaaccgcatcaaaaccatttaccagcagcgtgaaacactgaatctggactcagaatcgctccgtctggtagaagtcatttataagcaattcgaattagcgggtgccaatttatctgatgccgacaaaataaaaatgaaagcattaaatcaggaagcggcaaccctgcgtactcaatttaccaacaaattgttagcagcaaccaaagatggcgctctgacgattaaggataaaactctgctggccgggctatccgatggcgaaatggctgcggctgcacaggctgccagtgagcgtaagctggataatcaatggctgttcgtattacagaacacgacccagcaaccggttctgcaagatctgaaagatcgcgatacacgtaaagcgttattcgaagcatcgtggaaccgggctgaaaaaggggatgataacgacacccgccaaacgctgtcccgattggcgaaaatccgtgctgaacaggctaagctgctgggtttcaaagattacgcatcatggaagctgcaaagccagatggcaaaaacaccggaagtcgcattgaagtttttacgtgatattgtccctgctgcaactgcacgcgctgaacgtgaagcaaaagatattcaggccgtgattgaccagcaaaaaggcggcttcaaagtggaagcatgggattggccgttctatgccgaacaggtacgcaaggcaaggtatgatttggacgagtcccagattaagccctatttcgaactgaataacgtcctgaataacggcgtgttctacgccgccaacctgctatatggcattacctttaaagagcgcaaagacattccggtttatcatcccgatgtccacgtgtatgaagttttcgataaggacgggcaacaactggcgttgttctattccgattactttaagcgtgacaataaagccggtggcgcctggatgagtaattttgtcgatcagtccagactcttcggaaccaaaccggtaatttataacgttgccaactttaccaaaccagctccgggccagccagctttgttatcgtatgatgatgtgatcacaatattccatgaatttggacatgcgttacacggcatgtttgccgatcaggaatacccgacgctgtcaggaaccagtactgcccgtgactttgtggagttcccgtcacaaattaatgaatactgggcccgtgatcccaaggtatttgcgaattacgccagacattaccaaaccggtgaagtcatgccgcaggcactgatggataaaatcaatcaggcggataagtttaacaaaggttatcaaatgaccgagttactgtcagccgcactactggatatgcactggcatatgctggccgcagataagccgcagcaggacgtgaataaatttgaagccgcatctttgcaagaagataagatccatctcaactacgtgccgccacgctaccgttccagttacttcaaacacatttggggcggtggttatgctgccggttattatgcctatctgtggacagaaatgctggcggacgatgcgtttgcatggtttaccgagcatggcggtctgacaagagaaaatggtcagatcttccgcgataagatattgtcacgcggtaatagtacagatttggaaaaactgtatatagactggcgaggtaagccaccaagtactgaatctatgctgaaaaaccggggtcttacggaacaaaaataaccaagtatagctaaaggctgagagttacctgatataaaacaccgggtaactctcatgaattttaagtattcactatcaatactgacgacatagtgcgaccgtttcctcaatcagacgacgggcaatcgtatcaggcccggggatcaggggaagatcatcatatcgataccaatccgcactgattagctcaacggggtcgtgctcaatatctccactctcataatcagccagaaatcccatcatcagtgaatgcggaaaaggccacggctgagaagtaacataccgcaggttacggatttttatcccactctcttccatcacttcgcggtgtactgtctcttccagtgtttcccccacttccacaaacccagccagcaccgtatgcataccattgcgatggcgctgatgttgtgccagtagaatgtgatcttcacggcggataccgacaataatgcagggagcaatttgcggataatagcgttcatcgcaatggtgacacaggcaggcccactcgtgctcagtctgctgcatttcatgaccgcaatacccacagtaacgatgtgagcggtaaaactcagccaactggactccgcgccctaccagctgaaataattgagggtcctgctctgcaatccggcggggagaatacatatctgatgccatcttatgacggacaagccacactacttctcccaaccactcgccgatagcgtaggcgacaaggccctgcaatgaccagctctcggcagttcccagtggtaagtctccctgcggaagccaaactctgttttcaagactgacaatccaccagcctcgttctatacctgtcagttttttttgcatcattggttccatcatgtgttgtgtcatatgctgtgctcattaagaatatcttaaccaagtcagtgttaattaaatgttaaccagcattcatatacaggatctatatgaacgcattctgacatagacctcgtcctgatatgcgttgacatttattaatgcctgacgatgtacttcatcagagaccgatatttcttatatatttcataagatcacattagtaggtgacattttacaaataaccatccctgacacattgcattcactaataggaataattttagtttaataaagacacctgagttaacctcggtttttgtgattgcagataaggattacgatagcaaatgtttcagggaaatagtcaaacaagaaagagcaacactggttattcctatcggaaaaacaagcgaaaatcggataagaagattgataacggtttataccatcaccgtcattgagtggaaaatacgattaatcagcacaaaattacgccagcatactggcactggcgtttatcattgtctggcgacccatgtgaaaggaataagccatgaatacaaaacgacgttgtaatagctattggctaacaagagactggctgtaaatgataagcacaagtactccctgttgtgccacaacccaggctcagtattttcatatcaatttaccttacacagccaaacgtagctattatcaacctccagtactatttcttctattacatttaggcaactcctttcgaaaattgccatataatctgcacgagttcttggtacaagcccctgtagtcgatgaatataatcaaaccctctagcgaaaatattattgatgctattccctttctcattagtaacagtatcaaataaaataataaacttcagattagggaataaattccgataatcattaaatagtttttctaatctttcatttggctcaatatgatgtgtaaagaaagtaaataatatagcttcaacggatgggttaatctcactaattatagtaacatcctgttgtttaaattttatctcacttgctccagaatatgtttctctcagatttttatttgcaagctcaatggcattagcattaatatccataccaataccattaaaaccaaattggcgacaaatattaatcaacctcaaacctgcgccacatcccatatcacacaaggtgccactaatatcaagttgactaaaaatcttttccatatgtttatcaataaaatacccacctatctcggctgagtatttggctacactagcgccatcataagggagaacattgtaattcccatcaaatatttcttcttgattagataataaatctctatatgcatataaccataatttgaaaataggtaatttcttttttatctcctcaatacttatttgtaattggcatataccatcgacaacagtcaatataccaccgtcttttaaagacgtaattacagcatcaacataagaaggctttttcttataatgttctctaagttcagattcaactattcggccatttttatcaaagtggtcaaataaattcatatgttctgctaacataactgctttacttattatattaccagaaaatgcgacatctagattatcctgtttattcattttcaatcacttccaaataatttaacatgatcaatcccttgctcaaacaagatgataattacaatgttcatttgagctggaataagatatttttgtgaacagcattccggatcacctattatgtaatagtgtttattgtgtaattcagaaatcatttcttggttacttttgaaatatcggatatgaaaatatcatatttcaaactttccaataagtaagcatatctatcagtaaatttgaatttacaattaaaactttcagcttcagttattatatttttcagttaacattttcattaccacattaattaattataattattccattcctctaacatgaaatattattattttttaaaacaccatttcactggtaaattgttaaacttttatcatgggcatgtaattacataacgatacgttacttcgtgataacgtattttacggaaaatctaagtcaaaataactttatcgtgtatttttaactcagtcaatatggctatttcttaaaaccattaatgtatatattaaatataaaatgcgtaatatattttttgataaaatatcacacctacttacatgataatcaggaaagaaactcagcagagtaagcccgccattcgcttacaatccaccctctttatcgtattctgcctgcaatctgttatattaacgacgtttctggatgttcactaaatgcttgattctctttcagccaaccaaccctatcgattttgggtttgaggaatagcgactatgtcacagcaaattgccatatttgatctggacgacaccctgatccgtggggattccagtctactctggacgaattatttatgggaaaagcagatcattactgacccccgctttatagaagcagaccagaaaatgatatcggattacagtgcggggaaactgaatatgcaggaatatctgtcagtcagtttacaagccctctgccaaataccccatgaacaagttgatatctggctgacagattttgtggaaacaacaatcaggcctctcttctatcccgctgcgaaaacacaattagatatttaccgccaacaagatattcccgtcattatcatttctgctactgtttctttcgtggtgaaaaaaatcgcggctgcatttggcgtaaataccgcaatggggattgatatggtcatgaaagagggttgttataccggtgatattgacggtatcccgactttccgtgaagggaaagttacccgcttacagcaatggctggcagaacagaatttatcgccacaacatatctctttttacacagactcagcaaacgacttaccgatgtgtttctttgccagtgaagtatttaccgtgaatccggatatgaaattgcagtcagcagcagaaaaacatggctggaagcaattgagctgggcgttagcgccacagagttaatacctgacatcgggccaatacaaaaggctcagttttccggttgcagtttccataatcccctttatactctggggtgttttcttgtcggagtgcctagcgttcagcgtatatcacggtggacgcaggctgagaccgtttattcgggatccgcagaacctgatcgggctaatacccgcgaagggaacaagagtaatccctctgctgatatgctttattgcttctgtccagatcttctgccagataacaccgttcagcaatcatcattactccctgcgagctccagacaagcaattttctcaacttaagcctgatgacaggcgatcacacagtcaggaatttgctatgtctaatgctattactaatgataccgtcacctccagcacaaatattatccctacaacggatatcgcgcctaaagcccatccggcacgtccacgtaaggcccaacgggatgctgcacaggaattcatcaattcaattcagggtgtcactttccccaattcacgccgtatctatctggaaggttcacgcgaggatattcaggttcctatgcgtgaaattcaggtatctcctacgctgattggcgggacaaaagaagagcctcaatttgaggaaaatgaacccgtacctgtttatgatacttccggcccttatggcgaccctgaagccgtgctggacgtgcacgcaggtttgcagaaaatccgccagccgtggattgaagagcgcaatgacacagagcctgtcacaactctcagctctgattttacccaacagcgcctagcggatgccgggctggatcatctgcgttttcaccattgtccccaccctctgaaagcgaaagtgggcgaacgcgttacccagttacactacgctcgtaaaggcattatcacgccggagatggaatttatcgctctgcgggaaaatatggggcgggaacgtatccgcagtgaagtacttctccagcagcatccggggcaaagtttcggtgccaatttaccagaaaacattacgccggaatttgttcgtcaggaagtcgctgcgggtcgtgcgattattcctgccaacattaaccacccagaatccgaaccgatgattatcggacgcaactttctggtgaaagtgaatgccaatatcggtaattcttccgtaacctcgtccattgaagaagaagtcgaaaagctaatctggtctacccgctggggcgcagatacggtaatggatctttccaccgggcgctatatccacgaaacccgtgaatggatactgcgtaatagcccggtgccaatcggtacagtccccatctatcaggcgctggaaaaagtcaatggcattgcggaaaacctgacgtgggaaatgttccgtgatacgttactggaacaggcggaacagggagtcgattattttactattcatgccggcgtgttgctgcgctatgtcccgatgaccgccaaacgactgactggcattgtttcccgtgggggctccattatggcgaaatggtgtctctcccaccatcaggaaaacttcctctatacccatttccgtgaaatttgtgaaatctgtgccgcctacgatgtttccctttctctgggagacggcttacgtcccggctccattcaggatgccaatgatgaagcacagttttccgaactgcatacactgggtgaactgaccaaaatcgcctgggaatatgatgttcaggtgatgatcgaaggaccggggcatattccgatgcagttaatccgccgcaatatgacggaagagctggaacactgccacgaagcgcctttctacacattagggccactgacaaccgatatcgcaccgggttatgaccatttcacctccggtattggtgcggccatgattggctggttcggttgcgccatgctctgttatgtcacacctaaagagcaccttggcctgccaaacaaagaagatgtgaaacaagggctcatcacgtacaaaatcgcagctcatgcggcagatttagcgaaaggccatcccggtgctcaaatccgcgataacgccatgtcaaaggcgcgttttgaattccgctgggaagaccagtttaatctggcacttgatcctgacaccgcccgcgcttatcacgatgaaacgttgccacaggaatccggtaaagttgcccatttctgctccatgtgcgggccaaaattctgctcaatgaaaattacacaggatgtgcgggactatgccgcaaaactggaacaacaatcgggtatggaacagatgtccgaagaatttcggactcatggcagcgaactgtatcaccgggctgaggatatcaacgatgtcaaatcagtctgaagcaattttatctgaaaccgttggccctgaaacagcctcctttgcgccaaccgaacaccggttggggttatatcccgtggtggactcactgagatggattgagcggttactggaagccggtgtcagaacgctgcaactgcgtattaaaaatctgcccgaagatcaggtagagcatgatatccggcaggcaattgcattagggaagcaatacaacgcgcgcctgtttatcaacgactactggcggctggcaatcaaacaccgtgcttatggcgttcatctgggtcaggaggatttagatattgctgatctcagtgctatccgacaggccgggcttcggctggggatctccacccatgacgagcaggaactggcgcgggcaaaagccttgcgtccatcctacattgcactggggcatattttcccgaccacaaccaaagaaatgccctcatcgccacagggtttaattgctctgaaacatcaggtagaaatcacacctgaattcccgacagtggctatcggcggtatttcactggaacgagtacctgatgtggtcgcgaccggtgtcggtggtgtagcgctggtcagtgccatcaccaaagcgaaagactggcgacaggcaacagccagattgcttcatttagttgaagggacacctgacaaaaacgttgaagaaaataatcggaggcgcttatgttgaacgatcaggaatttatgcgatacagccgtcaattattactggaagatatcggcccggacggacaggaaaaattaaaaaacggcaaggtgttaatcgtcgggatggggggattaggctcccccgccgcactctacctcgcagcagcaggagtagggcatctttatcttgccgatgatgacaaattacatgtctcaaatctgcaacgtcagatcctctatcgcacggcagatattcccgcaggtaaagccgctctggcggcacaaaaactgtctgatctgaacccattggttaatacaaccgtcattaatgaacgactggataaaaaatcactgacaaacctcgtccggcaggtcgatctgatactggattgtagcgataacatggcaacccgccatgctattaacgccgcctgtatcgaaaccggtaaaccgcttatcagcggcagcgccgtcggtttcagtggtcagcttatggtattcgaaccgccttaccagcatggctgttatgcctgcctctatcccgatcaggaagagccacagcgtaactgccgcactgcgggtgttttagggccggtggtcggtgtgattgggacgttacaggcgctggaagctattaaaatgctggcgggtctcccttcttatctgaatggaaaactgcgactgtttgatggcagaaaacagaactggagtacgttacagctgacaccctcaccacaatgtccggtatgcggaacgccccccatcattgataaaactgcgggtacagataaaaccgtttcaggaacagaaatcgtatgaacattattgtcaacgatcaaacgatcacactggatacgccgacagataatcccatgacagttcagcagttactggaacatatgcaacgtccccagtcaggtactgcactggctattaaccagaccatcatcccccgctcagaatggcatacccaccagctcagtgacggggataatatcctgctgtttcaggccattgcagggggctaatgccggaggttaaccatgttaaaaattgctgataccacctttcattcccgtctgtttacaggcacaggaaaatttgccaatgccgggctgatgattgaagccattcgcgcctccggtagccagttaatcacaatggcgatgaaacggattgatctgcaaggcaaagatgatggcattctccttcccttgcaggagctgggggttaaactcctgccaaatacttccggagcaaaaaccgcagaagaggcagtttttgctgcccgccttgcgcgggaggcgctgggcactaactggatcaagctggaaatccaccctgacgtgaaatatctgttacccgatccgatagaaaccctgaaaggagcggaacagttagtcagagagggttttgtggttctgccttactgtggcgcagatccggttctgtgccgccgtctggaagaagtgggttgtgccgctgtcatgccattgggagcacctattggttcaaataagggcttactcacccgggatttcctgcaaattatcattgagcagtccaatgttcctgtggttatcgatgccggtattggtgctccaagccatgcactggcagccattgaaatgggagccgatgctgtactggtcaatactgcaatcgctgttgcccgtaatccggtcaaaatggcgcaggcattcaaaaccgccattgaggccggcgaactagctcatcaggcaggagtggcaagccagaaatcccatgcagaagcctccagcccgctgaccgattttctggaggctttatgaacagcaataccgtggccgaacagactttcctccatcgctggcaacagttggactgggatgacatcacgctgagcatcaatagtaaaacccgccatgatgttgagcacgctctaaatagtgagcgcctgacattgaatgattttatggctctgctctcacccgcagcccttccctaccttgaaccactggctaggcgggcacagcaattaacccgtcagcgattcggtaataccgtgggattttatatcccactttacctttccaatctgtgcgccaatgactgtacctattgtggtttttccatgagtaaccacattaaacgtaaaacgctcaatgaacaggaggtcggggctgaatgtcaggccctgaaaaaactggggtttgagcatatcctgctggtaacaggggagcatcagaaaaaagtcggaatggattattttcgccattaccttcccttaatacaccgttatttcagttcagtcacaatggaagttcagccattggcacaagaggaatatgccgaactgaaaacactgggattagatgctgtactggtctatcaggaaacctaccacgaaccgagttatcagttacaccatctcaggggaaaaaaacaggattttcactggcgactggaaacccctgaacggctaggacgggcaggcattgataaaattggtctgggtgcattaatcggcttatcacctcactggcgaactgattgctatatggtggcagagcatctgtttttcctgcaaaaacagttctggaaaagccgttattccatctcctttccacgcctgcgcccctgtgctggcgggattaagcctgcatccctgatgaatgatgcagaactggtacaactgatctgtgcattccgcctgctggcaccggatgttgaactttttttttctacccgtgagtcaccttatttccgcgatcacgttgtacctctggcaataaacagtgtcagtgccggttctaaaactcagccgggtggttatgtcgaaaatgaccatcacgaactggagcaattctctccgaatgatcatcgctctgtacaacaggttgccgaagcgctggtcagatcgggcttacagcccgtctggaaagattgggatagttatttgggaaggcagggataaaaaataagcttacgtccctcatccacattgcacattgcacattgcacattgcacattgcacattgcacattggatgagggatagatcatcgcctcaacacttatttaaagagacctttttcattcagatatctttttattcttcttcggtatttacaggctgataaaaccaataccaagaagctactataaaaaataaatttaacgatacttcccgcaatgacaatacagaataaaaccccgataaccataaaaaaattaaagatattttccattatccattttaaaaatgtaaatatgcattttatgatgtgataaatacactccagtagtgccgcgaaaaactccaacaaatcttccatttgcatctccttttccgtaatacctttattttactttctatattcgggtattaatccatcataaaagcatttcatctgaccggattgcagccattatactaactcaaatcatgcaaaggcttgttcaaggctgtcatcagtttgaattcagagaacttcacctgtaatccttctcgctctggtgaacaacacatcgcaccaacaaacactcgttgcccattatgttggttgatagcaaaaggggataaccgcaacaaaggccactgcttactgtcggtggaatattgcagccggatagcaccttcccgataagtcagccgcaaccagaatttttcagagttacccgaaaaaatccccatcgcccagtcagaataaggtgcggttaatacactgccgattgttgcattaccatcggcatattcaataccggctttcagccaatggtgttcatccaccagcaacataacgcctgcctgatcgtataactgctcaaaacgcccttcaatacagagctgaaacatgaacccttctttaataagtaaatcgtcaacatagcagccgaaaatatgaccactgtggcgctgaaagccataccatgtatcacgccaaaaatcggttttattatcggttaccacgctcagtgcattatcctgacgctgccatgaagcaggctcattaatccaatgacagtgcaataaattcatcaatatctcctgtgtgatttgccgtcgatgttatttatgctcgacactatttacttacgctcaggagtaatcaaccgataccccgctagtaatgaaagtgacagcatggcaatacaggcaaaagcaccatgtaatgttatttggtgagcaagaccaccaataatcgcaggcccaagcaaaatacctgaataacccatcgtagaaacggcggaaacagccagagcatcaggcatgactttttgtcgccccgatgcggtgaaaaacattggcgccagattggataagccggcaccaatcatcataaatgccaccgctaatgtaattacaccggatgccagataaatcagcacaaatcctgaagtcgccaaaatagcacttcccagaaaaacccttcgataaccatacgcagcaatgattttgtctccgaaaaatcggccagatgtcatcgtaatagcaaatagggtataacccagccccgcctgatgactcgccatattatgcacactgcttaataagatcccgctccagtccagcattgagccttccatcagataaaccacaaaacagagaaaaccaatcaggatcacaataccacggggtacggaaaaaaatggggtatccccggcttctgcctcatccaataatccattccataccggaaacaataacaaaatagtgaataatgtcaccgcgatcatgaccaaaaatggggatattcccatcaacaacagcaaactcaccgaacctgcccccgcaattcctcccagactgaacaaggcatgaaaaccggacatcaccggctgctgtactcttttctcaatattaaccgcatgaatattggccgaaacatccatcgccccaataccagccccgaacagaaacagcacacaagccagagtcaggggagttggcaaaatactcagtcccggcaacattaaaattgccagtaacgtgaagagaataaaaaccttccggcaaccaacccgcgcagacaacatccctgcgatgggcatcatgatgaaagagccgataccaaatgccagcatcagtaatcccattgcaccattatcaagtgatagtcgctccttgaccaagggaatcaacggagcccaactcgccatactgaaacctgcaataaaaaacgagaaccttgtcgccataacaggctgttttatcaaagatactgcatactcttcagacatctgtttactccatcaatctctgtcacctaacatatttctcttataaaaaaacgatatttactcagatatgccccctcccaaattcttggaaagggcatctgcattatttatcccggtaattacattggcttaatattcattgagtaaaccgaatatttggggaatatccaccagctctctaatgatccctgtggactgttcatatttttctgctcctgacaaagcatgaggccaggcatatatccaaggaataccggcttgttttgccgccaaaatacccaaatcagtatcttcaatcaccagcgtctgcctgacatccatagctttcaatttcagcatcgccagataaggatcaggaaaaggtttggtttgtttaacatcgtcaccagaaatcaacgctggctcttcccttagattcaacaacccaagattgagcaaacacacttctcgtggggcagtcgaaacgaatccaaaaacaatctcattttgctgtaaggctgatatcagatcagtaacacctgaccgtaggtagtgcggagataatttatcctgataagtcgatataatcctgtcggtaatacttttctgtgcctgtaacggaaccccaatagaactcaatgtttgcgccagactcaagcctatcaactgctgaggcctaatctcgtgcgtgtgatcaggtgccagctcacgcagcacatcaaaatgcagctgctcactatcaacaatgaccccatcgatatcaaaaatgatattgaatttttccatcattcatcttccattatttaagatcagacaaacggatcaataccttacagtttggggtactgagtggcacttgctgtttagctgcaatatcacatccgacagtaagaaatgcctgctggtaatcgtcaaaatcaaaaacctgactgaccagacgatctacagggatcactccatcacggatcatgacgtaagcccgttcaaaactgttgttcagggaatcaatcgaaccaataacagaaaggcttttatctgcgatttttaagatatcgagactggcatgtttatctttcaaagctacattcagcaacttaccaccgggtgccaagtggtcgaaaatatactcagtcagttgcccggtagtatctacacataagtctatcaatgtagatttatctccgaattcctgtatcagtgcttcgtcaaaatcagcatataaccggcatcccacaggtaaattctggctggcaaactgcatacgatatgggtttttctcaatgatgaacgcgttaactccccgttcatgcaatgcccaaaggtacagcatccccataggccccgcaccagcgaccacagcacgaatattagtatgggtgatccccagtttatccacgcctgtcagtgtgcagcttaacggctcagttaatgaagccgcttccatactgacatgaggctccagtttaatcagcgagctctcttttgccagatattgctcagcaaacgcaccgtcataggagacaccggcttctgttcccaatttcttttcacagtgattcgggctgccggtcaggcacattctgcaatgcccacaagaatatgttgggttaatgacaacgcgatcaccagcctgaaagcaggtcacaccactgccaacctgcgcaacaatacctgtagtttcatgacccaacgtcgtccccggtactgcgacaggataaaacccggtgataatgcctacatcagttccgcatatcccacagactgcgatatcaaccaccacatcatcaggttcaatgcaggagagtggttcaacatgttggacttcaatatcccatgactgattaaatttaagcgctttcatttatgccacctcctgctggtgctgtacagaagctgtcagatcagcaaaagtcagatccagcttatggagaatttcagctaagtgttcctgtgtacaaattaaaggaggacgtaccttaagcgctcgtcccttaccataacgggatccccgcaagatcagtttatgacgggaggctgtcgcgattgcctgtgctgcaaattcaggtgttggcgtatcaaaaccaaacatatagccaacgcccctaacacccgtaatttcagaatatttatgctgcaaatccagcaaaccatcacgcagaaaagtttcgttctggatgacattatctaaaatatgttcatcttcaataatattgatgatttcgttaagagcgaccaaagacaacggattagcgccggaagtactggaatgctcaaatgattccagcacatccagtgaactgcgcatcagcacaccaccggttggaatgccaatgccaccagcacctttggcaaaaacgataatatctggctccagctctttggcataacccgtcgaagcaaagaaagtgcccgtacgcccgaaccctgtctgaacttcatcggcaatgataatgatgccgtgctgatggcagatttccctgattttacgatagaactccaccggaaaaacaatattcccaccgttcccctgaatcggttcaataatcagacatgcaatattgtcgcttgagcccaactgaatgaactgttccaaatcgatatattgtggggtttcctcctgagattcagccatcacactgaccggagcggggatttttatggagccttcaatattgatatgaaaatttttaagcctgaacgcattaccggaaacctgcgccgttgcaagcgattgaccgtgatgcgcaagaaagaaagagacgatgccagaacgtcccgtcgccttttgagcaatacgaattgcacattcaacagcaccagagccggaaacatcgcgtaaccacatgcgatctatgcctttaggtgtgtatttaaccaacttagttaaaatatactgggacatttcccgggtatacgccgaactcaaatgtgtgcatctatcaatctgttgctttaatttttcggcgagcctgtggttagtgtaaccaagtggcaaattaaatgtgcccgatgccgcatcaatatgtttttccccatcaatgattaaataagggccgtgaccgatataacgggaaagcataccttcaagagaattctctgctgggtgatagttattttccataatgactcactattattagttatattaaacaatgaagaatccaccaactacacgaaataggtgtaatcctatttaaaacttaatagtgatcacaaaaaagaataaaatacattcagtattttttaaaaattatcttatatttttaagttataatccttccaattcatatttattaatgaaattaccgaaaatatcaccttagaaaaaattttactgaacacctaatcccatcattttcattaaattctgcgcctgttgaatagcttcctgacgatgagtaatacccattttctgatacagattgcggatatgtgtcttaatggttgtcgcagccacttccagttcagtcgcaatttgttcattgctgtaaccagaataaattaaccctaatacctgccattcacgttgggttaatggactattacggataagttcaggtacatcgggatgagtaagaagctgtttaacaaatgtttcatcaaaatgcgcaaatttatgccgatgctgacgattaatttcacgcagaatacgctgtgcccggtgttgttcaaaatcaggcaggatattgatctggataagctggcgtaattgcagggccatcaactcaccctcaagcacaaagtgactgataaaccccgtgcgattagccaatttcagcgcttctatcagcacctgttgcgcttcagccttgcgaccaagctgccagtagagcaggttgcacagcaacaaattgcggtttaagtcactgaccaactccagttttaccgcatactgattcagcatgtttaaaatgctttccgcctcttcatactgaccaagcaatatctgagcacgggcaatattacgccactgattctgattgaagtgattactgaaactttcaggtttttcagcctgagccagccattgagtcactgaaatattatcttccagatgctgccagataatgatccgcaatttatccgtattcgttctccagtcccgatgataatgcccattactcaacaaattttcacaacgggttaaatggcggcgggcattatcaatatctcccctgattaaggaacatttcgccagttgagacagacattgcaattgttgctgaggctgaaagttagacagtacctccagaccttgccgggccgcctcctctgattcatcaatacgcgcccaacaccacagaagctgggagcgaatacgcaacagaaactcatgcatcggtagctgttccatatgttgttcacgaaccagatcaaaagcgtgtttttgggtttcataagcaccctgtaaatacccttgcgctagtaaaatttcgctttgctgtagcaatgcccataaagcatagtggtagacatgacagcgacgggccaactgttccgtctgcttcatcaatgctaatgcctgagacagcgcccccttacagtgcaacacttcccctttcactgacatcgcgacaatacggccatattcattatcaggcagcagagcagccagtgctttttcagccagtaaattagcgtcatccggtcggccatcattaatcgcaacctgagcacgtaatgcatcaaattcccccaatagttcagcttcaatcattatctgtttttgcttcaacgattgctctgcctgattcagtaatgcattcacctcataatgacgatgctgactctgcgccagccatgcctgtaacagcaccagacgcgggttttccaaaagctgctcatagggcaacgcattcatgcactcttccagcagcgacagttgactctggttgaacaattcccacgcatattgcagcaaaatatcgcacaataacttcgtatcccctgctgccaaagcatgatgaatagcttctcccggaaacccctgcatcaaccagccttctgccgccgtactatgcagcttcggcaggtcagcagccatttcccaatgacaacgctgtcgaagaaatgatgcgaacaagggatgaaaacaaaaccattctccgaaatcatccatgcgctggataaataacccctgacgctcaatatcttcaaggcgttgctgaccattctccatgcccgtcagacaaacaattaacccatcattcattgaacgcaggatagaactgcgcaataaaaattctcgcgtttcctgatcaacacggtttaaaacttcatccaccaaataatcggacaaatggccagcattaatgcctgagaggcgttttgccgatatttctgctgtattaccagcctgacgggcagacagagcaatcaactgcaacgctgttgcccagcctgccacgtcatgacataactgcctgcaattatccgcgtccaatgggctgggcaaccgtttatcaaaaaattgctgagcctcctgatagttaaacgctaactgctggctgtcaaactccagcaattgctcacgcacccgtaagttagcgacccccagagacggtaattgacgggaaagaataatcagcgtgagattttccggctgatgacggagaaaaaaacgcatggcttcatggataagattatttactatcaggtgataatcatcgatcaccagaaacaatgactgtttccattcattcaattcaataaacaactgtgcgaacagcgccgataaactggcatactggtgtttctgcgccagaacctcacttttgacacaatgcccctgtgtggcctgttgaatcgcagcaatcagataactggcaaaacgctccggctgattatcactatcatccagagaataccaccccagattaccctgccctaccgcccattgtgacatcagcgtagttttaccataccctgccgggctggttaccaataccaaacgataattctgtgcttcattgagctgcgctaacaggcgctcacgcatgaccatatgattgaggcgaagggggcgactgagtttcgatgggataagcattgatttcctcccctcacaagcaatgagtagaactgatccctgtaactttgttgtcatgttattgagaaatacaaatcagtaacattcataaataaacacccaaatttagagaaacgtgagctatttgcaattaggttgattgattagattgtgttaagttgcaccctgtcacattctttaactgaaacgtttctttttcctgaataaattgcgaaagcgcacgaaaaaatagctacgccctaatactcatccccgcgaatatcctgacaggatgatgtttcttgtccactgaaccttcagcatatcagactcaatcatctccatattttccttattcagtgacaggatgaagacgccatgaaaaagccccaacttgataaagccgaattccaggctgcgctgacccggcagttgcagcgctttggccttgatttagcacagggagtaacaacacatcagtggtggcaaacgatcagtgccactcttttggaattactgcctgcttatcgccaaaacaatcaccaccaaaacaatcaccatcaaattgataatcttccgccgaccgatggctcaaaaggcaagcaacggcatgtaaactatatttcaatggagttcctgatcggtcgtttaacgggtaacaacctgctgaatcttggctggtatgatgatgttcaggcgtatttagccgaatatggtgtggcattaagtgatgtgctggaagaagaaactgatcctgccttgggcaatggcggtttaggccgtctggcggcttgttttcttgattcaatggcgaccattaatcaaccggcaatcggctacggtcttaattatcagtatgggctgttccggcaatccttcgagcaagggttacaaattgaaactccggatgactgggagcgcaatacctatccatggttttaccgcaatatacaactgaatgttgatgttagtttcggcggtgaaatggtcacaacaaccgacggaggtgaaatctggcgaccggcttttaccctgaccggggaagcgtgggatcttcctgtcgttggttataagaatggtgttatacagccgctgcgcctgtggcaagcaacatatgataatccctttgatttatcactgttcaatgatggtcagttccttcatgcggaacagcagggtatagaagccaccagcctgaccaaagttctttatccgaatgataaccatcgggctggaaaacgcctccgcctgatgcagcaatattttcagtgtgcctgtgctgtggctgatattctgcgtcgcccccagctggctggtcgcaaaatacaggagctgccgcaatacgaagtgatacagctcaacgatactcaccccacaatcgctattcctgaaatgatgcgcctgctgattgatgatctccaactagattgggatactgcatggagcattaccgggcaaaccttcgcttatactaatcacaccctgttaccggaaggtttggaacgttgggatgaacatctcatcatcgaattactgccgcgccaccatcgtattattcaggaaataaacaatcgttttcgtaaaacggtagaaaaaaactggccgggtaaccaacaaatatgggaaaaactggcagtcatccatgataatcaggtgagaatggctaatctttgtgttgtagcctgctttgcgattaacggtgttgccgcattgcattcatctttgattgtgacggatctcttccctgaatatcaccaattgtggcctcaaaaattccataacgttaccaatggcgttacaccacgtcgctggttaaaacagtgtaatccagcactctcttcactaattgatcagacattaggccatgaatggctcagcgatattactgaactaaaaagactcgaaccctacgctgctgatgctgcttttcgtgaggcttatcgcaccgtcaaacagaacaataaaatccgcctttccaactacatcaataaaacaatggggctgaagctagaccctcatgccattttcgacgtacagatcaaacggttgcatgagtacaaacgccaacatttaaacctgctgcatatcctctcactttatcgacagattcaggaaaatccggcactggatatttacccgcgtgtttttctgtttggtgcgaaagcggctcccggctactatctggcaaaaaatattatttcagccatcaaccacgcagccgaaaaaatcaaccatgatccgatcgtacgcgatcgcataaaaatcgccttcattcctgattacaatgtttcaaaagctgaattgatgatcccggcagccgatgtatcagaacaaatctccacagcaggaaaagaagcctccggtacaggtaacatgaaacttgccttgaacggagcactaactattgggactctggatggtgcaaatgtcgaaattgccgaacaggttggcaacgacaacatttttatcttcggacatacagtggaagaaacaaaaaccttactgagagagggttatgatcccaaaaacattctccaacaaaataagcaattacaacaaataatggattccctctccagcggtgagttcagtcacggagataaacaggcatttgatttaatgctgcacagcctgattgatggtggtgacccttatttagtattagctgattttgcttcttactgtgccgcgcatcagcagattgatgaactctaccgtaataccccgcactggacacgaagcacgatccttaatactgcccgtatgggaacattcagttccgacagaactattcaggattatcaacaacgtatctggcaggttaagcaggttaaatagaggatcataatggaaaacaaaagccttgaggatttagcgacagaagctggcattgccactgaatatattaatgcctatggcaaaccacaggctattcctgctcagataaggcataagatcctgcaagccatggaagaaaatataccggtcaaaaagccggtttctgatccatcggttgcagccttacccacagtgaaagtattaattattggtcagtcattcacttttacgctgaatacttccgcccaatatcagtggcaaatacagacagaacaaggaacaaacctgcgtggaaattgccaatatcaactgatactgccagcctctttgcctctgggttatcacacgctgagtttagtcccctcatcagatcccaaagactcagtacaacgccatgttatgcagatcatcatcgcaccggaacgctgttacgaaccagaatcactgataaaaggcagcaaattgtggggagcctgcatccagctttataccctgcgttccgaaactaactggggaatgggtgattttggcgatctgaaaaaaatgttacgggaactggcacaacgcggcggcgcttttattggcctgaatccgctacatgcgatgtatcctgccatgcctgaaaacgccagcccttatagcccctcatcccgtcactggttgaatatcatttatattgatgtcagtcaggtagaagatttccaatccagtgccaacgctcaaaagtggtggctgatgccggaaacccaaagcagaattcagagtgtccgccaaacagaatgggttgattattcgggtgtgatggcactaaaaatgacagcattacgtttagcttatcaacaattcaatactcgaactgataccgatcccctatatctctcattccgtcaattcattaatcaaagcggtaaaagtctgtattctcaggctgtctatgatgccctgcatgacaaactatacagtgaaagtcacacttattggggttggcccatctggcctgaaaaataccgcgatccagataatgatactgtacaggcgttttgtcacaccaacccacaggaagtggagttctttctttggttacaatggattgctgacaggcaactggctgactgttttcgtgaaagtcagagccatgctatgccgattggtatttatcgtgatctggccgttggcgtggcacaaggtggttcagaaacctgggataaccgggaactctattgtatgaaagcatctattggtgcaccgcctgatatcatggggccactggggcaaaattgggggcttcctccaatgaaccctcatgtattacaggctcagaattatcagccttttattcaattactacgtagtaatatgcggcactgtggagcattacgcattgatcatgttatggctctgctcaggctttggtggatccctcagggagaaaccgcagctcaaggcgtttatgtccattatcctgttgatgatttactggcaatactggcattggaaagccagcgtcattgttgcatggtgataggcgaagatttagggatagtaccggaagagattgttggaaagttacgtaaccgtggtatctattcttataaggttttttatttcgagcgcgacgggcaaggtgaatttaaaccaccggagaaatatcaaacacaagccatggcaactatcactacccatgatttaccgacattatgtgggttttggcaaagtggtgacctgaaactgggtgagtcaattgggttatatcctgataaggcattactcactgagttatataatgaacgcgaacactgtaagcaaaaactattacagagtttaaatcatcatggttatctctctgaatcagaaaatatagcaaacacactaaccccattgcagccaaagacatcttcatcacagataccaacgtccgttaatcaaggaatacactattatctcgctagctgtaccagtgccttgttgggcttacaacctgaggactggctgggtatggaaaatcctgtcaatgtcccgggcacaaccatggaatatcctaattggagacgtaaattaaccgtcacattggaagacatgttcaaaaatacagacataaataatttattggaaaaaatagataaacacagaagaaaagtgccataactacaggcaaaaaatattgaacttcgtaccctttatacaggtacgaagttttgctttacctttactctttgatgaatttccgaacagaccgtcatcccttcacaccaccagcagtcaatcctccaactaaccaacgctgggcaagtaagaaaactactgtaataggtatagcagaaagtacagcagcggcggcaaagtcaccccagaggtaattttgtgggtgaagatattgctgcatgcccacagctaatgtgtaattatccacatcccttaacaataacgatgcgactggtacttcagtaatcgcaccaataaaagacaggataaataccaccgctaatatcggtacagaaagcggcaacagtatcaaacgaaaaacctgccacgatgtagcgccatccagcatcgccgcctcttctaaagaacgatctaacgtttcaaaataaccttttatcgtccacacatgtagcgcaatcccccccagataggcaaaaatcacaccaccttgggtattcagaccgagaaaagggatatattcccctaaacgatcaaacaaggcatacaaggccaccaacgacaaaacagcgggaaacatttgaaaaatcagcatgcctttcaataaggtatttttgccacgaaaacgcatgcgagcaaaagcataggcacacgttgttgacagcgcaacaatgccagtcgcagtaatgaatgcgacttttacagagttccatagccacagtattaccgggaacggaggaggagtaatgcgcccatcagaggattcaacactatagcccagcgccaatttccagtgttcccaggaaatcgactcagggatcaaacttcccgtcgcgaaattccccggtcgtaaagagatagcaatgaccatgagtaatggaaataaaatcgaggcgataaaaatcagcatgaatatatgcgttgcccatattcgccaccgctgtgatctagattggaccatcgccatgacactacctccttaatcaaatttaattcgtgtcgttttcagattaatgattgccaatgcccccaccaacaagaagattaacgttgctatcgccgcggctaatccaaagtcttgtcctccatcaccctcaaaagcaatacgataggtatagctgactaatagatcggtataacccgctggtgtcgttgtcccaatatggtccggcctgccgttagtaagtagttgaatgagaacgaagttattgaaattaaaagcaaagctggcaatcatcaatggcgtcagaggcttaattaacaaaggaaaagtgatatagcagaaattctgtagtggcccagcaccatccatcgctgaggcttcatacagatcatcaggaatcgctttcagcagccccatacaaaggatcatcatgtagggataacccagccacgtattaacaataatcagcatggttctggccagagtcgggtcagtaaaccagtccggtttcaaaccaaatagcccattgagcagtagattcacctcaccaaagctctggttaaataatcctttgaaaatcaggatagaaataaaggaagggacggcatacggtaagataagcaacacacggtaaatcgccctacccttaagcgcttcccactgcacaatgcaagccagaatcatgcccagtgccacagtcaatattaccgttaacagagaaaagaacaccgtccagacaaaaatggagagaaaaggtttttgaatcccttcatcctgaataacccgcagaaaatttttccagccaatggaaaccgtaaacccgggattcaacgtcccatcgccccattccccttttgcatcaatggattggtaaaaacccgtctccatattcgggcgatattttacacctgtctgattatcaatcagagtgtgactatctttctccagagtataaagggaatgtataccggaaaactgccgcaaagagctcatgcgcaatctactgttatccggcagaattactgtgatttgtcctaatgcctgccggttctgcgtaatggtacgcaatgtggcagcgtcatgattaaagcgggttacctgctcatataatggcagaatgattttttctttatctgataaagaaaaaggctctgataccaatacattcgaactatcagcaacatttaataccaaaatccactgttgatcctgagggtaaagtttgaaattaaatgactggcctgtttgatagtgtctactcatcaatacggcctgagcccgctcaagggtgagttggttggtactgctatagtttgtaaaagcaatcgtaatggtacaaataagcggaaacagcacaaacaataacattgcggcaatacccgggtaggtataacgccaggcataagacttactattagcgaaaacataaacaccactacccagtaataccagtatcagaatcgcaaacaggtattccccttgtgcgtacatcaacacaatcaaataaccggtaaaagacaggctcagtcccaccgcaaaccatttcaggacagaacgtagccaccatacatttttgttcaaccttgctgacattatgcacttcctgttactagaagtttattacctgcgagcctattcccacgaacctgttttactgagattcaataagaaaatctttcctccgataaacaaaaagcccccttcaaaagaaggagactaatgcgcgtttattttacaatccgggcttctgcatcattgagagccgcatctacaggttgtcggctgctgattgcattaagtaccgcactacgcatggcgtaccaaaagctgctcatttgtgaaatattcggcatgatttcgcctttctgggcattgttcatcgtggcagcaatacgtggatctttggcaagaatatcctgataagacttcaatgctacagcacccagcggcttatccttatccatcattgctaagccatcattagtcagcaggtagttttccaaaaactccttagccagttctttattgggactggccgcgttaattcctgcgcttaaaataccaacaaaaggtttagaaggctggcctttaaaagtcggcagcaaagtaacaccgtaattaattttacttttgtcgatgttcccccatgaccaaggaccattaatagtcattgctgtcgtacctttattaaaggcggcttcagcaatggaataatcggtatcagcactaaggtgtttgttttttaccagactgactaaaaattccagaccggctttagaaccagtatgatttaccccgctatccttaatatcgtaggtatctccctgcctcttaaaggcatatccaccatcagcagcaatcaggggccaggcgaaataaggttcctgaagattgaacataatcgcacttttcccctgcttttttagctcgttatctaatataggaatttcttcccatgttaagggtggtgacttaaccaagtctttattgtaaataagagaaagagcttcaaccgcaatagggtagccaatcaatttgccttcataacgaaccgcatcccaggtaaagggaaatagtttgtccataaaattcttatcaggcgtaacctcagccagtaaccccgactgtgcgtagcccccaaagcggtcatgtgcccagaaaatgatatccggaccatctcccaccgcagcaatctgaggatatttttcttccagtttatcgggatgttcaacactgactgaaatccccgtatcctgcataaatctgtcaccaacctgagccagcccgttatatcccttatccccattgatccaaattaccagcttaccttcttccagttttgcgaaagcaggaacagaaagtacccatgcagataaaacggaaagtatcagcgcactagcacctatttttgagattctttttgtcatcattccgtccttttcagtatttgctgatttaagatgaattcttcactacaccgccagaaaatatttcatagtgtgcaattaatagaaagcagactcatcctccccttatctacgcctctcatcaaatgaatgtgaacgtgattacaaaagcactgtaaaccatgccaacagccttaaaaatgcaccaatttctggaactaaaatcacattttgttccgtgaaatatcgagggattttgtaattctactaatctcatcctcctaatccctcccccataaaaaacgataaaatggaggatttttattcctgttattttgcacacaattctgccatctacttttcgctacaaaccaggatggcaactccgaggtaaacacatgtccagcgtcacacttcgtaatgtatataaggcttatggtgaaaatgttatttccagaaatctcaatcttgagattgatgaaggggaatttgtggtttttgttggtccatcgggatgtggaaaatcgactttattaagaatgattgccgggctggaagatattacgtccggtgaaatgctgattgcaggccaagtaataaatgatgtaccgcccgctaaacgaagtatcggcatggttttccaatcttatgcactttacccccatttatccgtagcagataacatgtctttcggcctgaaactggcaggcattaaaaaaagtgagattcaaaaacgggtagagcaggtcgcagaaactctccaactcgctcatctattggatcgccgcccaaaagcactatccggtggccagcgtcagcgagtggctattggccgtactctggtcgccgaacccaatatttttctactggatgaacctctctccaatctggacgctgccctgcgagttcagatgcgtatcgaaatttcacgtctgcataagcgtctgcaacgcaccatgatctacgtcacccatgatcaaaccgaggccatgacattagcagacaaaatcgttgtattggatgccggcaatattgctcaggttggtaaacctctcgaaatttatcactacccggctaatcgttttgtagccagtttcatgggctctccaaagatgaatttcttaccagtcaaagtctctgcaaccgctgttgatcaagtacagatcagcctgcctaatgggcaacatgtctggcttccggtagaaagtaagggagttactgtcgggagtaatgtgtctttgggtatccggccggaacaccttttacccagcgatgtcgctgacgtaacactgacaggaactgtacagatagtagagcagttaggaagtgaaactcatatccatatccacatatcaaccatccgtcaaaatctcgtttatctccagcctgatattgttcttgtagaagaaggggcgaccttcactatcggattagcccctcatcgttgtcatctgtttcgggaagacggaacagcatgtcggcgcctatacaaagaaccaggggtttaaaacctcgccataaaaaataacaggagaacaattatgcgcatcttacctctctcattacccgtgctggcaggattattttccatgcaggccgctgcggtagacttccacggttatgcccgttcaggtatcggctggacaggacgtggcggtgagcaaacatgtgctcaaagtacaggggcacaaagtaaataccgcctcggaaatgagtgtgaaacctatgctgaattaaaattggggcaagcattatggcaacaagaagataaacgcttctatttcgataccaatctggcctatagcgcagctcaaaaaagcgatcatgaatcggtcaacccggcattccgtgaagtgaatgtacagggaactaacctgattgactggttgcccggctcaacactgtgggccggtaagcgtttttatcaacgccatgatgtacatatgatcgatttctattattgggatatttctggtcccggagccggtttggaaaatattgatcttgattttggcaaactttctcttgccgtgacacgcaatactgaaagtggaggttcatatcgctgggttagtaataaaaatcaaaataccgaaacctctaatgatgtttttgatgtccggctggctgctctccccatcaatagcggtggtgtgctggaattaggtgttgattacgggcgggctaatccacgcaagggttatcatttagccaaaaacgcttctaaagatggggtaatgctaacagctgaacatacccaaagtatgttggatgggttcaataaacttgttgttcagtatgcgactgactctatgacttccaataataatggtcgttccgcgggagccagtaccgacaataatggtcatatgctacgtgtgataaatcatggcgctatcaatctggctaaaaaatgggatttgatgtacgtcgctatgtaccaaaatattgatcgcgacaatcgtaacggtaccatttggtataccgccggtatccgcccaatgtacaaatggacacccaccatgagtacgttattggaagttggctacgataatgtcaaatctcagcgtaccaaagcgattaacgaccagtacaaaatcactctggcccaacaatggcaggcgggtgatagcatctggtcccgtccggcgattcgtttgtacaccacttatgctaaatggaatgaaaaatggggttatgccaataaaactcccggttataacgatgggttagcttatcgtgacacaactgctcaccatttcagccgtggtaagaatgatgagttcacgtttggtgctcaatttgaagcctggtggtaatttcgggtaagggtaaacgatgaaaaccaaactaattactctcttctttagcggtattttctcctgcataagcctccccttagaggcttatgcagcaggtactgtatctgagaaggctatgattaatccggaaataaacaacagcgttgcttattccatacctgtttctgttttacagaagcaggtatggaaaccgataaagaccccggcaatgcacacaattgttctcagtcggacttcatctcagattaacgaaggaaatattcagggagcagttgccactcttgctttaccggccagtcagggtgcactgaaaatgacgttaagcagcctgataaaagataagcaggtctatttacctaacgtgttggtgtttgatgaaaaatttcagcctgttgcactttatgcaagccattctttttcctatcaacaaccgggggtcttctcgggggaacgggttgaaagaacattaaaaataacgccagtgtcagggcagaaaaatatatatttgttgatttacactacccattcagacctgcaaacatcgaccaaaatggttgatccagccaaagcctatgctcagggagtaggtaacgcggttcccaatattccagacccagtagctagccatgctgataccggaattttaacgctgaaagtgacgtcagaagaacaaactaccgaaaacgtattggctgaccattctctcgtagatcgaaagcctaatagggtgcctaaatctatttcaggtgaaacagaacagcacttcaatgaggccatcaagaaagcgatcaaaaatggagatatcaataaggcactgactctgttagatgaagctgaacgccttggttcatcgagtgcacgggaaacatttatcaaaatgataaagagcaaaggatctacctgaaccggtacaaattaaagccacccgtttagtaggaataaaacggttggctttaatcattattactcatcatatttagtcattaaattctgtatttacgattgattcaaccagcactttgccattacgcgtgagcttaattttatcatcatcaaaaaatagcaactgacgctccgccaaattacataatttattataaatacgtttgttttcttttatcgcatgaccaaatctttgctggtgaacatcgttgtctaccggctggcaggtagataacgccattttaatagcattttcttttaccacagtgctttttttcctctgagacaccggttcgcgtttccatgaaaattcttttcttattatttttcaaaaaccctgcaagtttaattgattcaacaacaattccggacatcggaacgccatcaaaggagattattaacacattataatcatcttcaatatccacgctcacctccacataatttaataattaaatggaaacaataatatataatattttcaagctaaactgacagggtcttatttcatgaaaacatgatcaaaaatagcgaactgtgatatttgcaataaaaacccattaatacagtaagttctatatacttatcttaacattaatctaaatatatcattttttactatttatcttagaaaaagaaatatctcttggtttattggctatcatttttgccattttttcaatggaatctgtccgcaatatatatagccgcttcaaagaaaagggattgtctcccaatttaacttttccctgcacagtggtaaccgctaaatgaaaacctgcatttttagccgctttcatcgctgacatattatatccgccaaaagggtaggaaagataaattacatgggggttaaattgtgataatgcccggcgggagcgttcaaaatcatacagaatattccggtatgaacgcttgaataatatgggtttcttattcttacctaatcgatgcaagaaatgagtatgggattgaaaatcaaaaacatcctgcatagataacaattcattaagactcaaaaattgtaggttattgggattccatttctgaggatgacgtttgattctggatgaaatgataaaaagtgtcgccttttgttcattttttctcagtattgggtaagcataacgatacacggacttcaatccatcatcaaaagtcaaagcaacgactttcgccggcaggttaactgcaccttttaagtacccttccaactcatagagtgaaatcgtggtgtaaccagcctgttttaagtaatccatttgattacggaaggctttcaaagatgtggttgttgatgtatgcagaaaacgcttattttctttctcctcaaggagatgatggtatgtcagcacaggtatgccattatcctgttcagcatcctgagcacgaatatagcccagacgtcctcccagattaatttcataccagatattatgcttaatatcctgtaccttctcctgaattggatagcggagatctgccgccagtactgcaattggcttactatcggctttcaacgtgctgtaaaccttcgttttctgaaaggtagctaaaccctgagcgattttattattgagaatggggaaaggatcactggggaatgaggctttttttatttcttttaaatggtttttagcaatgtaacctttcccattaccaaacttaaatacgtaataatcactgtcttctcgttcatcctgagccactttcaggctttgcccttccctgaagataccaacctgaatcacatgctctccaaccaaggcataaatttcgctgtctctgatgacctccatatagcgatagctttccccatcaggctgatacgctgcaacctgattggcgaaaaagaataatgacagcaagaaaatcatggcagcaacattaacgatttgtctcattctgttttccacccaaaatcactttccgtctatatttcgacgaaaagacgatatggtatttacacagccactttgtatgcgctgagctttgtgctttaatgcccataaacacctttccttatttgagttacgaatattagcttgaacatctatatcgtaacggaaaggtgtttttcttggtataacctttgaactccacccgcaaagcgggtggttttatgtttaagacgctaacgcgacttaaactggctaaagccataaaataaaaatgccctctaccagagctgtctttcatacacaaatcccccgataaaaaatcgggggattttttgaatctttttccactttaccgatctgagtaataacgatttcattgaggtacggtaaaatgttccaaactcacgcagaacaatgggctgatgaaactttttctcgcgcaaatttgggcgatagtcggcgtacaaaacggcttatcaaattcaccgcctcgttagccaatcatatcgggcaatctattgtgcaatcactcaaaaccccagcggatattgaagccgcttatcggtttacgcgtaatcaggccattaacgcaacctctattgccgaggccggatttgcggcgacggctgaacacgccaaatcctatgactgtttgctggcattggaagatacgacctcactggaatttactcatcagaccgtccggaaagaaatgggctataccacatcccgaaaaagtgccaccggtctgcatgcccattctgtttcactttttgctcccaaagaagaacagctcattggcctgattgaacaaacgcgctggataagagcgctgagtcagtatggcaagaaagcgcaacgggcttcccgtccatataaagacaaggaaagttataagtgggaacgggcctctcaggccacagaagcccgccttggcagtgagatgaataaagtgatttcggtgtgtgatcgcgaggcagacatcattgactatctgacttataaaatcacacatcaccagcgttttattgtgcgttcaatgcaaagtcgttgtattgaacaaagcccggataagctttatcagttcagtgaatctttacagccggcagataaaagaaacgttcaggttaagcagcgaggtggacgtaaggcacgtgaagcagtctgtgagatccgttatgcgcctgttaccctcaaaatgccggtcaataaacggggtgaatcggtcgccctgtattatgtgagttgtcaggaaaccaataacgataaagaactgagctggcacattttgacctcagaaccggtaacctgtaaagaagatgcccaccgtattctggattactatgaaaaacgttggctcattgaagagtttcacaaagcgtggaaaagtggcgggacacgggtcgaagcgctacggatgcaatgtaaagagaatctggaaaaaatggtggtgatcctggcgtttattgcggttcgtgttcatcagttacgctatgtgggactcaataaatcagaggcggagaaacaaagttgtgaaacgttattaagcccgttagcgtggaagttattgtggacaaagcaagagaagaaaaaactccctaagacagccccaagcgtttattgggcctatattaatttgggcaaactggcgggctggtatgactctaaacgaaatggccgagtagaatgggaaaggctgtgggaaggatggttcatgttacaaaccatccttgacggttatttactgtccaagtctcttgacctatgaaatatgatcaagagacagccaacacgcagggtaagtttgctgccactttgtagtgtcagatccccttgcgcatcaacactgacaacaccttgaattttttcagccagatctcccttgatttgtaatgcacgatcaccatcaatttgctcaatataattgccggtggttttatgatcctgctgaccttcaactgtaatcttgcgattattagctatcaccagctcatcatcgtgaccgatactggttgtacggtcatagttaatgcgttcatcccgcgaattgcgcacttgaatggccaggttcttctgagcatgaataaagatttcttcgcgatctttctcatcttcaaaacgtaattcgttaaatccttctcctttgtgggtttttgaacgtatcgacatctgcgtttttgccataggcaggcggtttggtggaatgttgttcgcgtgataagctcgcccgacaataataggttggtcaggatcgccgtggacaaaatcaaccaacacctcatgaccaatgcggggaatagcaatcattcccattaattgtccagcccaggcttgactgacacgtacccagcaagaactttggtcattgaattcaccatacctgtcccagtcaaactgaatacgaacgcgcccatgttcatcacagaagatttcttctccttcaggcccaacaacagtggcaatgtgtgggccttccattttgggtttgggatagggggaagggcggtaagaattttttcgggtggtcaaggtaaattggttggacagccatgttccactatcgccggactgggtttcatctgcttgtggctggcggccagaatgagtaatgtggataagctgccattggtcgttgaaagtttctctggggtgatccgtcaggttaaacaattgccccggccatatggcaaaacagtctccatggccgttgccaagctgagtatcccgtcgcaggtattcaagatgatactggcttgcccgctggcctagatcatcgtccttaaagcggctggggaaatcgtaataatgatagctgttcaggatccgctgattatttagattgcgcccttcataccagaactcacggttccagcgggggttcttaaacgttctgtctttagtggtgatattggcaacaccaacacgctctgaccagctaaattggtgaatacaggttgtttcacctgtgacgtcagcttcggggcgataaggaacgctaatgacctgattaagggacagactggaatcgtgaaatatgatgcgttgctcgtgctgctcctgatcgaaaacgaaatagtaaaaaataccctcatcagccagtaagcgttgaataaaggccaaatcactttcatcgtactgaacacaaaattcccgtggtggatgtttataacccagagcaaagaaaaaactgcgtacaccgttttccctgagcaggctttccacaatatccacaacggactgattttggaaaatccggctattgacccgcagagaagtacgccataacggaggttgaatagtgatacggtaatgactaacatgacgtccggtggaaatcaatgaaaattgagtgaccatccctgtgatttgtcgttcaacttgtccattgcgatgtacggcaaaagcggcattactgtcgagaacattggcaaagtcaatctccgggcttttacaggttagagtggcttccagtcggaagggagaagatagtgattcatgtagggaaaaatcgacaacagcaaaggtttgttcgggtaagttttccgtaatcagtgtaaatcttaaccctgagcgatcaaatagttggttgattttatctattaccctgctcatttgtgctctccatgatattggggtggatcaatttattagttcactacgactctatgaattcaagagatatttccatttagctgattttaatatctgttttattgctatttgtttgagtaagtattatttgtgatagtgtttttttaggcggtttattgtaatgttgtttatttagctcactatcagggaatggcgcaggaattgatttttatgcgggatgttattatccaccttaaaatcaccatcaaattttttaaatattttattgattttattaattccagtaaagtcattccatgttatttcgggtatgagtcctgcactgcgaagtgctttccaagtaaaatcaatacaactattcgtcgcaccattatatccaagattaaaatctgggttatttccacttttagttaattcgccgtatttcttcaatttattatagtgttcttctgcaatttccatggtacgactatatcgtggattttcataatgtattgtatcttcttttgtcaccctacctgctcccgtaattcctgatacaataggtgcaaatccataggagtcattaacataactgtctgaaatttcataccacatatgtccagccgccgatgttactctttcacctttttcaaagtgaggcgttccatcatcgttattaagaggcgtgcccggatgcgctgcgtaaataataacgatataccttttgtctaaagatttaattaaattttctacaaattcgggtcttgcttgtggaggtgcacacgtagcacatggttttcctgcggcataatttgttttttgatcaggataagcactggcattgatacgtttttctttatttttccatataaaaggttaaaaccaccgactttagtcggtcagctttagctgcgatactgtgttgcacgagaggtgcaatatggattacagatatggcagccacacggtatttcagattgagtatcattttgtgtgggtaacaaaatacaggcgcaaagtgctaacaggtgaagttggtttacgggtgagagagttagttcgtcagacctgtgaagcgttcgaaatcaggatagtagaaggggtcgtgagcaaagaccatgtacatatactggtgagttgtcctccgagcttagcgccctcagaaatcatgaggcgaataaagggaaggacagcaagtaagttgtttgaagagtttgctcacttgaaaaagcgttactggggtcagcatttttggggcagaggctatttttgtgcgacggtaggtcagttaacggaagagatgataaaggcctatctggcgcatcattttgaaccgaacccgaatgatcacttcaggctggataattgacgcatcgtttagccgatgcgtatccggactttcagtccgttaatcactaacccaccgactttagtcggtggttgttgagtttcttccttcttattgtgctgcttaggcacggggatcaacgtggcatcaatgatttgccctcctctgggaatgaatccctgtgctgacagctgatgcttcgcctcttcaaataacgctctggcaccttcctgcccaatccgtttttcgaaacaccaaatcgtgttacggtctggaatattaatgacatcggtcaagcgacaaaaacgttgccagctcattcggtcaagcaattgatattccattttttcatcggaaagattatggaaatgtttcaggataatgatgcgaaccatcacctccgtcgggaatggcgggcgtccccctttgggggaaataatacgtgggacgatacggtctagggtgtcagccagtgccgagaaatcaacatatttatcaagaacaagcagcggatcacctaattcatcgatttttcgacggtgatattcggatgcctgtttgtctttttttaaagcagaacgaggcggtatcatgatggcgctaccttgcagagaggtactgtgcctacattttactcaattttgtggctgtgaaaagtttttagaggttcccaatagtattaggatggtcttagttagttagttagttagttagttagttagttagttagttagttagttagttagttagttagttagttagttagttagttagttagttagttagttagttagttagttagttagttagttagttagttagttagttagttagttagttagttagttagttagttagttagttagttagttagttagttagttagttagttagttagttagttagttagttagttagttagttagttagttagttagttagttagttagttagttaataattataaaagtttgtagaccttgtttaagattttgtgtaatcgccatttccaattaaacatgaccgtctaaacggtcaccaaattcaatcataaaacgactcatcgcaagacgccaatcttggataggcatagtccattttttagacgctgcttgaatcgctaaccagatcacctttttcaccgaatcatccgacgggaatattttgcgtttcttgatcgcatgccgaatgacgctgttgagcgattctatcgcatttgtcgtgtaaatcactttccgaatttcagcgggataggcaaagaacgtggacagattgccccagttttcttgccagctccggctgatttgaggataacgctcatcccattgttcagcaaaagcgtccaaagcctgcaaagccatttcttctgtcggggcttgataaatctgcttgagatctttaacaaccgctttggcctctttccaggatacatagcgcaggttattacgtatcatgtggacaatacacatctgcacccgtgtctgcgggtaaacggtgttaatcgcctctggaaacccttttaatccgtccacacacgcgataaaaatatctttcagtccccgattatggaggtctgtcagtacgccaagccagaacttcgccccttcattctcggccagccataagcccagcaattccttgtgaccttcggtattaatgcctaacgcgatgaagaccgatttattgataactcggttatcctgacgcactttaaccaccaggcagtccagataaacaatcgggtacaagctatccaagggacggctttgccactcaaggacctgttctttgacggcatcggtgactttggcaatcagtgacggtgaaacctcggcatcatagagttctttgaacgcgctggcgatatcgcgagtggtcattcctctggcgtacagggccagtatttggctgtccatgcccgtaatccgcgtttgatttttcctgatgatttggggttcaaaggtactttcacgatcgcggggaatttgcagcgcgaattcgccttcttcagtcagtagcgttttagcggagtagccattgcgggtattagaacctgttttgggatggtgtttttcatggcccagatgcgcggccagttcggcctgaagggcggtttcaacggtcagttttttgaggaaacgggagagctgacttaaatcttcgggcgttttgagatttttagccagctcagtagccagggcttgtaactgtttctcgtccatcttttcacctgtattagttgataaattaaacatatcaaaaacaggcaattacacaaatttagaaacagggtcaaatttattttttgatcatgattttactcaattagaataatctatttttatgatatgactctcttctgaaattaaagatagtcatatttattttattaaaaagccggaaatatcccagtgatcttccggctttcttctttttttagagccgcttagctcttgcccttagcggcgtttgtaatccccaatcatctcgcgcatcttcagcttaatctcactgagctggtcttgctggtgccggtactgctgcttgatgctttgcgtatcatcgctgtcaggaatcaacaccagacagccagccagtatcttcacggtcagggtacaacctttatcaaagccagccgccttaagccactggcctttaaggtggatcgcaggcggggcggtggccttgttattttgcggcacgtatcccacggtgtaataacgttcggttttggcggctttatttaccgcgcggttttgcttagaatgcgccttagccatcattcaactcctaatcagttggttgtggtgagcggcgttggtgtggtctcaacacatcagcgccgcgctatttttatccctccggttcatcaacgggcagtaatgcagactccatacgctgcttggcgatcatggcatcaatgatcttgataaccgtttcctgatcttcctgtgccagccgttccagaacctgaaagcgtcgaaataaccgagagttagccaacggtgaatcttcaacaggattacctgtcagcagataatccaccgtcacccctaacacatcagccagcttaaccatcatctcagcagggggaatattaagtccgctttcgtacttgttcagttgctgaaaacgaatatcaacttttcctgccagttctttttgaggccatcccttctgcttacgtagtgccttgagacgtaccccaaactctttgcggagttcagcattttgcataatcaaaaactctgtttgcatagtgactccgttagtgtaagggcttgtctgaattaggggttgcaagtagctcctaaaaggattataaataaatccaattaagagtcaatttaaatcttgacaggatttaggagttaacagcatggcacggatacccgacgcagaattacagcacttaaaatccgccgtctccttagttgccatcattgaacagcaggggcggaagttgatcccacgcggcaaagatatgacggtgctgtgcccgttccatcaggagaaaacaccctcgatggtcattacgccgtcgaagaacctctatcactgctttggctgcgatgcgggcggctcggtgctcgactgggtgatgaaaacggaacatctgagcctgcgtcatgcctgcgaacggttacgcgccatgctcggcagtaatccggcggtggagccgctggttgattcctcggaattgatccgtgatgcggtcgggcaacaggcgctgctgttacgggtggttgagttctatcaccagactctgctgaatgcgccggaagcccatcagtacctgaaaaaacgccgccttgatcaccctgagctggtcagccattttaagctcggctttgccaaccgcaccctcggctatcgcctgccggagaaaaaaatcaaagcaggtgctgagatccgtgcccggcttcaggcggtcgggttaatgcgtgagagcgggcatgaacacttcagcggctcgctggttgtgccggtgatcgggctggaggggcaaatacaggaaatgtatggccgtaaaatcacgaatcgcctgcgggcaggcacaccgctgcatctgtatttaccgggggagcatggcggggtctggaatgaagcggggctggttggttcggcctcggttatcctgtgtgaatcgttgattgatgcgatgtcgttctggtgtgcggggtatcgcaacgtgacctgttcgtatggggttcacggctttaccgatgcccaccgggacgccttccggcagtatgaaatccggcaggtgcatatcgcctatgacaatgacaaggcgggcaatgaagcggcggcaacactggcggcagagttgcaactgatggggctggatgtttggcgggtggtgttcccggaaggctgcgatgccaatcggtttagctgcgaagtggcaaacccggaaaatgctttcggtcagttacttgaatcagcgcaatggctcggtgaacccacaaaaacaccgttgtcagacccaagtgctgccattgccgtccccatctctacggcggccttagtgccagaaccgggcgtggtgacaacgcttgagcccaacggggatatcgttatccggcaggacgggcaggaatggcgtctgcgcggtgtaccaccgaaaatcggtgcggtcatgaaaatcaacgtacaattattggataaaaacagcggggcgttgttcgtggacagcctcgatatcctgagcgcccgtgcgcggacagggttcgtgcgtcaagccgcgcaggaactggcgttaccggatacgctgatcaagcgtgaactggggcgggtgttactggtgctggagcaacgttcttggatggcagcagaaacggaacacaccgccaactccctgaatgccgatgagcagcaggctgcgctggcattactgcaagacccccaactcatcagccgtattacggcggatttagccgcctgcggggtggtcggggaatcgactaatctgttggccgcttatctggccgccgtcagccgaaaattacccaaacccttagccgtcctgatccagagcagcagcgccgccggcaagagcagcctgatggatgccgtcttgaacctgatccccgaagaagaacgcatccagtacagcgccatgaccgggcaaagcctgttctacctcggtgaaaccaatctccagcacaaaatattagccatcgcggaagaagaaggggtgcggcaggccgcctatgcgctcaagctgttgcagtcagacggcgagctgacgatggcgagcacgggcaaggacgaagccacggggaatctggtcaccaaaagctacaccgtcaaaggcccggtgatgctgatgctcaccacaacggccattgatgtggatgaagaattactgaaccgctgtctggtgctgacggtgaacgaatcccgcgaacagaccgaagcgatccatgcattgcaacgccagaagcaaacccttgaaggcctgctggctgagagcgagcgggagtatctgacacagcttcaccagaacgcccagcggttgctgaaaccgctgaatgtggtcaatccctatgccagccagttgacattcctgtcagacaaaacccgcacccgccgtgaccatatgaaatacctgaccctcattcagagtattgccctgttgcaccagtatcagcgggacattaaaacagcagtgcatcgcgggaaaacactggaatacatcgaagtcagcaaagacgatatccggctggcaaaccagcttgcccacgaaatcttaggccggacactcgacgagatgccgccacagacgcgcaagctgttgctgctgatacaggcatggatacgggacagcggtcagccacgccatgagaggatttttacccgcaagcagttgcgcgatgcggtgcagtggggcgatacgcagctgaaagtgcacctgtcccggctggttgaaatggaatatctgctgttgcaccggcgcgggctggcgtttgcctacgaactgctgtttgacggcgacgacagcgacaccgcgtacctgtgcggccttatcgtgccgtgacagggcaggtatgactttctccggtcggggtcaatcagtcatcggtcgccccccggtcggggttcagtcggcgggcggtcggcatagcaaaatcatcgcaaaggcagacacagaaaggcttcaccgaaaagcggtcggacaacctcaaaaaacacggttcccaccacatgaatttatcccatcgtaaccacagtgcttctcacacagacagggggcttatcatggcatcgattacactcagacaacatatccagaattacattgaacaccttgataccctgcgttatacgcgggacacccggctacactatcagtcgaatctgatgcagttcgtccgctggtgtgatgaacgggggatcattacggcacaacaggtgagcttcgcccatctggaaagctggcagcgccacctgtcagcacaaaagaatccgcagggttatccggttgccgccagcaccatcgtaaaaaaactgacgaacgtgcgtcttctgttcggttggctggtcaaacggcaatacctgctgtataacccggcgcgggatctggagctaccccggacagacaaaggcttgccgaggcatatcctgagtgaagaagaaaccgcccgtatcctgactatgacaaacagtgacacgccgctgggtctgcgtgaccgagccatcatggaaatgttatggagcagcggcatccggcgttcagagctacagcggttacaggtgggtgatgtggacttcgggcgcggcgtggtgtttatccggctgggtaagggacgcaaagatcgggttgtgccgttcggcaaatcggcgcagcagtggacacagagctatctggaggaggtgcgtccgcgtctggtgtggggaaaagatccgggttacctgtttgtctccaataaaggtaaagggctgactgatggcagcctgacgcagatagtccgcaatgcgcttcatcgtgctgaggttgaaaaaccgggcggttgtcacctgttccgccatgcgatggccacgcagatgctggagaacggcgcggatacgcggcatatccaggccatattaggccatgccagtctggaaacgacgcaaatttatacgcgggtcgctatcggacacctgaaagaagtgcatcaacagacacacccggcagagcgtgataatccgacaaaatcaacgccagagagcggctcaggcagtgtcagcggagagccagacgccgaactgaaaactccgcgcaccggacagcccgccagtccccgttgagttcgctgggatcggtgcgggggcagaccgtaaccggactgcccgttagcatcagtgcttgcgggggtacgtgggcaatggtcggcctgagctatcgtgtccccgttaaaaatgtgcaggccgcccaaagcccactcaacataatgtgggggaattatacgccactcaccgggcagccccgccgtcagtcaatggcatcggtgagcggttcgcagcgtataatttacattatgtctggcgcccccgctgttcggcctcgcggggtgtggcgcacaaggctacgccttctgctctaaacttctgagccgatgcctgccaaaaacctgcgccagaccgaaacaccgtgcccacgttcagctaaacccccttctcttcctctttagctgccttgcgttacctgggcaaacacccctgaaggcaggtcggcctgcggcctccgcgtttacctcccccgccccaaccccgctgccctggctgcgcccggctcgcagtcgctgcgctccttgctcgttgccgtgctcgccatcgccgccccgtgcagcccccgcagggggcttcccttgaacaaagcgccatcaacaaaccgagccaaattctgagcctcaatgccccagagcgtcgcagggcgccgcttgcgggctctatgccgcccgctcccgcagaacgtgcgcccgccgcccggcaagccgggcagcgttcgcccgttgccagaagtgaaaaacaatcccaaactgtacgtcggggtcaaaaaagtgatcggggtaaaatgggtgaaacgtgtcctgctgaaagccttgccctgcgcgggctgacgctgctctacgggtatgactgcctcagagctgatggcccttcgctggtcaaccggatggcgaataccagtcagttagtggtgcgctggctgaaactgtttcccaatattgcgcgctggattggctatatctcagcgggcattatcggattcgcagcagcaggtgctgtggccaatatcgtcatgggcatgtcgaagtttatctggctgggccttaagggaatttgggcggcctgtacgctggtcatgaagctgtggacagccgccgtctggctgtgcaatggggccattctcgtctggaatgctaccttgcgcatgttgcgcggtgtattgctggctgtcaggatagcggcgatgttggcaggtgtctcttttacctttatgacatggcccatcctgttgattatcgccgcgattgcgttgctggccgtgggcatttatctgctgattaagcactgggatgccatcaaagccgccatcatgaacaccacggcgtttaaggtggtggccgcgtatgtgaaatggctcggcgggatattcagcgtcgtctgggacgggatagcggcgggctggagtaagctgtgtgactggttcagcagcttttcactggctgaggcgttctccaatatggtggacagtgtcagcaatctgttcagcggactctgggactggctgaaagaatcctttgcgggggtttataacggggtgattgagaaactcaatatgatccccggcgtgaatattgaaacgatggcgatccagaaaacggtggtcgaacccgcgataaacgccaatgtgcccaatgcgggcatggccggaaatccccagcaactggcatccctgccgaacggcacgttgccggggcagccgccgatgatgatgcagcaggtaaaagccatcaagccacctgaaagtgaaggtgttttaacgggcggaaggaagcaggggatcggcaagcagggtctgataaaagacgtgacgacaaactcgcagaccatcacggataacagtcgccggattgaaaatgtcacactgaacgtgacaggcaacgtcacaccgggacaactcacagaatgggagcaggtggcttatggatgagccaaaatacattgatttatggattacggacggggattttacgctgaactccgggaatgaaccgcgcttttgcgataaccgctattcggtcggtcaggactgtgttcatgccattatggaaagtggccttgccaccgagctggttgctgaacgcagcccgaccttgcgggcagatatccgcactcagattgaaattctggttgaggacgacgagcggattattccgggcacggtcagcattaatgaagagtcacccatcaaattatggataacggcggaaacctacgattttggccgcctgagcgtgagtgtgggacatggacactaaacccaccattgactatgaaaaggtgctgcgtgacagcgggatgccaaccacggaagccgacatcagcaaagcgtttgccaatgtggtgaatgaagccgggctggtcactaacacctcgcgcatgtccccgttctggcggctgattaaaaccattgtcacgcgcccggtgttgtggctgaaagaagccttaatcaacgtcacgctgaagaatatgtatctggcgagcgcatccggttcatggttggatatgttcgcgtggggagtgaacctgaaacgcaaacccgcttcggcagcgcagggcgttattcgtttttataaagcagcaggggcctctgccgtgaccgtgcctgccggaacggttatccagactgagcgtattaacggtgatatctaccgggtcagcaccacggaaagtgtggcgattgctgaaggggtcagcagtgcgttgctgcccgtaacagctgaagtagcaggtggggcattcaatctggcccccggttattttcgcattctgcctgtggccgtgtccggcattgcgcgggtacagaatgaggaaggctggctgttaacccccggcgcggatgccgaatccgatgacgatttgcgcgaccgttgccgcaaccaatataacctcgtcggtaactatcataccgatgcggtttaccggggcatgattgcggcggtagcggggttaagcattgatcgtatcttctttctgcatgacgccccccgtggggcaggcaccgccaatgcgtatctgttgctggattcaggcgtcaccagtcagccctttattgaggtggtgaacgattacatcaccaatcagggccatcacgggcatggtgatgatatgcagtgcctgccgatgccggaaacccagcatgatttagcggtcacgctgtttgtggtcagtctggcgaactatagccacgaacagatagccaccctgaaacgggatgtcgagaaccttatccgctgtgccttccgggaaaatagccagtatccggtgaaaaaaacatggccctactcgcgcttttctttttccaacttagggcgggaaatccaccgtgaattcagcgagattgaatccctgaccttttctctgggggatattctcagtgacttaagtgtgccacggctgaaaacgctgtcggtggaggtgaaaaatgtctgagttcagggaacgccttcagcggctggctctgccctcatggatggacaaaggcgagcctgccaaactgctcagtgctgcgcgggcattctggatgcaggtttacggctggctgacatggccgctggcccaactggatgcggaaacctgtaccgaagcgttgttatccgtactggcctatcagcgcgatatccagcgctttaacggtgaaccgctacccctgttccgcaagcgcgtgaagtatgcgtttatcaacgccaaagatgcgggcagcatcgccggttttattgccatctttgaacgcctcggcgtgggctatgtggagctactggaacgccagccggacattgactgggatgtgattatcctgcgcctcagtgatagccagatagcggctaaccctgatttgctgatgaatattatccggcaatacgggcgcacctgccgtcgttatcgctttgaagtgatcgcgaaaaacccgttgctgatgcgggtgggcaatatcggggcagattattgcacgtatgccgcggctattccgactcagccattattaataaaagtagggcatatcgcgggcgttgccgtctgtgacagtgcccgcctcaaggaaagtactgcaccgaacgtgacctacggtgcatcattataaggaaattgtatgtcttcagtgataacgacagactttgaaaaatggaaggcccaacaagtagccgcaggtcagcctgtggtgctggatgaatttgtctttgctaacgtgccaaatcttgatccgtcgaaagacatcagccgcagtgagaaattacctgcccaaaaccaaatcgttcaccgtcaggccgtcaacaaaaccggactcgccagtgagaacgccgtggcctacagcgtcacattgggtacggaagtgggtcacttcgattttaactggattggcctgataaataaggcctccggtgtgattgggatgatcacccatgcgcctacgcagaagaaaatcaaaaccgccaacggtcttcagggcaacgtcttaatccgctctttcttactggagtttgatggcgcagcgactgagaccgcgatcaccaccacagcggaaacatggcagattgattttaccgcccgtttgacggggatggatgaaatgcagcgtctgattaataccgacagttacggtgaagccgcctttttcggtgatggctttgcggtggtgcgtcagggggaacagtaccttgtgaaaaaagggctggcttatgtcggtggcctgcgcgggatgctggaatttgaccagacgcttaacagtctgcgcaatacccgtgtgtatgccgattttagctatcagggcaatctggtgagtcaatggcaaaccgtagtgaaaatgaccactgcaaatgagctgagcaactatgtggatgccgcaggctacccgcattatgtgtttgccattgctcaaattgacggggacggtaatgtgactgatttgcggagcaaaggcacattaagtgaccgtgatattgctcatcttcaaaaggaattgggcggggttaagcaggattatgccacccatgtggcgttaaacgaagttaggatgaatgcttacccaagaacaggaggccagattaacggcgtggtcgaggctactcattgggtgggtgggagtaaattgtatgaccgtcatgacgatggaggttggtcgcaggtatacagtgaagcccacaaaccttcccctcatgaaataggcgcatttccggcatcgggtggggtcattactggagacgtttatgctaaagaggctatcagggtaacaaaatgggtcggtgctgaacgtgtctatatcggtaaagaaggggaatggtatgaggtgtatagccccttaaaaaaaccgactgcatccgatatcggcgcttattcgatgacagcgattgatgctaattttgccctgaaaacctcaaaggataccttcacctgtggcaacttgcatgtgaatgccccgcatgaatggccgggtgtggttttcagaaagcccagtggttacaacaccacgatagcatctaatcctgataacagcgaaagtatgctgactattcgctatcgagataggaaagataacgatttgtacaatgtcgatatccgaaaaaaatcaggcacggtcgccttggaatcacaattgcttggtgttgatcaaatatggactgatgtcatgtcagttcgcagtaatgatacgtggtatgtcaatgatacggggaaaccgatcaccgtctatgttgagagccaaaagaccgataaaagaacggggccgttcagtatgggaggagaagtcgataattatcgggtgggttatttttgggtatcaactaacagcatccattcctttagttttattgttcccccgggaagtcgttatatcgtgaaagcggggtggggggtgactttgacacccgatgcgattgttcgttgggttgaattgaggtgaacatgaaatactacaaatcaaaagataatcaggttcatgcgtttacgtcagacggctctcaggatgcgtggattgagccggattttatcttgattactgaagaagaagcccgggctattacgaatccaccgcctacgcctgagcagttacagcaacaagctgtatatgaaaaacaatacctgatggatgtggccaaagataaaattgctgtctggcaggatgccgttgatttagagatggcgacgggtgaagaggaagcagcactcatcagatggaagaaatatcgaatactgctcaatcgggtggattgttttaccgccccggatattatctggccggagcaacccgaataatgtactggcagcgtaaaaccctgcaactggccccggatttatcggggctgtctgccgctatcgtgcctgtccacccatttatttacggtatcgggcagcagaccgacagcggcagttacttaagcccaaccaatgccattgagacgctggcgactaaactcacgggtgcgggccatatcaacagtctgatactgatggtgtgcgccaaaactcacgcggaatttatgcagcacctcacgcagttttcagcggtgctgccattgcccgcattggcgcaggtcaaacggatggcaaagacggcagaaagtctggccacgaccaaaatgcaattgccgggtaagccgggtggcgggttaccgctgccgcaacccttatccaccgcaaccagccgtcaggcgatcaatgcgcaactcatcgccaaagccaacgcgcaggccagcgcgggcagcagtcttgccgggttaaaatcccagttaaccgcgctgaccgccgcccgacaatctgcattgcagcacgtcaccgaggccataagcgggctggcgggaaaatcggccacggtctgggcgttcgccgggacagggaacggggcacatgtggcagaaaaattacgtaaaaacatccccgaaccggatgcggtgtacacactggcagtcctgtttgccggggacgatcttcgctcattagaaaggatgctacaccatgagccaaattatcaccctcgcccttgatggtgaggccataccgttaaaaagcctgaccgtcacgccctcggtgatgtttcaggatcaagaccagagcggccagtcttccagtaccgccgtcgccgaacagggcatcaagccgaaagaactgcgtatcaccggcattattccctttaccgaacagaaaaccctgtcgcgcctgtttgctctggcagaagccaaagacaatggcaacctgaaacgctaccgggtggcgaatctcactgcacaggctattaattttcgtatcggcacctttacgggtacgattgatgccagcaaggtggacggtaaacaggcatggcaggtcacgtttactttacgggagcatttatcggtggcggagaaacgcgacgcccgtgccaccggcgcgattcaggcgaaaaaacagaccggacagggcggcacgaaagccggggaagacccggaaaaattaagctggttcgaacgcgaggtcttaaaaccgattaatgacggcatcggaggcgcaagcgaatgaaacccatccagcgcctctacttatccggcgatgaggtgcatgtggttgatgccaatctgatgctggaactgtcatcctgtggccggggctttatcacagcggaaaccacgactgattacaccggaaaactggtgcgccttgaggtgggttataccgatttggtgctgcgctggtttacgggttatgtggaacgctcgcagcctgcccagaacggctatcagcgtttgtttgtgcgtgaactggtcggcgtatttgataaagcgtggccatgttcgtttcagcacccgacgttgcgcgagatagtcaactggttgcaagagcacagcggcctgacgttcacgctaccggatgcgctctataccgataaacctatcccgcattacacccataacggcacgggctatcagttactgggcagtctgggccaactttttgccattgacgattatctctggcatcaactgccggatgggtcggtctatctgggcagttgggcgcattcgatgtttgcccaaaagcctgtcgacattccgaatgaattcagccagagccagtcggcgggcaataccatgaccattcccatgatccaatccctgcgccccggttttgtggtcaatcagcagcggctgaccaaggttaatctgttgaatgaaaacatgagtatcacatggcagccgaaaggccagacggagcacaaaacccccgcccagcgccagattgatgccgcttaccctgaactctctgccgggttacatctgcccaaactggcccgcattgaagcccacaccgaaaacaccgtcagcggcgatatatctgacccgttccgcccgcgctatgccgtcgatgtgcaactgctggatgctgacggcaaagatgcggctgccccggtttatcgtgccgtcccactgccgttgccgatggcgggcagtgaatcggggatgttccagtatccgcctatcggcaccgtggttgaaatcgcgtttgaaggcgggcgacccgataagccctttatccgccagaccttaagtcagggcaacaccttgccggatatcaagcccggtgaacaattgcagcagcagcgggcggaagtctcgcagcgggtgacacaggaagggagctggatacgccagactgaccagaccattaatgaatcgtccatgcaccgtgaaattaaagccgataccgaaacccgcaccgtggtcgcccgtgataccacgattcaggccacggataaaacgctggtgttaggcacatccactttattggcgggtgctgttcagcaggtggcggagggggattacagtctggccacatccagtaattacctcgccagtgtgggaaaaaatgccaacattgacgtgggccaaacgctgatagagaaaatcggcctgctgaaacagagcattgcgggcgtgaagcaggaaatcgtcgcgcctgtggtctgggtaggcagcccacaaattaacgtgatgacgttgatgttagacacactggatgtggtcaaggaactggcggaactgaccgctgcccatacccatcacaacacaggcaccccgcagaacgccagcgccatcagaggcaccgcccataaatccgatgggctgaaaaagaagtattcgcctgtgattggctgaatatcgtttatttgtgtgatgttttgtacgctataccataggttgatatttaatgctataggtattagactgatgatgtcagttaaggaatgtcgcgctataactgaggccaccaccctcgtatagctcaaagacaaataccctgcttaagggaaatgcaaaaaaaccaacctcaccagttggtttttttgtttttatctacctatcatttttattgattgaatgatatgaaaatgaacttataatttatagttgttagttaggcaagcgcactgaccgccgctaaagagtgtttgatatagaaaaggaactcagcatttcgtaaattttgcggagtgtatcaaagtcctgaccgaagtacgggtggtgccgcttcagtgcctcggtcagagcgcgacattccttaactgaccgtgatggaagctagccggacaggcagcgtaaaggcaatggctggttaaatcgtgctcctgctcataggagcgaacggatgaaagaggttattaacaccgctatcatcattctgaaagcactaattgcgcttttagaattgatccgtacatttctgaagtagaataacggaaacgtagataaggccatcgggttaaccactcggtggcctttaacatttctggcgccccctcaataaaacgccaccagacgcacgcaacaccgttcatttcttaatttgctcctagtctagggttcatttggatctgcgttactgtgtcgcgctcacgctgcacaatttccacgaaataaacgtcaacctgacgtaaaacgcactacaccgcacccgcctgcacgttttggatcaaaaaattatttcagttttacaatcctacaaagggagtagccggagcgcgcccgtgctggcgctgtggaaaaaatcccaaactgaaaggcgtgaaaagattttcaggaaatttcagtttttggatcaaaagcggatcgcggagaaaatatcaatgccatgatattaaaagaaaaactacattttacgtgggaagttagatcacaaagacaggctaaagaaaattctagaacagagtagcggtgcggctttgagtccattaggaaattgaaatgaattgaacccataaacatattgtcactggctgaaagaaaattttcgggttggagcaattgagttaaaaatgttcaatgaaaaaattaagatagcggaagctcaaaaatccctgtcgccattttatcgccactgacttataaaaacaaaaaagccactcgtctaagagtggcctaatgtgctgatttaacagcttaaatctggtggcccctgctggacttgaaccagcgaccaagcgattatgagtcgcctgctctaaccactgagctaaggggccagtgaagtggggagattatacggtactgtgtggcattaggtctagccccgaaaattcatatgcgcgttttatatacagaaataagtatcttttaactgatttaaactattcttaagcgctatcaactattttttagtgatattgactgtctttttgattaatttctctggtcatttactgacttttgattattgtttgaatataaaatttttatcggttatgttctgtgctttctgtaatttcagaacatatctgtatttctctataaaaatatttttgtgactcaacaatatgagcctatataacttatcaaattcggttttgtcccatcgtaaactggaagattactttttttcatcaatcagccaaatttatcggcatattggaactggtatccgggtttatgtaactggcgttgaaactgattcattaaattttttacaggtagttgatgaaaatgatcagatagcagaggagctgaaagcagcgattcagttaatgaacgagcaatctgatgtaccttttctgattgttgctgtacagcccagtcatcaggttttagcggttattgaacaggccggatttgtgtttgatcctgatagtatcacaacggttatgaagcttgatttaatcaactggcagatgaagaatgagtattgcactgagtatgaaatcaggtgtgttgatcatcgtttgtctgattggattcttccggttaaaagtgcatttgcgacaggtaattctatctccggacagtatatgaaatgccatcaggctgcgttaattgccgggaaatgcttgcgacattacgccctctatgtcgatgaacagccagtttgtgctttaaccctatcaaggcttgataatattgtccgtcttgatgatatcagtacagtaagggaaaaaatggggcgaggatatgcttcagcattgattaactatgtactgagtgaagctaggaaaaaagacgcaacagcttgctatctggaagcttcccgtgagggtaatggcgtgtatcgtcgcattggttttaagtcgttgtttgaatgtcaggcctttgttcgtgaaagctaaaaagctcgtgagcaatcataaccacccgtataacgggtggtttgctcttgccctataagggcttgttaccgactgcgcctaaatgacgctgctttctcttcgttcaagctaagtgtctttgctgctttggcctaccccttgaaggggtctacatgctctttactactcaatttatccgagattaaatccgacttttcttgctctctgatatacttttgaattgtcgcttcatttagccctaccgtactgacatagaacccttccgcccaaaactttctgttgccaaatttatattttaaattggcgtgtctatcaaagatcatcaacgaacttttacccttcaaatatcccataaagcttgaaacgcttagctttggtggaatactcaccaacatatgaacatgatctggcatgagatgaccttggattatttccacacctttatacttacaaaggtctctgaggatctctcccacacttgaacgaatattattaaaaatcactttccgtctatatttcggcgaaaagacgatatggtatttacacagccactttgtatgcgctgagctttgtgctttaatgcccataaacacctttccttatttgagttacgaatattagcttgaacatctatatcgtaacggaaaggtgtttttcttggtataacctttgaactccacccgcaaagcgggtggttttatgtttaagacgctaacgcgacttaaactggctaaagccataaaattaaaaatgcagggcacaatattgccgccctgcattttttcatccccttcaaaccccttcttcagcctaaatccgcataaaacttaacactgaaataatatcaatatactgggtcaactatttcagacacactggtcagacatcacattatctacaaataattcaatgtgatatggattatttcttacgtttgaacatactctaatttagtcaattgttatcagatggttaacaatttgatcaaaatcacaaaatatttaacctgtcagcacctcaaaacttccgaaaaggcgttgctcagacttcgtcattaaaaaattggggaactgataaataacaaaaactatttatggagaatgccagtgaaaaaggcttttttatttgcacctgccctattagcgctttcagtcagcaccatttcttatgctaagacttataagaatgtttatgaatttggaaatagtttgaccgatattggaaataatggatgttacacggcaaaagatgaaaatggtgcctgtgattcatatactaaaatagtgaataaaatatggacaaatgaagaaccacttgcatcagacttaggtggcaataaccacgctagaggtcgcgcaacagccatttggcaaccctattttggagaacctaacaatacaacaaaggcacaacttgataaatattttgcaagtacaaatggaaaggctgactctaacggcgtttatatccattggattggtggtaatgacctcgctgccgctttaatagctggtcagcaaaatcctttcattgcacagaatattgtgaaaaacagtgcctatgcagcctcagagcaaataacgcagttagtgaacgctggagccggattaatcattgcgccaaatgtacccgatgttggagctagccctaggttactggaaaacgttttgaaaataggattaaacaataaattagaaccattattaacaaaatatatggaggcagaaggaaagtcaccagaggaaataaagcttaccattgaaaatacaacgacaagcattttgagtggcgttcgtacaaaaataaatcaagccactattcctaataacgatgcacgcaaaaaagcgctcgaaaatgtatttgatgggatgggacggctagccgaagatatgctcagagaaatggctaaaaaagaagtggaaaagatagaaaaagaaatgggaaaaaaactatctgaagaagtagctaagcaacagatcgaaaatatagcgaaaaaaattgctagggcgtgttgacgtttgctcgaagggaattgggtggcatgataatttggtctcttattttcgccaaaaaactcgttacccgaactatcatgccacgacctatgttatcagatcctgtgtgggataagctatttgtcttcatgcaacaaaatcggcttacctatcataaaaaaacgcatcgcctcatcatggaaggtattctttttcgaatgagaaccgggataccctggcgggaactacctgctgaatatgggaaatggaatacggtctttaagcgttttaatgtctggtcaaaaaaaggtgtttttaattcattattcaacgaattagctaagaattctgatactgaatggttgtttattgatggcagtattgtccgtgctcatcagcacagttcaggcgcagcttcaaaggaaaatgaagcgattggaaaaagccggggtggacgctcgactaaaatccatttggccgtagacagttacggcctgcctgttcattttgaattatccgagggacaaactcacgacatggtgcatgcggaaagtttggtggcgcaatcaccgcccgcggattttgtcgttgctgacaagggatacgatagtcaggcattgagaacttatattgaagaacaaggtgcaacagcggttattccctaccgaaaaaatagccgaaattcggataaaaagtgggataaggatttatatcgttatcgtcatttagtcgaaaatgcatttgccagaatcaaacattttcgtgcaatcgccacaagatacgataaattagcgagaaattacgccagcacattagcactggcatttatcattatctggttacccatgtgggtcgagtaagtgatgaaaacaaaacgtcaacacgcccatagtgttattgaggggatagctgattatataaaatgataaatcagattaacgccattctttgaaacgattaatcagcccgtttgtagagctgtcatggctatttacgctttctgaatcgtggagttcaggcaggatacgatttgccaattgttttcccaattcaacgccccactggtcaaatgagaaaatattcagaattgcgccctgagcaaagattttatgctcatacatggcaattaatgcgcccatactaaatggtgtaatttcacgtaacagaattgagttagtcggacgattaccctcaaacactttgaatggcacaacatttgccacatcctgtacattctttccggcagcaacaaattcggcttctacctgagcctgagttttaccaaaagccagcgcttcagtctgtgcaaagaagttagataataatttactgtgatgatcgccgattggattgtggctgattgccggagcaataaaatcacatgggatcagtttcgttccctgatggataagctggtagaaagcatgctgaccattagtgcccggctccccccagataatcggcccggtctgataatccacagggcttccattacgatcaatatatttaccgtttgattccatatttccctgctggaagtaagcagcaaaacgatgcatatattgatcataaggcagaatcgcttcagtttctgcgccaaagaaattgttataccagatgccaatcagcgccagaataaccggaatattctgttcaggagcagtttgtgcaaagtgcttatccatagcatgggcaccattcagcaattgctcgaaattatcatatccaatggacaggacaatggataaaccaatcgcagaccaaagagaataacggccgccgacccagtcccagaactcaaacatgttttgcggatcaataccgaacttgctgacttcctgttcattcgttgaaagtgccgcaaaatgtttggcaacatgtacttcatcaactgcactttgcaagaaccaatcacgggcagaatgtgcgttagtcatcgtttcctgcgtggtaaaagtcttcgatgcaatcaggaacagcgtggtttccggatccagagacttcagtgtttccgcgatatgagtgccatccacattggatacaaagtgcatattaaggtggttcttataggctttcagtgcctctgtcaccatatatgggccaagatctgaaccaccaatgccgatgtttaccacatcagtaatagctttaccggtataacctttccactccccactaataatgcgctcactgaatgatttcatttttgccagtaccgcattgacctgcggcataacatcttcctcatcaaccttaatcggagagttactgcggttacgcaaagcaatatgcaatacagcgcgatcttcagtacggttaatcttttcaccggaaaacatgctatgaatagccccggataaatcagtttctttcgccagagcctgtaatttctccagtgtttctgcggtaatacggtttttggaataatccaccagcatctgatcgtcaaatgtggcagagaatgtcgcaaaacgcgccttgtcctgttcaaacagatctcgcaggtgagtatcttttatctgctcaaaatgttgctgcaatgctttccaggcttcggtctggctagggttgatgtttttcatgaataatgttctctatctactgtagataaaaataggaatgcaccggattgtaacaagttaatactgtgatggatctccttttcctgttactgactgatattggtcaaaataagcgattatttccagtcataattacataggcaaaaacgataatctcactctaatcatgaaaaatattgatgcttaattaacaaatattgactcattaccgctaacccgatatttctaattgcctatctttaaaacagaaggccatcatccatgagtgcagtatcttctccctcgtcgcagtatattgttgcaaaattcggtggtaccagtgtggcaaactttgatgccatgaataactgtgctgatattattctggcaaacagagatgttcgcgtagtcgttttatcagcttccgcaggtataaccaatttgctggtcacattagcttccggctgtaatagtgataaacgggagaagtgcctgaaacagatccgagacattcaatacgccattatcgggcgactgaatgaatcagatgtgattaaagatgagattgaccgtctgttggataacattgctacattgtcagaagcggcttcgctcgccacatctgacgccttgactgatgagttagtcagccacggtgaagtcatgtccaccctgttgtttgttgaattattacgtcagcgcaatgcggatgtcgaatggtttgatatccgccggataatgcgtaccaatgaccaattcggacaggcagagcctgataccacccagctcaatattctggccgagcaacatttgcagccacgcctgaataatacaattgttattactcagggttttatcggcaaagaagaaaaagggcgtacaacaacattagggcgtggcggcagtgattataccgccgcattgcttggtgaagcgctggggctaaagcgtgtggatatctggaccgatgttccgggaatttacacaacagacccccgtgttgtcccaacagctacgcgtattgataaaattgcttttgatgaagcggctgagatggcaacatttggtgccaaaatcctccatccggcaacattgctgcctgccgtccgctgtggtattccagttttcgttggttcaagtaaacaaccacaggcaggtggtacacttgtttgcgacagaacggcaaccccaccccgcttccgggcactggcactacgtcgcaaacagactttattaactctgcatagcctgaaaatgctgcatgcaagaggctttctggcagaaatttttatcctgctttcacgccataatatttcggtggatctgattactacctcagaagtcagtgtcgcgttaacactggatacaacaggctccaccagcacgaacggtagtttgctgactaatgccctactgacagagctttcaacattgtgtcgtgtcgaggttgaagaagatttggcactggtggcgattatcggtaataagctgtcacaggccagaggattaggaaaagagatctttggtccgctggaatccttcaatatccgtatgatcagctatggtgcaagtagccataatgtctgcctgcttgtacccgggcaagacgctgaagaagtggttcaaacccttcataagaatttgtttgaagaataatcaacgcacccgggtattctcattccgttacggtaataagaataccctcctatacactttgcctttcaagttgcctctttgttgactgtgctcattctcagttaaatttttttgtttgccaaatgtgattttcaatatactttttccttcactcatcggatgtgtttttccaccctttatcattcataataagaaaacgaaaacaaattccattttaactctgcttagccttcctataaacagaggataatttagagggaatcttatgactaccgctattgccaataaacgccctaaaaaaacgaaaatgacagccggcggtgccgcagcaggcggtcaggtacaatctttaagccggggcttatcccttttggaattcatttctgattcacaaagtggggtcgccctgactgacctcgctattcaggccggtcttcctaattcgactacccaccgtcttttgacaacactacaacagcatggctttgttcggcaggttggcgatctgggcctatgggtgattgcatcacatgcgtttgttgtcggcagcagctttctgcaaagccgcaatctgatggtactggttcacccaattttacgccagttgatggaagattctggcgagactatcaatcttgctattttcaatattgatgaatatgaagcggtgattgttgatcaagtgcaatgtaacgcattaatgcggatgtccgcgcctattggcggtcagttaccgatgcatgcatccggtgcaggtaaggcgctacttgcgacactgtctgaacaaaaatgcctgcaattactgcataaaaaagggttacacgcctatacacagcacacacatactaccgctaccgccttaaaagagaaccttgaacagatccgtaagcaaggtttttcactcgatgatgaagaacatgctcttgggttacgctgtattgctgcctgcatctatgatgagcaccatgaagcgtttgccgctatttctatctccggcccgatatcacgtatctctgatgagcgtgtgactgagctgggtgcccttgttatgcgggcagcgaaagagataagtcgggaatatggcggtaataagtaaaacttctactaatttcacttaaaaagtaagcttactgaatagctgttacgtttcagcttataaattgatatagatcacagataaggtgtgttgaacgcaaaagttgattgcatcctttgtttattgcattaaaaatgttaccggtaacaatcagtgagagtatgtgctagatacattccatatggtgtcggaagcaagtgcctggagcaattatcatgacaacaccccagaacagtacgacgatcaataaaaccgtcgaacggatcactcaacgtatcattgaacgctctaaagagacgcgtaaccgttatctggcgcgtattgagtctgctcgttcaaaaaccgtccatcgctctcaactggcatgcgggaatctggctcatggttttgctgcctgtcaaagtgacgataaagtcgcattaaagaatatggtgcataacgatatcgccattatcacttcttacaatgacatgctttccgctcataaaccttatgaaagctatccacaaaaattaaaagactccttacatgcagtcggtgctgtcggtcaggttgcgggtggtgttcctgctatgtgtgatggcgtaacacaagggcaggatgggatggagttatccctgctcagccgtgatgtgatcgcaatgtccgcggcgatcgggctttcccataatatgtttgatggtgctctgtatctggggatctgtgacaaaattgcgccggggctggtcatggctgcactgtcattcggccacttacctgctgtttttgttcccgcagggccaatgaccagtggcttaccgaataaagagaagttacgtatccgccagttatatgctgaaggtaaggttggtcgtcaggcgttactggaagcagaagcagactcttaccatagcatcggtacctgtactttctatggaacagccaattccaaccaaatggtcatggaagtaatgggactgcatttacccggagcttcttttgtccatccggatacgccattacgtgacgccttaaacgatgcggctgcacgccagatcactcgcctgactgaaaattcaggtaattatctccctctgggacaaatggttaatgagaaagtgatcgtcaatggcattattgcactgctggcaaccggtggttcaacaaacttgaccatgcacttgatcgcaatggcaaacgcagccggaattatcattaactgggatgatttttctgaactatcagatgtcatcccgttgttatgccgtatttaccccaacggacctgcggatatcaaccaatttcaggctgcaggtggtgtggctctggttgttcgggagttactgaaaaaaggcctacttcatcaggatgttaataccatcgctggattcggtctggaacgttatactcaggaaccctggctgaatgaaggtcaactggcatggcgtgaaggcactcactcctcactggataacgaggttattgcctgcattggaaaaccgttcaaacatcatggtggtacaaaagtcatgaccggaaatattggtcgtgctgttatgaaaacttcggcagtaccagccaacaatctcgttattgaagcgccagccgttgtttttaatagtcagcacgatatcgcccctgcttttgaggctggaaaattaaatcgtgattgtgtcgtcgtcgttcgctatcaggggccacaggcaaacggtatgcctgaattacataaattaatgccacctttaggggtactgatggatcgtggctttaaagttgctttagtgacggatgggcgtctgtcgggcgcatccggtaaagtaccttccgccattcatgttacacctgaggcccatgctggcggagtgctggccaaaatacaggatggagacttcatccgtattgatggccgcactggcaaacttacgttgctgcttgatgagctggaattagcacaaagagtaccttaccaagccgatttaagcacaggacataccggttgtggccgtgaactatttggtgctttgcgcacccaactttccggtgcagagcaaggtgcatgttccattacatttttataaccggggattttaaatcccttgtgtaggattcgatgagagaaattgctaatgaataattggaaaacaaccgcagaaagcattctgactgatggccctgtcgtccctgttatcgtaatcaatgaaattgaacatgccgtacccttggcgaaagcgttggtggcaggcggaataagggtattggaagtcacgctgagaacagcatgcgcgctggaagcaattcgtctcattgccagagaagtgcctgaagccattattggtgctggaacggtgattaaccccgaacaactttctgccgtcactgaggccggagcgcagtttgccattagccctgggttaactgacgagttgttaaaagctgcgactgctggctcaattcctcttattccgggcatctccactgtctctgagctaatgctgggtatgagctatggcttaaattgtttcaaattcttccctgcggaagccaatggcggcgtgaaagcgctgaaagctattgctggcccattcccacaagtacgtttctgcccgacaggaggaatttctcctgataattaccgtgattatctggcactgaatagtgtcctatgtatcggtggttcttggctggtaccaaatgatgcattgaaaaaaggtgattatgcgcatattacggaactggctcataatgcaataacaggcgctaaagcataatttagccggatcatttttgaaattgcggaaattctattatttcaacaggacgacttattagaatttccgccttcatgaatccagcatttttttgccaaataattaagaaaaccaattaaatccttttaccatgccaccttatattaagagtgaatatcgcggttgggagaagctaataccacaacattattctcttcacataatgattctgcatattttgttatgccctgctcttcagctctgttctcattacgctgactgaatctctgcctgagacggtaagcaaaaacatcctctacatgcccttttcttatccgctcttgcaacgctcgccaataatcggctttaaaaaggtcactatgaaattcttcaaaatatttacgaatgcgcttatcgctacataaaaaatgccggaactcttccggaaaaacgtcattgggcgctacgctgtaccacggctcgctggcaagttcatcttccggataacgcgctggaggaatatccctaaaattcacttcggtcatataacaaatttcgtcataatcatagaaaatcactcttccgtgtcgtgtaaccccaaaattcttgaataacatgtctcccggaaagatattcgctgccgcaagctgtttaattgcattcccatactcttcaacagcatctttcagacgatcttcatctacctgctccatatagatattcagcgggagcatcctgcgttccatataaagatgttttatcaggattttgtcacctaaatcttccagcttgtcagggatctctttctgtatctcctccattaactcggggctgatatgacgtttatcaatgacgaaattctcaaattcctgcgtatcggccattctcccgacccgatcatgttccttgaccaaccggtaacactcctgaaccctctcctgagaaacttctttctgcggcgcaaacttatcttttatcaccttgaatacacggtcaaaagaaggagacgtgaaaaccagcatcaccatccctttcacccccggagcaatggtaaattgttcctgagatgaattaataaatgtcagatattcacggtaatactctgtttttccatgcttttggcaaccaatagccatataaagctcggctgtcgatttgacgggcaaaatttcacgtaaccattcaaccatagctgctggtaagggggcataaaccatgaaataagagcgggcaaaaccaaaaacgacactggcatcatcatggttcgtcagacaggtatcaataaaaatctggcctgattcattatgatgaatcggcaataaaaagggataaacttctgtacccagccttattttacctaccagccaagcagctttattgcgataaaagagttcgttagcaacctgaaatgtcgcctgtagtaaatcatatccgggaaatgtgttttgtaagtagcgagtgatataactgatatctctgtctaaattttcccattccagtcgtaacggtaaatctttcaaaatagcccatatcatagattcaagaccggaatcaggaaaaaaatccctcgataatgggcgtggaatatggcgaaaacggcgtggtggctgggaagaaaaaataaatagattttcctgcttcaaattacgatgctgaaataatcggcaataaacggaattaaagaaactttctgcaatttcaaaacgtgggtaatccggcaataggcgggtataaaccactttcactttggcaatgtattcctgatcatacaaccgtgaaccacgaatacatttcaactgttcaaccaccaaacctacatgatgatcgtacagattgatccttttcttcatagcctgctgcactgcgtgccagtctgcctgctcaaaacgctgttgtgcgccagacgttacttccagaaatctgccgtattgcgcatcaaatccctgaagaatagtttgtgcaattaagtgagctaaatctgtttccatgtctgccaccttaatctgacgcgtaaaggggaattccctacggaatcccccaaagtaatatcaactttatacaaaaaatcagaattgctgctcttcggttgatcctgtcagagcggtaacagaggaggttcccccctgtattatcgtggttactttatcaaagtatccagtgcctacttcctgttgatgcgaagagaaggtgtagccacgctccagtgaggcaaactcacgctcctgaaccttctcaacatagtgtttcatgccttcgccacgcgcatagtcatatgccaaatcaaacatgttgaaccacatgctatgaataccagccaaagtaataaactggaatttatatccaagctcggaaagctgctcctggaagctggcaatcgttttatcatccagattctttttccagttaaaagatggggaacagttataggccagtaacttccctggatactcagcatgaattgcttctgcaaaacgacgggcagcttcaatgtctggtgttgatgtttcacaccagacgacatcagcatatggcgcataagccagcccacgactgatagcctgatcaatccctgcacgagtgcagaagaaaccttcacaggttcgcttgccagtaagaaactcgctgtcatagggatcgcaatccgatgtcagcagatcggctgcatcggcatcagtacgagcgataagaagagtgggtacgcctgatacgtctgcggctaagcgagcagccactaatttctggatagcttcctgagttggtaccagtactttgcctcccatatgcccacatttcttcaccgcagctaactgatcttcaaaatggacagcggcagctccggcttcaatcatagctttcataagttcaaaagcattcaggacgccaccaaatcctgcttctgcatccgccacaatcggcagaaaataatcagtgtattctacgctatcagggccaatgccattcgcccattggatctgatctgcgcggcgaaaactattattgatacgcttaatgacatttggtacggaatcgactgggtagagcgattggtcagggtacatactggaagctgtgttggcatcagctgcaacctgccagccagaaaggtaaacggcttcaattccggctttagcctgctgaagtgcctgcccacccgtcagtgcacctagcgcgtttacataaccttttttggattttccattcaacaattcccataactttttcgctcccatttgagccaaagtatgttcaggattgactgagccacgtaatttaataacatcttcagctctgtatggtcgattaatgccttcccagcgtgcttttttccattcttgctctaattgagtgatttgttgtgctcgagaaacggtcatgatcctatacttcctattctgaattaattgaatattaattattgattggatgttgtttaaatcagtcgagtaattgatagcccggcaaagtcaggaaatcgactagttcatcttgtgtggtgatccgtttcatcagctcagaagcctctgtaaaccttccctcgttaaaacgtacctcaccaacttcttgtttaatgactgccaattcttcttttagcatctggttgaacaactctttagtcactttttgaccgttgttcaacgatttttcatgatggatccattgccagatagaggtacgggaaatttctgctgtagcagcgtcttccatcaaaccatagatcggcacacaaccatttcctgaaatccatgcttctatatactgaactgcaattcgtatatttgcccgcatgccatcttcggttctttctcccagacttggttcaagcagctgtgcagcagtgatctcaccatcctcttcgcgggaaaccatcagttgatttggtcgttcacccagttttgaactaaatacttccatcgctatatcggcaagaccgggatgtgcaatccatgtaccgtcatgaccattattagcttccagctctttatcggctctgactttatccagcactatctggttttgctcaggatctttactcggtataaatgctgacataccgcccatcgcaaaagcgcctcgtctatggcaggttttaatcaataaacgggaataagcactcaggaaaggctgcgtcatagtgactgactggcggtctggtaagacgcgatccgcatgattcttcagtgttttgatataactgaaaatataatcccaacggccacaattcagaccaacaatgtgatgacgcaggtgataaaggatttcatccatttggaaaacagctggcaatgtttcgatcagaacagtcgctttaatcgtaccttttggtaaattgaaacgctcttccgcaaaactgaaaacatcactccaccattgtgcttcatgataactctggatcttaggtaaatagaagtaaggaccactccctttcgccagcaactgtttataattcaaataaaaataaatcgcaaaatcaaataacccacctgaaattggttcatttttataaagaatgtgcttttctgacaggtgtaatcccctgacacgagcaatcaatacagcagggtccgattttaattcataacgtttgccctgctcattggtataagaaatagttccattaactgcatcccgcaggttaatttgaccatcaataaccttatcccagcttggtgccagagaatcttcaaagtctgccataaatactttaacgttagcattcagggcattaataaccatttttcgctctacaggcccggtgatctcaacccgacgatcttttagatcttccggaatcccctgaattctccaatcaccatttctaatggaagatgtttccgaaataaattctggtaatttcccgttatctattttcttctgccaatttatccgatcttctagtaattttttgcgtctgtcagcaaatttgacgactaaatcttctagaaaatgaatagattcagatgataaaaccttcttctccgcatcagaaaaaggttttataaaggttaattctgttgccaatacttgctgcgtcatcccctgttcctcaccttaaagtgtccactcaggtaagaataatcaatataaaaaataaatcaaaaacggtttccattattttcatacattaaattattattaataaaatcaaacaattaatatataaataggcatgtataaactgggaattaatttccaaaatagaaaaacaaaaactgttaagtttttgttatatatagagaatagaaaaaacagataatttatagaaaataaacaaaaaattaaaaaatgagaaatgactcgcttcagttaattctcatttttaaagatgtttataaggagttcaatctaaggaagggttcatgtaggtcaaatcgtatggagtgatctgatatacataataattgagccaatttgaaaatagcaaatgcccatggctacgccatgtagcaactggtttattttctggatcattatccgggaagtagttgacgggtaatacaggttctaaaccagccgtccgatcacgctgatattcagcagctagtgtgccaacatcatattctggatgcccagttacgaataccagtcttttatccttactggcaagtaaataggtaccggcttcttctgaactagccaaaatatccagatccgtatattggcgaatagctgactcaggaaaatcagcaaagcgcgagtgcggcgcccagaatgtttcatcaaatcctctggtcaataatgccagcggttccagaatagtatgagagtaaacacctgatagtttagtttttcgcgtatatttaggcaggttataaagaatatttaaagccgcctgaacagcccaacagacaaaaagtgttgaagtaacgtgctctctggcccaattgataacggtttcaatttcctcccaatacgtaacatcctcaaattttactaatcccaaaggggcgccggttacgattaatccatcaaaattctgatcttttattgattcaaagtcgcaataaaaattatccaaatgctccactggtgtatttctacatcgacgactgtcaatacggagtaattgaatatcaatctgtaacggtgaattagagagtagcctgataaactgattttccgtttctatcttctttggcattagatttagtaacaataccttcatgggacggatgtcctgaacattggctctcgtcgatgtcataacaaaaatattttcgttgcgaagaaaattaactgctggcagttcatcaggtacacgaattggcattgtttaaaacctcaatcattccacatagtttagccttctagacagccaaaatttaaccttaaaatgggaggaatgtcgagtttttgtacgcaaattgaaattatttcattctatgaaataaaaaatggagataaagaacaaatgcaaaaaagccatccggtgaaggatggcttctctgacaaagtgatgtctggcagtgtcctactctcacatggggagaccccacactaccatcggcgctacggcgtttcactgctgagttcggcatggggtcaggtgggaccaccgcgctattgccgccagacaaatcctgttttcaatcccgaacaagctgtgtcaccggctactttctgttttccggtcactcttcatctgaaacttttatcgtcttgctctcaatccccgcaaaacaccttcggtgttgtcaggttaagccgcacggttcattagtactggttagctcaacgtctcgcaacgcttacacacccagcctatctacgtcctcgtctcgaacgttccttcagtgtcctctagggacaagggaagactcatctcaaggcaagtttcccgcttagatgctttcagcggttatctcttccgcacttagctaccgggcagtgccattggcatgacaacccgaacaccagtggtgcgtccactccggtcctctcgtactaggagcagcccctttcaatcttccaacgcccacggcagatagggaccgaactgtctcacgacgttctaaacccagctcgcgtaccactttaaacggcgaacagccgtacccttgggacctacttcagccccaggatgtgatgagccgacatcgaggtgccaaacaccgccgtcgatatgaactcttgggcggtatcagcctgttatccccggagtaccttttatccgttgagcgatggcccttccattcagaaccaccggatcactaagacctactttcgtacctgctcgcgccgtcacgctcgcagtcaagctagcttatgcctttgcactaacctcacgatgtccgaccgtgattagctaaccttcgtgctcctccgttacgctttgggaggagaccgccccagtcaaactacccaccagacactgtccgcaacccggataacgggcctacgttagaacaccagccattcaagggtggtatttcaaggatggctccatgcagactggcgtccacacttccaagcctcccacctatcctacacatcaaggaccagtgttcagtgtcaagctatagtaaaggttcacggggtctttccgtcttgccgcgggtacactgcatcttcacagcgagttcaatttcactgagtctcgggtggagacagcctggccatcattacgccattcgtgcaggtcggaacttacccgacaaggaatttcgctaccttaggaccgttatagttacggccgccgtttactggggcttcgatcaagagcttctccttacggataaccccatcaattaaccttccagcaccgggcaggcgtcacaccgtatacgtccactttcgtgtttgcacagtgctgtgtttttattaaacagttgcagccagctggtatctgcgactggcttcggctccgaaagcaagtttcttcacctactgccagcgtgccttctcccgaagttacggcaccattttgcctagttccttcacccgagttctctcaagcgcctgagtattctctacctgaccacctgtgtcggtttggggtacgattcaatgttacctgatgcttagaggcttttcctggaagcagggcatctgtcacttcagcaccgtagtgcctcgtcatcacgcctcagtgttatcagccgtccggatttaccaagaccgcccacctacacgcttaaaccgggacgaccgtcgcccggatgacatagccttctccgtccccccttcgcagtaacaccaagtacaggaatattaacctgtttcccatcgactacgcttttcagcctcgccttaggggtcgactcaccctgccccgattaacgttggacaggaacccttggtcttccggcgtgcgggtttttcacccgcattatcgttacttatgtcagcattcgcacttctgatacctccagcagccctcacaggccaccttcaacggcttacagaacgctcccctacccaaccacacttacgtgtcgctgccgcagcttcggtgcatggtttagccccgttacatcttccgcgcaggccgactcgaccagtgagctattacgctttctttaaatgatggctgcttctaagccaacatcctggctgtctgagccttcccacttcgtttcccacttaaccatgacttggggaccttagctggcggtctgggttgtttccctcttcacgacggacgttagcacccgccgtgtgtctcccgtgataacattcttcggtattcgcagtttgcatcgggttggtaagtcgggatgaccccctagccgaaacagtgctctacccccgaagatgaattcacgaggcgctacctaaatagctttcggggagaaccagctatctcccggtttgattggcctttcacccccagccacaagtcatccgctaatttttcaacattagtcggttcggtcctccagttagtgttacccaaccttcaacctgcccatggctagatcaccgggtttcgggtctataccctgcaacttaacgcccagttaagactcggtttccctgcggctcccctagacggttaaccttgctacagaatataagtcgctgacccattatacaaaaggtacgcagtcacaccccaaagggtgctcccactgcttgtacgtacacggtttcaggttctctttcactcccctcgccggggttcttttcgcctttccctcacggtactggttcactatcggtcagtcaggagtatttagccttggaggatggtccccccatattcagacaggataccacgtgtcccgccctactcgtcgaactcccactgccagcgtcttcagatacggggctatcaccctttactgccggcctttccagaccgttctcctgacgctgacactgatgttggttctgggctcctccccgttcgctcgccgctactgggggaatctcggttgatttcttttcctcggggtactgagatgtttcagttcccccggttcgcctcctgaccctatgaattcaggtcaggatagtgcaacggattgcactgggtttccccattcgggtatcgccgggtctcgcgggtcatatccccttcccggcgcttatcgcagattagcacgcccttcatcgcctctgactgcctaggcatccaccgtgtacgcttagtcgcttaacctcacaacccgaaggtgtcttcggattggggtattgagagactcctcaataccgtcttatcgacgtctactgagtgtttcaaattttcagcttgttccagattgttaaagagcatgtattggtaaaccggcaactatgcccgcttaacaataccttcattggcgccgtctttcacccgactcccgagcaaagtggcgtcccctaggggattcgaacccctgttaccgccgtgaaagggcggtgtcctaggcctctagacgaaggggacttcaagtcttcttcgcagacgctgctcgtcttacatgcatcagacaatctgtgtgaacactcacatttcaccatcataggttaaggaggtgatccaaccgcaggttcccctacggttaccttgttacgacttcaccccagtcatgaatcacaaagtggtaagcgccctcccgaaggttaagctacctacttcttttgcaacccactcccatggtgtgacgggcggtgtgtacaaggcccgggaacgtattcaccgtagcattctgatctacgattactagcgattccgacttcatggagtcgagttgcagactccaatccggactacgacagactttatgagttccgcttgctctcgcgaggtcgcttctctttgtatctgccattgtagcacgtgtgtagccctactcgtaagggccatgatgacttgacgtcatccccaccttcctccggtttatcaccggcagtctcccttgagttcccaccattacgtgctggcaacaaaggataagggttgcgctcgttgcgggacttaacccaacatttcacaacacgagctgacgacagccatgcagcacctgtctcagcgttcccgaaggcactccctcatctctgaaggattcgctggatgtcaagagtaggtaaggttcttcgcgttgcatcgaattaaaccacatgctccaccgcttgtgcgggcccccgtcaattcatttgagttttaatcttgcgaccgtactccccaggcggtcgacttaacgcgttagctccggaagccacggctcaaggccacaacctccaagtcgacatcgtttacggcgtggactaccagggtatctaatcctgtttgctccccacgctttcgcacctgagcgtcagtcttcgtccagggggccgccttcgccaccggtattcctccacatctctacgcatttcaccgctacacgtggaattctacccccctctacgagactctagtcaaccagtcttagatgcagttcccaggttaagcccggggatttcacatctaacttaattgaccgcctgcgtgcgctttacgcccagtaattccgattaacgcttgcaccctccgtattaccgcggctgctggcacggagttagccggtgcttcttctgcgggtaacgtcaatcgtgaaacgtattcaacttcacgccttcctccccgctgaaagtactttacaacccgaaggccttcttcatacacgcggcatggctgcatcaggcttgcgcccattgtgcaatattccccactgctgcctcccgtaggagtctgggccgtgtctcagtcccagtgtggctggtcatcctctcagaccagctagggatcgtcgcctaggtgagccgttaccccacctactagctaatcccatctgggttcatccgatggcgtgaggcccgaaggtcccccactttgctccttagaggtcatgcggtattagccaccgtttccagtggttatccccctccatcgggcagatccccagacattactcacccgtccgccgctcgtcagcaaagcagcaagctgcttcctgttaccgctcgacttgcatgtgttaggcctgccgccagcgttcaatctgagccatgatcaaactcttcaattaaaagtgtttgatgctcaaagaatcgttactgttagttcgtaatgaattaactgtttcagtcactcttcaagacttgaatctttttcgcctttcggctgtcgatagtgtcttgcgagtgcccacacagattgtctgattatgttgttaaagagcggttgcaaccgaacctttcttttcgggttgcgaggctgcctatcttacgctttttgcctccggagtcaagcaattattttcgctttcgatccgctgtccttcccggctgagtgcacctcaacgtcggtaaatggtggcgcattatagggagtttttcggccctgacaatagatttttcgcatttttttttggtatgttccttttttcaaaaatttcagcaaaaaatgctcattttaaattcaattattgatgacctctaaagcggttttaaaagttaatgctaaaactggaaaaacaatccatccctttaactgtccgaatatcaagattggtcctacgaaataataatcatgactacttcacaggacatctaaaggtcaaatctgcgcccatcatgtccggattgccttgcggcgaaggcctgggtttacctggatccaaaccctgt

SEQ ID NO: 3880 - DNA, 83080 bp, Xenorhabdus sp.; identical to SEQ ID NO: 3879
  CDS (68504)..(70318)

SEQ ID NO: 3881 - DNA, 83080 bp, Xenorhabdus sp.; identical to SEQ ID NO: 3879
  CDS (67431)..(68261)

SEQ ID NO: 3882 - DNA, 83080 bp, Xenorhabdus sp.; identical to SEQ ID NO: 3879
  CDS (65819)..(67165)

SEQ ID NO: 3883 - DNA, 83080 bp, Xenorhabdus sp.; identical to SEQ ID NO: 3879
  CDS (63059)..(63808)

SEQ ID NO: 3884 - DNA, 83080 bp, Xenorhabdus sp.; identical to SEQ ID NO: 3879
  CDS (62670)..(62969)

SEQ ID NO: 3885 - DNA, 83080 bp, Xenorhabdus sp.; identical to SEQ ID NO: 3879
  CDS (60172)..(60954)

SEQ ID NO: 3886 - DNA, 83080 bp, Xenorhabdus sp.; identical to SEQ ID NO: 3879
  CDS (56918)..(58516)

SEQ ID NO: 3887 - DNA, 83080 bp, Xenorhabdus sp.; identical to SEQ ID NO: 3879
  CDS (56415)..(56882)

SEQ ID NO: 3888 - DNA, 83080 bp, Xenorhabdus sp.; identical to SEQ ID NO: 3879
  CDS (55643)..(56371)

SEQ ID NO: 3889 - DNA, 83080 bp, Xenorhabdus sp.; identical to SEQ ID NO: 3879
  CDS (55293)..(55643)

SEQ ID NO: 3890 - DNA, 83080 bp, Xenorhabdus sp.; identical to SEQ ID NO: 3879
  CDS (53494)..(55290)

SEQ ID NO: 3891 - DNA, 83080 bp, Xenorhabdus sp.; identical to SEQ ID NO: 3879
  CDS (52918)..(53475)

SEQ ID NO: 3892 - DNA, 83080 bp, Xenorhabdus sp.; identical to SEQ ID NO: 3879
  CDS (51642)..(52826)

SEQ ID NO: 3893 - DNA, 83080 bp, Xenorhabdus sp.; identical to SEQ ID NO: 3879
  CDS (51440)..(51652)

SEQ ID NO: 3894 - DNA, 83080 bp, Xenorhabdus sp.; identical to SEQ ID NO: 3879
  CDS (50182)..(51324)

SEQ ID NO: 3895 - DNA, 83080 bp, Xenorhabdus sp.; identical to SEQ ID NO: 3879
  CDS (48780)..(49415)

SEQ ID NO: 3896 - DNA, 83080 bp, Xenorhabdus sp.; identical to SEQ ID NO: 3879
  CDS (45706)..(48162)

SEQ ID NO: 3897 - DNA, 83080 bp, Xenorhabdus sp.; identical to SEQ ID NO: 3879
  CDS (37569)..(38945)

SEQ ID NO: 3898 - DNA, 83080 bp, Xenorhabdus sp.; identical to SEQ ID NO: 3879
  CDS (34543)..(35238)

SEQ ID NO: 3899 - DNA, 83080 bp, Xenorhabdus sp.; identical to SEQ ID NO: 3879
  CDS (33054)..(34331)

SEQ ID NO: 3900 - DNA, 83080 bp, Xenorhabdus sp.; identical to SEQ ID NO: 3879
  CDS (31911)..(33020)

SEQ ID NO: 3901 - DNA, 83080 bp, Xenorhabdus sp.; identical to SEQ ID NO: 3879
  CDS (25513)..(27648)

SEQ ID NO: 3902 - DNA, 83080 bp, Xenorhabdus sp.; identical to SEQ ID NO: 3879
  CDS (23044)..(25503)

SEQ ID NO: 3903 - DNA, 83080 bp, Xenorhabdus sp.; identical to SEQ ID NO: 3879
  CDS (13267)..(14391)

SEQ ID NO: 3904 - DNA, 83080 bp, Xenorhabdus sp.; identical to SEQ ID NO: 3879
  CDS (12479)..(13246)

SEQ ID NO: 3905 - DNA, 83080 bp, Xenorhabdus sp.; identical to SEQ ID NO: 3879
  CDS (12251)..(12463)

SEQ ID NO: 3906 - DNA, 83080 bp, Xenorhabdus sp.; identical to SEQ ID NO: 3879
  CDS (11472)..(12254)

SEQ ID NO: 3907 - DNA, 83080 bp, Xenorhabdus sp.; identical to SEQ ID NO: 3879
  CDS (10840)..(11457)

SEQ ID NO: 3908 - DNA, 83080 bp, Xenorhabdus sp.; identical to SEQ ID NO: 3879
  CDS (8775)..(10760)

SEQ ID NO: 3909 - DNA, 83080 bp, Xenorhabdus sp.; identical to SEQ ID NO: 3879
  CDS (7758)..(8432)

SEQ ID NO: 3910 - DNA, 83080 bp, Xenorhabdus sp.; identical to SEQ ID NO: 3879
  CDS (2459)..(4534)

SEQ ID NO: 3911 - DNA, 66038 bp, Xenorhabdus sp.; identical to SEQ ID NO: 120
  CDS (532)..(1335)
  unsure (1)..(66038): unsure at all n locations

SEQ ID NO: 3912 - DNA, 66038 bp, Xenorhabdus sp.; identical to SEQ ID NO: 120
  CDS (179)..(529)
  unsure (1)..(66038): unsure at all n locations

SEQ ID NO: 3913 - DNA, 66038 bp, Xenorhabdus sp.; identical to SEQ ID NO: 120
  CDS (2006)..(2335)
  unsure (1)..(66038): unsure at all n locations

SEQ ID NO: 3914 - DNA, 66038 bp, Xenorhabdus sp.; identical to SEQ ID NO: 120
  CDS (2684)..(2791)
  unsure (1)..(66038): unsure at all n locations

SEQ ID NO: 3915 - DNA, 66038 bp, Xenorhabdus sp.; identical to SEQ ID NO: 120
  CDS (4445)..(5023)
  unsure (1)..(66038): unsure at all n locations

SEQ ID NO: 3916 - DNA, 66038 bp, Xenorhabdus sp.; identical to SEQ ID NO: 120
  CDS (7523)..(7627)
  unsure (1)..(66038): unsure at all n locations

SEQ ID NO: 3917 - DNA, 66038 bp, Xenorhabdus sp.; identical to SEQ ID NO: 120
  CDS (8016)..(8426)
  unsure (1)..(66038): unsure at all n locations

SEQ ID NO: 3918 - DNA, 66038 bp, Xenorhabdus sp.; identical to SEQ ID NO: 120
  CDS (8625)..(10067)
  unsure (1)..(66038): unsure at all n locations

SEQ ID NO: 3919 - DNA, 66038 bp, Xenorhabdus sp.; identical to SEQ ID NO: 120
  CDS (12330)..(13592)
  unsure (1)..(66038): unsure at all n locations

SEQ ID NO: 3920 - DNA, 66038 bp, Xenorhabdus sp.; identical to SEQ ID NO: 120
  CDS (13602)..(14090)
  unsure (1)..(66038): unsure at all n locations

SEQ ID NO: 3921 - DNA, 66038 bp, Xenorhabdus sp.; identical to SEQ ID NO: 120
  CDS (14151)..(15182)
  unsure (1)..(66038): unsure at all n locations

SEQ ID NO: 3922 - DNA, 66038 bp, Xenorhabdus sp.; identical to SEQ ID NO: 120
  CDS (15251)..(15604)
  unsure (1)..(66038): unsure at all n locations

SEQ ID NO: 3923 - DNA, 66038 bp, Xenorhabdus sp.; identical to SEQ ID NO: 120
  CDS (15604)..(16017)
  unsure (1)..(66038): unsure at all n locations

SEQ ID NO: 3924 - DNA, 66038 bp, Xenorhabdus sp.; identical to SEQ ID NO: 120
  CDS (16027)..(16491)
  unsure (1)..(66038): unsure at all n locations

SEQ ID NO: 3925 - DNA, 66038 bp, Xenorhabdus sp.; identical to SEQ ID NO: 120
  CDS (16588)..(16962)
  unsure (1)..(66038): unsure at all n locations

SEQ ID NO: 3926 - DNA, 66038 bp, Xenorhabdus sp.; identical to SEQ ID NO: 120
  CDS (17213)..(17407)
  unsure (1)..(66038): unsure at all n locations

SEQ ID NO: 3927 - DNA, 66038 bp, Xenorhabdus sp.; identical to SEQ ID NO: 120
  CDS (17521)..(17880)
  unsure (1)..(66038): unsure at all n locations

SEQ ID NO: 3928 - DNA, 66038 bp, Xenorhabdus sp.; identical to SEQ ID NO: 120
  CDS (17890)..(19347)
  unsure (1)..(66038): unsure at all n locations

SEQ ID NO: 3929 - DNA, 66038 bp, Xenorhabdus sp.; identical to SEQ ID NO: 120
  CDS (19640)..(19810)
  unsure (1)..(66038): unsure at all n locations

SEQ ID NO: 3930 - DNA, 66038 bp, Xenorhabdus sp.; identical to SEQ ID NO: 120
  CDS (19810)..(20223)
  unsure (1)..(66038): unsure at all n locations

SEQ ID NO: 3931 - DNA, 66038 bp, Xenorhabdus sp.; identical to SEQ ID NO: 120
  CDS (20265)..(20432)
  unsure (1)..(66038): unsure at all n locations

SEQ ID NO: 3932 - DNA, 66038 bp, Xenorhabdus sp.; identical to SEQ ID NO: 120
  CDS (20549)..(20965)
  unsure (1)..(66038): unsure at all n locations

SEQ ID NO: 3933 - DNA, 66038 bp, Xenorhabdus sp.; identical to SEQ ID NO: 120
  CDS (21669)..(21815)
  unsure (1)..(66038): unsure at all n locations

SEQ ID NO: 3934 - DNA, 66038 bp, Xenorhabdus sp.; identical to SEQ ID NO: 120
  CDS (22631)..(23104)
  unsure (1)..(66038): unsure at all n locations

SEQ ID NO: 3935 - DNA, 66038 bp, Xenorhabdus sp.; identical to SEQ ID NO: 120
  CDS (23640)..(26099)
  unsure (1)..(66038): unsure at all n locations

SEQ ID NO: 3936 - DNA, 66038 bp, Xenorhabdus sp.; identical to SEQ ID NO: 120
  CDS (29378)..(29527)
  unsure (1)..(66038): unsure at all n locations

SEQ ID NO: 3937 - DNA, 66038 bp, Xenorhabdus sp.; identical to SEQ ID NO: 120
  CDS (30064)..(30702)
  unsure (1)..(66038): unsure at all n locations

SEQ ID NO: 3938 - DNA, 66038 bp, Xenorhabdus sp.; identical to SEQ ID NO: 120
  CDS (31224)..(31331)
  unsure (1)..(66038): unsure at all n locations

SEQ ID NO: 3939 - DNA, 66038 bp, Xenorhabdus sp.; identical to SEQ ID NO: 120
  CDS (32639)..(33031)
  unsure (1)..(66038): unsure at all n locations

SEQ ID NO: 3940 - DNA, 66038 bp, Xenorhabdus sp.; identical to SEQ ID NO: 120
  CDS (34589)..(35062)
  unsure (1)..(66038): unsure at all n locations

SEQ ID NO: 3941 - DNA, 66038 bp, Xenorhabdus sp.; identical to SEQ ID NO: 120
  CDS (35628)..(36344)
  unsure (1)..(66038): unsure at all n locations

SEQ ID NO: 3942 - DNA, 66038 bp, Xenorhabdus sp.; identical to SEQ ID NO: 120
  CDS (36840)..(37493)
  unsure (1)..(66038): unsure at all n locations

SEQ ID NO: 3943 - DNA, 66038 bp, Xenorhabdus sp.; identical to SEQ ID NO: 120
  CDS (37867)..(38163)
  unsure (1)..(66038): unsure at all n locations

SEQ ID NO: 3944 - DNA, 66038 bp, Xenorhabdus sp.; identical to SEQ ID NO: 120
  CDS (38232)..(38519)
  unsure (1)..(66038): unsure at all n locations

SEQ ID NO: 3945 - DNA, 66038 bp, Xenorhabdus sp.; identical to SEQ ID NO: 120
  CDS (38633)..(39709)
  unsure (1)..(66038): unsure at all n locations

SEQ ID NO: 3946 - DNA, 66038 bp, Xenorhabdus sp.; identical to SEQ ID NO: 120
  CDS (40479)..(41735)
  unsure (1)..(66038): unsure at all n locations

SEQ ID NO: 3947 - DNA, 66038 bp, Xenorhabdus sp.; identical to SEQ ID NO: 120
  CDS (41738)..(42088)
  unsure (1)..(66038): unsure at all n locations

SEQ ID NO: 3948 - DNA, 66038 bp, Xenorhabdus sp.; identical to SEQ ID NO: 120
  CDS (44741)..(45778)
  unsure (1)..(66038): unsure at all n locations

SEQ ID NO: 3949 - DNA, 66038 bp, Xenorhabdus sp.; identical to SEQ ID NO: 120
  CDS (49344)..(49754)
  unsure (1)..(66038): unsure at all n locations

SEQ ID NO: 3950 - DNA, 66038 bp, Xenorhabdus sp.; identical to SEQ ID NO: 120
  CDS (64041)..(64316)
  unsure (1)..(66038): unsure at all n locations

SEQ ID NO: 3951 - DNA, 66038 bp, Xenorhabdus sp.; identical to SEQ ID NO: 120
  CDS (64678)..(65562)
  unsure (1)..(66038): unsure at all n locations

SEQ ID NO: 3952 - DNA, 66038 bp, Xenorhabdus sp.; identical to SEQ ID NO: 299
  CDS (48881)..(49063)
  unsure (1)..(66038): unsure at all n locations

SEQ ID NO: 3953 - DNA, 66038 bp, Xenorhabdus sp.; identical to SEQ ID NO: 299
  CDS (44665)..(45057)
  unsure (1)..(66038): unsure at all n locations

SEQ ID NO: 3954 - DNA, 66038 bp, Xenorhabdus sp.; identical to SEQ ID NO: 299
  CDS (39546)..(39920)
  unsure (1)..(66038): unsure at all n locations

SEQ ID NO: 3955 - DNA, 66038 bp, Xenorhabdus sp.; identical to SEQ ID NO: 299
  CDS (38773)..(39084)
  unsure (1)..(66038): unsure at all n locations

SEQ ID NO: 3956 - DNA, 66038 bp, Xenorhabdus sp.; identical to SEQ ID NO: 299
  CDS (38279)..(38479)
  unsure (1)..(66038): unsure at all n locations

SEQ ID NO: 3957 - DNA, 66038 bp, Xenorhabdus sp.; identical to SEQ ID NO: 299
  CDS (38074)..(38253)
  unsure (1)..(66038): unsure at all n locations

SEQ ID NO: 3958 - DNA, 66038 bp, Xenorhabdus sp.; identical to SEQ ID NO: 299
  CDS (34298)..(34666)
  unsure (1)..(66038): unsure at all n locations

SEQ ID NO: 3959 - DNA, 66038 bp, Xenorhabdus sp.; identical to SEQ ID NO: 299
  CDS (23261)..(23521)
  unsure (1)..(66038): unsure at all n locations

SEQ ID NO: 3960 - DNA, 66038 bp, Xenorhabdus sp.; identical to SEQ ID NO: 299
  CDS (21449)..(22477)
  unsure (1)..(66038): unsure at all n locations

SEQ ID NO: 3961 - DNA, 66038 bp, Xenorhabdus sp.; identical to SEQ ID NO: 299
  CDS (19256)..(20239)
  unsure (1)..(66038): unsure at all n locations

SEQ ID NO: 3962 - DNA, 66038 bp, Xenorhabdus sp.; identical to SEQ ID NO: 299
  CDS (17007)..(17186)
  unsure (1)..(66038): unsure at all n locations

SEQ ID NO: 3963 - DNA, 66038 bp, Xenorhabdus sp.; identical to SEQ ID NO: 299
  CDS (2903)..(3802)
  unsure (1)..(66038): unsure at all n locations

SEQ ID NO: 3964 - DNA, 24270 bp, Xenorhabdus sp.; identical to SEQ ID NO: 121
  CDS (3880)..(4182)

SEQ ID NO: 3965 - DNA, 24270 bp, Xenorhabdus sp.; identical to SEQ ID NO: 302
  CDS (15767)..(15964)

SEQ ID NO: 3966 - DNA, 24270 bp, Xenorhabdus sp.; identical to SEQ ID NO: 302
  CDS (3587)..(4045)

SEQ ID NO: 3967 - DNA, 24270 bp, Xenorhabdus sp.; identical to SEQ ID NO: 121
  CDS (9750)..(9983)

SEQ ID NO: 3968 - DNA, 24270 bp, Xenorhabdus sp.; identical to SEQ ID NO: 121
  CDS (12218)..(12526)

SEQ ID NO: 3969 - DNA, 24270 bp, Xenorhabdus sp.; identical to SEQ ID NO: 121
  CDS (558)..(755)

SEQ ID NO: 3970 - DNA, 24270 bp, Xenorhabdus sp.; identical to SEQ ID NO: 121
  CDS (1013)..(1210)

SEQ ID NO: 3971 - DNA, 24270 bp, Xenorhabdus sp.; identical to SEQ ID NO: 121
  CDS (1599)..(2087)

SEQ ID NO: 3972 - DNA, 24270 bp, Xenorhabdus sp.; identical to SEQ ID NO: 121
  CDS (2327)..(3082)

SEQ ID NO: 3973 - DNA, 24270 bp, Xenorhabdus sp.; identical to SEQ ID NO: 121
  CDS (3301)..(3507)

SEQ ID NO: 3974 - DNA, 24270 bp, Xenorhabdus sp.; identical to SEQ ID NO: 121
  CDS (3629)..(3883)

SEQ ID NO: 3975 - DNA, 24270 bp, Xenorhabdus sp.; identical to SEQ ID NO: 121
  CDS (10551)..(11489)

SEQ ID NO: 3976 - DNA, 24270 bp, Xenorhabdus sp.; identical to SEQ ID NO: 121
  CDS (12561)..(12869)

SEQ ID NO: 3977 - DNA, 24270 bp, Xenorhabdus sp.; identical to SEQ ID NO: 121
  CDS (13757)..(14278)

SEQ ID NO: 3978 - DNA, 24270 bp, Xenorhabdus sp.; identical to SEQ ID NO: 121
  CDS (16607)..(17341)

SEQ ID NO: 3979 - DNA, 24270 bp, Xenorhabdus sp.; identical to SEQ ID NO: 121
  CDS (19006)..(19749)

SEQ ID NO: 3980 - DNA, 24270 bp, Xenorhabdus sp.; identical to SEQ ID NO: 121
  CDS (21211)..(22149)

SEQ ID NO: 3981 - DNA, 24270 bp, Xenorhabdus sp.; identical to SEQ ID NO: 121
  CDS (22874)..(23719)

SEQ ID NO: 3982 - DNA, 24270 bp, Xenorhabdus sp.; identical to SEQ ID NO: 302
  CDS (19344)..(19634)

SEQ ID NO: 3983 - DNA, 24270 bp, Xenorhabdus sp.; identical to SEQ ID NO: 302
  CDS (11079)..(11321)

SEQ ID NO: 3984 - DNA, 24270 bp, Xenorhabdus sp.; identical to SEQ ID NO: 302
  CDS (2)..(562)

SEQ ID NO: 3985 - DNA, 361 bp, Xenorhabdus sp.
  CDS (1)..(360)
tggttcaacatgcgcagcgcctccggcatggtcttcaagattcccggcaagtcgcgctcggtgcttgaggacgatggcgcggccgagatgcttgatggacccgacccactgccgatccgtggcctttccggcaatgtcgatgtgcatttcggtgccgccggcgccgttccgggagaccgcatcgtcggcatcatggaaaaaggcaagggcatcaccatctatcccattcaggcgccggcgctgcaacgcttcgacgatgaaccggagcgctggatcgatgtgcgctgggatctcgatgaggcgaacaagtcgcgcttcatggcgcgggtgatgatcaatgcgctgaacgagccgggcacgc

SEQ ID NO: 3986 - DNA, 1018 bp, Xenorhabdus sp.
  CDS (934)..(1017)
tgcgatatgttctgccaaagagctggaaagtaaccctgaatctgctattgcgaatgcatatgatatggtgatcaatggctacgaagtgggtgggggttcagtacgtatccatcgtaatgaaatgcagcaggcggtattccgtattctgggtatcaccgaagaagaacaacaggaaaaattcggtttccttctgaatgccctgaaatatggcacgcctcctcatgcagggctggcttttggtctggatcgcctcgttatgttgctgacggatactgataatatccgtgatgtgattgcattcccgaaaacaactgcagcagcatgtctgatgactgaagcaccgggttacgcaagttcggcagcactggaagagttagctatttcggttactaaaaaagagagcgaataatggattacaagcgccctgaatctgtactggttgttatttatgctgccgacagcaaaagggtgctgatgttacaacggcgggacgatcctgatttctggcaatccgttacggggagcctcgaagagaacgaaaagccgtatgaagcagcgttgcgtgaagtacaggaagagatcgggattgatattgtcagtgccaatcttgaactgatagattgtcagcgcagcctctattatgagatcttctcacatttacgttatcgatatgctcccggggtaacacggaacaaagaacactggtttttgttgccgttgcccggggagtgcgagatcctgttgacagagcatctggcttatcaatggctggcagtggaaaaagcggccagcctgactaagtcatggagcaatcagcaggcaattgaagagtttgttatttagtctgctaaacctgacagatttcagtttaccgtagataaaacaggtaaactgaatgatgaaaggcacagacgttttatcggagatattttcatggcaggtcatagtaagtgggccaatacgaagcaccgtaaagcggcgcaggatgcaaaacgcggtaaaattttcactaaaatta

SEQ ID NO: 3987 - DNA, 1018 bp, Xenorhabdus sp.; identical to SEQ ID NO: 3986
  CDS (2)..(409)

SEQ ID NO: 3988 - DNA, 997 bp, Xenorhabdus sp.
  CDS (1)..(573)
agtcgatatgagcttgagccactgagacaagttcaatccctgcaacaacgtctcgaaatggctttggattacttctttgcccaaaaacaacggagttttaatggattacaccaccgcctccagcaacaaagccctgatttacggctggcccgtcaacaaaatcgtttatctgaattacgtcagaaattaattgacggtttattacgtcatttaaaacagaattctgctgccagtgaaaaattaattcagcgtctgttacaacacactcctgagcaggagataagacattatagccagcatattcaacaaattgattttcgcttaagacaggcaattgagcggcaattatcccgctataaagagaaattcgctgtttcctgttcgcgtatggaagctgtcagcccactggcaaccttgagtcgcggttatagtatcagcgaaacaccggatgggaagttgctgaagcaggttaagcaggtaaaagtgggtgattcactgaaaacacgagtacaggatggctgggttgagagccaggtgacacaagtacagaaagccagtaagagaaaaaaataaattcacattataatttttaaattaataagggggttatattaaaatctcctcccttattatatcccccctcattttatcacttgatgaatgacatctttactctacacttaattatataaagaaattattttcattaaaaatgatcttgttaaaaaacactatttttgcgtccgatatatttatttccataacagcaatggcttggttttaaatatttataataacaactcaataatattaaacataaaataaagaggttcttatgaacgacataacatctcaaacactacaaaaaattagtaaagaagctttagatgatataaaaaaaaccttagatgatttatccattctagttaaagatatagtaaaaacgttgcaagatgctaatgttatttctgctcacacagggaaaataatatcagcc

SEQ ID NO: 3989 - DNA, 997 bp, Xenorhabdus sp.; identical to SEQ ID NO: 3988
  CDS (836)..(997)

SEQ ID NO: 3990 - DNA, 1048 bp, Xenorhabdus sp.
  CDS (2)..(853)
taaacactgcgatatggaaatcactcacgttattcgtggtgaagaccatatcaacaacacaccacgtcagattaacattctgaaagcactcaacgcaccagtaccagaatatgcgcatgtttctatgatcctcggtgacgacggtaaaaaactgtccaaacgccatggtgcggtcagcgtaatgcaatatcgcgatgatggttacttgccagaagcattgctgaactatctggttcgtttgggctggtcacacggtgatcaggaaattttcaccgttgaagaaatgactgagctgttcagccttgatgctatcagcaaatcagccagtgctttcaatactgaaaaattgctttggctgaaccatcattacatcaataccctgccagcagaagaagttgctgttcatttagcatggcatattgaacagcaaggtatcgatacccgcacaggcccagagttagtggatctgatcaaactgctgggtgagcgttgcaagacattaaaagaaatggccagcgctggtcgttacttctatgaagagtttgcagagttcgatgctgatgccgcgaaaaaacatctgcgtccggttgcgcgtcaaccattagaagttgtgcgcactaaactggcagccattaccgaatggacacctgagaatattcatcacgctattcaggcaacggctgacgaactggaagttggaatgggtaaagtaggcatgccactgcgcgttgctgttaccggcgctggccaatcaccaagtgttgatgtaaccattcacgccatcaatcaggctcgttcactggctcgtattgataaagcactggcttatatcgcacagcgtgaagcgcaataatcaatacgctaattaactgtaacaatttatatagttaatggatttcaagttacatcacagcggcaagtagacgcatccccagagcattagatactttgtgattggggtgcatagcgcagcaaccaagtggcaacttgaaatccacaaggttattgatgggctttttcagcgcttatacatagaaaacttaatgaa

SEQ ID NO: 3991 - DNA, 768 bp, Xenorhabdus sp.
  CDS (83)..(580)
  unsure (1)..(768): unsure at all n locations
nnnnnnnnnnnnnnnnnnnnnnnnnnnnnnnnnnagatgcaggagacccgtgaaaaggtcatgccccaagtggaccctgccggaaaccatcaccattcaggaactgtcgcagcgcatgtccgaacgcgccgtcgacgtcatcaagttcctgatgaaggaaggccagatgatgaagccgggcgacgtgatcgacgccgatctggctgaactgattgcggtcgaattcggccacaccgtcaagcgcgtttccgaatccgacgtcgaagaaggcatcttcaaccagacggatgacgaaggcgaaatgctgccacgtccgcctgttgtcacgatcatgggccacgtcgaccacggcaagacctcgcttctcgacgcgatccgtcaggccaacgtcgttgccggcgaagccggtggcatcacccagcatatcggcgcctatcaggtcgaaaagaatggtcagaagatcaccttcatcgacacccccggccacgccgccttcacggccatgcgtgcccgtggcgcgcaggcgacggatattgccgttctggtggttgccgcagacgacagcgtgatgccgcaaacgnnnnnnnnnnnnnnnnnnnnnnnnnnnnnnnnnnnnnnnnnnnnnnnnnnnnnnnnnnnnnnnnnnnnnnnnnnnnnnnnnnnnnnnnnnnnnnnnnnnnnnnnnnnnnnnnnnnnnnnnnnnnnnnnnnnnnnnnnnnnnnnnnnnnnnnnnnnnnnnnnnnnnnnnnnnnnnnnnnnnnnnnnnnn

SEQ ID NO: 3992 - DNA, 744 bp, Xenorhabdus sp.; identical to SEQ ID NO: 6
  CDS (453)..(743)

SEQ ID NO: 3993 - DNA, 771 bp, Xenorhabdus sp.
  CDS (1)..(462)
ctctacagaccagggtatggtatggctgttgctcaggcacaatatccggtacatgacatcacagcaaaattgagagaaaaaggaatcaaagttcgttttggtattcatccagtggcggggcgtttgccgggtcatatgaatgtattactggctgaagccaaagtaccttatgatatcgttttagaaatggacgaaatcaatgatgattttgctgaaacggataccgttctggttattggagccaatgacacagttaatccggctgcacaggaagatccaaacagcccgattgcgggaatgcctgtattggaagtctggaaagcgcaaaatgcgattgttttcaagcgctcgatgaataccggctatgccggcgtacaaaatccactgttctttaaagagaatacacaaatgttatttggtgacgcaaaagcaagtgttgatgcaatattacgcgcactataaacataaatatccataaattaaaaaaagagccttgaatgaacattcaaggctctttttttaattcttaaaatgactctctaattatactctgacttttaattgatcatgtgaaggcgagaaccttttctatttattaggatagtgtaatttaattatattttgtggtgaaaaatttcaccataaaaatggttgtgggtgaaccatgaaaagttcatgaatgttattgtatcaggccggaaaaaagagcgaataagtaatttttatcactaaaatattcagaataaaatctaaattaacaaagggatgagt

SEQ ID NO: 3994 - DNA, 720 bp, Xenorhabdus sp.
  CDS (557)..(718)
caggcagtatccaatatagggaaagtgtgggaaataaacttaataataacccgataaaaagcgataaaaacagagcggataatgtgacttgattggctgtatatcccagatgatgaagacgaatgacgataggccgtaacaggttctgaaaacggggttttagatcatatatagtcattatttccctagatccgttagaggtaaaaatatcagtgttattaatgtaccatgtgatgtcaaatattatgtgtagaaaaacatactgatatactattcatttttcaggttacttttcagggagtaatcgcaattattccctgccgtgtataagtcaccaaaactagtttaagtatcactattatggtggtgcctattttctttgttgtacacgctctgtcagagatacggcggcttattcggatgctttggcaggagcacttccgggtgagccttacacacctccgaccccggatttgccatggttagaactgtcagagggtgatacgggagaattacacattgggtttactgtttcaccgccaaatggacagactcagtgtttgcctatcctttcaatatttctggtcagtcagctatttcattgccatttggctggagtgttgagggtattcctattggtatacagcttgtcgggcgttatggtgatgaggccacagttcttcaggtttcggcacaactggaatatgcaatgccctggaa

SEQ ID NO: 3995 - DNA, 1209 bp, Xenorhabdus sp.
  CDS (681)..(1208)
acgtatgactcagtttggtaaaggttcttgcaataatgaggatagaattacggattttcattgaggttctttgaaaaagaatataagtatgcaactatttttgccagaaaataggttatcgattttaattaagccagtgtctatataatagctattttaactttatgattaatattaattttggtgagaataatcgacgctatggaaaatttattctacagtaataatatttagtaggtttcacttaataattatttagatgaaagttaggttatttagagaaccctcatatgaagatatatgatcgcattgtatttcccatagctattagagtgactttaattctttccggaatgagtgttgatgcaactgcggcctcattatgcggctcttcgagcacgaatactactatttctgaaaatcagacaaccccctataatctttcacagtgcgaaaatcttactatcaaggagcacgtatcgattgatgttcctacaggactagcaaatgaattcgatccatatggtctgaaatacagtgcggttaatattggcgctaacaataatcaaggacagataatttccgttgatcgtattgaaaataaaggaactttacagggaagtgctggggtcactgtaacttataggggctctgttggaacgttacgtaatgatggaatcatgaatggaacgaacggtacagtatcggtttctggtcaaatggatgtgttggataattatggctcaattaatgctggcgatggcacgaattcattgaatgcgatactgatacaaggcccgagtggaccatatgccaagcgtccacatggacaaatagataccatcctaaatcagcctggagcgtcgattgatgggatctctgttatcacttcaacacttaatcttcttcataatttaggaaggttggaatctcagaagaataattccctctctactttagcaacgtttgttatagatgctggcagtaatgttggcatttttaataatgacggaagcgtgattggtcccaatcacggcgttttgattcgaggtggaggctacctcgaaactctcaataataaatctggaagtattacggctgaacaggacgcaattcaggtcacagggcaaggcatggcttttgtagaagctaacccttcgatcaggccatccaaaattaaacaaatattaatgctggcctgctacatgg

SEQ ID NO: 3996 - DNA, 771 bp, Xenorhabdus sp.
  CDS (3)..(770)
taaagaagtatctcgcggtacgtctcgctgtggattacagcggtagaaatacgtttatgaaatataccaaccctcgattctatgattctgatatgaagaaaggttctgaaactgtggatgccaggtttaaagcactttggcaaccactggatagcccttggctcgctaaactaacctacttccatacagcagcaaaaaactctgatgccgagtctgcttcattaccttaccgtaatttgaagagtatgactttaggcataaacagatctaaaactatcagtgatgtcggtatcttcgatcttcagtatgattttgacaacgatatcgtgctctccaaccagcttcaatattctgcatcgaaataccgttacactttcacgaagatgttgccaggtatcgcaaaccgtgattcgaacaatatcactaacgaaacacatttgaactttggtgatgaatattcaatctggagcggagtgacagggctttattattcgcgtgataaggccagtaatgtgcttaataatgtcttgggcaaggctcattccgatttgactaacacgagtgttggccttttctctgaggggaccacacgttttgcaggaaaatgggctttgtctgccggtttgcgttatcagtatgatcaggtcaagcatgaagggatcaacagctatgtacccggtgtctatcatgaatatagtaaagggttccatgctgtcctgccgaaagtttcccttgcttacgatattactgacgatgtcactgtcggtgctt

SEQ ID NO: 3997 - DNA, 818 bp, Xenorhabdus sp.
  CDS (2)..(811)
ctcacccgctatcttcaaggcgcttatcagcctgaaaacccgtaacggtattattttttctccacatccactagctaaaaatgccacaaataaagcagcagaaatcgttttacaagcggctgtcgctgctggtgcaccaaaagacattatcggctggatagatgaaccgtctgttgagctctcaaatgcgttgatgcatcaccctgatattaatctcattctggcaactggcggccccggaatggtaaaagccgcctacagctcaggtaaacccgctatcggcgttggggcaggtaatacccctgttgtaattgatgaatcagcagacatcaaacgggctgttgcatcgattttaatgtccaaaactttcgataacggtgtgatatgtgcttctgaacaatctgttattgtggttgacagtgtttataaacaagtccgtgagcgcttttccagtcatggaggttatatcctacaaggaaaagaactgaaggcagtccaaaatattattttgaaaaatggtagcctgaatgccgcaattgtcggtcagccagccatcaaaatagcagaaatggcgggtatcagcgttcccgaaaatacaaaaattcttattggtgaagttacagtcgtggatgaaaaagaaccattcgcccatgaaaaactatcacctttattagccatgtatcgggggaaagattttggagatgccgtcggaaaggcagaaaaattagttgaaatgggggggattggtcacacctcttcactttatatcgaccaagacaatcaagctgcccgtattaaatatatcctttagagcacgt

SEQ ID NO: 3998 - DNA, 881 bp, Xenorhabdus sp.
  CDS (2)..(127)
gagcggtgatgatatggaagctttggcatttgcttggctggcattccgtaccatgtttgggttatcgggtaacttgccatcggtgactggtgctgatagggaaacgattttaggcgcaatttatcctgttgctggctgataacaatgttatgctgaaactcacttagaaatagagaattagacatgtcagaacataatgatactcatatagcagagctgcgccgtgaatatatgcgtggtgggttacggcgcaaggatcttactgaagagccgatggctctttttgagctttggctgaaacaggcctgtgatgccgggcttagcgacccaacagcgatgtgtgtagcaacagtcgatgagcatgggcagccttatcagcgtatcgttctattgaagcattttgataaccgcagtctggttttttataccaatcttggtagccgtaaagcgaaacatttagctcagaataaccgtatcagcctccatttcccctggtatcagcttgagcgtcaggtcagctttctgggcaaagccgagcgtttatcacctctcgaagtagtgaaatatttccatagccgcccgagagacagtcagattgcagcctgggcttcacaacaatcttcccgtatttctgcccgaagtattttagaagggaagtttttagagctgattcataagttccagaatggcgaagtgccattgcccagttttaggggtgggttacgggtcgaatttgattcggtagagatctggcaggggggagcaagccggctgcatgatcgaatgctatacctgcgggaaggatatgagtggcatattggtcgtatggcgccttaactgcctaaattaccttttttaatactggcacttatagttctggc

SEQ ID NO: 3999 - DNA, 881 bp, Xenorhabdus sp.; identical to SEQ ID NO: 3998
  CDS (184)..(837)

SEQ ID NO: 4000 - DNA, 779 bp, Xenorhabdus sp.
  CDS (209)..(778)
taaacataatattttaataatacgtaattaataatcgttattgattctaattatttgttatatatatatacagcaagtgttatagtagttatatgtctacataaatatattctatatggttatatgagaataactattagcaatatagagctgatataaactacaaaaaacattcgtatataaattacaatttagggacagtgctgatatgaaactacagcaattacgttatatcgttgaagtggttaatcacaacctgaatgtctcttctacggcggaaggattgtatacctctcaaccagggatcagcaaacaggtaaggatgcttgaagatgaactgggtattcaaatatttgcgcgcagtggaaaacatctgacacacgttacaccggctggtgaggaaatcgtccgtatttcacgtgaagttctgtcaaaaattgattcgattcgctcagttgccagtgaacacacttaccctgatcgtgggtctttatatattgcgacgacacacacacaggcaaggtatgcattaccgcctgttattaaaggttttattgagcgttatcctaatgtttcccttcatatgcatcagggctcaccaactcaaattgcagaagaggtctgtaaagggaacagtgattttgcaatcgctactgaagcgcttcatctttatagtgatctcatcatgctgccttgctatcactggaatcgttcgattgttgtcaccaaagatcacccattggcgacaaagcaaaatgtaaccattgaagagctgcttt

SEQ ID NO: 4001 - DNA, 987 bp, Xenorhabdus sp.
  CDS (642)..(953)
ctaatgaaccgattaaacttgcgcaaaccattcaggatatggggctacgttacgttgttatcacttccgttgaccgtgatgacttacgtgacggcggcgcacagcactttgctgactgtatcactgcgatccgtgaaaaaaatccatcaattaaaattgaaactctggtaccggatttccgtggtcgtatggatcgcgccctggaaattttgaccgcaacaccacctgatgtgtttaaccacaatctggaaaacgtaccacgtatgtatcgtcagatccgtccgggtgctaattatgaatggtcattaaaattactggaaagatttaaagaagcacatccggatattccgactaaatctggcctgatggtaggtttaggagaaactaacgaagagattctggaagtcatgcgtgatttgcgcaaacatggcgtcaccatgctgacattggggcagtatttacagcctagccgccaccatttgcctgtacagcgttatgtcagcccggcagaatttgatgaaatgaaagaggcagccttagaaatgggctttacccatgcagcctgtggtccgtttgttcgctcatcttaccatgcagacatgcaggccaaaggcatggaagtcaaataagcgataccactactgatgaatcttgttcttgctgtatttatcggtggtggcataggcagcgttttacgctggtttatcagcctccgcctgaaccatatctcggcaccgattgccgttgggactctgacggctaactgtgttggtgcatttattatcgggctggggctggcttatttcagtaaagcgacacatatcgatcccgtctggaaacttctgttaacaacaggcttctgtggtggcctgacgacgttctctacattttcggctgaagtggtttatttattacaggcggggaaaatcagctggcgttgggtaacattttaacgaatggaactggctcattattgatgaccatgct

SEQ ID NO: 4002 - DNA, 987 bp, Xenorhabdus sp.; identical to SEQ ID NO: 4001
  CDS (3)..(629)

SEQ ID NO: 4003 - DNA, 1146 bp, Xenorhabdus sp.
  CDS (162)..(1103)
aaaaaaccagctttgttcggccagtgttacaaaaattacttggcaaataaatgaacccggtttgattaaagaaggtgattagcaagccttttaggggggaagttggggttttttcattgttacagaacgcagccatttttatactattggtggtcgggtaggccgttggcattcggacgattgcgttatttgatatgagcgccagacaactgtctgaagagcaacatcctgttctggaaaatagccagcaagaagtcgatcaacggattatctccgttattgaagactttatcagcagaaatcagcggcgtaaccgcgaactgattgcgatctccattattgttcccggattggttgatccccataatggcattatccgctatatgccacacattaaagttgataagtggccattggtgcaaaacctgcgcaatcatttcaatatttcatgttttatcgggcatgacatccgcagtttggcactggcagaaaactatttcggagccactcgcgattgtgaagactctcttctcgtacgtgttcatcgtggtgtgggtgctggcgttattatcaagaataatatcttgctcaataaacgtggcaatctgggagagataggccatatccaaattgaaccactgggtgagcgttgtcattgcggtaattttggttgtctggaaacagtcgcatccaatccggccatagaagctaaaatacagcaccaattacagcaggggtttccaagtaagctgacattggataagtgcagcatccatgacatatgtcgcgctgctaatcagggcgactctctggcagtcgaagtgatccggcaggcagggcataacctcggtaaagccatcgccattgccattaacttctttaacccacaaaaagttgttattgccggtgatatcactgaagcagagcagtctctgcttaccgctattcaaaactgcatcaatactcagtctttgaaaaacttccgtgaagacctgcctatcgtggtttccgaattaaaccactgttcagcaataggcgcattcgccttaacgaagcgagctatgctcaatggtgtgctgttacaacaccttcttggaggataattcgccatttcagcttcttttatcatcgagatctttaaaggac

SEQ ID NO: 4004 - DNA, 765 bp, Xenorhabdus sp.
  CDS (260)..(649)
cagacgaatgcccaccttgcgcacagattacttcactggccggcgctaatgctgacatctatgtatagctacttagtcgtctatatccggtcataagtattttttggcaaagctgggatgccatgttgttggcgaagagataagccttctgatactataccgctcatctttcaggtgacagttttactgctgatagcctgaaatctactgggtatatattacctgttattttttatggcagatggaataaaacacgatgacgaagcgtgacagatcactaacccggttgggtatcacccaatgggttctgcgtaaccctgcggccctgcggggtgaattatctgtcctcatccctgactcaacccgtctgttgatcattactcatgatcacattgacttaagccattcattacttgttgatattttcacagccatggggattgatgcctcattagtttattgcatcacaacaaaagatgttgaattgctttcggaatcaatacgctgcccatgctggctgctggggggtgatattaccttatcaatacaagggatttctttgagaaaccccgcattaaaagacacatcccttgatggggatgcacaacgttctctttggcaacaaatataccattatgaaaaaaatttctctattaactcccgctgatctttccgcggccttttacatagaacacgcccgtctcccctttttctggagagagaaaacactctattttaatttaggagagcgttttttttttttta

SEQ ID NO: 4005 - DNA, 1261 bp, Xenorhabdus sp.
  CDS (208)..(786)
ggaccatgtgctctaaggttctctggtgtcgcttccgcggtcgcttcggccggcatcaggttcagcgccaaaaccctgctcgaaatcgcggtggcgcttctcggcgcgtccctcagccttgccattctcaagggcgccggcgggctgctgattggtggcatcgcgctgatcgtcgcgctgtcgctaatcgtcagctatgccgccgggcgaatgctgggcctgccgcccaagcttgcaacgctgatcgcctgcggtaattccatctgcggcaattccgccatcgccgccgccgcgcccgccattggtgccaagccggaagatgtcgccgcatcgattgcctttaccgcggttctcggcgtcgccgccgtgcttttgatgccattcctgccgcagcttctgggtctcgatgccacccaatacggcattttcgccggcctgacggtctatgccgtgccgcaggttctggccgccaccgcgccgctcggcgcgattgccgtgcagaccggcaccatcgtcaagctcattcgcgtgctgatgctggggccggtcatcgccacgctttccgtcatccatggccagtccggcaagggacgcctgaagctgcagcagatggttccgtggttcatcatcggcttcgtgctgatgatcatggcccgttccttcggcctcatccccgaagttctgctttcccccgtcgcctcgctctccaatatcctcaccatcatgtcgatggcggcgctgggtctttcggtcgatattcgcagccttcgccatgccggcggcaaggtcatcgtcgccgccagcctgtcgctggtgctgctgggtgttctgagtttcggcctgatcgtgctgacacaggcggcctgagggcgggcctatttcccggtgctgaccgtcaacgtgtaatgcgcgccgaggccacggcgcggcgaccccagaatgagtgtcgggcggatcagccattcggtatccgccttcggcgtcagcgtcgcgatcttgccgccggaatcgctgaagaagatcgcatcctcatccggcgtcgaaaaatcgaagaccgccatcaggacaaattcgctggaggcggcaagctcgatcttcaccgtctgcccggccttcaccttcaggcgataaacatcgccacgcccacgccgggtccagccatccagcgtcagcggtccagacggcggcagcgccacttccttcagcctttcgccgtcatcgagccagatgccatcgacattgcggctttgcgcaaaaggcg

SEQ ID NO: 4006 - DNA, 1261 bp, Xenorhabdus sp.
  CDS (3)..(386)
cgccttttgcgcaaagccgcaatgtcgatggcatctggctcgatgacggcgaaaggctgaaggaagtggcgctgccgccgtctggaccgctgacgctggatggctggacccggcgtgggcgtggcgatgtttatcgcctgaaggtgaaggccgggcagacggtgaagatcgagcttgccgcctccagcgaatttgtcctgatggcggtcttcgatttttcgacgccggatgaggatgcgatcttcttcagcgattccggcggcaagatcgcgacgctgacgccgaaggcggataccgaatggctgatccgcccgacactcattctggggtcgccgcgccgtggcctcggcgcgcattacacgttgacggtcagcaccgggaaataggcccgccctcaggccgcctgtgtcagcacgatcaggccgaaactcagaacacccagcagcaccagcgacaggctggcggcgacgatgaccttgccgccggcatggcgaaggctgcgaatatcgaccgaaagacccagcgccgccatcgacatgatggtgaggatattggagagcgaggcgacgggggaaagcagaacttcggggatgaggccgaaggaacgggccatgatcatcagcacgaagccgatgatgaaccacggaaccatctgctgcagcttcaggcgtcccttgccggactggccatggatgacggaaagcgtggcgatgaccggccccagcatcagcacgcgaatgagcttgacgatggtgccggtctgcacggcaatcgcgccgagcggcgcggtggcggccagaacctgcggcacggcatagaccgtcaggccggcgaaaatgccgtattgggtggcatcgagacccagaagctgcggcaggaatggcatcaaaagcacggcggcgacgccgagaaccgcggtaaaggcaatcgatgcggcgacatcttccggcttggcaccaatggcgggcgcggcggcggcgatggcggaattgccgcagatggaattaccgcaggcgatcagcgttgcaagcttgggcggcaggcccagcattcgcccggcggcatagctgacgattagcgacagcgcgacgatcagcgcgatgccaccaatcagcagcccgccggcgcccttgagaatggcaaggctgagggacgcgccgagaagcgccaccgcgatttcgagcagggttttggcgctgaacctgatgccggccgaagcgaccgcggaagcgacaccagagaaccttagagcacatggtcc

SEQ ID NO: 4007 - DNA, 648 bp, Xenorhabdus sp.
  CDS (2)..(643)
ttttcatgtgccaattgctttgctcatggagggagaactggataaaggtgcattagaaaaaagtttgagtactatttttgaacggcatgaaagtttacgttttaggttttataaagaaaataataatattttcatgcagcctgatgaaaatatgaaagttaacttacaagttattgaagcattaccaagagaaataaaaagagaagaaatttctattgaaattaatagactctgggaagagaaattaagaacaccttttgatgtttataatggcccattaatcaggacattcttactacctgtttcggaaaaagtcaccatattgcttattgatgtccatcatattatttctgatggatggtctgttaatatcattatgaatgagtttaagaaattatatacgacttattcacaaggggaaggaaatacattgccgcctgttcctatgcaatattctggctatgtttatgacttacaagacctccatgcgactgaggaagcgaaaaaacagattaaattctggcaacaacaattttctgatgtcaattctgaccgcgattttccggctcccttcagaaaacacttggcttcaaaatatcgatattgctcccgtcatataaaaatacctaattcccttctttagagcac

SEQ ID NO: 4008 - DNA, 525 bp, Xenorhabdus sp.
  CDS (92)..(412)
ggggttaattttccccaatataaagcgcttcctgttctctccatcgggaaaacatcatgaaacgtcagctagaaaccctgttttattatttttatcccgtgtgatgacattccattttgtttgtctggcatgggtgtttttccgaagcccaacactgaatgatgcttttatggtactgggccagcttttctccggtgatatcttggcatctttgctttccagtagtgctttgctagccaccttttgggcgctgtttattgcttatccattactggtgaagatcagaaattcaatggaaagaaattcccggcatatttcatggctatattatccggttcctctggcactggttctcacattggtatttatgttgtcaccttccggaatgcctgggtttatctatgctaacttctgaatttacatctacatttaagagtgtcggacgggttatttttatcgtttttttgaccatactactgttaatctggctgaatcaaagttcactggataatctttagaggcaca

SEQ ID NO: 4009 - DNA, 1246 bp, Xenorhabdus sp.
  CDS (76)..(768)
gtgctctaaagccaaagacttatgggatcactgacagacctgatgcatcgcctgaaagcaaaacgtcgtcgtctgatgagtattcgtcgggaaagtaatgaacgaatggctgattttgccgtggcggatgtttcactgttttggttgcttaatgcgctgaatagtgctgaacccgtgttagctgaactcttagcaaacccgactcgtcatccggaattactttatcgtgaactggttcgtctggtgggtagtttgttgactttttcactagagcatcaacctgacgatattcctgcctatcagcatctttctccgggaactgttttcccacctttgtttgctttgctaaatgaactgttagaggcgagtctgccttctcgggttattccgattgaattggcgaaaaatggtcaattttggaaaggtgatctcaatgatagccgtctgcgtgaagaggctgatttttatctgtcagtacgttcttctctggcagctcacctgttacaaactcaatttccattgttatgtaaggtgggtagcccggatgaagtcgcaaatgtggttaacgtggccctgaacggagtaccacttaaggcgctttctcacgttccggcagcgatcccgatgcggcttgaaaatcagtatttcgcgttagaactcaataatctttccgcgaaatccatgctggattcggggcattgtgctttttacgtacccggaactttgggtgatgttcaacttgaattatttgctgtgctgcgctcatgactaactttatacaacctgacaaaaatcagaacatagctgtcactatcgatacttcgtttgctgatacttggcttatggtatgccaactgcgtaatggggtatcgatcgaaaacggtaaggcactttatcgccgagcctgtgaacagatagataaaacacgcgaatctctggagcaggccggtttttccaaatcagcggttgaacatatgtcgtatgcccaatgtgcgctattggatgaaagtgttatgaatcgtggtgtgcaggatgaagggtacatacagtggctgcaatcaccgcttcagaccaaatatttcaatacgctggaagcaggggacaaactttgggatcgcattcgtacggtattacacgagccagccccggatccggctgttttgatttgttttcaccgtgtagtgaccctgggattcagcggtaaatatcaaacaccggaaaatgatcataggggagatgttttgac

SEQ ID NO: 4010 - DNA, 1246 bp, Xenorhabdus sp.; identical to SEQ ID NO: 4009
  CDS (843)..(1244)

SEQ ID NO: 4011 - DNA, 894 bp, Xenorhabdus sp.
  CDS (3)..(545)
ataacggaacgttgactgataacaatggccggaaggcagatttccgtaatgttattctggtgatgacaaccaatgcgggcgtacgtgaaatacagcgtaaatccattgggttcacggaacaggataatagcattgatggaatggctgagatcaaacgaacctttacccccgaatttcgcaatcgtcttgatagtattatctggtttgactcactttctgcggaagttattcaacaagtggttgataaattcattgttgaattgcaggttcaactggatgaaaaaggtgtgtctctggaaatcagcacggatgcccgtcagtggttatgtgataaagggtatgataaagcgatgggtgcccgtccgatggcccgtgtgattcaggatagcctgaaaaagccattagctaacgagttgttgtttggctctttagtacatggaggttcagtcagaattagtcttgataaagataaaagtgcactgaaatacgatttcaaaagcgtacaaaaatcaaacaagaaaaaatcagaagatgccgtactataatcagtacggtatatgcaaaactagcaactaagttaagagcaacaccacaggcgaatgttgaaaatacataacctgtggtgtgtaagaaggtatcggaatcagcggctacggaagatgatacggcctttgctcaggtcatatggagttagttcaactgtaaccttgtctccagtcaggatgcggatatagtttttacgcattttgcctgaaatgtgagcagtaacgacgtgtccgttctctaattcgacacgaaacatggtgtttggcagtgtgtctaacacagtaccttgcatttcaatattgtcttctttggccatctaatcctctaaatgtaacaaccatagtttct

SEQ ID NO: 4012 - DNA, 719 bp, Xenorhabdus sp.
  CDS (2)..(718)
acgtcctctaaaggcagaatcatatcgctactggacagagcgtaaacctcagtttcagggtgccaatgatttttcagctttactgagccattccattgatttaacacaggtgaaaaccgttgaaaaacccgctgcacagttactgactctaaaggacagcacctatcatcagcttaaagagatctgtcggactcagggcgtaaccctgaatgtcgctctgcaatttgcatggcataaactcctgcatagctacacgagtgatgaacagaccattgtcggtacaacggtatccggccgtgatgtgcccgtggagggtatttcggacagtgttggtttgtatatcaatacattaccgctgatggtgcaatgggatcacaccgacagtgtggcaacggttttacaggccattcagcaggatatcgctgctctcaacagccacagtgatcttgccctgtccagcctgcaatctgacggtgagcggttattccacagcctgctggtgtttgagaactaccctgttccggcggtaagcgaagatatggccggtatcgaacataccctgacattccgtaaagcggtcgaaaaagtcgattatccggtgctgataatggcctatgaacacgataacaagctggttatcaaattcagttatggggaagactggctgacagaagaacaggcgcagcatttactctgtcagcttgaacgtagcctgcttt

SEQ ID NO: 4013 - DNA, 863 bp, Xenorhabdus sp.
  CDS (1)..(723)
ccatcaaaagttgttaacgttggtgatgttgtggaagttatggttttggatatcgatgaagaacgtcgtcgtatctccctgggtctgaaacagtgtaaatccaacccttggcagcaatttgctgaaactcacaacaaaaatgatcgtgttgaaggtaaaatcaagtcaatcactgacttcggtatcttcatcggtctggacggcggcatcgacggcttggttcacctgtctgacatctcctggaacgttgcaggcgaagaagcagttcgtgaatacaaaaaaggcgacgaaattgctgctgtagttctgcaagtagatgcagagcgtgagcgtatctctctgggcgtcaagcaactggcagaagacccattcaataactacctgtctgtaaacaagaaaggtgctattgttaacggtaaagtaactgctgttgatgcaaaaggtgctacagttgaattagctgacggtgttgaaggttacctgcgtgcatcagaagcttctcgtgaccgcgttgaagatgcaactcaagttctgaacgttggcgatgcagttgaagctaaatacgttggtgttgatcgcaaaaaccgcgtaatcaacctgtctgttcgtgcgaaagacgaagctgatgaaaaagacgctatcgcttctgtgaacaagcaagaagacgcaaactttgctaacaacgcaatggctgaagctttcaaagcagctaaaggcgaataatctaagtcaataacggcgggtaatattttcggttacgataatattacccgaacacggtagtttagggaggtaccatgaccaagtctgaattaattgaaagacttgctgagcaacaatctcatatgccggctaaaaccgtt

SEQ ID NO: 4014 - DNA, 1417 bp, Xenorhabdus sp.
  CDS (803)..(1417)
tagtccagcgggccccacaagaagaattgaataaacggtggaaaccccacctgccattgtggccggtttttgttgttattgggggggttggccaccaccaggaaggaaaaaacccttcggtaatgccgggtcatagtcttggcgaatattcagcactggtttgtgcgggcgtcattgaattccaacaggcaattaaactggttgaattacgtggaaagctaatgcaggaagccgtgcctgaagggaagggtgctatgtatgccattattggtctggataacgaatccattgcaaaagcatgtgaagaatcagcacaagggcagattgtttcaccagtgaacttcaattccccggggcaggttgttattgccggcgaaaaagaagcagtagaacgcgcgggtgctgcatgtaaagcagcgggagctaaacgtgctctgcctttagcagtcagtgtcccttcacactgtgcattaatgaaatccgccgcagaccagttagctgttgcattacagtctgttgagtttaaacagccgcaattccctgttatcaataatgttgatgtaaaaacagaagaatctgctgatacaatccgggcggcgctggtgcgtcagttgtataatccggtacgctggacagaatctgttgagtatattgccgctcagggtattgataacctgctggaaatagggccgggtaaggtactgactggcttaacaaaacgaattgttggtactctgagtgctgtagcagtgaatgatgtatcatcacttacaattgctctgaataaatgactgaggaaaacatgggctttgatggaaaaattgcactagttactggtgccagccgtggcataggtcgagcgattgcagaattattggctgaacgtggagcgcgtgttattggcaccgcgaccagtgaaaatggagccgaggcaatcagcgcctatctgggcgataaaggcaaaggttttgtactgaatgtcacagattcagaatccattgaacaggcactatcgaatattcgtgctgaatttggtgaaatagacattctggttaataatgcgggcatcacacgtgacaacttgttgatgcgcatgaaagatgatgagtggcaaggtattgttgacacaaatctttcttcgatttttcgtctgtcaaaagcagtaatgcgttctatgatgaaaaaacgttatggacgtattatctccattgggtctgttgttggaacaatgggaaatgcagggcaggcgaattacgcggcagcgaaagcaggagttattggttttagtaaatcactggctcgtgaagtcgcttctcgtggcattaccgtcaatgttattgctcctggttttatcgaaaccgatatgaccagggcgtcacagacgaacaacgagcgggcattttatcgatgttcttta

SEQ ID NO: 4015 - DNA, 1417 bp, Xenorhabdus sp.; identical to SEQ ID NO: 4014
  CDS (3)..(791)

SEQ ID NO: 4016 - DNA, 1311 bp, Xenorhabdus sp.
  CDS (1056)..(1310)
tttttaactatatgatttcaagtgaaataatttatttttgatattaattataagtgtgaaaaatacagtaatgacttgtcgaaggttcctgtcaatatattcaatccatccatttttatttagttgtggaattaagcgtctattaataaaaattgcagtagatcaaagacgtttatctaagaacagggaaaaaatgaaataacttctcccaatttattaagtgaactgtttattccgttgtgacggggatgacttctgcctgatttttggttggcagattattaaccgaaatggaaaaactaatacctgagagaaaatgtttcctgagtatctttcgatactcggcgttcccgtttttattctctcaaaaaataaaataaaacaattgtgatagttacctgacgtaaataagcaatttaaaaacagcagatataacagttttcaaatattcaatagattcgttgaggtagtaaaaaaatgaaagacagtattaccagcaagaataatattcttgaagctggggtagtggatatgtcgtcagaaaaaatgagtgatgacatattcacaggaaagtttaatgggttatatgagactgaatattctctgttgccggaaatctgcaactccacggaaactccgtatcctgaccatctatgtattcatcagttatttgaacatcaggctgagagaacgccaactgccatagcattaattgccggcaatcaaatactgaattatgtgtaggtgaatgctcaggctaacaggttagcgactcaactgattgaacagggtatttgtccgggtgatcatgtagcgattctgttggagcgctcaattgaattggtggtagctcagttagctattctgaaatccggtgccgtttatgttcctattgatccgaatgtgccggatgaacggaaaaactggctgataaatgattgttccgccaaattactgctgactgatatgcagatggcgaccccggctgaattagttgttccccgactcagtcttaccctcgcaacaaacctattggaaaagaagaatatcgcaatcctgatttatcggttaccagtaccgggccagcgtatatcatgtatacctctggttcgacggggctaccgaaaggcgtcattgtgccacaccgggctgttgtccggctggttattaataatggttatgctgatattaaatctgatgatcgcattgcttttgccgctaatccggctttcgatgccagtacttttgaggtatgggcaccgctgctcaacggagctgcgctggtggttatcgatcatactacgttactga

SEQ ID NO: 4017 - DNA, 1434 bp, Xenorhabdus sp.
  CDS (58)..(342)
gtgctctaaagcacttatttcaatgctggctatttcaaaaaacgggttttacaacatgtgaatagtgctttcatacgccctgagtggctggtggtggatgcaacagtcagttttacttacgatgatgtcagtgtgtttgctgtgttggatgaactgattactgaactgaaaaggaaacgaataactttagttcttgcaggtcgcagcactgaattgaagaactggataaaacagaacaaactcaggagtagtgatgaggatttaattattgtccccgatctttattttgctattcgtttgattcagagtaaaaagcaagcggaagaaagcctcgctgaatagtgcgaggctgtcagtttaatatttattagttttgtggtttagccagcatatacaagcggaatagataaatcagcaatatggcagacagcagattattcacggttaataaggcgatttccggcattttggataagccgaatacaacaatcagtttcattgcaagaaatagcaagaccgcgggaattaacaggcggaaattatcgaatgctaatctccagctcgcttgcatggatgcaaatacgcctttgcttttctcaagtagcagaatcggagcaaatgcaaacccgattgaaaacagaacccccgggacgaacatcaaagcgtaacccacctgaactaacagggtacaaatgagtaccagcaaaaacatcttagggagtcgagttaacgatagttgacaggcctgtagcgcattagcctgatggccgtttgaaatagcactgataagtattaagacactggcggtcagcagagtatcaccaaagatattggaaaataagatcccgccagcggtgcgcataagcatcagttgtgcttctggggttaattgttcaataacgtttttaatccctgaatttcctgactcccttagagtatcttgcatatcagtcaataacttaagttgctcaccatcaggaatgaggaggtgattgagcagtgtagtcaccaacgcggctaaaacagagagtatgacaatgttcaacaattggtgtttaaaaaagttgaagctgtcacgatacaaggtatttgccgtgatgggcatgtaaatggctcctatcacatgaaacaataatgatatccaattgtaccttgttcaacggattattggatagcgaaaagataaagctgataactattgtacaattttgtttatcagaattggcttgttatcaaaaatggggcacgttcgaaagcttctccatttatgtgaggggcctattaacccgtattagccagccaagctttgacagatatatattcagttaactttgacttggatcaatttaaaatatcccataggtgaaaataataatttgtaaccactaaaactatataaatggggatcgataatgaaaaaagatttctggcctt

SEQ ID NO: 4018 - DNA, 1434 bp, Xenorhabdus sp.
  CDS (330)..(1067)
aaggccagaaatcttttttcattatcgatccccatttatatagttttagtggttacaaattattattttcacctatgggatattttaaattgatccaagtcaaagttaactgaatatatatctgtcaaagcttggctggctaatacgggttaataggcccctcacataaatggagaagctttcgaacgtgccccatttttgataacaagccaattctgataaacaaaattgtacaatagttatcagctttatcttttcgctatccaataatccgttgaacaaggtacaattggatatcattattgtttcatgtgataggagccatttacatgcccatcacggcaaataccttgtatcgtgacagcttcaacttttttaaacaccaattgttgaacattgtcatactctctgttttagccgcgttggtgactacactgctcaatcacctcctcattcctgatggtgagcaacttaagttattgactgatatgcaagatactctaagggagtcaggaaattcagggattaaaaacgttattgaacaattaaccccagaagcacaactgatgcttatgcgcaccgctggcgggatcttattttccaatatctttggtgatactctgctgaccgccagtgtcttaatacttatcagtgctatttcaaacggccatcaggctaatgcgctacaggcctgtcaactatcgttaactcgactccctaagatgtttttgctggtactcatttgtaccctgttagttcaggtgggttacgctttgatgttcgtcccgggggttctgttttcaatcgggtttgcatttgctccgattctgctacttgagaaaagcaaaggcgtatttgcatccatgcaagcgagctggagattagcattcgataatttccgcctgttaattcccgcggtcttgctatttcttgcaatgaaactgattgttgtattcggcttatccaaaatgccggaaatcgccttattaaccgtgaataatctgctgtctgccatattgctgatttatctattccgcttgtatatgctggctaaaccacaaaactaataaatattaaactgacagcctcgcactattcagcgaggctttcttccgcttgctttttactctgaatcaaacgaatagcaaaataaagatcggggacaataattaaatcctcatcactactcctgagtttgttctgttttatccagttcttcaattcagtgctgcgacctgcaagaactaaagttattcgtttccttttcagttcagtaatcagttcatccaacacagcaaacacactgacatcatcgtaagtaaaactgactgttgcatccaccaccagccactcagggcgtatgaaagcactattcacatgttgtaaaacccgttttttgaaatagccagcattgaaataagtgctttagagcac

SEQ ID NO: 4019 - DNA, 1262 bp, Xenorhabdus sp.; identical to SEQ ID NO: 346
  CDS (692)..(1129)

SEQ ID NO: 4020 - DNA, 949 bp, Xenorhabdus sp.; identical to SEQ ID NO: 9
  CDS (656)..(949)

SEQ ID NO: 4021 - DNA, 642 bp, Xenorhabdus sp.
  CDS (3)..(641)
tgtgctctaaagatggttctggtattggtggtttgggcctgattgaagagaatcacagaacattgctttctgctggtcctcgtaaagtcagtccgttctttgtaccttcaaccattattaatatggtggctggccatctgagcatactatacggccttcgtggtcctagtatctctattgcaacagcctgtacttctggtgtgcataacattggtcatgcagcgcgtataattgcttataatgatgctgatatcatgttggcaggtggtgctgagaaagcaagtacagaatttggtgttgccggttttggtgctgcccgtgcactgtcgacccgtaatgatgatcctaaaaccgcgagccgtccttgggacaaagatcgtgatggatttgttctgggtgatggtgctggtgttgttgttcttgaagaatatgaacacgccaaaaaacgcggcgcaaaaatttatgctgaagtcgttggctttggtatgagtagtgatgcgtatcacatgacatctccgcctgaagatggggcaggggctgcgcttgctatggaaaatgctctgaaagatgcaggcatttcttcagaacaagtgggctacattaatgctcatggaacttcaacaccggcgggagatcttgctg

SEQ ID NO: 4022 - DNA, 977 bp, Xenorhabdus sp.
  CDS (3)..(962)
  unsure (1)..(977): unsure at all n locations
ggaatatccccgaaactcagaaaagtcacgggtatttagccggaggttttatgcaggaaaatacatttcagtttaaagcatcccttgcgcaaaaacgtttatggttgcatgaacaactcgaacaaaaatccgccatttatcacatcacaactgcgctggtgcttgagggacatttggatataccggcactcacacaggctatcagcgatatggtggaaagacacgagtcttttcgcacaggttttgtatatcagaatggttcactttatcagtgctgccatgaatccgtatctttgccgctggtcacggttgatttgtctatgctgagtgaagaagagcaaaagcagcgtttgcagcgcgacagtcagcaaccgtttgatttacagcaggctccgttattgcgttttaccctgtatcagtgtggaaccgaacacggggaagagcgtcattatctggtgatggtgctgcaccacattatttcagatggctggtctgccggtattatcagccgtgaactgacaacatgttataacgcacggcgacagggtaaattccccgaattgccagagttatccatacagtacattgattattcagaatggcagcacgatcagcatgaaaatgctgaatcagctgaatcgctggtatggtggaaagaaaaactgtccggcattgagcctatcgcgctgccttttgatcacccacgccccagccgtctgagcctgcgcggtaaaacgcactgcttcgcattatcgcctgaactgacacaggcgctggatcaacaggcacgtcagcaaaataaaaccctgttctccacactcttgagtgcattttacctgctgctttaccgctacagcggccagactgatctggttgttggttcgccggtctccgggcgtgggcagttggagctggaaggcatgtcggatctttgtcaatacacggtttacggattgagntagtncctttagagcaca

SEQ ID NO: 4023 - DNA, 1179 bp, Xenorhabdus sp.
  CDS (1)..(300)
aaaggcgagctaacagaattcaccactggtgccgttttttcccgcaatggctcaatatttgaagatgacggaaaaccaagaacaacatttgctgatattgatggtgacgggagtaaagaactcattatctctaaactcaccgcaggttcagggaattaccttgaagtagatgcactcaagattaccgataaggatgtcaaattattgacccgcattaatactaatagtacgaataatattattagattacttcgtaatcattgtaagaaagagcaatgcttaaagcagaaacagagatagcacctaaatcagttattcaatgcccataaaatgtaaggcaaacgatagataatgtactatcgttaatgttatcaccaccatacccaatggatttctagttgcatcgcggaggaaagtaagttattccctccgaaaacatgactcactctataatcggggtgaacacagccaataaaaagcaacctgaaaggcgatgggtataccacggtatagctgataaaggggaatctatgaaacgtcttttattaccattttttgtgctatcgctctcattcttctcttatgccgcacatacaaatcaggacaagattgctgaaacctattgtgatgtgttcggcaaagcttccgtagaggcatttaaaactcatgactcgccagatgtgatagcgcagaatgcattaaatgctttatataagaaagggttaaccctgaaagaaatccaatctaataaaagtgaatttattgcaacaattaaacaaactgttgctgaagtcagagaacataagccaaaatttccgagcaaccaccattttgatgaaacgctggctaagtcagtgaaagattgtaaagttcagataaagaatgttttatcccaacatgctcggtgattaaatgcggagcgacgaaaattcgccgctccgcatatactcgtactcttgcaaattaccactttattcgcagcacttatgccgatcatatcgtcagttatgcttcctgagtccgcttttattgcggtaacttattctggaattcattgagtatatttagttcaagggcccagagtaaaacaatacaaaaaatttatggaattattcctgattttttctggtcttgtaagtcaatacaggcttaagccgtgctaccaattttaccaaacct

SEQ ID NO: 4024 - DNA, 1179 bp, Xenorhabdus sp.; identical to SEQ ID NO: 4023
  CDS (558)..(908)

SEQ ID NO: 4025 - DNA, 1095 bp, Xenorhabdus sp.
  CDS (534)..(995)
atgtgctctaaagcctagtgcccaaaccggcaacagggatcactgctttttttacttttttatttataactggcattacataatctcctgtggctacgttatggctgaaaaactccttttacagcataaacgatagcccaaactctttaaaaaatcgtatgtgtgaaaaattgaatatgtgaaaagaatcacatactcaaaaatagcgcgcaagagtatatcagctaactcaaccaaatttacagttaatggaagtttacttatattttttatatgacaatgaataacattaccgtagcaaatatacatataagacacatatatctaacaagtatccgttttattatagtgaaagtgagtataaaaaatgcctcggtaatatagacagctatgactagttgcactctgggcaaacattgcgactaagctctgtattcaggtattatcagatagattattgctagttatattcctacacacccttacagtattgttcacataaacaacaacctttttaattcaccggagtgattttgacaaaaatatgcccctgcggtagcagcttatctctcgcacactgctgcggcccctatcttgataatcatcgacctgccccaaatgctgaatctctgatgcgttccagatatagcgcttatgtaacaaaaaatattgattaccttattgcaacctggcatcccgactgtaaagccgaaacctggcgttcagaaatagaacaaagctttgttggtgtcgagtggctgggattgaatgtgatcagcgtagataaaggtctacataataacgaagcctatgtcgaattttcagcttgctttattgaacaggcaaagcaagatagacaactgatacatgagcgctcccgttttttgcgcattgaacaacattggttctatattgatggtattcgtcctcaaactggacgcaatgactcatgcccatgtggttcaggaaaaaaatataaaaagtgctgtagttaaaactataaatttcaaacaaaatcattcacacagtaaaaaaatttgaggttacattattcatgccaaacgcaatcattacaaaaaaaaatcttgcgtacaa

SEQ ID NO: 4026 - DNA, 735 bp, Xenorhabdus sp.
  CDS (98)..(421)
  unsure (1)..(735): unsure at all n locations
nnnnnnnnnnnnnnnnnnnnnnnnnnnnnnnnnnnnnnngagctacatggccgagcatggcatcgccatgcgtctcgactgattgcaggaacttctcatgagcgcattttccctttccgatctggaacgcatcgtcgcgacccgcgcggctgcatctcctgacgaatcctggacggccaagctggttgctgccggccaggaacgcgcggccaaaaaactcggtgaagaggcagtggaagccgtcatcgcggccatcgcgaaagaccgtgacgggctgaagaacgaggccgccgacctgctttaccatctgctggtggtactgaagatcgccgacattcccttgagcgacgtttttgccgaactggaacgccggacgggccagaccggccttgcggaaaaggcggcgaggccaacatcatgaatgtcacggcaggcagcggggagagaggcatgccaggcacactcgatcatttccgtccggatgaatattcgccctaccacttcttcagctcggaagaatggtcgaagtttcgcgccgatacgccactcacgctttccgccgacgaggtcaagcggctgcgctcgctggacgacccgatcgatctggacgaagtgcggcgcatctatctgtcgctgtcgcgcctcctgtcttcccatgtggaggcgtcgcagctgctnnnnnnnnnnnnnnnnnnnnnnnnnnnnnnnnnnnnnnnnnnnnnnnnnnnnnnnnnn

SEQ ID NO: 4027 - DNA, 735 bp, Xenorhabdus sp.; identical to SEQ ID NO: 4026
  CDS (418)..(735)
  unsure (1)..(735): unsure at all n locations

SEQ ID NO: 4028 - DNA, 1016 bp, Xenorhabdus sp.
  CDS (231)..(653)
  unsure (1)..(1016): unsure at all n locations
nnnnnnnnnnnnnnnnnnnnnnnnnnnccttctccccgagccccctcgtgtgagccgaccttgaacgtctgacgcaaaatgccactttattggcgtgtcgtctactcccaacaaggaggcaatcaccgtaactatcgcgacgctctactcgctaagtgcgcttgtgagcagcagctgcattgcaatgggaattgcgtttcaaagcgccaattcgttgcggatttaattacgacagccgaggaaacatggtaaccaaccgccaaatcattctgtcgaggcttccgcaaggcaagctttctgcagatcattttgagatacgtgaaactgaacgtcctgttccggcagagggagaagttcttctccgaacgttgtacgtggctttagatgccgcaagtcgagcgtggatgcacggggccacgtatcgggccggccttgcgagcggcgatctcatggccggcatgtcgctggcagaagtgatcgagtcgcgctcgtccaacctggcgcctggcgatcttgtcttcacggaaacgggctggcaggtttttgccgtcgtcccggcacagacccttaccaagctacccagaattgagccgttgagccatctggtcagcatctacggcgttcctggtctcacggcctatttcggtctgctggaatgnnnnnnnnnnnnnnnnnnnnnnnnnnnnnnnnnnnnnnnnnnnnnnnnnnnnnnnnnnnnnnnnnnnnnnnnnnnnnnnnnnnnnnnnnnnnnnnnnnnnnnnnnnnnnnnnnnnnnnnnnnnnnnnnnnnnnnnnnnnnnnnnnnnnnnnnnnnnnnnnnnnnnnnnnnnnnnnnnnnnnnnnnnnnnnnnnnnnnnnnnnnnnnnnnnnnnnnnnnnnnnnnnnnnnnnnnnnnnnnnnnnnnnnnnnnnnnnnnnnnnnnnnnnnnnnnnnnnnnnnnnnnnnnnnnnnnnnnnnnnnnnnnnnnnnnnnnnnnnnnnnnnnnnnnnnnnnnnnnnnnnnnnnnnnnnnnnnnnn

SEQ ID NO: 4029 - DNA, 969 bp, Xenorhabdus sp.
  CDS (1)..(495)
  unsure (1)..(969): unsure at all n locations
nnnnnnnnnnnnnnnnnnnnnnnnnnnnnnnnnnnnnnnnnnnnnnnnnnnnnnnnnnnnnnnnnnnnnnnnnnnnnnnnnnnnctgtcacaatccccattgttatccaatggaaaaattgatcgtaaggcaggacaggctccgactattgggcagagttccattcagcgacagaatccagttcctccactgggcgaacaggaaataaaactggcagctatctggcagtcactactgcatgttggcccgattggacgtgacgataatttctttgctctgggaggtaattctctacaggcaatccgcatgattgctcaggtatgggaacaaacagggctgaagctgcatttcagtgatctgttccggcagccgacactggcccaatgtgcggctatgttgcatgccagcgaacagccagaagaaaaaacggcagatttacataccgncagttttgaacagcaaggcatttattctgattcaacaaggctgtcctgacatcccgattttnnnnnnnnnnnnnnnnnnnnnnnnnnnnnnnnnnnnnnnnnnnnnnnnnnnnnnnnnnnnnnnnnnnnnnnnnnnnnnnnnnnnnnnnnnnnnnnnnnnnnnnnnnnnnnnnnnnnnnnnnnnnnnnnnnnnnnnnnnnnnnnnnnnnnnnnnnnnnnnnnnnnnnnnnnnnnnnnnnnnnnnnnnnnnnnnnnnnnnnnnnnnnnnnnnnnnnnnnnnnnnnnnnnnnnnnnnnnnnnnnnnnnnnnnnnnnnnnnnnnnnnnnnnnnnnnnnnnnnnnnnnnnnnnnnnnnnnnnnnnnnnnnnnnnnnnnnnnnnnnnnnnnnnnnnnnnnnnnnnnnnnnnnnnnnnnnnnnnnnnnnnnnnnnnnnnnnnnnnnnnnnnnnnnnnnnnnnnnnnnnnnnnnnnnnnnnnnnnnnnnnnnnnnnnnnnnnnnnnnnnnnnnnnnnnnnnnnnnnnnnn

SEQ ID NO: 4030 - DNA, 730 bp, Xenorhabdus sp.
  CDS (281)..(676)
  unsure (1)..(730): unsure at all n locations
nnnnnnnnnnnnnnnnnnnnnnnnnnnnnnnnnnnnnnnnnnnnnnnnnnnnnnnnnnnnnnnnnnnnnnnnnnnnnnnnnnnnnnnnnnnnnnnnnnnnnnnnnnnnnnnnnnnnnnnncgatttttccgaaaaaaagcgctggcaaaagtcccgctaaaaaaaatagataaaaagaagttctatctattattttaaacggagaggtcgccgaatgcatcagatggtcagggaaatcccggaaaatccaacgccggtttctgcgattgcgacaagttcggcgctcgaagatgcaaaaattatctataatttgccgttcaacgatctgctgtttcgcgcccagcaggtgcaccgccgccattttgatgccaatgccatccagatgagccggcttttatcgatcaagacgggtggctgccccgaggattgcagctattgcagccagtccgcccgcaacccgacaggcctgaaggcctccaagctcatggaggtggagcgggttcttgcggaggcacgcaaggcaaaggagggcggggcgacgcgttattgcatgggcgcagcctggcgcaatcccaaggagcgggacatggatgccgtggtggccatggtcgagggcgtcaaggcgctgggcatggaaacctgcatgacgcttggcatgctgacgcctgaacaatccggacggcaggcccttgagagcnnnnnnnnnnnnnnnnnnnnnnnnnnnnnnnnn

SEQ ID NO: 4031 - DNA, 700 bp, Xenorhabdus sp.
  CDS (55)..(519)
  unsure (1)..(700): unsure at all n locations
nnnnnnnnnnnnnnnnnnnnnnnnnnnnnnnnnnnnnnnnnnnnnnnnnnnnngctgcccatgcatggcttccatatggacaatggcatccttgaagagcgcgtgcttctgccgcgcaagggcgcgcccgaaacgttcgatgtgcgtggcttcctcgatatcgtctctgccgtccgcaagggcgggcaggaagtgcttgtcccggttttcgaccgttcccgcgagatcgccatagcgtctgcccgggcgattgcgccggaaacacgctttatccttgctgaaggcaattatctgctgctgaacgaggcgccgtggacggcactttccgagagcttcgacctcaccattttcgttgggccatccgtcgccgtgcttgaggagaggctgcgcaacagatggcagggctatggtctcgatgcggatgcgatccatgccaaactttttaaaaacgatcttcccaacggaaaaagggtgatcgagaacgcccgttctgccgatattcgcatcgatatctgggaataggttaacgctttcccgtcactgagcggcaaggcgcatttgccgttaagcctttgttgaccatgtgttgaatctttttgatccacagggtggggcttttgtgtgtctattcattgacgcaaaaatttcctcatatactatatgtggtgttcgaggttcttccgattcgcaaggattggaa

SEQ ID NO: 4032 - DNA, 933 bp, Xenorhabdus sp.
  CDS (102)..(197)
  unsure (1)..(933): unsure at all n locations
nnnnnnnnnnnnnnnnnnnnnnnnnnnnnnnnnnnnccctaaaggcatggagaagactgatgctggctgagactgagatgggcgatcaacaccctggttgtgtgccttatgagcatgggcacatggccggaaacgacactatgaaatgctatgggaatgacctgcactgtttggaaaacgaggtcccaacaggttaaacagctatgcctggaactagttatgaggagaacagtcgactggcacacaacgatttgatactttcgcgtgatgggggggaggcataagtgaaacatctgcccaaagcacatatttcacggaaggctgaaggctcttgatgaatttatgaccaacgaaagaccctgcagtgtcacggcatatannnnnnnnnnnnnnnnnnnnnnnnnnnnnnnnnnnnnnnnnnnnnnnnnnnnnnnnnnnnnnnnnnnnnnnnnnnnnnnnnnnnnnnnnnnnnnnnnnnnnnnnnnnnnnnnnnnnnnnnnnnnnnnnnnnnnnnnnnnnnnnnnnnnnnnnnnnnnnnnnnnnnnnnnnnnnnnnnnnnnnnnnnnnnnnnnnnnnnnnnnnnnnnnnnnnnnnnnnnnnnnnnnnnnnnnnnnnnnnnnnnnnnnnnnnnnnnnnnnnnnnnnnnnnnnnnnnnnnnnnnnnnnnnnnnnnnnnnnnnnnnnnnnnnnnnnnnnnnnnnnnnnnnnnnnnnnnnnnnnnnnnnnnnnnnnnnnnnnnnnnnnnnnnnnnnnnnnnnnnnnnnnnnnnnnnnnnnnnnnnnnnnnnnnnnnnnnnnnnnnnnnnnnnnnnnnnnnnnnnnnnnnnnnnnnnnnnnnnnnnnnnnnnnnnnnnnnnnnnnnnnnnnnnnnnnnnnnnnnnnnnnnnnnnnnnnnnnnnnnnnnnnnnnnnnnnnnnnnnnnnnnnnnnnnnnnn

SEQ ID NO: 4033 - DNA, 960 bp, Xenorhabdus sp.
  CDS (19)..(534)
  unsure (1)..(960): unsure at all n locations
nnnnnnnggcgctctaaggtcggtctcggcaagcctttcaagccgcatcagataggccgagggaacggaaacgccctctttttctcccgccttcgccacgaactggcgggcgagatcgttctttaccggctcgaactccaactggccgtcggctccgggcttttccttggcaagcagttcgccgatcatttccgccggcagaagcgcagatgctttctgcacggtggcgagcctgtcgcttgcaaccgtgcaattgttgagaatgtagagataggcgtcccgcgcccgtcccatccggtcggtattggcgaaggcatcggcaacccgccacaggacatcgacctcgctgcaggtcagcaatcccggattgttggcagccgtatccaccaccgtcgcatattgcttgagatcggacgcattgacgagccgctggcgagcctcggcaagggaaagcatgcccgtcaagttgtccggcggctgccagccgggttccgcctgctgccggtcggcaatcgccttttttacctcggcgtnnnnnnnnnnnnnnnnnnnnnnnnnnnnnnnnnnnnnnnnnnnnnnnnnnnnnnnnnnnnnnnnnnnnnnnnnnnnnnnnnnnnnnnnnnnnnnnnnnnnnnnnnnnnnnnnnnnnnnnnnnnnnnnnnnnnnnnnnnnnnnnnnnnnnnnnnnnnnnnnnnnnnnnnnnnnnnnnnnnnnnnnnnnnnnnnnnnnnnnnnnnnnnnnnnnnnnnnnnnnnnnnnnnnnnnnnnnnnnnnnnnnnnnnnnnnnnnnnnnnnnnnnnnnnnnnnnnnnnnnnnnnnnnnnnnnnnnnnnnnnnnnnnnnnnnnnnnnnnnnnnnnnnnnnnnnnnnnnnnnnnnnnnnnnnnnnnnnnnnnnnnnnnnnnnnnnnnnnnnnnnnnnnnnnnnnnnnnnnnnnnnnnnnnnnnnnnnnnnnnnnnnnnn

SEQ ID NO: 4034 - DNA, 977 bp, Xenorhabdus sp.
  CDS (39)..(572)
  unsure (1)..(977): unsure at all n locations
nnnnnnnnnnnnnnnnnnnnnnnnnnnnnnnnnnntaaagctttagagactggatcatgcggtcgaaaaccatggtgatacaaaaattgtttcacgcccgaccgagggcagaattcacagatatgttccatgtcaacgcttggggtattcctttctcggcactgattgtgggggccaagctagtcatgcctggcgcaaatctcgatggagcaagcctgtattctctgttcgaaagcgaaggcgtcacaattgccggcggtgtcccgaccgtttggatggcgctgctggactggatggatgcaaatgctcggtccttttccagccttcaacgaattgccgtaggtgggtcagcgcctccgctcgatatgatcaaccgcttccaaagccgaaacatcatggtacgacatgcgtggggcatgacagagacgagccctatcggcttggtatcagcaaaactgccaaaacatcagaatctctcgtcggaaaagcaagcgctcaatctgaccaagcagagccgaccgatttacggtgtggaaattcgtgttgaccgcgctgacggcaaacccatcccacctgnnnnnnnnnnnnnnnnnnnnnnnnnnnnnnnnnnnnnnnnnnnnnnnnnnnnnnnnnnnnnnnnnnnnnnnnnnnnnnnnnnnnnnnnnnnnnnnnnnnnnnnnnnnnnnnnnnnnnnnnnnnnnnnnnnnnnnnnnnnnnnnnnnnnnnnnnnnnnnnnnnnnnnnnnnnnnnnnnnnnnnnnnnnnnnnnnnnnnnnnnnnnnnnnnnnnnnnnnnnnnnnnnnnnnnnnnnnnnnnnnnnnnnnnnnnnnnnnnnnnnnnnnnnnnnnnnnnnnnnnnnnnnnnnnnnnnnnnnnnnnnnnnnnnnnnnnnnnnnnnnnnnnnnnnnnnnnnnnnnnnnnnnnnnnnnnnnnnnnnnnnnnnnnnnnnnnnnnnnnnnnnnnnnnnnnnnnnnnnnnn

SEQ ID NO: 4035 - DNA, 888 bp, Xenorhabdus sp.
  CDS (400)..(888)
  unsure (1)..(888): unsure at all n locations
nnnnnnnnnnnnnnnnnnnnnnnnnnnnnnnnnnnnnnnnnnnnnnnnnnnnnnnnnnnnnnnnnnnnnnnnnnnnnnnnnnnnnnnnnnnnnnnnnnnnnnnnnnnnnnnnnnnnnnnnnnnnnnnnnnnnnnnnnnnnnnnnnnnnnnnnnnnnnnnnnnnnnnnnnnnnnnnnnnnnnnnnnnnnnnnnnnnnnnnnnnnnnnnnnnnnnnnnnnnnnnnnnnnnnnnnnnnnnnnnnnnnnnnnnnnnnnnnnnnnnnnnnnnnnnnnnnnnnnnnnnnnnnnnnnnnnnnnnnnnnnnnnnnnnnnnnnnnnnnnnnnnnnnnnnnnnnnnnnnnnnnnnnnnnnnnnnnnnnnnnnnnnggtttccccgcttgatttctcaaaaccggggtccggcgagcccccaggggtcgttcccagacgggggaaagcgttggtgccctatctttcccgtttccagccggcacgcatgaaggccacctccattcccctggttttcgtgctggtgatcctgccgtttacatggattgcggcgctggtgctcctgcttgccatgcccaccatcccgctcttcatggcgctgatcggctggcaggccaaggcggccagcgagaagcagctggccgagacgggcaatatgaacgctttcctgctggatcgtctgcgcggattggaaacgatccgcgcgctggaggccgtcgatctgaccgccgggcgtctcagcgccgatgcgcagaaccttaagaagcgaaccatggcggtgctgcggatcgcctttctctcctcggcggtgttggaactttttgccgcgctcggggcttccctatcggcggggtatatccnnnnnnnnnnnnnnnnnnnnnnnnnnnnnnnnnnnnnnnnn

SEQ ID NO: 4036 - DNA, 1034 bp, Xenorhabdus sp.
  CDS (486)..(1025)
  unsure (1)..(1034): unsure at all n locations
nnnnnnnnnnnnnnnnnnnnnnnnnnnnnnnnnnnnnnnnnnnnnnnnnnnnnnnnnnnnnnnnnnnnnnnnnnnnnnnnnnnnnnnnnnnnnnnnnnnnnnnnnnnnnnnnnnnnnnnnnnnnnnnnnnnnnnnnnnnnnnnnnnnnnnnnnnnnnnnnnnnnnnnnnnnnnnnnnnnnnnnnnnnnnnnnnnnnnnnnnnnnnnnnnnnnnnnnnnnnnnnnnnnnnnnnnnnnnnnnnnnnnnnnnnnnnnnnnnnnnnnnnnnnnnnnnnnnnnnnnnnnnnnnnnnnnnnnnnnnnnnnnnnnnnnnnnnnnnnnnnnnnnnnnnnnnnnnnnnnnnnnnnnnnnnnnnnnnnnnnnnnnnnnnnnnnnnnnnnnnnnnnnnnnnnnnnnnnnnnnnnnnnnnnnnnnnnnnnnnnnnnnnnnnnnnnnnnnnnnnnnnnnnnnnnnnnnnnnnnnnnnnnnnnnnnnnnnnnnnnnnnncgtttggctgcccccgccatgcccggcttcgatacgctcggtacgttgaagatgctgggtgagcgtggcagcggtcacagctggttcattctgaccaaggcgatcatcaaaaaggaatttgcgctttccggctccgagcaaaatccggatctgacgggcaaggatgtacggctgctgctcaaacggctgggcaaggaaccgccgggaccggtgcgggctttcatggagcgcggtgaggatttcgccgttcgcgatacgctggacgaacttgtggcagcgatgaatgccatcagcggcgacgaccggctggatatcggtcatatccgccaacagatcgaagcgcgtgaccgggaaatcgggaatggtttcagcaaggatgcgcaggtaacggcaattcatggcgcgcgccgttatctcggtgacaggctgatgcggacggcaaaaccgcaccgcctgcttgatccggcaatgggacccctgattgccgtgcgcctgcatgtgctgacgcgcaagacgctgggaggcctgcataccctttagagcacannn

SEQ ID NO: 4037 - DNA, 1085 bp, Xenorhabdus sp.
  CDS (3)..(185)
  unsure (1)..(1085): unsure at all n locations
nnnnnnnnnnnnnnnnnnnnnnnnnnnncaagtgctctaaagctgttcaggttgatgtcaaacttgctctgggtgaccgctatctgtgggcaaggattactccgtgggcacgggaagcacttaatctgcgtggggggcaatggttgtatgcgcatattaacctattgcgtaaatcgcacttataaactgaaaatagcggaatggaagaccccgttggcttaagctccttccttaatgaaacaatttcgttcatattccggaaaaataccaaatacnnnnnnnnnnnnnnnnnnnnnnnnnnnnnnnnnnnnnnnnnnnnnnnnnnnnnnnnnnnnnnnnnnnnnnnnnnnnnnnnnnnnnnnnnnnnnnnnnnnnnnnnnnnnnnnnnnnnnnnnnnnnnnnnnnnnnnnnnnnnnnnnnnnnnnnnnnnnnnnnnnnnnnnnnnnnnnnnnnnnnnnnnnnnnnnnnnnnnnnnnnnnnnnnnnnnnnnnnnnnnnnnnnnnnnnnnnnnnnnnnnnnnnnnnnnnnnnnnnnnnnnnnnnnnnnnnnnnnnnnnnnnnnnnnnnnnnnnnnnnnnnnnnnnnnnnnnnnnnnnnnnnnnnnnnnnnnnnnnnnnnnnnnnnnnnnnnnnnnnnnnnnnnnnnnnnnnnnnnnnnnnnnnnnnnnnnnnnnnnnnnnnnnnnnnnnnnnnnnnnnnnnnnnnnnnnnnnnnnnnnnnnnnnnnnnnnnnnnnnnnnnnnnnnnnnnnnnnnnnnnnnnnnnnnnnnnnnnnnnnnnnnnnnnnnnnnnnnnnnnnnnnnnnnnnnnnnnnnnnnnnnnnnnnnnnnnnnnnnnnnnnnnnnnnnnnnnnnnnnnnnnnnnnnnnnnnnnnnnnnnnnnnnnnnnnnnnnnnnnnnnnnnnnnnnnnnnnnnnnnnnnnnnnnnnnnnnnnnnnnnnnnnnnnnnnnnnnnnnnnnnnnnnnnnnnnnnnnnnnnnnnnnnnnnnnnnnnnnnnnnnnnnnnnnnnnnnnnnnnnnnnnnnnnnnnnnnnnnnnnnnnnnnnnnnnnnnnnnnnnnnnnnnnnnnnnnnnnnnnnnnnnnnnnnn

SEQ ID NO: 4038 - DNA, 892 bp, Xenorhabdus sp.
  CDS (146)..(742)
  unsure (1)..(892): unsure at all n locations
nnnnnnnnnnnnnnnnnnnnnnnnnnnnnnnnnnnnnnnnnnnnnnnnnnnnnnnnnnnnnnnnnnnnnnnnnnnnnnnnnnnnnnnnnnnnnnnnnnnnnnnnnnnnnnnnnnnnnnnnnnnnnnnnnnnngagaactacanacatgnatgctttcctcgcttccgtcgatgagagcctgaaaaagctgaagaccgattatgtcgatctgctgctgctgcactggccgaacgaggcggtttcgcttgcggaacagatcggtgcgctgaacgcggtaaaggaagcgggcaaggtccgccatatcggcgtctccaacttcaatacggcgctgatggccgaggcggtgaagctctccaaagctccgatcgtcacgaaccagatcgaataccacccctatatcgatcaggacgtggtgatggcggccgccagagaagcgggcatgtcggtgacgggttattacggcatggctgacggcaaggtgttcgccgatccggttctgaaggagattgccgcaggccgtggcaagtcggtggcgcaggtggttctgcgctggctggtacagcagcagggtgtcgttgccctttcgaaaacggtcagcgaagcccgtgtcgatgaaaatctcgccatcttcgatttcgagctttccgccgatgaaatggcggcgatccgtgcgctcgccaggccggatggccgcatcgtttcgccggatgggctggcgcccgtctgggatcaggctgcctgatgatgacgaccggggagggaacgctcttcccggtttcctcttgcgtgggaaactccgtacattcggcacggcgatacatttctacagccgcaaaaacgacgctgctcacanccgggtcggtncttaaaagcactatggtccnnnnnnnnn

SEQ ID NO: 4039 - DNA, 739 bp, Xenorhabdus sp.
  CDS (65)..(739)
  unsure (1)..(739): unsure at all n locations
nnnnnnnnnnnnnnnnnnnnnnnnnnnnnnnnnnnnnnnnnnnnnnnnnnnnnnnnnnnnnngcatcatcatgtcgccggccatcggcacgccgatcgaggatatgacgctggcggaagaaaacggcatgcccgccattctggtggcccgttcgatggatggcgtcgacatgccgacctatcgcggcgacgacagctacggcatttcgctggccaccaatcacttgatcagccttggccaccgcaccatcgccatggttggcggcaccgaccagacctcgaccggccgcgaccgttaccagggttacgtcaatgcgctgcgcaaggccggtatcgaggtcgatccgaacctgcgcattcccggcccgcgctccaagcagggcggtttcgaggccgccgtgcatttcctctcactgccgcagaagccgaccgccgccgtctgctggaacgatctcgtcgccatcggtctcatgaacggcatttcccgcgccggtctggtgccgggtgtcgatatttccgtcaccggctacgacgatctggaagaggcggcgattgccacgccggcgttgaccacggtttccaacggtcaggcggaggtggggcgtctcgcggcccgcgcgctgctggacaggctggcgggcagccatgagcctgacggcattcacctcatcaagccggaaatgcgtatccggcaatcgaccgggccggtgcggcnnnnnnnnnnnnnnnnnnnnnnnnnn

SEQ ID NO: 4040 - DNA, 912 bp, Xenorhabdus sp.
  CDS (380)..(796)
  unsure (1)..(912): unsure at all n locations
nnnnnnnnnnnnnnnnnnnnnnnnnnnnnnnnnnnnnnnnnnnnnnnnnnnnnnnnnnnnnnnnnnnnnnnnnnnnnnnnnnnnnnnnnnnnnnnnnnnnnnnnnnnnnnnnnnnnnnnnnnnnnnnnnnnnnnnnnnnnnnnnnnnnnnnnnnnnnnnnnnnnnnnnnnnnnnnnnnnnnnnnnnnnnnnnnnnnnnnnnnnnnnnnnnnnnnnnnnnnnnnnnnnnnnnnnnnnnnnnnnnnnnnnnnnnnnnnnnnnnnnnnnnnnnnnnnnnnnnnnnnnnnnnnnnnnnnnnnnnnnnnnnnnnnnnnnnnnnnnnnnnnnnnnnnnnnnnnnnnnnnnnnnnnnnnnnnnnnnnnnnnnnnnnnnnnnnnntccgcatccgccgtaccgacttgacgcaggaagtctcgcagcagaccttcgagcgcatgaagtcggaacgtctggccgaggccgaattgatccgcgcccgtggtaacgaagaggcgcagcgtcgccgcgctatcgccgaccgtcaggtcgtcgagctggaatccgacgcccgccgtcagtccgaagtgctgcgcggtgaaggcgatgcggagcgcaacaaggtgttcggcgaggctttccagcgcgatccgaacttcttcgagttctatcgctccatgtctgcctatgccaactcgctgaacggcaacggcacgacgctggtcctgtctccggattcgaccttcttccgttatttcaacaatatcgacggcgcggcgcctgctgctccggccgcacctgcgccagcaccggcgaactgatagcggatcaaatgattttggaggggccggtttttaccggccctttctttttactccgttttcgtgccaatgctgtcgacaggggnnnnnnnnnnnnnnnnnnnnnnnnnnnnnnn

SEQ ID NO: 4041 - DNA, 708 bp, Xenorhabdus sp.
  CDS (2)..(706)
  unsure (1)..(708): unsure at all n locations
nnnnnnnnnnnnnnnnnnnnnnnnnnnnnnnnnnnnnctttttgccggtgtctatctcattggccgctcgataacgcgacccgcgacggcaataaccggcgcgatgcgccgccttgccgaaggcgagaccgacttcgccgttcccggtctgcgccgcaaggacgaatttggcgccatggcccatgcgctggaaattttccggcaggccgccatcgccaagatcgagctggagaaccaggcgcttgcggcccgacagcaggccgaagcggaaaaggcgcgtttccagcgcgaggcggaagccgaggcgcaggcgcggctgatgcaggcaacgaccggccttgcggcggcgctgcatcgtcttgccgccggcgatctctcctttgaactgaacgagcctttcgccccggatttcgaggcgttgcggcacgatctcaatcgcaccatccgccagctggatgcggccatgtccggcgtcgtgcagtccagcgtggccattgatggcggcagtcaggaaatcagccagagcgctgccgatcttgcccggcgcaccgagcagcaagccgcctcgctggaagaaaccgcagcggccctcgatgagctgacggccaatatccgcatctcggcggaacgcgcggtggaagcccgcacggttgcccattccgcggatgaagatgccagccgcacggccgatctcgtcgtcnnnnnnnn

SEQ ID NO: 4042 - DNA, 741 bp, Xenorhabdus sp.
  CDS (517)..(741)
  unsure (1)..(741): unsure at all n locations
nnnnnnnnnnnnnnnnnnnnnnnnnnnnnnnnnnnnnnnnnnnnnnnnnnnnnnnnnnnnnnnnnnnnnnnnnnnnnnnnnnnnnnnnnnnnnnnnnnnnnnnnnnnnnnnnnnnnnnnnnnnnnnnnnnnnnnnnnnnnnnnnnnnnnnnnnnnnnnnnnnnnnnnnnnnnnnnnnnnnnnnnnnnnnnnnnnnnnnnnnnnnnnnnnnnnnnnnnnnnnnnnnnnnnnnnnnnnnnnnnnnnnnnnnnnnnnnnnnnnnnnnnnnnnnnnnnnnnncatgtgctctaaaggatcacaccggtataattgggcagaatctcgcggatcgcctgttcgtccgggcgttgatcggaggactcgaccacctcaccctcgagatcgtctgtcgtgcgctgttcgccccaggtgacggtgaattcataaatcttccggccgtccatgacatagggcacggtcttgggcatcgcgagcgcatcggcagcatgccggaagcgagcggatcgagcgtgccggcatggcccgccttctgggcgttgaacagccacttgatcttggaaacggcctcggtcgagccgaaatccagcggcttgtcgagaatgagccagccggaaatcgggcggcctttgggtttgcggttctgctgtttgcgtggtttggacatgcttcagttctgttcgtcgtctttttcgttcgaaggtccaagatcgcgctgcacttcgggcgagcgcagaagcgcgnn

SEQ ID NO: 4043 - DNA, 741 bp, Xenorhabdus sp.
  CDS (300)..(455)
  unsure (1)..(741): unsure at all n locations
nncgcgcttctgcgctcgcccgaagtgcagcgcgatcttggaccttcgaacgaaaaagacgacgaacagaactgaagcatgtccaaaccacgcaaacagcagaaccgcaaacccaaaggccgcccgatttccggctggctcattctcgacaagccgctggatttcggctcgaccgaggccgtttccaagatcaagtggctgttcaacgcccagaaggcgggccatgccggcacgctcgatccgctcgcttccggcatgctgccgatgcgctcgcgatgcccaagaccgtgccctatgtcatggacggccggaagatttatgaattcaccgtcacctggggcgaacagcgcacgacagacgatctcgagggtgaggtggtcgagtcctccgatcaacgcccggacgaacaggcgatccgcgagattctgcccaattataccggtgtgatcctttagagcacatgnnnnnnnnnnnnnnnnnnnnnnnnnnnnnnnnnnnnnnnnnnnnnnnnnnnnnnnnnnnnnnnnnnnnnnnnnnnnnnnnnnnnnnnnnnnnnnnnnnnnnnnnnnnnnnnnnnnnnnnnnnnnnnnnnnnnnnnnnnnnnnnnnnnnnnnnnnnnnnnnnnnnnnnnnnnnnnnnnnnnnnnnnnnnnnnnnnnnnnnnnnnnnnnnnnnnnnnnnnnnnnnnnnnnnnnnnnnnnnnnnnnnnnnnnnnnnnnnnnnnnnnnnnnnnnnnnnnnnn

SEQ ID NO: 4044 - DNA, 972 bp, Xenorhabdus sp.
  CDS (57)..(344)
  unsure (1)..(972): unsure at all n locations
nnnnnnnnnnnnnnnnnnnnnnnnnnnnnnnnnnnnnnnnngccggcctgaatccggtcagcgtcgaaaaacgcgatcttttccgccggccgctgatggtcagcgaattgaagaattacgacgccgtcgtgttcgacccgccgcgcgccggtgcggaattccagtgcaaggaactggcccgcagcgcggtgaagaaaatcgttgctgtcagctgcaatccgctgacgctggcgcgcgatctcgccattcttacggagggcggctatcgcatcacccgcgtcacaccggtcgaccagttcctgtggtcgccgcatgtggaagcggtggcggtgctggagaaataatcaggaaataatcaccaggccgtatcaaccgtgccgttgccaacaacgcccgagcagcggcaggcacctgcgacgcggccctgctctatcgggcagatatagggtcggcggcgattggcgctttccggcggggtgatgacgcagacgaagcgcgcacggcgctggtggctgcggctgctgccggaattgtagttcgggctgtcgtcatcgcttgactgcgccagaatgatgttgctgctcgaaaccggcaagcgtgtgatcgctgccgcctctgcaacagttgcggcggaaagaaagactgacagggcnnnnnnnnnnnnnnnnnnnnnnnnnnnnnnnnnnnnnnnnnnnnnnnnnnnnnnnnnnnnnnnnnnnnnnnnnnnnnnnnnnnnnnnnnnnnnnnnnnnnnnnnnnnnnnnnnnnnnnnnnnnnnnnnnnnnnnnnnnnnnnnnnnnnnnnnnnnnnnnnnnnnnnnnnnnnnnnnnnnnnnnnnnnnnnnnnnnnnnnnnnnnnnnnnnnnnnnnnnnnnnnnnnnnnnnnnnnnnnnnnnnnnnnnnnnnnnnnnnnnnnnnnnnnnnnnnnnnnnnnnnnnnnnnnnnnnnnnnnnnnnnnnnnnnnnnnnnnnnnn

SEQ ID NO: 4045 - DNA, 537 bp, Xenorhabdus sp.
  CDS (6)..(290)
  unsure (1)..(537): unsure at all n locations
nnnngatctattttattcccgatgtaatgcgtgtttttacattggtaacaacgatatcagccattctgttcatgtttatctggagtatgattttgtgctcctatctggcctaccggaagcaccgtcctgaactgcataaagcatctgtttacaaaatgccgtttggtaatgtgatgtcgtgggtttgtctggctttttttgcttttgtcatagttcttctgtcgttacaagcagataccagacaagcattaattgcgactcctgtctggttcattattttaagatcgggaccaggtgtaaaaggcgtaagcccatttccgataagagaaaaatggcaaaatcatattataatggccggaatcgggctattttttatggtatactgagatctccattatgtccctgatgaaactgagttgccatgcacccgatgcggataactgccagattgatgagcgcaatgcttcattatatgactgccatcgtttattcacttcataagattnataggtaagcagcacatcttagagnnnnnnn

SEQ ID NO: 4046 - DNA, 587 bp, Xenorhabdus sp.
  CDS (1)..(585)
  unsure (1)..(587): unsure at all n locations
agtttcctgcaccgtatcgaaaaccgcatcgagaccgaccatcacgatatgggcttcctctattcgccctcgtgcatagccgcatggaaactggtgggcgatgaggatggaagacgcgcggcgctgatggcggcggaccagttgatggaacggttccagccggtcgggcaattcatccaggcctggggccgcagggataatcccaacgaatatcgctatatcatcgactgccttttgaacctgccgctgctttattgggcgagccgcgaaacgggctgggcgnannnnngcaccgtggcgcttgcccatggnnnncccangnnngnnnnnnnngnnnggcnggncgattccacttatcatacattttacatggnnnnnnnnnncggcgcgccggtgcgcggcgtcacgaaacagggttacagcgatgagagctactgggcccgcggacaggcctggggcattgccggcatggccatttcctatcgatacgagcgcctgcccgcctatcgcggcaccnnngancggnntntcgccttctatctcaaacgcctgcccgatgtctcctttagagcacatggctcnnnnnn

SEQ ID NO: 4047 - DNA, 959 bp, Xenorhabdus sp.
  CDS (441)..(923)
  unsure (1)..(959): unsure at all n locations
nnnnnnnnnnnnnnnnnnnnnnnnnnnnnnnnnnnnnnnnnnnnnnnnnnnnnnnnnnnnnnnnnnnnnnnnnnnnnnnnnnnnnnnnnnnnnnnnnnnnnnnnnnnnnnnnnnnnnnnnnnnnnnnnnnnnnnnnnnnnnnnnnnnnnnnnnnnnnnnnnnnnnnnnnnnnnnnnnnnnnnnnnnnnnnnnnnnnnnnnnnnnnnnnnnnnnnnnnnnnnnnnnnnnnnnnnnnnnnnnnnnnnnnnnnnnnnnnnnnnnnnnnnnnnnnnnnnnnnnnnnnnnnnnnnnnnnnnnnnnnnnnnnnnnnnnnnnnnnnnnnnnnnnnnnnnnnnnnnnnnnnnnnnnnnnnnnnnnnnnnnnnnnnnnnnnnnnnnnnnnnnnnnnnnnnnnnnnnnnnnnnnnnnnnnnnnnnnnnnnnnnnnnnnnnnnnnnnnnttgcccgcgatcacgcccgcaagctaatttccaaaggcaagacggtcaagatcatccgggttggcaagaagggttacgacagccttcgccgcgaattggcagccaacttcatcaagcgcatcgagctgcgtgacgtgaagagggtcggttttgaaaacgccgaccagatcgccaagaaagtgatctcgctcttcatcgcgggtgagttcgatgtctgcacgctgatctactcggaattcaagtccgtcatcagccagatcccgaccggcctgcagctcattcccgccgcaacgcctgttgtggaagaggatgaggcgacgcagaacgccgtctacgaatatgagccggatgcggcttctattctggaagaccttattccgcgcaacatttcggttcaggttttccgggctgtgctcgaaaacgttgccggtgaaatgggcgccaagatgggcgcgatggccggatgcaacgcgcaatgccggtgagatgatcaacaagctnnnnnnnnnnnnnnnnnnnnn

SEQ ID NO: 4048 - DNA, 900 bp, Xenorhabdus sp.
  CDS (49)..(462)
  unsure (1)..(900): unsure at all n locations
nnnnnnnnnnctctaaagattgccgtgtgccgtcgtctggtacatgattttcaatccggagagggtccggtcaacatgctgctctatacgctcggcctcgatcccgccgacatgccgggatgggcggcggaccggcactgggccatggtcacggtcattctcttcggcgtgtggaagagcatgggttattacatggtcatctatctcgccgggctgcagggcatcaattcggagctttatgaagccgcggggctggatggcgccaatgcctggcagaaattcatccacgtcaccctgccgcagcttgcgccgacgacgtttttcgtgaccgtcatgctgacgatccagtccttcaaggttttcgatcaggtctatatgatcacgcagggcggccccggcacctcgacgctggttcttgtctatcacatctacaatgaggccttcatttcctgggatctcggttactccagcatgatcgccctcgtcctgttcttcctggtccttgtcgtcaccatcgttcagttcaaacggcagcgggaggactgatccatgcgcatcatgggccgcaaaatccctgccgccacgatcggcatctatctgacggtgatcgtcgtcaccatcgtcatgcttctgcctttcgcatggatgctgtcggcatcgctgaaactcaccgcgatgtcttcgcgttcccgatcgaagggataccctcgcagccacgctggggaaactatgtggaaatctggacgaagatcccgctggcattattcatctacaacacgtcgaagctgacgatcatcgtcacactgctgcaattgcttacgtcaagctttgcannnnnnnnnnnnnnnnnnnnnnnnnnnnnnnnnnnnnnnnnnnnnnnnnnnnnnnnnnnnnnnnnnn

SEQ ID NO: 4049 - DNA, 580 bp, Xenorhabdus sp.
  CDS (155)..(580)
  unsure (1)..(580): unsure at all n locations
nagtgtgctctaaagcagacctggagctccggccgtctcaatcttcgtaatgcgcgcgaacgagttcgttcaaaagccgcacgccatagcccgatccccaggactggttgatctctgtgagcggcgaccccatggccgtgccggcaatatcgagatgcgcccatggcgtttcgccgacgaaacgcttgaggaactgggcggcggtgacggagccggccagacgacccgagctgttcttcatgtcggcgaatttggaatcgatgatcttgtcgtaatccttgccgagcggcatgcgccacagcttttcagccgtcacctcgcccgcatctgcaaggcgcgtggccagttcatcgtcattggagaagaggcccgcctgcagattgccgagcgcaaccgtgatcgcgcccgtgagggtggcgagattgatcatgaatttcgggttgaagcgttccttggtgtaccagagcgcatcggccagaaccagccggccctcggcatcggtattgatgatctcgatggtctggccggacatggaggtaacgatgtcaccggggcgctgggcannnnnnnnnnnnnnnnn

SEQ ID NO: 4050 - DNA, 580 bp, Xenorhabdus sp.
  CDS (19)..(543)
  unsure (1)..(580): unsure at all n locations
nnnnnnnnnnnnnnnnntgcccagcgccccggtgacatcgttacctccatgtccggccagaccatcgagatcatcaataccgatgccgagggccggctggttctggccgatgcgctctggtacaccaaggaacgcttcaacccgaaattcatgatcaatctcgccaccctcacgggcgcgatcacggttgcgctcggcaatctgcaggcgggcctcttctccaatgacgatgaactggccacgcgccttgcagatgcgggcgaggtgacggctgaaaagctgtggcgcatgccgctcggcaaggattacgacaagatcatcgattccaaattcgccgacatgaagaacagctcgggtcgtctggccggctccgtcaccgccgcccagttcctcaagcgtttcgtcggcgaaacgccatgggcgcatctcgatattgccggcacggccatggggtcgccgctcacagagatcaaccagtcctggggatcgggctatggcgtgcggcttttgaacgaactcgttcgcgcgcattacgaagattgagacggccggagctccaggtctgctttagagcacactn

SEQ ID NO: 4051 - DNA, 987 bp, Xenorhabdus sp.
  CDS (527)..(985)
  unsure (1)..(987): unsure at all n locations
nnnnnnnnnnnnnnnnnnnnnnnnnnnnnnnnnnnnnnnnnnnnnnnnnnnnnnnnnnnnnnnnnnnnnnnnnnnnnnnnnnnnnnnnnnnnnnnnnnnnnnnnnnnnnnnnnnnnnnnnnnnnnnnnnnnnnnnnnnnnnnnnnnnnnnnnnnnnnnnnnnnnnnnnnnnnnnnnnnnnnnnnnnnnnnnnnnnnnnnnnnnnnnnnnnnnnnnnnnnnnnnnnnnnnnnnnnnnnnnnnnnnnnnnnnnnnnnnnnnnnnnnnnnnnnnnnnnnnnnnnnnnnnnnnnnnnnnnnnnnnnnnnnnnnnnnnnnnnnnnnnnnnnnnnnnnnnnnnnnnnncatccgcagccatgagcggagacggtgcaaagcacgcaacatatgcgtgcgcgcccattaaccttagattgccatttgcacggaggcggctacatttcgggtgactttttagggtaaatgaattattaattgttcatataaattaattttcttgtttcaaaataacttttcagggttccatattatgctgggtactaaaagctcatcgcatgccgttttttacggcgctccctatcctgccgccgccacatttgaagcggcggaaatacagacctccatttcggaaaaaaccccatcggcgtttttacgcggccagttcgcgctcaagagaacgatggatattgcaggggcgtccatcgcccttgtcgcactcgctcccgtgttgatgaccgtcgcgctgctggtcaagcttgacagcaggggtccggtcctgttctcgcaggtccgctggggcatgaacgggagaaaaatccgcgtctataaatttcgctcgatgcgggcggaactgggcgacgccaccggggtggcgcaaacggtgaagaacgatccgcggataacccgcatcggcgccgttctccgccgcacgaacatcgatgaattgccgcagctcatcgatgnnnnnnnnnnnnnnnnnnnnnnnnnnnn

SEQ ID NO: 4052 - DNA, 711 bp, Xenorhabdus sp.
  CDS (345)..(503)
  unsure (1)..(711): unsure at all n locations
nnnnnnnnnnnnaattttcaaaaccgtngcattcaaggcttgaaatccgtcggcattgcctgtatcagcccgccatgaagctgatccgcaacagacggatcatgttcgggccgctttagctcagctggtagagcacgtcattcgtaatgacggggtcacgtgttcgagtcacgtaagcggcaccatttatttcccctgacataaatatttatcgatcggcagccttgtttacgcgcgggtgaccctcgccatcacaggcaccttccaccgtcgcaatggcgtttgaaaccaaaccgcccgccagacgttgaccggcaagtcattctcaaatggaaagccctgtcatcgtggacgtcatccgtattctcatcgccatccttcttccgcctgtcggcgtattccttcaggtcgggcttggcctgcatttctggctcaatattcttctgacgctgtgcggttatgttcccggcatcattcacgccatctgggtgatcctgcgcaagtgacgctccccccggcgatgagatggccacaacattttagtacgtgattaaattctcatgattttctggaaccgggtcttcgccctcacgttatggtgatgacaccagccaaggagaaaatcatgaaccagatcatctacatcgtcggcctcgtcgtcatcgttctcctttagagcacannnnnnnnnnnnnnnnnnnnnnnnnnnnn

SEQ ID NO: 4053 - DNA, 906 bp, Xenorhabdus sp.
  CDS (50)..(232)
  unsure (1)..(906): unsure at all n locations
nnnnnnnnnnnnnnnnnnnnnnagtgcgctctaaagagacctgagcgccatggaaatgttgaagaatcacacaacctctgcacctgttcatggctggattgaaggcattgacatgaccccggaagatcattacccgatgcactgtaacgagaaccaatggaatacaagcgctgagaaagctgccagcgcatccgggaaaggaggggtcatggctgaccacgctccaatttaaccggagggagaaaatcacgcctttgttaccgacaccattgccctgacgcttcaagatctgggcatgcctaatgctggcctttggcccataactgctatcaaacatggtgcaactgaacactcaaagagggagacctgctgtataatattaatgttagactacggtctttactgccgacgacaatgtgtcacacagttgagccgtttgcacgtcactgaacaagcatgctgggtcacacactnnnnnnnnnnnnnnnnnnnnnnnnnnnnnnnnnnnnnnnnnnnnnnnnnnnnnnnnnnnnnnnnnnnnnnnnnnnnnnnnnnnnnnnnnnnnnnnnnnnnnnnnnnnnnnnnnnnnnnnnnnnnnnnnnnnnnnnnnnnnnnnnnnnnnnnnnnnnnnnnnnnnnnnnnnnnnnnnnnnnnnnnnnnnnnnnnnnnnnnnnnnnnnnnnnnnnnnnnnnnnnnnnnnnnnnnnnnnnnnnnnnnnnnnnnnnnnnnnnnnnnnnnnnnnnnnnnnnnnnnnnnnnnnnnnnnnnnnnnnnnnnnnnnnnnnnnnnnnnnnnnnnnnnnnnnnnnnnnnnnnnnnnnnnnnnnnnnnnnnnnnnnnnnnnnnnnnnnnnnnnnnnnnnnnnnnnnnnnnnnnnnnnnnnnnnnnnnnnnnnnnnnnnnnnnnnn

SEQ ID NO: 4054 - DNA, 1078 bp, Xenorhabdus sp.
  CDS (33)..(629)
  unsure (1)..(1078): unsure at all n locations
nnnnnnnnnnnnnnnnnnnnnnnnnnnnnnctaaagtcgcgaccggtatcgatatcgtcaaggcgcagattcatattcttgaaggagctgccatcggcacggcggaatccggcgttcccaagcagggggatatccgcctcaacggccacgcgctgcagtgccgcatcacgacggaagacccggaacataatttcattccggattatggccgtatcactgcctatcgttccgcttcgggcttcggcatccgtctggacggcggcacctcctataccggcgccgtcatcacgcgatattacgatccgctgcttgtcaaggtaacggcctgggcgccgcaaccggatgaggcgatcaaccgcatggaccgcgcgctgcgcgaattccgcatccgcggcgttgcgaccaacctcaccttccttgaagccatcatcggtcacgacagcttccgcaacaatacctatacgacccgcttcatcgattcgacgccggaactgtttgcgcaggtcaagcgtcaggaccgcgccaccaagcttctgacctatcttgccgacgtgaccgttaatggccacccggaaaccaaggggcgtgcgaaaccctccgacaaggcggcaaagcccgtcgtaccctatatcgatgcgccgacgcctgacnnnnnnnnnnnnnnnnnnnnnnnnnnnnnnnnnnnnnnnnnnnnnnnnnnnnnnnnnnnnnnnnnnnnnnnnnnnnnnnnnnnnnnnnnnnnnnnnnnnnnnnnnnnnnnnnnnnnnnnnnnnnnnnnnnnnnnnnnnnnnnnnnnnnnnnnnnnnnnnnnnnnnnnnnnnnnnnnnnnnnnnnnnnnnnnnnnnnnnnnnnnnnnnnnnnnnnnnnnnnnnnnnnnnnnnnnnnnnnnnnnnnnnnnnnnnnnnnnnnnnnnnnnnnnnnnnnnnnnnnnnnnnnnnnnnnnnnnnnnnnnnnnnnnnnnnnnnnnnnnnnnnnnnnnnnnnnnnnnnnnnnnnnnnnnnnnnnnnnnnnnnnnnnnnnnnnnnnnnnnnnnnnnnnnnnnnnnnnnnnnnnnnnnnnnnnnnnnnnnnnnnnnnnn

SEQ ID NO: 4055 - DNA, 700 bp, Xenorhabdus sp.
  CDS (302)..(700)
  unsure (1)..(700): unsure at all n locations
nnnnnnnnnnnnnnnnnnnnnnnnnnnnnnnngtgctctaaagagcccccaagagaaccacgaaatcacccggattcgcaatggctgcaacctgtgacgcaaggtcctcccgcttttcgagaaaacgggcatcgcggtggccggcggccttgatggccgaaaccagcgcttccgaacttgcgccttcgatcggatcttcgcccgcagcatagaccggagcaaggataatcgtgtcggcatcgttaaagcaatgcgcgaaatcgtcaaacaggctggaaagacggctgtaacggtgcggctggtgcacggcgatgatacggcccttgcaggcttcccgcgcagccgccagcacggccttgatctcgaccggatgatgaccgtaatcgtcgaagacctgcacgccgttggcttcgcctgtcagcgtgaagcgccgcttgacgccgccgaaggacgcaagccccttcttgatgtcggcttccgaaatgccgagacggttggcgacggcaatcgccgccgtcgcattcgaaacattgtggcggccgggcatcggcaggacgaggtccttgaaggagaatatcttgccggtgcggcgacggcggatttccacgtcaaacaccgagcgcgtgccgtcaatgcgcacattcgaaaaacgcacgtgcgcctgcgggttttcgccataggtgatgaccttgnnnnnnnn

SEQ ID NO: 4056 - DNA, 700 bp, Xenorhabdus sp.
  CDS (10)..(663)
  unsure (1)..(700): unsure at all n locations
nnnnnnnncaaggtcatcacctatggcgaaaacccgcaggcgcacgtgcgtttttcgaatgtgcgcattgacggcacgcgctcggtgtttgacgtggaaatccgccgtcgccgcaccggcaagatattctccttcaaggacctcgtcctgccgatgcccggccgccacaatgtttcgaatgcgacggcggcgattgccgtcgccaaccgtctcggcatttcggaagccgacatcaagaaggggcttgcgtccttcggcggcgtcaagcggcgcttcacgctgacaggcgaagccaacggcgtgcaggtcttcgacgattacggtcatcatccggtcgagatcaaggccgtgctggcggctgcgcgggaagcctgcaagggccgtatcatcgccgtgcaccagccgcaccgttacagccgtctttccagcctgtttgacgatttcgcgcattgctttaacgatgccgacacgattatccttgctccggtctatgctgcgggcgaagatccgatcgaaggcgcaagttcggaagcgctggtttcggccatcaaggccgccggccaccgcgatgcccgttttctcgaaaagcgggaggaccttgcgtcacaggttgcagccattgcgaatccgggtgatttcgtggttctcttgggggctctttagagcacnnnnnnnnnnnnnnnnnnnnnnnnnnnnnnnn

SEQ ID NO: 4057 - DNA, 910 bp, Xenorhabdus sp.
  CDS (415)..(579)
  unsure (1)..(910): unsure at all n locations
nnnnnnnnnnnnnnnnnnnnnnnnnnnnnnnnnnnnnnnnnnnnnnnnnnnnnnnnnnnnnnnnnnnnnnnnnnnnnnnnnnnnnnnnnnnnnnnnnnnnnnnnnnnnnnnnnnnnnnnnnnnnnnnnnnnnnnnnnnnnnnnnnnnnnnnnnnnnnnnnnnnnnnnnnnnnnnnnnnnnnnnnnnnnnnnnnnnnnnnnnnnnnnnnnnnnnnnnnnnnnnnnnnnnnnnnnnnnnnnnnnnnnnnnnnnnnnnnnnnnnnnnnnnnnnnnnnnnnnnnnnnnnnnnnnnnnnnnnnnnnnnnnnnnnnnnnnnnnnnnnnnnnnnnnnnnnnnnnnnnnnnnnnnnnnnnnnnnnnnnnnnnnnnnnnnnnnnnnnnnnnnnnnnnnnnnnnnnnnnnnnnnnnnnattttcattcggggcgtcatcgcggttggaaacacgaattttggcgcagctttcgcatccgccggagacatcgtctcgcgtaaatgcgcggtgccgtttctctatcgcttcgagcttctcggcacggaggaagatgtcgtcaacgtcaaacatggattggaacgattttggacacgctgacctcaggcgcgctgcgcaaggacgccaaacagccggtagccgcaagccagaaacctgttgatacggggctggactaccacgcgctgaacgcgatgctgaacctctatgacgaaaacggaaagatccagctcgacaaggatcgccttgccgcccggcaatatttcctccagcacgtcaaccagaacacggtgtttttccataacctcagggaaaagctcgattatctggtgacggaaggatattacgagcaggaggttctggatcagtagtccttcaatttcgaacgcgatnnnnnnnnnnnnnnnnnnnnnnnnnnnnnnnn

SEQ ID NO: 4058 - DNA, 912 bp, Xenorhabdus sp.
  CDS (460)..(876)
  unsure (1)..(912): unsure at all n locations
nnnnnnnnnnnnnnnnnnnnnnnnnnnnnnnnnnnnnnnnnnnnnnnnnnnnnnnnnnnnnnnnnnnnnnnnnnnnnnnnnnnnnnnnnnnnnnnnnnnnnnnnnnnnnnnnnnnnnnnnnnnnnnnnnnnnnnnnnnnnnnnnnnnnnnnnnnnnnnnnnnnnnnnnnnnnnnnnnnnnnnnnnnnnnnnnnnnnnnnnnnnnnnnnnnnnnnnnnnnnnnnnnnnnnnnnnnnnnnnnnnnnnnnnnnnnnnnnnnnnnnnnnnnnnnnnnnnnnnnnnnnnnnnnnnnnnnnnnnnnnnnnnnnnnnnnnnnnnnnnnnnnnnnnnnnnnnnnnnnnnnnnnnnnnnnnnnnnnnnnnnnnnnnnnnnnntcaaatatgggttctggaaacatatgcgcgcgcgtttcgcaatgagcaattcgctgtggccgcaatggctgaaggcggtctgacacatgcaaagcactgaagaggtgatctctcccgattttcttcgccgcctcgcggcagttgccgcccgcgagacattgccccggttccggttgccgggagccgtcgtcaacaagattgccggcgggttcgatccggtcaccgaagccgaccgcgaaacggagaaagcgcttcgagcgcttatccgttcggaatatcccgatcacggcatcctgggcgaagagttcggcaatgaaggcgcggatgcgggcctggtctgggtcatcgatccgatcgacggaaccaggtcgttcatatcaggtatcccgctctggggcacgcttgtcgggctgaccagggatggtgatgcggtggccggcatgatggcgcagccttttatcggggaattgttttatgcgacgggcaacggcgcatacctttagagcacnnnnnnnnnnnnnnnnnnnnnnnnnnnnnnn

SEQ ID NO: 4059 - DNA, 700 bp, Xenorhabdus sp.
  CDS (96)..(227)
  unsure (1)..(700): unsure at all n locations
nnnnnnnnnnnnnnnnnnnnnnnnnnnnnnnnnnnnnnnccgaagagctgcatgacgtgcaatggcttgacataacagacctttccggtctgaacatgccgaaaatcacccgcacggttctcgaagatgtcacaaaactcatgataggtgatccgtcattgccctttgaaagccccgcgcggctctatgtcacgcgccacggccgattcattcgagactttgtataaaggccgtcatgtcacaaacgaaatgcgaagcggacgccattcactggccctcactgatcgccgccatatccgccatcagcgcggtcggcgtcgccatcggtctcgggctgccgctcctgtcgatcattcttgaaaagcgtggcatctcctccaccatgatcggggtgaattcggcgatggccggcatcgcggccatgatggccgccccggtcgccagcaagatcgcccatgatttcggggttgcccggaccatgctgctggcggtcgtgatttccgcggtgagcgcactcggcttttatttcgccgaggccttctggatgtggttccccctcagaatcgttttccatggcgccacaaccacgctgttcatcctttccgaatactggatcaacatgaccgcgccgccgaagaaacgcggcatggttctcggcatctatgccacgggactggcggtcggcttcgctgtcgggccc

SEQ ID NO: 4060 - DNA, 700 bp, Xenorhabdus sp.; identical to SEQ ID NO: 4059
  CDS (620)..(700)
  unsure (1)..(700): unsure at all n locations

SEQ ID NO: 4061 - DNA, 959 bp, Xenorhabdus sp.
  CDS (54)..(494)
  unsure (1)..(959): unsure at all n locations
nnnnnnnnnnnnnnnnnnnnnnnnnnnnnnnnnnngtgctctaaaggacaccgatgacgggctggatttcgaaacttgccggcattgtctgcctgtccgcgatggcgctgattgtgggtatttccgccgtccgcgccgcatccgtatcgccgcaagcgtggtctgcctataaggacgccttcctcgatcccggtgggcgcatcatcgataccggcaacggtaatataagccacagcgaggggcagggttacggcatgtggctcgccgtgctttccgacaacatcgccgatttcgaactgatctggagttttacgcgcaccgagctgctggttcgtgatgacgggctttccgcgtggaaatgggatccacgcacccggccgcatgtcactgatatcaacaatgcaaccgatggcgatatcctgattgcctatgcgctggcgctcgccgccggccaatggaaccggcaagattacgccgaggcgttcgcagccatcnnnnnnnnnnnnnnnnnnnnnnnnnnnnnnnnnnnnnnnnnnnnnnnnnnnnnnnnnnnnnnnnnnnnnnnnnnnnnnnnnnnnnnnnnnnnnnnnnnnnnnnnnnnnnnnnnnnnnnnnnnnnnnnnnnnnnnnnnnnnnnnnnnnnnnnnnnnnnnnnnnnnnnnnnnnnnnnnnnnnnnnnnnnnnnnnnnnnnnnnnnnnnnnnnnnnnnnnnnnnnnnnnnnnnnnnnnnnnnnnnnnnnnnnnnnnnnnnnnnnnnnnnnnnnnnnnnnnnnnnnnnnnnnnnnnnnnnnnnnnnnnnnnnnnnnnnnnnnnnnnnnnnnnnnnnnnnnnnnnnnnnnnnnnnnnnnnnnnnnnnnnnnnnnnnnnnnnnnnnnnnnnnnnnnnnnnnnnnnnnnnnnnnnnnnnnnnnnnnnnnnnnnnnnnnnnnnnnnnnnnnnnnnnnnnnnnnnnnnnnnnnnn

SEQ ID NO: 4062 - DNA, 917 bp, Xenorhabdus sp.
  CDS (46)..(252)
  unsure (1)..(917): unsure at all n locations
nnnnnnnnnnnnnnnnnnnnnnnnnnnnnnntgtgctctaaagaagatggcgtgctgatgatcgaggcaagccggtttcgcagccaggagcgcaatcgcgaagacgcgcgcgagcggctgaaggaactgatccttgaagccgttgccccgccgccgcccgtgcgcaaggccaccaaacccaccaagggatcagtcgagcgccgcctcaaggcaaagtccggccgttccgatatcaagaaaatgcgtggcaagccctcgggcgattagctcccggtgtgacgacgaatgtttcgcccttgtcatagagcttcaaatatcgtctggtaatcctccctacaaccaaggagggtgctatgggtctgttcaatttcatcaaggaagcgggaaaaaagcttggtatcggcggcgacaatgcgcctgatgtcgatgcggtcaagaaggagctcgcttcccacgatctcggcacggacaaggttcaggtcgaggtggtggacgacaaggtcgttctgaagggcgaagtggccgatcaatcngttttcgaaaaagcngtcatcgcggtcggcaatannnnnnnnnnnnnnnnnnnnnnnnnnnnnnnnnnnnnnnnnnnnnnnnnnnnnnnnnnnnnnnnnnnnnnnnnnnnnnnnnnnnnnnnnnnnnnnnnnnnnnnnnnnnnnnnnnnnnnnnnnnnnnnnnnnnnnnnnnnnnnnnnnnnnnnnnnnnnnnnnnnnnnnnnnnnnnnnnnnnnnnnnnnnnnnnnnnnnnnnnnnnnnnnnnnnnnnnnnnnnnnnnnnnnnnnnnnnnnnnnnnnnnnnnnnnnnnnnnnnnnnnnnnnnnnnnnnnnnnnnnnnnnnnnnnnnnnnnnnnnnnnnnnnnnnnnnnnnnnnnnnnnnnnnnnnnnnnnnnnnnnnnnnnnn

SEQ ID NO: 4063 - DNA, 723 bp, Xenorhabdus sp.
  CDS (2)..(721)
  unsure (1)..(723): unsure at all n locations
nnnnnnnnnnnnnnnnnnnnnnnnnnnnnnnnnnnnnnnnnnnnntgtcgcaaacatcatcgccaatccgaagatcaagatcagtggtgaagaggtcgacgcctccaagatcacccctgaactgatcgagagcctgcacgaggcgggtgatgtcgaagccaatgtgaccaccggttaccacgccatcgaattcctgctctggggccaggatctgaacggcaccggaccgggcgcgggcaaccgtccctataccgactacgacaaggcaaaatgcaccaatggcaattgcgaccgtcgcgccgattacctgaaatccgcctccaccctgctgatcaaggatcttcaggaaatggtggacgcctgggcgccggaaggcgaagccacgaagacggtggaagccgatccgaaagcgggcctcaccgccattctcaccggcatgggttcgctttcctatggtgagctggccggcgagcgcatgaagcttggccttctgctgcacgatccggaagaggagcatgattgcttctccgacaacacctataattcgcatctgaacgacgcgatcggcatcgcttcggcctatacaggtgaatatacccgcgtggacggcacgaagatgaccggcgcctcgctggcggaactggtcggcgccaaagataaagcgctgaacgacgaaatgacngcgaaactgaacaagacgctcgacgccatgcatgtgatgga

SEQ ID NO: 4064 - DNA, 810 bp, Xenorhabdus sp.
  CDS (283)..(777)
  unsure (1)..(810): unsure at all n locations
nnnnnnnnnnnnnnnnnnnnnnnnnnnnnnnnnnnnnnnnnnnnnnnnnnnnnnnnnnnnnnnnnnnnnnnnnnnnnnnnnnnnnnnnnnnnnnnnnnnnnnnnnnnnnnnnnnnnnnnnnnnnnnnnnnnnnnnnnnnnnnnnnnnnnnnnnnnnnnnnnnnnnnnnnnnnnnnnnnnnnnnnnnnnnnnnnnnnnnnnnnnnnnnnnnnnnnnngatgacaaaaatgatgatggtattaccgggcgtccggcatgggtcagggatcatcgcaccggcgaggtgaaactcggacggttcggctggaaagcccagaatgcaagcgtgcgcgatcagagcgccagcgccttctcccacgatatcggcatctccacaccggatgcaccgaacgcctatggcgattgcaccgatgcccagaaggactgtcttgccatgccgaccggcgtgcaggcgcggctggggccggtggaagcccctgacccggttctcgatctcgtgactttctacaccgaaaacctcgccgtgccgcagcggcgcaatgccggtgatgcgaccgttctgcggggcaagcagctgttttacacctccggctgcacggcctgccacacgccgaaattcgtcacccgccgcgatgccagcgacccaatgcactccttccagctgatctggccctattcggatttcctcttgcatgacatgggagaggcgcttgccgatggccagcaggtgggtgaggcgaatgggcggcagtggcgcacccagccactctggctttagagcacannnnnnnnnnnnnnnnnnnnnnnnnnn

SEQ ID NO: 4065 - DNA, 967 bp, Xenorhabdus sp.
  CDS (44)..(379)
  unsure (1)..(967): unsure at all n locations
nnnnnnnnnnnnnnnnnnnnnnnnnnnnnntgtgctctaaagacatatgtttctcgacggtctcgaggatgcctatgacaagggccggctgatgggcactttcgcggaagattgcgctgaaacctatcaattcacccgcgccatgcaggatgactatgcgctcgcctcgctggagcgggcgcgtcgcgccatagcggagggagccttcgaagcggaaatagcgcctgtcggcgatgttgccgtggatgagcagccgggcaaggcaaggccggagaaaatcccgcagctgaagcccgcctttcgcgatggcggaacggtgacggcggccaattccagttctatctccgatggtgcggccgctctcgttctatgcgtcgctccgaagcggaaaggcggggtctttcgccgctggcgaccattatcggtcaggcttcccatgcggacgcacccgccggatatccaacggctcccatcggcgcgatgaaaaagctgttcgctaaaaccggctggacggcgaaggatgtcgatcttgttcaaatcaacgnnnnnnnnnnnnnnnnnnnnnnnnnnnnnnnnnnnnnnnnnnnnnnnnnnnnnnnnnnnnnnnnnnnnnnnnnnnnnnnnnnnnnnnnnnnnnnnnnnnnnnnnnnnnnnnnnnnnnnnnnnnnnnnnnnnnnnnnnnnnnnnnnnnnnnnnnnnnnnnnnnnnnnnnnnnnnnnnnnnnnnnnnnnnnnnnnnnnnnnnnnnnnnnnnnnnnnnnnnnnnnnnnnnnnnnnnnnnnnnnnnnnnnnnnnnnnnnnnnnnnnnnnnnnnnnnnnnnnnnnnnnnnnnnnnnnnnnnnnnnnnnnnnnnnnnnnnnnnnnnnnnnnnnnnnnnnnnnnnnnnnnnnnnnnnnnnnnnnnnnnnnnnnnnnnnnnnnnnnnnnnnnnnnnnnnnnnnnnnnnnnnnnnnnnnnnnnnnnnnnnnn

SEQ ID NO: 4066 - DNA, 1068 bp, Xenorhabdus sp.
  CDS (414)..(965)
  unsure (1)..(1068): unsure at all n locations
nnnnnnnnnnnnnnnnnnnnnnnnnnnnnnnnnnnnnnnnnnnnnnnnnnnnnnnnnnnnnnnnnnnnnnnnnnnnnnnnnnnnnnnnnnnnnnnnnnnnnnnnnnnnnnnnnnnnnnnnnnnnnnnnnnnnnnnnnnnnnnnnnnnnnnnnnnnnnnnnnnnnnnnnnnnnnnnnnnnnnnnnnnnnnnnnnnnnnnnnnnnnnnnnnnnnnnnnnnnnnnnnnnnnnnnnnnnnnnnnnnnnnnnnnnnnnnnnnnnnnnnnnnnnnnnnnnnnnnnnnnnnnnnnnnnnnnnnnnnnnnnnnnnnnnnnnnnnnnnnnnnnnnnnnnnnnnnnnnnnnnnnnnnnnnnnnnnnnnnnnnnnnnnnnnnnnnnnnnnnnnnnnnnnnnnnnnnnnnnnnnnnnnnnnnnnngaaaacgcgatgcgtagcaacacctgggatacatcctgcgaggtgtacgctgcagaagaaatgtcgcttcttgaagcggcttatgaggacgccgagcttcaggaatttgattatgcgctggccgatacgcatggtggttcgagcgagctcaataacacaatcatcgctagctcaaacctgcttctgatcccgacaatgttaacgccgctggatatcgatgaggcactttcgacatatcgttatgttgtcgagctgctgctgagcgagaacttagtgattccgaccgccgtgttacgccagcgagtcccggttggccgattaaccacgtcacaacgcgcgatgtcagacatgctggtgaatctgcctgtcgtacaatctccaatgcatgaacgagacgcgttcgctgcaatgaaagagcgtggcatgttgcatctcacattgctgaacacgacaaatgatccgacgatgcgcctccttgagcggaacctcagaattgcgatggaggaactcgtaacaatttcagaattgattggcgataccttggggaattgaagatggggatccgcaaacctgctttgtctgtcggtgaagcaagacggcttgctgccgcgcgaccgatcgttcactttnnnnnnnnnnnnnnnnnnnnnnnnnn

SEQ ID NO: 4067 - DNA, 999 bp, Xenorhabdus sp.
  CDS (100)..(579)
  unsure (1)..(999): unsure at all n locations
nnnnnnnnnnnnnnnnnnnnnnnnnnnnnnnnnnnnnnnnnncactaaatatggagacagacgatgaccgacgcccgtacgaccgcagaaggtggcatggaaacgtcctatggcttccacaaggtggacgaaggcaaaaagcaggggctggtcaacgaagtcttccacaaggtggccaaacgctacgatatcatgaatgacgtgatgtcggcgggcctgcaccggctgtggaaggacgccatggtctcctcgctttcgccgcgcaaggacgcctcctacaaggtgctggacgtggcgggcggcaccggcgatatcgccttccgcatcgttgaagcctccaatcgcctggcgcacgccaccgttctcgacattaacggctcgatgctggctgtgggcgaagagcgcgcggcaaaaaagaaactctccgacaatctgaccttcgttgaggccaatgccgaggaactgcccttcgaggcgaatagcttcgatgcctataccgtcgccttcggcattcgcaacgtgccgcgcatcgacgccgcgctgaaggaggcccaccgcgtgctgaaacgtggcgggcgnnnnnnnnnnnnnnnnnnnnnnnnnnnnnnnnnnnnnnnnnnnnnnnnnnnnnnnnnnnnnnnnnnnnnnnnnnnnnnnnnnnnnnnnnnnnnnnnnnnnnnnnnnnnnnnnnnnnnnnnnnnnnnnnnnnnnnnnnnnnnnnnnnnnnnnnnnnnnnnnnnnnnnnnnnnnnnnnnnnnnnnnnnnnnnnnnnnnnnnnnnnnnnnnnnnnnnnnnnnnnnnnnnnnnnnnnnnnnnnnnnnnnnnnnnnnnnnnnnnnnnnnnnnnnnnnnnnnnnnnnnnnnnnnnnnnnnnnnnnnnnnnnnnnnnnnnnnnnnnnnnnnnnnnnnnnnnnnnnnnnnnnnnnnnnnnnnnnnnnnnnnnnnnnnnnnnnnnnnnnnnnnnnnnnnnnnnnnnnnnnnnnnnnnnnnnnnnnnnnnn

SEQ ID NO: 4068 - DNA, 710 bp, Xenorhabdus sp.
  CDS (68)..(709)
  unsure (1)..(710): unsure at all n locations
nnnnnnnnnnnnnnnnnnnngcccgccgacgacctttgtcggtcatcgcttcagcgtcgaccccgatgtgctctccgtacgacagaagcgcgcggaacgctctcttccggccgatggccagccgaagaccattcttctgctgccgggatcgcgctccactgaaacgacgcggttgatggagccgttccagcaggcggcaaaggcctttgtggaacgcaacggcccgacccggttcctgctgcccactgtgccgcgccaggaaaaccgtatccgcgaactggccgcaacatggccggaagaaatcaggccgcaaatcggcgccgaccctgcattcaagtggaatgccttcgcggaggccgatgcggcaatcgccgcctccggaaccgtcattctggaactcgcactcgccggcgtaccgacgatctcggtctacaagaccgactggattttcaccatgctgagcaagcgggtgaaaacctggaccggcgcattgccaaacctgattgccgactatgccgtcgtcccggaatatttcaacgaggtggtacgggcaggttcgatgctgcgctgggctgagcgcctgtctcacgataccatcgagcgccgggcgatgctggaaggttatgcgctggtgcaacggcgtttgcagacggatgtgcctcctggtgaagccggtgnnnnnnnnnnnnnnnnnnnnnnnnnnnnnnnnn

SEQ ID NO: 4069 - DNA, 967 bp, Xenorhabdus sp.
  CDS (406)..(924)
  unsure (1)..(967): unsure at all n locations
nnnnnnnnnnnnnnnnnnnnnnnnnnnnnnnnnnnnnnnnnnnnnnnnnnnnnnnnnnnnnnnnnnnnnnnnnnnnnnnnnnnnnnnnnnnnnnnnnnnnnnnnnnnnnnnnnnnnnnnnnnnnnnnnnnnnnnnnnnnnnnnnnnnnnnnnnnnnnnnnnnnnnnnnnnnnnnnnnnnnnnnnnnnnnnnnnnnnnnnnnnnnnnnnnnnnnnnnnnnnnnnnnnnnnnnnnnnnnnnnnnnnnnnnnnnnnnnnnnnnnnnnnnnnnnnnnnnnnnnnnnnnnnnnnnnnnnnnnnnnnnnnnnnnnnnnnnnnnnnnnnnnnnnnnnnnnnnnnnnnnnnnnnnnnnnnnnnnnnnnnnnnnnnnnnnnnnnnnnnnnnnnnnnnnnnnnnnnnnnnnnnagttggagtatctatctcggaagggcaagttggagctgcagcgttcggcccgacatctcgatactttcgtaccaccggatgaaatccgcgaactcgccctaagctgggttcaagaaaccgggacttatcacgaaagtcggccagacgaggaaaggcaacaggagttgacgacccacattattgtaagcttccctgccggtacaagtcaggtagcagcttatgcagcgagccgggagtgggcagccgagatgtttgggtcaggcgcagggggaggccgatacaactatcttacagcctttcacatcgatcgcgatcacccacatctgcatgtggtcgttaatcgtcgcgaacttttggggcacggctggctgaaaatatcccggcgccacccccaactgaattatgacgccttgcgcattacaatggccgagatttcacttcgtcatggcgtcgtcctcgaggcgacgagccgagctgagcgcggcatctcggagcggccgatgacttttgcccagtatcgactttagagcacattggatcgagcannnnnnnnnnnnnnnnnnn

SEQ ID NO: 4070 - DNA, 1104 bp, Xenorhabdus sp.
  CDS (190)..(444)
  unsure (1)..(1104): unsure at all n locations
nnnnnnnnnnnnnnnnnnnnnnnnnnnnnnntgtgctctaaaggtgccaagataccttcggcaagcggcgagcggcagatattgcccatgcagacgaaaagaacggtggtatgtttcatggattatgcgtcgatccggtcgttgaggcgttaatggttatcaagcggaggcaagttcatgaaatatcccagactcgaaccggaggccatccggcaggctctcgtcaagctcgaaggctggtccctgcgcgaggatggagcggcgatcgtcagatccttcaagttttcgagttttgccgaagccttcggtttcatggccgaatcggctcttgcggcggagaagctcaatcatcaccccgaatggtccaacgtctattcaagggtcaaggtctgcctcaccacccatgattcacagggcgtgacggagcgggattttcttctggccgaagccatgcagaaggcggctgcaggccgggggaattgaacgacgggcgttcagtcccatataatagccatgaccggaggaccgtcgatcatggatgatgtgaaaatcggtgaaattcttctgcctggcgaaaccgacaggcagcaagagcgcgaagatgtggtgcgggcgaaattctggcccaagctgaaacgcgtcatgtcgaaggtgcctttcgcgcgcgannnnnnnnnnnnnnnnnnnnnnnnnnnnnnnnnnnnnnnnnnnnnnnnnnnnnnnnnnnnnnnnnnnnnnnnnnnnnnnnnnnnnnnnnnnnnnnnnnnnnnnnnnnnnnnnnnnnnnnnnnnnnnnnnnnnnnnnnnnnnnnnnnnnnnnnnnnnnnnnnnnnnnnnnnnnnnnnnnnnnnnnnnnnnnnnnnnnnnnnnnnnnnnnnnnnnnnnnnnnnnnnnnnnnnnnnnnnnnnnnnnnnnnnnnnnnnnnnnnnnnnnnnnnnnnnnnnnnnnnnnnnnnnnnnnnnnnnnnnnnnnnnnnnnnnnnnnnnnnnnnnnnnnnnnnnnnnnnnnnnnnnnnnnnnnnnnnnnnnnnnnnnnnnnnnnnnnnnnnnnnnnnnnnnnnnnnnnnnnnnnnnnnnnnnnnnnnnnnnnnnnnnnnnnnnnnnnn

SEQ ID NO: 4071 - DNA, 903 bp, Xenorhabdus sp.
  CDS (418)..(858)
  unsure (1)..(903): unsure at all n locations
nnnnnnnnnnnnnnnnnnnnnnnnnnnnnnnnnnnnnnnnnnnnnnnnnnnnnnnnnnnnnnnnnnnnnnnnnnnnnnnnnnnnnnnnnnnnnnnnnnnnnnnnnnnnnnnnnnnnnnnnnnnnnnnnnnnnnnnnnnnnnnnnnnnnnnnnnnnnnnnnnnnnnnnnnnnnnnnnnnnnnnnnnnnnnnnnnnnnnnnnnnnnnnnnnnnnnnnnnnnnnnnnnnnnnnnnnnnnnnnnnnnnnnnnnnnnnnnnnnnnnnnnnnnnnnnnnnnnnnnnnnnnnnnnnnnnnnnnnnnnnnnnnnnnnnnnnnnnnnnnnnnnnnnnnnnnnnnnnnnnnnnnnnnnnnnnnnnnnnnnnnnnnnnnnnnnnnnnnnnnnnnnnnnnnnnnnnnnnnnnnnnnnnnnnnnnnnnnngtgttcgatcgcttccagcccgatctcgttgtgctatcccccggccccggcagcccgacggatttcgactgcaaggcaacgatcaaggccgcccgcgcccgtgacctgccgatcttcggtgtctgccttggccttcaagccctggcggaagcctatggcggcgagttgcgccagcttgcggtgccgatgcacggcaagccctcgcgcatccgcgtgctggagccaggtctggtcttctccggtctcggcaaggaagtcaccgttggccgttaccactcgatcttcgccgatcccaccaccctgccgcgtgatttcatcatcaccgcggaaagcgaggacggtacgatcatgggtatcgaacacgccaaggaaccggtggccgccgttcagttccacccggaatcgatcatgacgctcggccaggacgccggcatgcggatgactttagagcacnnnnnnnnnnnnnnnnnnnnnnnnnnnnnnnnn

SEQ ID NO: 4072 - DNA, 981 bp, Xenorhabdus sp.
  CDS (389)..(487)
  unsure (1)..(981): unsure at all n locations
nnnnnnnnnnnnngcaccaggcacccagaccgacaaaggccaaaagcgtcacgaacatgaaaagccgggcgaaaagcccgcggcgcttgcggcggccaaccgcaccttcagggcggaaagccagcgaggcgtcgcccgcgctggagcctctccttggcggctttgcgttgcgccgaccggtgctcatgggctccggggcggcggcacccggcggcatctcgcgcgtttcgccacgcagttccggctcgacggccatggcgtcgtgcggctgcggttgcgaaacgggatcgacggaaacctcgccgtggcttgcgtctgccggctggggcggccgcaattgctgctccaccctgtccagaagccggttacgctcttcattctcaatgacatgaatgaggctttcgagccgctggcgctgctgggccacgacctgcggatcatctatgccctgtttgcgcaggcccgcttccagcgcctgacgggatgattggtaaatccgtgcacgaacttcggcgttcgacctgtccgatttttccagagcatttctgattgccgtttccagtccgctcacgaccgatccttgttctattgcgctttgcaaaaatatgcgggcgttgcgnnnnnnnnnnnnnnnnnnnnnnnnnnnnnnnnnnnnnnnnnnnnnnnnnnnnnnnnnnnnnnnnnnnnnnnnnnnnnnnnnnnnnnnnnnnnnnnnnnnnnnnnnnnnnnnnnnnnnnnnnnnnnnnnnnnnnnnnnnnnnnnnnnnnnnnnnnnnnnnnnnnnnnnnnnnnnnnnnnnnnnnnnnnnnnnnnnnnnnnnnnnnnnnnnnnnnnnnnnnnnnnnnnnnnnnnnnnnnnnnnnnnnnnnnnnnnnnnnnnnnnnnnnnnnnnnnnnnnnnnnnnnnnnnnnnnnnnnnnnnnnnnnnnnnnnnnnnnnnnnnnnnnnnnnnnnnnnnnnnnnnnnnnnnnnnnnnnnnnnnnn

SEQ ID NO: 4073 - DNA, 865 bp, Xenorhabdus sp.
  CDS (117)..(473)
  unsure (1)..(865): unsure at all n locations
nnnnnnnnnnnnnnnnnnnnnnnnnnnnnnnngctctaaagaccctgcgccagcttctcgccgcaaaggatcgcgtttcggtcatgttcgccgccgcccccagccaacaggacacgcttgccctcctttgccgggaaaaggccatcgactggtcgcggatcaccgccttccacatggacgagtatatcgggcttgaggccggccatatggcgcgtttcgccaactggctcgacaggtatctcttctcacacctacccttcggcgccgtacatcgcatcgaaccgcatcgcttcgcatcacccgaagcctgcgctaccgattatgcctgccgcctcgctgctgagccgctcgacctcgtatgcctgggtgtcggcatcaacggccatcttgccttcaacgatccgccggaagcgcggttcgacgaaaaagaaacggtgaaggtcgtgacgcttgcgcaagactgccgcgcgcaacaagtggaagaccaatgtttcgcccaactgacccgacgtgccgcaacgggcgaacaccggtaccattcctgcacttcttgcccgaaccagcatgatatnnnnnnnnnnnnnnnnnnnnnnnnnnnnnnnnnnnnnnnnnnnnnnnnnnnnnnnnnnnnnnnnnnnnnnnnnnnnnnnnnnnnnnnnnnnnnnnnnnnnnnnnnnnnnnnnnnnnnnnnnnnnnnnnnnnnnnnnnnnnnnnnnnnnnnnnnnnnnnnnnnnnnnnnnnnnnnnnnnnnnnnnnnnnnnnnnnnnnnnnnnnnnnnnnnnnnnnnnnnnnnnnnnnnnnnnnnnnnnnnnnnnnnnnnnnnnnnnnnnnnnnnnnnnnnnnnnnnnnnnnnnnnnnnnnnnnn

SEQ ID NO: 4074 - DNA, 999 bp, Xenorhabdus sp.
  CDS (508)..(945)
  unsure (1)..(999): unsure at all n locations
nnnnnnnnnnnnnnnnnnnnnnnnnnnnnnnnnnnnnnnnnnnnnnnnnnnnnnnnnnnnnnnnnnnnnnnnnnnnnnnnnnnnnnnnnnnnnnnnnnnnnnnnnnnnnnnnnnnnnnnnnnnnnnnnnnnnnnnnnnnnnnnnnnnnnnnnnnnnnnnnnnnnnnnnnnnnnnnnnnnnnnnnnnnnnnnnnnnnnnnnnnnnnnnnnnnnnnnnnnnnnnnnnnnnnnnnnnnnnnnnnnnnnnnnnnnnnnnnnnnnnnnnnnnnnnnnnnnnnnnnnnnnnnnnnnnnnnnnnnnnnnnnnnnnnnnnnnnnnnnnnnnnnnnnnnnnnnnnnnnnnnnnnnnnnnnnnnnnnnnnnnnnnnnnnnnnnnnnctacgcaagcggcggaagagaatgcgcccgcaccccagccgacggaacaggccgcgccgccttccgccaaccctgacttcggtcccgatcgtggcccggatacggggctgcggccgccacatatgcgcaggatgcccgggccggatgtcctggcgctggcgacgaagctttccgcggccgaaatctatctcggcgtcacgccggaacagcttggcccgtggcgtgcctataccacggcgctgatcgatctcgtctcgcccggcccggagcgcaacccgttgccgccgatgccgggtgaaggcaaggccaaacctgagccgcgtcttgccggcgaggagctggcaggcatcatcgcgcagaaggcggaaaaggcgaaagcccttcaggatgccgttgcggcgctgaaaccgaagctttcgccgcagcaggtgctgaagcttgccgagctcgagcgcgccctgatgccgcctccgcctcccggcccgcgccatgggccgtccgaggagggccgcctgccgccccggcacggcgatatgcggccgccggttcccgaaatggaccggggctgacacgggttttcgaagcttcctnnnnnnnnnnnnnnnnnnnnnnnnnnnnnnnnn

SEQ ID NO: 4075 - DNA, 697 bp, Xenorhabdus sp.
  CDS (2)..(697)
  unsure (1)..(697): unsure at all n locations
nnnnnnnnnnnnnnnnnnnnnnnnnnntgccctaaaggccggcgaaatctcgctgcgcatcgagacccgcaagctcagcaccaccttcctcgatggctgcgagcagccgatcgatacggcccgcgaaccggtcgcggcaggccagctcgtaaagctgcttgaagagatcggcggcgagaccttcgaggcccgctcgcgctccggccgcgtcctttccgcccgttacgtggccggcagcgatgccgcggtgatgatcagcggcggccagcaccccaacgagacgacaggcatcgtcggcgccatccgcgccgcccgcaaactcgcggagcgcaagggcgcgcatttcaccatctcgccgctggaaaaccccgacggctacgccctgcaccagcgcctgcgcgtcggcaatccgcgccacatgcaccatgccgcgcgttacaccgctcttggcgacgatctcgaatatcgcaccccggaaaattcgggcgcgcatctcaacgagaaggaaatccgcttcaaggcgcaggagatgagcggcgcgcgcctgcatgtgaacctgcacggttatccctcacacgagtggacccggcctctatccggttatgtgccgcgcaatttnnnnnnnnnnnnnnnnnnnnnnnnnnnnnnnnnnnnnnnnnnnnnnnnnnnnnnnnnnnnnnnnnnnnnnnnnnnnnnn

SEQ ID NO: 4076 - DNA, 709 bp, Xenorhabdus sp.
  CDS (105)..(398)
  unsure (1)..(709): unsure at all n locations
nnnnnnnnnnnnnnnnnnnnnnnnnnnnnnnnnnnnnnnnnnnnnnnnnnnnnnnnnnnnnnnnnnnnnnnnnnnnnnnnnnnnnnnnnnnnnnnnnnnncgcccggtccggcaacattttttccgccaaggaactggccgatctcgcgcaggcgggtgcggtggacgacatctcgctgcgcttcttcgacaggcaaggcaagccggtgaagacgccgctcgacgaccgggtcatcggcctgccgctggaaaacctctccaatgtcgaccgcgtcattgcgctggccggtggctcgaaaaagaccgaggcgattgccggggcactcaggaccggtgtgatcgacgtgctcgtcaccgataaattcaccgccgaacgactggtcggcaaggaaacatagccaaaatcccataaggaggagacatgaggcgctttgaaggtcaatccgtattcgtgaccggaggcaataagggcatcggttacggcatcgcccgccgttttgccgaggaaggcgcgaaagtcgccctcgcctctgtcgacagggacacccatgacgccgccagaaaactggcggacgaaactggcgccgttacccatggcgtcatcctcgatgtgcgcgacgcggcagcggtgcgcgaggcctatggtgccgccgaagaggcgatcggctttannnnnnnnnnnnnnnnnnnnnnnnnnnnnnnnnnnnnn

SEQ ID NO: 4077 - DNA, 721 bp, Xenorhabdus sp.
  CDS (43)..(267)
  unsure (1)..(721): unsure at all n locations
nnnnnnnnnnnnnnnnnnnnnnnnnnnnnnnnnnnnnnntttgcgcttccgagcatcatggccggtgtcaaccaaagcctgatgatggccttcggcatggtggtgatcgcgggcatcgtcggttccggcgggctcggcgagacgatctatggatcgatccgcacgctcgatatcgcgacatcgatcaacggtgcgattgcaatcgtcgtcctgacgatggtgcttgatcgcattacccagagtgccgcccgtatcggggcagggaggaagtgatggctgatacaaccctgcagttttcacccggtgccttcctggctccggccgtcgactggctcaacaccaacctgcatccgctttttgcggcaattggctatgtggtggaagccgtcctttcggcccttgaggcgacgctgctttcggtgccgccttatgcgttgatcgtgattgtttttattgccgcgttttttgccgtcagcatcagggcggcgatccttgccggcctgtgtctcggtttctgcctgctcgtaggtctgtggaccgcgtcgatgcagacggtggcgctggtcaccgtcgccgtcctgatctcggtcacgatcgcatttccgatcggcgtcctgtgctcccggcacaagacactggaagcaatcgtccgcccggttctcgacgtcatgcagacggtgctttagagcacnnnnnnnnnnnnnnnnnnnnnnnnnnnnnn

SEQ ID NO: 4078 - DNA, 962 bp, Xenorhabdus sp.
  CDS (560)..(961)
  unsure (1)..(962): unsure at all n locations
nnnnnnnnnnnnnnnnnnnnnnnnnnnnnnnnnnnnnnnnnnnnnnnnnnnnnnnnnnnnnnnnnnnnnnnnnnnnnnnnnnnnnnnnnnnnnnnnnnnnnnnnnnnnnnnnnnnnnnnnnnnnnnnnnnnnnnnnnnnnnnnnnnnnnnnnnnnnnnnnnnnnnnnnnnnnnnnnnnnnnnnnnnnnnnnnnnnnnnnnnnnnnnnnnnnnnnnnnnnnnnnnnnnnnnnnnnnnnnnnnnnnnnnnnnnnnnnnnnnnnnnnnnnnnnnnnnnnnnnnnnnnnnnnnnnnnnnnnnnnnnnnnnnnngttttgccgcactctattacgatacggtcaagcgacgcgcgatggtttgcagccagggtaccggctacggtcttgtcatgccggcacaggtgctatcggaactcggcggacaggagatcggcgcagaccggctcggcccctatggcgaggtggcactggaatgtttcggcgaggtcttaggcgatgtcgacgccattctgctaatcgattttgggaatggcggcgcaaaccagttatccgccgagccattatggcaaaggttgcccgccgtctgcgcgggtcacgttcatctcatcaatggaaactgcgtgttcggttcactttacacggcacggtacttggccgagggctggcgccgccttttcgcgagagcgcaaccgcaatgacgccacttgccggcagtagactgcgtgtgatcctgatcgttctgtgctgcggcctcattctgtcagcaacggtcctacttggtctttccaccggagcccgccatatgcctttcgggaccgtcttcgacgcaatacgcggccgggccgacgatgaggcaagtctgatcttctgggatatcaggctgccacgcgtcacgcttgccacactggtgggagctgcccggccgtttccgnnnnnnnnnnnnnnnnnnnnnnnnnnnnnnnnnn

SEQ ID NO: 4079 - DNA, 962 bp, Xenorhabdus sp.; identical to SEQ ID NO: 4078
  CDS (351)..(695)
  unsure (1)..(962): unsure at all n locations

SEQ ID NO: 4080 - DNA, 588 bp, Xenorhabdus sp.
  CDS (312)..(587)
  unsure (1)..(588): unsure at all n locations
nnnnnnnnnnnnnnnnnnnnnnnnnnnnnnnnnnnnnnnnnnnnnnnnnnnnnnnnnnnnnnnnnnnnnnnnnnnnnnnnnnnnnnnnnnnnnnnnnnnnnnnnnnnnnnnnnnnnnnnnnnnnnnnnnnnncaagtgctctaaagcggtaatagcagcgcccggcgttccgctggcacgcccgccaaaacctcaggaaggctgggtatcaccctggaactacagcgatttcaccgaccgctatgctgctgtttcgacggaatttgacatttccgatcagctctcgatttacgcaaagggcggctgagttcatggatgaatcagcgaaagcagaccggcttctgccgaatggtgatttcaccgcgacaggtcggcgatatctgatcgatatagaccgccggtccgcagaagcaggcttgcgcgccaatttcgacaccggcccggtgtcccatgacgtcacgctttccgtgaacggctaccgcgccgaccggagttctgcgaccacccgggtcttgtcggtaacgcagtccaacatttataaccccgtttttnnnnnnnnnnnnnnnnnnnnnnnnnnnnnnnnnnnnn

SEQ ID NO: 4081 - DNA, 984 bp, Xenorhabdus sp.
  CDS (348)..(842)
  unsure (1)..(984): unsure at all n locations
nnnnnnnnnnnnnnnnnnnnnnnnnnnnnnnnnnnnnnnnnnnnnnnnnnnnnnnnnnnnnnnnnnnnnnnnnnnnnnnnnnnnnnnnnnnnnnnnnnnnnnnnnnnnnnnnnnnnnnnnnnnnnnnnnnnnnnnnnnnnnnnnnnnnnnnnnnnnnnnnnnnnnnnnnnnnnnnnnnnnnnnnnnnnnnnnnnnnnnnnnnnnnnnnnnnnnnnnnnnnnnnnnnnnnnnnnnnnnnnnnnnnnnnnnnnnnnnnnnnnnnnnnnnnnnnnnnnnnnnnnnnnnnnnnnnnnnnnnnnnnnnnnnnnnnnnnnnnnnnnnnnnnnnnnnnnnnnnnnnncgaactcaatattggtgccgattacaaggaggcgctgacagagcccggtggctggaccatcggcatgaccgccttcggcgaaatgttgccctatcatgagaaccgcgtgaaactggatcaagacaagaaggacaagtggggcctgccggtcctgtcgatgaatgtcgagatgaagcagaacgaactcgatatgcgcgaagacatggtcaatgacgccgtcgagatgttcgaggcggtcggcatcaagaacgtcaagccttcgcggggcagttacgcccccggcatgggcattcatgaaatgggaacggcccgcatgggacgcgacccgaaaacctccgtcctcaacggcaacaaccaggtctgggatgcgcccaatgtcttcgtgactgacggtgcctgcatgacttcggcctcctgcgtcaatccgtccctgacctacatggcgctgaccgcgcgtgcggccgattttgctgtttccgaacgcaagaaggggaacctgtgatgaacagacgcgaactgctgaaactgattgccattgccaccggccttccgctgatcggcgcggatgttctgacggctgcggaaaacgccgccaagcccgccggcgctgnnnnnnnnnnnnnnnnnnnnnnnnnnnnnnnnnn

SEQ ID NO: 4082 - DNA, 885 bp, Xenorhabdus sp.
  CDS (41)..(193)
  unsure (1)..(885): unsure at all n locations
ttctaaagcgggttcgatcttgattgtggaaaatgcagagcctgtgtggcaattgggaatgggtggtggtgctggggaggaatcgtatccgcaacgccccgatgaggttgattgcacttactatttgaggaccggcttctgtggcttcggttcccgctgtcggttcaaccatcctcgtgatcgtgccgtggtaactatttctcttccttcttcttgcttaaagggttttcatgatgccattgtgtgcttttacgttcgcaatttcgtctgatcttgctgaaaatcaccaagttttttcgttgttttcactgagattaagatgtctgcacttgggtactctgatttggtgtctcgcaatttgcttatgcttatttgcgccgctctagtcgccggacctgaaaggactgcagggccattccaaaggatccccggtctccgagctcgnnnnnnnnnnnnnnnnnnnnnnnnnnnnnnnnnnnnnnnnnnnnnnnnnnnnnnnnnnnnnnnnnnnnnnnnnnnnnnnnnnnnnnnnnnnnnnnnnnnnnnnnnnnnnnnnnnnnnnnnnnnnnnnnnnnnnnnnnnnnnnnnnnnnnnnnnnnnnnnnnnnnnnnnnnnnnnnnnnnnnnnnnnnnnnnnnnnnnnnnnnnnnnnnnnnnnnnnnnnnnnnnnnnnnnnnnnnnnnnnnnnnnnnnnnnnnnnnnnnnnnnnnnnnnnnnnnnnnnnnnnnnnnnnnnnnnnnnnnnnnnnnnnnnnnnnnnnnnnnnnnnnnnnnnnnnnnnnnnnnnnnnnnnnnnnnnnnnnnnnnnnnnnnnnnnnnnnnnnnnnnnnnnnnnnnnnnnnnnnnnnnnnnnnnnnnnnnnnnnnnnnnnnnnnnnnnnnnnnnnn

SEQ ID NO: 4083 - DNA, 948 bp, Xenorhabdus sp.
  CDS (66)..(947)
  unsure (1)..(948): unsure at all n locations
nnnnnnnnnnnnnnnnnnnnnnnnnnnnnngtgctctaaagctcttctggtcggcccgtcgcggcatgttgcttgccggtgcggttctggccgccaccacggtgctggccggcatcggccttctcggggtgtccggctggttcatcaccgccaccgcaatcgccggcctgcttccggcgacggcctatgcgttcgatgtttttgcgccctcggcggccattcgcctcctcgctctgtcgcgtaccgccgcccgttatggcgagcgcatgaccacccatgaagccacgctttccgtgctcgcggcgctgcgtgaaaagctgtttcgcggttttgccgcgccacaggcggcgaaaaatctgcaggcacggcctgcccgcctgctgaaccggctgactgcggatatcgacgcgctggattcgctttatctgcgtgtgctggtgcccgcagccgttgcggtccttgcggctgttgcaacgggcatcggccttgctttccttgatccgctcgcgggcattctggcggcgctttttctcgttgcggcagggctttgcattccagtgcgttccgcattgaaagcggaaaaattttcgcgccgccgggccgtcgggcttgaagcgctgcgtgcacgcacggcggatctcgtcaacgggcaggcggaattgctgaccaccgcccgnnnnnnnnnnnnnnnnnnnnnnnnnnnnnnnnnnnnnnnnnnnnnnnnnnnnnnnnnnnnnnnnnnnnnnnnnnnnnnnnnnnnnnnnnnnnnnnnnnnnnnnnnnnnnnnnnnnnnnnnnnnnnnnnnnnnnnnnnnnnnnnnnnnnnnnnnnnnnnnnnnnnnnnnnnnnnnnnnnnnnnnnnnnnnnnnnnnnnnnnnnnnnnnnnnnnnnnnnnnnnnnnnnnnnnnnnnnnnnnnnnnnnnnnnnnnnnnnnnnnnnnnnnnnnnnn

SEQ ID NO: 4084 - DNA, 709 bp, Xenorhabdus sp.
  CDS (161)..(361)
  unsure (1)..(709): unsure at all n locations
nnnnnnnnnnnnnnnnnnnnnnnccgtgctcatcatgttcatccgttgaaatctccctgccgctcaccagaattgttacggggtttataaagcccgtcagattatataatctggtgaacggcaaacatatttcaatatcccgtcatacggaggatttctcatgcaggacgcagataatgacaatggcgcggaaaagccgagacggctgtcgccggccgcggaacgggctctgaaagaagcggaggagcggcgcaggcaaaaagctgatcttcagctgccgccggaaaccggcggccgaggcggtgccgaacccgtccgtttcggcgactacgaaataaagggccgggccatcgacttttgagccgcgcgaaataaaaatacccgccaaaggcgggtatttgtcaattaaaacagatatttatttatttttgctctagcagccggcagaccgcttccagctgctccagcgtacggtagccaatacggatttgccccgatccgcccttgtggatgatcttcacatcaagccccaaagcgtccgacaggctacgctccaacgctannnnnnnnnnnnnnnnnnnnnnnnnnnnnnnnnnnnnnnnnnnnnnnnnnnnnnnnnnnnnnnnnnnnnnnnnnnnnnnnnnnnnnnnnnnnnnnnnnnnnnnnnnnnnnnnnnnnnnnnnnnnnnnnnnnnnnnnnnnnnnnnnnn

SEQ ID NO: 4085 - DNA, 704 bp, Xenorhabdus sp.
  CDS (2)..(496)
  unsure (1)..(704): unsure at all n locations
nnnnnnnnnnnnnnnnnnnnnnnnnnnnnnnncacccggttattcccgcctgatcgaccggctgttcgcaagcgccctgccggttgctgatgacgacgccgatttcttcggcaccttcgcgatctcgcccggccgtccggcgaaggaactggacgcagcctacggtcccggcctgctttcacccaccgaacaggcgatgagcgttgccgaactcatcgaggcgcgccttgccggaaaggccgattatgccgaccgcgtgcgcctcggttccatcgtgctgatcgttcgcacactggacgaacacgaggcaatcaccggtgtcggcatttcactcgaaccggtggaaccggccacccatctgcccatcttcatcagctttgcggaaatcctcaaccgcatgcgcgcctatctggcgcagagacgccagccgcgcgccgccgagatggaagaaagtgcccctgccccggcaactgcggcaagagaaaatgagggctgaccggcttgcgtcggcaatcaggcatagtatggtccgtgccgaactcgcaacaaatcaggatcgacctatgcccgccttcaagaccatcgacgaccttaacgacattgccagaaagcgcgttttcgtccgcgttgatctcaacgtgccggttgcggatggcaaagnnnnnnnnnnnnnnnnnnnnnnnnnnnnnnnnnnnnnnnnnnnn

SEQ ID NO: 4086 - DNA, 874 bp, Xenorhabdus sp.
  CDS (60)..(467)
  unsure (1)..(874): unsure at all n locations
nnnnnnnnnnnnnnnnnnnntctaaagacaggcccaccaccatgctgaatatgacctggctgcgcgacccccatgacctgccgctgaacggctcccgtgtatttctccaggacatcaacatcactcacatgctgcgcagtgcactgactggcctggcactagccttgctggatgccctgtcgaatgatgattcacagcactaccagaccatccggcatcagacgggcctgcatctcaatgaacgccctgccgcctacggcggccgtaaacaacctatagctaccctgctgccgtccgctacttcgcacaatgacagtgctctagagactggttgtggggtcgaacacacgggccgtatgaccgacagccgggagcagagctgctacattaccgcatgtggaaatgctgcccccaacattattatccatctggccctgctcgccaatgcaggggaagcccgtctgctgcnnnnnnnnnnnnnnnnnnnnnnnnnnnnnnnnnnnnnnnnnnnnnnnnnnnnnnnnnnnnnnnnnnnnnnnnnnnnnnnnnnnnnnnnnnnnnnnnnnnnnnnnnnnnnnnnnnnnnnnnnnnnnnnnnnnnnnnnnnnnnnnnnnnnnnnnnnnnnnnnnnnnnnnnnnnnnnnnnnnnnnnnnnnnnnnnnnnnnnnnnnnnnnnnnnnnnnnnnnnnnnnnnnnnnnnnnnnnnnnnnnnnnnnnnnnnnnnnnnnnnnnnnnnnnnnnnnnnnnnnnnnnnnnnnnnnnnnnnnnnnnnnnnnnnnnnnnnnnnnnnnnnnnnnnnnnnnnnnnnnnnnnnnnnnnnnnnnnnnnnnnnnnnnnnnnnnnnnnnnnnnnnnnnnnnnnnnnnnnnnnnnnnn

SEQ ID NO: 4087 - DNA, 924 bp, Xenorhabdus sp.
  CDS (395)..(922)
  unsure (1)..(924): unsure at all n locations
nnnnnnnnnnnnnnnnnnnnnnnnnnnnnnnnnnnnnnnnnnnnnnnnnnnnnnnnnnnnnnnnnnnnnnnnnnnnnnnnnnnnnnnnnnnnnnnnnnnnnnnnnnnnnnnnnnnnnnnnnnnnnnnnnnnnnnnnnnnnnnnnnnnnnnnnnnnnnnnnnnnnnnnnnnnnnnnnnnnnnnnnnnnnnnnnnnnnnnnnnnnnnnnnnnnnnnnnnnnnnnnnnnnnnnnnnnnnnnnnnnnnnnnnnnnnnnnnnnnnnnnnnnnnnnnnnnnnnnnnnnnnnnnnnnnnnnnnnnnnnnnnnnnnnnnnnnnnnnnnnnnnnnnnnnnnnnnnnnnnnnnnnnnnnnnnnnnnnnnnnnnnnnnnnnnnnnntttttacttgaccggtgaaaagcgccccggcgtcgcaaccggaccgctgcttcagggcaagcagctttcctataacaacatcaatgatacggatgccgcttacgagctggtggcggagttcctgccggaaaacgctccggccgttgccattatcaagcacgccaatccctgtggtgtggcgacgggtccaacccttgccgaagcctatcggcgggcgctggcatgcgattccgtatccgcatttggcggcgtcattgcgttgaaccgtacgcttgatgcggaaacggcggaagagatcgtcaagctctttaccgaagtcatcatcgcgcctgatgtcaccgaggaagccaagtccattatcgcccgcaagccgaatctgcgccttttgaccgctggcggcctgccggacccgcgcgcagccgggattacggcgaagacagtttcgggcggcctgctggtacagagccgcgacaatggcatggtcgaggatctcgatctcactttagagcacnnnnnnnnnnnnnnnnnnnnnnnnnnnnnnnnnnnnnn

SEQ ID NO: 4088 - DNA, 820 bp, Xenorhabdus sp.
  CDS (164)..(820)
  unsure (1)..(820): unsure at all n locations
nnnnctcggaccatgtgctctaaactgtgtctttttgtgngaacagctgtcggtttcatgacgtgatttcctgtttacaaaaagcctttcctttaaagactgtaggacctttaaagaatgcagggttgcgcccggggccgaaaaggccatgattgtgcgcatcatgcaggtcgtccacgaagagcaggaaaacatgtccgccaaattcgatatttctttcgccaattccgcttcgcttgaaaacgctctggccgttgtgctgcaggcctccggtgaggcacaggccgtcgccggtgcttccgaggccgatccgggtggggtgatcgacagggcggcgaagatatcgggcttctccgcaaagtcgatgacgacgctcgacgtgatcgcgccgcagggttccgcggccgaccggctgctcgtcatcggtctcggcaagccgtcgaaactcgtggcgcacgactggctgcgcgccggcggcacggctgccgccggtttccgcaaggcggacaaggttgccatctatctcgacgctcccggcattgaggtcggtgcccaggcggcggcggattttgctctcggcctgctgctgcgcgcctatagcttcgatgcctacaagaccaagaagaagtccgacgacgaanagaacccgaagaaggtcgatgtcatcatcgtcaccgcggcccatcgnnnnnnnnnnnnnnnnnnnnnnnnnnnnnnnnnnnnnnnnnnnnnnnnnnnnnnnnnnnnnnnnnnnnnnnnnnnnnnnnnnnnnnnnnnnnnnnnnnnnnnnnnnnnnnnnnnnnnnnnnnnnnnnnnnnnn

SEQ ID NO: 4089 - DNA, 850 bp, Xenorhabdus sp.
  CDS (253)..(816)
  unsure (1)..(850): unsure at all n locations
nnnnnnnnnnnnnnnnnnnnnnnnnnnnnnnnnnnnnnnnnnnnnnnnnnnnnnnnnnnnnnnnnnnnnnnnnnnnnnnnnnnnnnnnnnnnnnnnnnnnnnnnnnnnnnnnnnnnnnnnnnnnnnnnnnnnnnnnnnnnnnnnnnnnnnnnnnnnnnnnnnnnnnnnnnnnnnnnnnnnnnnnnnnnnnnnnnnnnnnnnnnnnnnnnnnnnnnnnnnnnnnnnnnnnnnnnnnnnnnnnnnnnnnnnncgatcgtcagctatctggctgtcagcgccatcggggcgatctggtcttcgtgctcgccggatttcggcccggcgggcgcttcagaccgtctgtcgcagatcgacccgaaaatcctcatcgccgtgccggaatatggttatgccggcaaacgcatcgacgtaggtcccaccatccgcgccgtggcggaaagtgcggctcctgaaaagatcgtgctgatcgtcgatgccgttcccgaaagccttgccgatctcggctgtgtgacgcttacggatttcgtcgcgccctatgcggcgggcgagattgccttcaaccgtctgcccgtcaaggcgccgctggcgatcctttattcctccggcacgacaggcaagccgaaatgcatcacccattctggcggcggtttgcttcttcaacacatgaaggagctgaaactgcaatgcgatattcaggagggcgagcgctttttctatttcaccacctgcggctggatgatgtggaactggcaggtctccggtctggcgctcggcgctacgctcgtcacctatgatggcaatcccggttatccgaacctttaaannnnnnnnnnnnnnnnnnnnnnnnnnn

SEQ ID NO: 4090 - DNA, 1000 bp, Xenorhabdus sp.
  CDS (384)..(962)
  unsure (1)..(1000): unsure at all n locations
nnnnnnnnnnnnnnnnnnnnnnnnnnnnnnnnnnnnnnnnnnnnnnnnnnnnnnnnnnnnnnnnnnnnnnnnnnnnnnnnnnnnnnnnnnnnnnnnnnnnnnnnnnnnnnnnnnnnnnnnnnnnnnnnnnnnnnnnnnnnnnnnnnnnnnnnnnnnnnnnnnnnnnnnnnnnnnnnnnnnnnnnnnnnnnnnnnnnnnnnnnnnnnnnnnnnnnnnnnnnnnnnnnnnnnnnnnnnnnnnnnnnnnnnnnnnnnnnnnnnnnnnnnnnnnnnnnnnnnnnnnnnnnnnnnnnnnnnnnnnnnnnnnnnnnnnnnnnnnnnnnnnnnnnnnnnnnnnnnnnnnnnnnnnnnnnnnnnnnnnnnnnnnnnnnnnnnnnnnnnnncattgtcgcgacgctcgtctgggctgtctgggaagtcggcttcgactggtggcagcttggcccgcgtggcggcctcatcattctcattggcctgtggcttctggtcccgtgggtgagaaggccgcttggttttgccagcccgaccggcctgaattacggtcccaatgcctggccgcttgcgctgtcggttctcgcttccatcgtggtggcgggatattccatgacgcaggatccgcatgatcaggcgggttccctgcctcaggagacggcgtccgcggcgccggcctatggtggcaacgtgcccgatggcgactggcatcaatatggccgcacgccctatggccagcgttattcaccgctgacccaggtgaatgtcgacaatgtctcgcagctcaaggaagcctggcgttaccagacgggcgacgtgaagctgcctgacgatgtcggcgaaaccacctatcaggtgacaccactgaaggtcggcaacacgctttatatctgcacgccgcataattgggcgattgccatcgatgcggcaaccggcaaggaaaagtggaaatacgacccgaatgtcctttagagcacnnnnnnnnnnnnnnnnnnnnnnnnnnnnnnnnn

SEQ ID NO: 4091 - DNA, 737 bp, Xenorhabdus sp.
  CDS (85)..(735)
  unsure (1)..(737): unsure at all n locations
nnnnnnnnnnnnnnnnnnnnnnnnnnnnnnntgccctatagccgtattcgacgcttccgactgatcatttcgctgagcttgaacatggaacacacaaggaacgacacgatggatggcggtaatttcgatctcaaggaagaaatccgcgactactggtcgaaaagatcggagaccttcgatctcgccttcggacacaggatcgccgccggtccggaggctgatgcgtggcagaaaccgatccggcagctgatcggcccggagccgaaacgtgttctcgaactggcctgcggcaccggcgaggtgacgcgcctgatccacgatctcggccacgatgttacggcactcgacttttcagaggcgatgctggctgtggcgcgcgccaaacacgccggcaaaccgcggctgcgcttcatcatggcggatgccgaaaacaccatggaacccgaagcatcctatgacgcgatcatctgccggcatctggtctggactttgacgcagcccgaacagacgttccgcgaatggttcaggcttctccgtcccggcggtcggcttctgtttttcgatggcgactgggcgacgccgaaaccggccggacgtcttgcgggcctgcttatttcgctcatcgatcatgtggtgggtgaagacaggaattatgacggcgccctgggcaaccgccatgcggccatcatgaaggcgcttccattcggccaggggctgcgacctcagatgctgacnnn

SEQ ID NO: 4092 - DNA, 737 bp, Xenorhabdus sp.
  CDS (108)..(386)
  unsure (1)..(737): unsure at all n locations
nnngtcagcatctgaggtcgcagcccctggccgaatggaagcgccttcatgatggccgcatggcggttgcccagggcgccgtcataattcctgtcttcacccaccacatgatcgatgagcgaaataagcaggcccgcaagacgtccggccggtttcggcgtcgcccagtcgccatcgaaaaacagaagccgaccgccgggacggagaagcctgaaccattcgcggaacgtctgttcgggctgcgtcaaagtccagaccagatgccggcagatgatcgcgtcataggatgcttcgggttccatggtgttttcggcatccgccatgatgaagcgcagccgcggtttgccggcgtgtttggcgcgcgccacagccagcatcgcctctgaaaagtcgagtgccgtaacatcgtggccgagatcgtggatcaggcgcgtcacctcgccggtgccgcaggccagttcgagaacacgtttcggctccgggccgatcagctgccggatcggtttctgccacgcatcagcctccggaccggcggcgatcctgtgtccgaaggcgagatcgaaggtctccgatcttttcgaccagtagtcgcggatttcttccttgagatcgaaattaccgccatccatcgtgtcgttccttgtgtgttccatgttcaagctcagcgaaatgatcagtcggaagcgtcgaatacggctatagggcannnnnnnnnnnnnnnnnnnnnnnnnnnnnnn

SEQ ID NO: 4093 - DNA, 978 bp, Xenorhabdus sp.
  CDS (41)..(622)
  unsure (1)..(978): unsure at all n locations
nnnnnnnnnnnnnnnnnnnnnnnnnnntgtgctctaaaggggcgaagcggcgatgcttgccgggcttctcaaggcgccgtcgcgcctttcacccgcgcgcgatccgcaggcggcggaagagcgggcgcaggtggtgctgcaatccatgcgcgatgtcggtttcatcaccgatgacgagatcaagaccgccatgtcgcaaccaccgaccaaggcgaaacgtttctggtccggtgccgaacattacgccgccgatatggtgctggaggaagtccgcagtctggtcggcgacgtcaagcaggacatcgttgtcgacacgaccatcgaccccaatctcgagcgcgatgccgaaaaggcgcttacccatgtgctgcagggtgacggcaagaagcagggcgcatcgcaggcggcgctggtatccattgatggcaccggcgcgatccgggccgtggtgggcggcgctgactatgccgaaagccagttcaaccgcgcggccaaagcgaaacgtcagcccggttcggcattcaaacccttcgtttatgtaagcccgctcgaatcaaggatgaccccctacaccatccgcaacgatgcgccggtgcgcatcggcaactggaccccggaaaattannnnnnnnnnnnnnnnnnnnnnnnnnnnnnnnnnnnnnnnnnnnnnnnnnnnnnnnnnnnnnnnnnnnnnnnnnnnnnnnnnnnnnnnnnnnnnnnnnnnnnnnnnnnnnnnnnnnnnnnnnnnnnnnnnnnnnnnnnnnnnnnnnnnnnnnnnnnnnnnnnnnnnnnnnnnnnnnnnnnnnnnnnnnnnnnnnnnnnnnnnnnnnnnnnnnnnnnnnnnnnnnnnnnnnnnnnnnnnnnnnnnnnnnnnnnnnnnnnnnnnnnnnnnnnnnnnnnnnnnnnnnnnnnnnnnnnnnnnnnnnnnnnnnnnnnnnnnnnnnnnnnnnnnnnnnnnnnnnnnnnnnnnnnnnnnnn

SEQ ID NO: 4094 - DNA, 601 bp, Xenorhabdus sp.
  CDS (370)..(600)
  unsure (1)..(601): unsure at all n locations
nnnnnnnagcaatgtgctctaaagggtccgcgaccgcaccgtcacccagtcctacctcacctccgataccggcaaggtctatacgatgcttgcccatgcggcggggcggttcaactgaactgaattgcgctgaaatgataaaaccccggtcaaggccggggtttttctttagctttcgggctgttgcgtcgctgttcaacgacgcgaacttattccgtcacgctcacctcaaatctcgaaggtacccgatgcgacacgtaccgcgtggccgccaatgcgggcgcgggcgatttcgttgtccttgatgtccatgcgcaggtggatgtgggacggtctttccatttcaacgccctgctctatcaggagcggatggtggccgtccgtcaggccgtcgaaatggtggatggcgccggaaagagcagcggcggcggagccggtggcggngtcttccgcaattcccatttccggggagaacatacgggcatggaatttcgccgcgtgattgaggccgccgcgacagtagatgtaggctgccgtcagcagtccttcgaccagcggcgcggttcgcagccacagattggcgtcgaaatccatgtcacgn

SEQ ID NO: 4095 - DNA, 601 bp, Xenorhabdus sp.
  CDS (505)..(600)
  unsure (1)..(601): unsure at all n locations
ncgtgacatggatttcgacgccaatctgtggctgcgaaccgcgccgctggtcgaaggactgctgacggcagcctacatctactgtcgcggcggcctcaatcacgcggcgaaattccatgcccgtatgttctccccggaaatgggaattgcggaagacnccgccaccggctccgccgccgctgctctttccggcgccatccaccatttcgacggcctgacggacggccaccatccgctcctgatagagcagggcgttgaaatggaaagaccgtcccacatccacctgcgcatggacatcaaggacaacgaaatcgcccgcgcccgcattggcggccacgcggtacgtgtcgcatcgggtaccttcgagatttgaggtgagcgtgacggaataagttcgcgtcgttgaacagcgacgcaacagcccgaaagctaaagaaaaaccccggccttgaccggggttttatcatttcagcgcaattcagttcagttgaaccgccccgccgcatgggcaagcatcgtatagaccttgccggtatcggaggtgaggtaggactgggtgacggtgcggtcgcggaccctttagagcacattgctnnnnnnn

SEQ ID NO: 4096 - DNA, 825 bp, Xenorhabdus sp.
  CDS (1)..(825)
  unsure (1)..(825): unsure at all n locations
nnnnnnnnnnnnnnnncgctgcgccgttgtcgagggaagcggatgtcgcaatctaactgttcactgtccttcgtcgcctccaccaccgaggaggcgcagacggcgctggaagaactgaaacgcgtttatggcgatacgccgttcgaagaggcggaagtgatcgtcgcgctcggcggcgacgggttcatgctgcagatcctcaacgagacgatgaattccggcaagcgggtctatggcatgaaccgcggctcggtcggctttctgatgaatgattaccgggtggaaggcctgctcgaacgcatcgcggtggcgagcggcaatgattttcatcccctgcgcatgacgacgacggattccgatggcgacgagtttaccgcccttgccatgaacgaggtcagcctcttccggcaatcgcaccaggccgccaaactgcgtgtcgaggtggatggcaaggtgcggctggaggagctgatctgcgacggcatgatggtggcgacaccggcagggtcaacagcctacaacttttccgcccacgggcccatcctgccgctggaatcgccgcttctcgcgctcacccctgtcagcgcatttcggccacggcgctggcgcggcgcgcttttgccgaataaggtgactgtcgacattcatgttctggaacgggacaaacgcccggtgaacgccgtggccgaccatacggaggtgaaatccgttcgtcatgttcgaatcgcacaatcgcaggacaggacagcgcgaattctttcggacccggaccgttcatggnccgacgggttnctcgccgagcagtcnaaccttagagcacnnnnn

SEQ ID NO: 4097 - DNA, 966 bp, Xenorhabdus sp.
  CDS (327)..(614)
  unsure (1)..(966): unsure at all n locations
nnnnnnnnnnnnnnnnnnnnnnnnntttaaagcgcggatattatcgtcggcaacgacaacaacctgcccttctcggccggccgtgcgctggacaaggctgacgacaacgagttcgtcctgctggaagtcaaggacctgctcgacgccaagtaagcatagtggcgccggaattcgttccggcgtcctcctgcgccctgcgcaggttcgacaggacggagcgtcctcgcagcctctggagaaggcgcggcgctccgtttctcttcagatcatacctgacccggaccccggctccgtaacaggaaagaccccttatgcaggatcatgccgaacgactttattatgcgctgaggaaaagctggtctgacgaaaccagcagcctgtggtcgcgcgaaaatcccgcccggggacagggtggcgtcaccgcactggtggttcaggatatttttggtggcgagattgccaagaccgcaatcagcggcgccgaccacttctataatatcgttgaggggatccgctgggatttcaccttcgcccagttcgatattccgatcggttaccaggacagaccctccacccgcgtggaagcgatggcgaagatcacgccgctgcaatatgcctannnnnnnnnnnnnnnnnnnnnnnnnnnnnnnnnnnnnnnnnnnnnnnnnnnnnnnnnnnnnnnnnnnnnnnnnnnnnnnnnnnnnnnnnnnnnnnnnnnnnnnnnnnnnnnnnnnnnnnnnnnnnnnnnnnnnnnnnnnnnnnnnnnnnnnnnnnnnnnnnnnnnnnnnnnnnnnnnnnnnnnnnnnnnnnnnnnnnnnnnnnnnnnnnnnnnnnnnnnnnnnnnnnnnnnnnnnnnnnnnnnnnnnnnnnnnnnnnnnnnnnnnnnnnnnnnnnnnnnnnnnnnnnnnnnnnnnnnnnnnnnnnnnnnnnnnnnnnnnnnnnnnnnnnnnnnnnnnnnnnnnnnnn

SEQ ID NO: 4098 - DNA, 682 bp, Xenorhabdus sp.
  CDS (36)..(674)
  unsure (1)..(682): unsure at all n locations
nnnnnnnnnnnnnnnnnnnnnnnnatatcatcgccctgcccgatctgcgcgacagcagcggcgatttcggcaccacatcaggcgttcccgatatcaaggacggcacaccgatcctcgccgccatcggcgacagccacgcagccctcttcggccacggcgccttcaaccccggcgatggtaaggtcactttcggcaccggttcgtcggtcatgacgacgctgccgcatttcatcgcgcccgaacgcggcatcaccaccaccgttgcatggcggctcggcggcaaaccgacctttgcctttgaaggcaatattctcgtttcggcagcctccctgccctggatgacggagattctcggcctgccggatgtcgccgcgctggtggaactcgccgccactgccgcgccaaacggtcccggtttcgtgccggccttcgttggcctcggtgcgccctattgggataccaatgcgcgcgccctgttcttccagatcaatttcagcaccacgcgtgcccagatggcccgcgccgtcactgactcgattgcctttcaggtccatgacgtcttcgccgccatgcgcgcgcagtcgccttcgggctttggacgcctgttcgtggatggcggcccgagccagaaccgtttcctgatgcaatgccttggcgacatgctgcaacacccccgnnnnnn

SEQ ID NO: 4099 - DNA, 682 bp, Xenorhabdus sp.
  CDS (3)..(605)
  unsure (1)..(682): unsure at all n locations
nnnnnncgggggtgttgcagcatgtcgccaaggcattgcatcaggaaacggttctggctcgggccgccatccacgaacaggcgtccaaagcccgaaggcgactgcgcgcgcatggcggcgaagacgtcatggacctgaaaggcaatcgagtcagtgacggcgcgggccatctgggcacgcgtggtgctgaaattgatctggaagaacagggcgcgcgcattggtatcccaatagggcgcaccgaggccaacgaaggccggcacgaaaccgggaccgtttggcgcggcagtggcggcgagttccaccagcgcggcgacatccggcaggccgagaatctccgtcatccagggcagggaggctgccgaaacgagaatattgccttcaaaggcaaaggtcggtttgccgccgagccgccatgcaacggtggtggtgatgccgcgttcgggcgcgatgaaatgcggcagcgtcgtcatgaccgacgaaccggtgccgaaagtgaccttaccatcgccggggttgaaggcgccgtggccgaagagggctgcgtggctgtcgccgatggcggcgaggatcggtgtgccgtccttgatatcgggaacgcctgatgtggtgccgaaatcgccgctgctgtcgcgcagatcgggcagggcgatgatatnnnnnnnnnnnnnnnnnnnnnnnn

SEQ ID NO: 4100 - DNA, 712 bp, Xenorhabdus sp.
  CDS (3)..(662)
  unsure (1)..(712): unsure at all n locations
nnnnnnnnnnnnnnnnnnnnnncgtcggttcgatctttgcggtgagtcaggtccaggcggacggcgacaccaatgttctacgcaaggggcgagagtatctctgcgccggctatgccatctatggcccctcgacgctcttcgttatcacattcggcctcggcgtggtcggcttcacgctggatccgtctgacgggcaattcaaactgaccaacgcgcgcatgcgcgtgccgacggaaacgaccgagtttgccgtgaattcgtcgcgccagcgtttctgggatgagccgatccgacgctatgtcgacgaatgccttgcgggatcggcagggccgcgcggacaggacttcaacatgcgctggaccgcctcgatggtggccgacgtccatcgcattctgacccgcggaggggtgtttctctatccggcggacgagtccaatcgccgcgccggcggcaagctgcgcctgatgtatgaagccaatcccatggcgttcctcgtcgaggcggccggcggtgcagcatccaccggaaccgaagacatccttcgcatccaaccacaggctcatcatcagcgcgtgtcggtgttgctcggctcgagcaacgaaatccaacgcctggtgcaatttcaccaaatccatcactcgcaagaggagatcggctcttaaatggctctcgtcaccctgctttagannnnnnnnnnnnnnnnnnnnnnnnn

SEQ ID NO: 4101 - DNA, 975 bp, Xenorhabdus sp.
  CDS (348)..(557)
  unsure (1)..(975): unsure at all n locations
nnnnnnnnnnnnnnnnnnnnnnnnnnnnnnnnnnnnnnnnnnnnnnnnnnnnnnnnnnnnnnnnnnnnnnnnnnnnnnnnnnnnnnnnnnnnnnnnnnnnnnnnnnnnnnnnnnnnnnnnnnnnnnnnnnnnnnnnnnnnnnnnnnnnnnnnnnnnnnnnnnnnnnnnnnnnnnnnnnnnnnnnnnnnnnnnnnnnnnnnnnnnnnnnnnnnnnnnnnnnnnnnnnnnnnnnnnnnnnnnnnnnnnnnnnnnnnnnnnnnnnnnnnnnnnnnnnnnnnnnnnnnnnnnnnnnnnnnnnnnnnnnnnnnnnnnnnnnnnnnnnnnnnnnnnnnnnnnnnnnntgcatccatatcggcgcgccgatgccgggcgtgatcagccgcgtttttgtcaatcaggggcaggaggtcaaggccggcgatgtgctgctgtccatcgaagcgatgaagatggaaaccgcgctccacgccgaacgtgacggcaagatcgctgaggttctggtgcgccccggcgaccagatcgacgcgaaggacctgttgatctcctacgccgaataagccctgtcgcatcgtcgataaggttgcagacgcccgcctttcggcgggcgttttttattgcgcttcggcagaaactcgaatatgcatgttcgtgcacgtttgttcctgtttatgcatgagtttcgatgagcgatcattttgtcagtgagcggcaggcgctcatcctcgcgcagttgcggcaaagcggccgggtgcttgcgcaggatctggcccagaatttcggtgtttccgaagacaccgtgcgccgtgacctgcgcgagatggcggcgcgtggggaatgtctgcgggtttatggcggagcactgctctccgacagcacgacggtgccgctgaagacgcgtattgccgaggatgccgaccggaaggcgatgctggctttagggcannnnnnnnnnnnnnnnnnnnnnnnnnnnnnnnn

SEQ ID NO: 4102 - DNA, 908 bp, Xenorhabdus sp.
  CDS (400)..(906)
  unsure (1)..(908): unsure at all n locations
nnnnnnnnnnnnnnnnnnnnnnnnnnnnnnnnnnnnnnnnnnnnnnnnnnnnnnnnnnnnnnnnnnnnnnnnnnnnnnnnnnnnnnnnnnnnnnnnnnnnnnnnnnnnnnnnnnnnnnnnnnnnnnnnnnnnnnnnnnnnnnnnnnnnnnnnnnnnnnnnnnnnnnnnnnnnnnnnnnnnnnnnnnnnnnnnnnnnnnnnnnnnnnnnnnnnnnnnnnnnnnnnnnnnnnnnnnnnnnnnnnnnnnnnnnnnnnnnnnnnnnnnnnnnnnnnnnnnnnnnnnnnnnnnnnnnnnnnnnnnnnnnnnnnnnnnnnnnnntcatcctcatcctgatttcggttgtggtggtggtggcggtcgagcggctgatcgggctgcgcaaggtgctgtgacatgacgatggtgaaagtggcagccggtacattgcggggcagtctggaaaacggaattcacgcctttctcggtgtgccctatgccgcgcccgtcacgtccgaacgccgcttcgaagcgccgcagcctgtgccgccatggcagggcgcacgggacgcgacccggcttggccccgtctgtccgcaaattcccacctacggcccggtgggcactgccgcgacctcgaaactggccttcggcgaggatttcctcaccgtcaatatccgcacgcccgatccggcgggcagggcgccggtgctgttctggatccatggcggcggttatgcggtcggttcggccaatgaaccggtgctgcagagcggcgctttcgcggccagcggcattgtcgaggtcacggtcaattaccgcctgggtgcgctcggtttccttcatctcgaaggcaagcccgacaatcgcggtctgctcgatcttgtcgcagcactcgaatgggtgcgcgacaatgttgccgccttcggagg

SEQ ID NO: 4103 - DNA, 938 bp, Xenorhabdus sp.
  CDS (3)..(428)
  unsure (1)..(938): unsure at all n locations
nnnnnnnnnnnnnnnnnnnnnnnnnnnnnnncacgccgcgcgagattttcgaccggccgaaaaccgatttcgtcgcttccttcatcggcgccggctcgttccttacgggcaccgtggttgcgccgggccgtgcggagattcccggtctcggcttcctgcatttctcgggcgctgtcccggtcggccagaaagcgcggtttctggttcgtccgcatcgctttctccttggcgatggcgtcaatgctttctccggcattgtcgagcacgtcacctatcgcgggcagatgctgacgctcggcgtgcgcgccggcgatcatcgccttcaggccgacctgcccacccatgccgccgctctgccggcaaagggtgagcgtgtgacgctttccgttgcgcccgaggatgtgacgctgattggggaggcggcctgatggcggcggcaagccatgcttccggcggcggcacgtcgcatcgcggcgttttgcttctcctgcttctgcccgggctcatcgcactgctgatgacgtttctgttgccgctcgtctggctggtgcgcgcgtccttcgcatcctcgtccatggccccccttcgcggcggcgaatggacgctcgaatcctacagaacccggctgttcgacccgtttactggaagatcgnnnnnnnnnnnnnnnnnnnnnnnnnnnnnnnnnnnnnnnnnnnnnnnnnnnnnnnnnnnnnnnnnnnnnnnnnnnnnnnnnnnnnnnnnnnnnnnnnnnnnnnnnnnnnnnnnnnnnnnnnnnnnnnnnnnnnnnnnnnnnnnnnnnnnnnnnnnnnnnnnnnnnnnnnnnnnnnnnnnnnnnnnnnnnnnnnnnnnnnnnnnnnnnnnnnnnnnnnnnnnnnnnnnnnnnnnnnnnnnnnnnnnnnnnnnnnnnnnnnnnnnnnnnnnnnnnnnnnnnnnnnnnn

SEQ ID NO: 4104 - DNA, 1052 bp, Xenorhabdus sp.
  CDS (528)..(1004)
  unsure (1)..(1052): unsure at all n locations
nnnnnnnnnnnnnnnnnnnnnnnnnnnnnnnnnnnnnnnnnnnnnnnnnnnnnnnnnnnnnnnnnnnnnnnnnnnnnnnnnnnnnnnnnnnnnnnnnnnnnnnnnnnnnnnnnnnnnnnnnnnnnnnnnnnnnnnnnnnnnnnnnnnnnnnnnnnnnnnnnnnnnnnnnnnnnnnnnnnnnnnnnnnnnnnnnnnnnnnnnnnnnnnnnnnnnnnnnnnnnnnnnnnnnnnnnnnnnnnnnnnnnnnnnnnnnnnnnnnnnnnnnnnnnnnnnnnnnnnnnnnnnnnnnnnnnnnnnnnnnnnnnnnnnnnnnnnnnnnnnnnnnnnnnnnnnnnnnnnnnnnnnnnnnnnnnnnngtaagctccattcgccagccggaactgcgcccgcagcctggccagctttagacgcgcccgccggacctgttccgcacccgtttccatcaggaatatggcccgccggtacgcgggcaggggctgaacgcgccgcaggttcaggggcaggcggcaccgctcgtcccggatcgcatggcgacctacggcctgccggtctccaatccgctgcatcgcgtcatgtatggcccgatccgcgatgatgaccgctcgcttccggctattccctatggtcgcatcgatccgcgttatctgcggcaggaagtcagctatcagacggcggaagcacccggcaccatcgtcgtcgataccaggcagcacttcctctatctggtgcagccgggcggcaaggcgatccgttacggcgtcggcctcggtcgtgacggttatgcctggtcgggtcgcggcaagatccagtggaaggcgaaatggccgcgctggacgccgcccgatgaaatggtcaaacgccagccggagctcgcttccatttccgccgccaatggcggcatgacgccgggtctcaacaatccgctcggcgcgcgcgctctttatatcttcaaggatggcaaggacacgctttaccgggtgcacggcacgccggactggccttagaggcaatnnnnnnnnnnnnnnnnnnnnnnnnnnnnnnnnnnnnnnnnn

SEQ ID NO: 4105 - DNA, 701 bp, Xenorhabdus sp.
  CDS (44)..(490)
  unsure (1)..(701): unsure at all n locations
nnnnnnnnnnnnnnnnnnnnnnnnntgtgctctaaagaatctgttccttgccaattcgcatgtggcgcatgattgccgtcttggcagccacatcatcctgtcgaacaatgtgatgctggcgggccatgtcaccattgaggatcgcgccattctgggcggtggttgcgccgtgcaccagttcacccgtatcggccgccaggccttcatcggcggactttcggcggtcaattacgatgtcattccctatggcatgctgaatggcaatcccggcattctcggcggcctcaatgtcgtcggcatgacccgcgccggtatcgagcgcgccgatatccacaaggtcaggcgcgtctacaaggcgattttcgaggctgagggcacgatccgaggcaatgcggcggccatcgaccgtaacgactatctggattgcccgcaggcgcttgaagtcatcgatttcatcggtgcggatagcgatcgcgcgatctcttcgcccaaccggggcaagtgagccgtgacaggcggcgggcgtctcgccattgtggccggcagcggccagctgccgctctatgtggcggccgccgcccgcgagatgggcgaaaacccgttcattgtgcggctgcgcgatgattccagcttcgactggagcggtttcgacaatgccgtcatcaatgtcggggatgttgccgggcttgnnnnnnnnnnnn

SEQ ID NO: 4106 - DNA, 701 bp, Xenorhabdus sp.; identical to SEQ ID NO: 4105
  CDS (536)..(700)
  unsure (1)..(701): unsure at all n locations

SEQ ID NO: 4107 - DNA, 701 bp, Xenorhabdus sp.
  CDS (368)..(670)
  unsure (1)..(701): unsure at all n locations
nnnnnnnnnnnncaagcccggcaacatccccgacattgatgacggcattgtcgaaaccgctccagtcgaagctggaatcatcgcgcagccgcacaatgaacgggttttcgcccatctcgcgggcggcggccgccacatagagcggcagctggccgctgccggccacaatggcgagacgcccgccgcctgtcacggctcacttgccccggttgggcgaagagatcgcgcgatcgctatccgcaccgatgaaatcgatgacttcaagcgcctgcgggcaatccagatagtcgttacggtcgatggccgccgcattgcctcggatcgtgccctcagcctcgaaaatcgccttgtagacgcgcctgaccttgtggatatcggcgcgctcgataccggcgcgggtcatgccgacgacattgaggccgccgagaatgccgggattgccattcagcatgccatagggaatgacatcgtaattgaccgccgaaagtccgccgatgaaggcctggcggccgatacgggtgaactggtgcacggcgcaaccaccgcccagaatggcgcgatcctcaatggtgacatggcccgccagcatcacattgttcgacaggatgatgtggctgccaagacggcaatcatgcgccacatgcgaattggcaaggaacagattctttagagcacannnnnnnnnnnnnnnnnnnnnnnnn

SEQ ID NO: 4108 - DNA, 701 bp, Xenorhabdus sp.; identical to SEQ ID NO: 4105
  CDS (608)..(700)
  unsure (1)..(701): unsure at all n locations

SEQ ID NO: 4109 - DNA, 967 bp, Xenorhabdus sp.
  CDS (89)..(229)
  unsure (1)..(967): unsure at all n locations
nnnnnnnnnnnnnnnnnnnnnnnnnnnnnnnnnnnnnnnnnnnnngccgaactttccccatgacaatccggaaatcatccttcccggcatggtggtcgcactcgaagcgcccttctatggcgaagggctgggcgcgctgatgatcgaggatcagttcctcgtcacatcgtcaggtgcggagtgcatgaacagcctgccacgcactctgcgggatctgtcacggcagtgacggcctgccgccgttcctgcctttagagaaagtcgtcgcgacgcggggtgaagcagtcgatcagctcaccctcttccagacacaggcagccatgctcgatatggccgggaatgacgaggctatcgcctttttgaagatcgtaggcttcgccgtcgcgataaaagcggaagctgccgctggcgacataggtggactgcacatgcggatggctgtgcagcttgccttctgcgccggtcttgaaccggaaggacacgaccatcagctccggcgcttcggaaagnnnnnnnnnnnnnnnnnnnnnnnnnnnnnnnnnnnnnnnnnnnnnnnnnnnnnnnnnnnnnnnnnnnnnnnnnnnnnnnnnnnnnnnnnnnnnnnnnnnnnnnnnnnnnnnnnnnnnnnnnnnnnnnnnnnnnnnnnnnnnnnnnnnnnnnnnnnnnnnnnnnnnnnnnnnnnnnnnnnnnnnnnnnnnnnnnnnnnnnnnnnnnnnnnnnnnnnnnnnnnnnnnnnnnnnnnnnnnnnnnnnnnnnnnnnnnnnnnnnnnnnnnnnnnnnnnnnnnnnnnnnnnnnnnnnnnnnnnnnnnnnnnnnnnnnnnnnnnnnnnnnnnnnnnnnnnnnnnnnnnnnnnnnnnnnnnnnnnnnnnnnnnnnnnnnnnnnnnnnnnnnnnnnnnnnnnnnnnnnnnnnnnnnnnnnnnnnnnnnnnnnnnnnnnnnnnnnnnnnnnnnnnnnnnnnnnnnnnn

SEQ ID NO: 4110 - DNA, 935 bp, Xenorhabdus sp.
  CDS (58)..(432)
  unsure (1)..(935): unsure at all n locations
nnnnnnnnnnnnnnnnnnnnnnnnnnnntctaaagttgagcggcatccatccggcgttatatcgacagtcaccttctcgatcctgccctttcagtggggaagatcatggccgaattcggggtgtcgcgccgcaccgtttatcggctttttgagccgctgggcggtttttcggcatgtatcacccatcggcggcttgagcgggcgatggatttcctgcggtcaccgcaatcgggccatatgacaatcgcggaggtggccgcgacctatggcttcaccaatccggaaaacttcagccgcgctttcaaaaagacctttggtctgtcgccgcgccagctgcgtcatttcgcgtcggaaagccgtgacgccacatcggatatactgaagccggacagcgccgaatggacgcgatggatcgtgcagcttggccgctgacaacgggttttgcggttgatctgacactttatgccggtttgctggcacaatctgacnnnnnnnnnnnnnnnnnnnnnnnnnnnnnnnnnnnnnnnnnnnnnnnnnnnnnnnnnnnnnnnnnnnnnnnnnnnnnnnnnnnnnnnnnnnnnnnnnnnnnnnnnnnnnnnnnnnnnnnnnnnnnnnnnnnnnnnnnnnnnnnnnnnnnnnnnnnnnnnnnnnnnnnnnnnnnnnnnnnnnnnnnnnnnnnnnnnnnnnnnnnnnnnnnnnnnnnnnnnnnnnnnnnnnnnnnnnnnnnnnnnnnnnnnnnnnnnnnnnnnnnnnnnnnnnnnnnnnnnnnnnnnnnnnnnnnnnnnnnnnnnnnnnnnnnnnnnnnnnnnnnnnnnnnnnnnnnnnnnnnnnnnnnnnnnnnnnnnnnnnnnnnnnnnnnnnnnnnnnnnnnnnnnnnnnnnnnnnnnnnnnnnnnnnnnnnnnnnnnnnnnnnnnnnnnnnnnnnnnnnnnnnnn

SEQ ID NO: 4111 - DNA, 994 bp, Xenorhabdus sp.
  CDS (384)..(992)
  unsure (1)..(994): unsure at all n locations
nnnnnnnnnnnnnnnnnnnnnnnnnnnnnnnnnnnnnnnnnnnnnnnnnnnnnnnnnnnnnnnnnnnnnnnnnnnnnnnnnnnnnnnnnnnnnnnnnnnnnnnnnnnnnnnnnnnnnnnnnnnnnnnnnnnnnnnnnnnnnnnnnnnnnnnnnnnnnnnnnnnnnnnnnnnnnnnnnnnnnnnnnnnnnnnnnnnnnnnnnnnnnnnnnnnnnnnnnnnnnnnnnnnnnnnnnnnnnnnnnnnnnnnnnnnnnnnnnnnnnnnnnnnnnnnnnnnnnnnnnnnnnnnnnnnnnnnnnnnnnnnnnnnnnnnnnnnnnncgctcgacccttttcgaaaaccgcatggagggcaactgaccatggttcagccgctcaactatttcaaggaaaccgcctcgcagacggccggcccctatgtgcatatcggctgcacgcccaatttcgtcggcatcgaaggggtgttcgaaaaggatctgggttccggtccgctttataacgacaaggcgcgcggtgagcgcatcagcgtgcgcggcacggtctatgacggcgcgggaatgccgctgaaggacgccctgatcgaaatctggcaggcggatacggacggctattacaacagcccgagcgaaacacgcggcaaggccgatccgaatttcatcggatggggccgttccccgggcgacatggatacgggtgaattcatcttcgaaaccatcaagccgggcaccgtgccgttccgcgatggccggccgatggcgccgcacatcaccttctggatcgtggcgcgcggcatcaatatcggcctgcagacccgcatgtatttcccggaagaacaggaggccaatgcggccgacccggttcttgcccgcgtcgaacagaagagccgcatcgccacgcttgtcgctaaaaaagaggaaggcaacgtctatcgtttcgatatccgccttcagggcgaaggcgaaaccttagannnnnnnnnnnnnnnnnnnnnnnnnnn

SEQ ID NO: 4112 - DNA, 890 bp, Xenorhabdus sp.
  CDS (525)..(656)
  unsure (1)..(890): unsure at all n locations
nnnnnnnnnnnnnnnnnnnnnnnnnnnnnnnnnnnnnnnnnnnnnnnnnnnnnnnnnnnnnnnnnnnnnnnnnnnnnnnnnnnnnnnnnnnnnnnnnnnnnnnnnnnnnnnnnnnnnnnnnnnnnnnnnnnnnnnnnnnnnnnnnnnnnnnnnnnnnnnnnnnnnnnnnnnnnnnnnnnnnnnnnnnnnnnnnnnnnnnnnnnnnnnnnnnnnnnnnnnnnnnnnnnnnnnnnnnnnnnnnnnncgacgtagagcatgatgacgacgccgacgagcacgacgacgaagctcagcggccatgtctttgccgcatcgatgaccgagggcgttacgctcgttcccatcgaaatgccgacgacgacgaaacaggcattacggatgaaggcgggaattccaagcttgacgcccgccagtccggtgatcgtcaccgcgagcgccggccccgaaagaaagggggcgggaacatgaagcaggctggcaagcagtgcgcccatgctgccgacaaggacggtaagcgcaaatgtatgaagttcgggcttgatgatcattgcgacgctgattgtttgcttgaaaaagctcgtgaccaaatgcgccgcttcgtctcgcaacgtcaaccggcgggaccaaaaatattgtatttcatgagtattttataaaagaaaagcccgtgaccttccggcacgggctctggctgtcgccattttggcattcatctggtcaggcggcgggaagcgccacggccttcggcatttcggtatcgaggccgagcaggaagttgatctgcgggcgtgccttgacgagatcgtcgatcgaatattccgccagcacgtcgaagaaggcattgagtgcctttagagcacnnnnnnnnnnnnnnnnnnnnnnnnnnnnnn

SEQ ID NO: 4113 - DNA, 746 bp, Xenorhabdus sp.
  CDS (277)..(714)
  unsure (1)..(746): unsure at all n locations
nnnnnnnnnnnnnnnnnnnnnnnnnnnnnnnnnnnnnnnnnnnnnnnnnnnnnnnnnnnnnnnnnnnnnnnnnnnnnnnnnnnnnnnnnnnnnnnnnnnnnnnnnnnnnnnnnnnnnnnnnnnnnnnnnnnnnnnnnnnnnnnnnnnnnnnnnnnnnnnnnnnnnnnnnnnctatgataaagacagggttctttggtattttcaacaagcacatccccccattggttgagggaggaatttccggttcgttccacgctttggtacatgacccagggcgaacatatcagccccttcctgcttcttgactatgccgggccggaacggtttgcgccgggcaagacgccacggggcgtcggcgctcacccgcatcgcgggttcgaaacggtgaccatcgtctatcagggcgaggtggagcatcgcgactcgaccggcagtggcggtctgatcggcccgggcgatgttcaatggatgacggccgctgccggcatcctgcatgaggaacgccattcgcaggcctttacgaaacagggcggtacgctggaaatggtgcagctctgggtgaacctgccggccagggacaagtccgcgccgcccgcctatcagaccgtgctcgacggcgatattcccgccgtggcgctgccggacaataccggaaccgtgcgtgtcatcgccggcgactatgccgggcacggggcccggcgcgcaactctttannnnnnnnnnnnnnnnnnnnnnnnnnnnnnnnn

SEQ ID NO: 4114 - DNA, 923 bp, Xenorhabdus sp.
  CDS (375)..(728)
  unsure (1)..(923): unsure at all n locations
nnnnnnnnnnnnnnnnnnnnnnnnnnnnnnnnnnnnnnnnnnnnnnnnnnnnnnnnnnnnnnnnnnnnnnnnnnnnnnnnnnnnnnnnnnnnnnnnnnnnnnnnnnnnnnnnnnnnnnnnnnnnnnnnnnnnnnnnnnnnnnnnnnnnnnnnnnnnnnnnnnnnnnnnnnnnnnnnnnnnnnnnnnnnnnnnnnnnnnnnnnnnnnnnnnnnnnnnnnnnnnnnnnnnnnnnnnnnnnnnnnnnnnnnnnnnnnnnnnnnnnnnnnnnnnnnnnnnnnnnnnnnnnnnnnnnnnnnnnnnnnnnnnnnnnnnnnnnnnnnnnnnnnnnnnnnnnnnnnnnnnnnnnnnnnnnnnnnnnnnnnnnnnnncgccacgcccatgcgttgatgcacagccatcatttcaaggcactgcgggtcaccaatgacagggcggaaatcgtcggcatcgttacccagacggattttctggaaaaggcaagctggagaaacggtcgcccgtcgatcggtttcctgcagcggctgcgcctcatcttctcaggcgcaagtgcccccaacgataccgtcaaggacatcatgacttcccccgtgagaaccgtgcggccggaaacctcgatcgaggaagccatcatccgctttgcggaggaagggttgcattatctgccggtgatcgatgccaggggcaagatggtgggcatcgtgtcgcaatccgacgtcatggttgcgatgctggtggacaaggtcgcggcatagcctgccgcgataccgaagtgcctgcctctccctgggggggcggcaagacggggcggttagcgtctcgccttcaggagacgctgccatagcgtgccgccaaagaaccgtccgagcgcgacgaaataggcgatgatcagggcnnnnnnnnnnnnnnnnnnnnnnnnnnnnnnn

SEQ ID NO: 4115 - DNA, 870 bp, Xenorhabdus sp.
  CDS (85)..(660)
  unsure (1)..(870): unsure at all n locations
nnnnnnnnnnnnnnnnnnnnnnnnnnnnntgtgacgatggacgcctgcatggaaaacgacgcggccgcggggcattaccggccgtggctggtggatctgcgcaaggacaagccgcatcagctcgacgaccaactggagcagttgttcctcgaaaaatcgatgaccagcgctgccgctttcaaccgcctgtttgacgagacgatggccgatctgcgtttcaacattgacggcgcgagccttccgctggaagtgacgctcaacatgctgcaggagccggaacccgagacccgaaagaaagcggcggaagcgctgggcgccaccttcaaggataatctgcgggtcttcaccctcatcaccaacacgcttgccaaggacaaggatatttccgaccgctggcgcaagttcgaggatattgccgacagccgccatctggccaaccgcgtcgagcgcgaggtggtcgatgcattggccaccgccgtaaagaaggcctatccgcgtctttcccaccgttattacgccatgaaggccagatggctcggcatggagcagatgaattactgggaccgcaacgcgccgcttcccgatacatcgaacacgattattccatgggatgaggccagggacacggtgctttccgcctatggcaatttcgcccccgaaatnnnnnnnnnnnnnnnnnnnnnnnnnnnnnnnnnnnnnnnnnnnnnnnnnnnnnnnnnnnnnnnnnnnnnnnnnnnnnnnnnnnnnnnnnnnnnnnnnnnnnnnnnnnnnnnnnnnnnnnnnnnnnnnnnnnnnnnnnnnnnnnnnnnnnnnnnnnnnnnnnnnnnnnnnnnnnnnnnnnnnnnnnnnnnnnnnnnnnnnnnnnnnnnn

SEQ ID NO: 4116 - DNA, 727 bp, Xenorhabdus sp.
  CDS (16)..(606)
  unsure (1)..(727): unsure at all n locations
nnnnnnnnnnnnnnngtcatcacccgggaccagatggaggcgcagactgtccgcaatctcagcgaagcactgaattatgtgcctggcgtcgtcgcgcagctttcaggttccgatccgcgctttgatgcgccgcgtattcgcggcttcgccggaaaccagctgcagttcctcaatggtctgcggctgatgcgcacggccggcgcgccatcctacgaagtctatggtctggagcgggtggaggtcattcgcgggccggcctcggtgctttatggtcagggcaatcccggtggactcatcaatctcgtcagcaagcggccgaccttcgagcgtttcggtgaagtgggcgcgcagatcggcagcttcgattattatcagtcgatgttcgatattggtggcccggtggcggatagcgacagctttgcctatcgcctgaccggccttgcccgcaatgcccatgcccagaccgacaatctgcagaacgaccgctatttcatcgccccggctctcacatggcagccggatgaggatacgaagctgacggttcttgcgtcctatcagcacgataatccaagttccccttccggcccgccgccgggggttaattaaggtcgggccggcaaccaggttggcccccggttttaaggtcggcgatcggtcttttgatacgtcgacccgtaaattnnnnnnnnnnnnnnnnnnnnnnnnnnnnnnnnnnnnnnnnnnnnnn

SEQ ID NO: 4117 - DNA, 928 bp, Xenorhabdus sp.
  CDS (34)..(564)
  unsure (1)..(928): unsure at all n locations
nnnnnnnnnnnnnnnnnnnnnnnnnnnnnnnncggcatcaaggtcagccggaagcgtcggcccgccgattacgccagcgccatcgataattacatcgaaaagctcgattcccatcgcggcgcggttttttcgtccaactatgaatatcccggccgttatacccgctgggacacggccatcatcgacccaccgctcggcatttcctgttttggccgcaagatgtggatcgaggcctataatggccgtggcgaagtgctactcggcttcatcaccgaaaagctgaagacgacacccgatcttaccctcggcgcttccaccacacgccgtctcgatctcaccgtcaatgagccggatcgcgtcttcaccgaagaagaacgttcgaaaatcccgaccgtcttcacggcgctcagagccatcgtcgatctcttctattcgaatgcggattcggccatcggcctgttcggcgccttcggttacgatctcgccttccagttcgatgcgatcaagctgtcgctttcgcggccggaagaccagcgcgacatggtgctgttcctgcccgatgaaatnnnnnnnnnnnnnnnnnnnnnnnnnnnnnnnnnnnnnnnnnnnnnnnnnnnnnnnnnnnnnnnnnnnnnnnnnnnnnnnnnnnnnnnnnnnnnnnnnnnnnnnnnnnnnnnnnnnnnnnnnnnnnnnnnnnnnnnnnnnnnnnnnnnnnnnnnnnnnnnnnnnnnnnnnnnnnnnnnnnnnnnnnnnnnnnnnnnnnnnnnnnnnnnnnnnnnnnnnnnnnnnnnnnnnnnnnnnnnnnnnnnnnnnnnnnnnnnnnnnnnnnnnnnnnnnnnnnnnnnnnnnnnnnnnnnnnnnnnnnnnnnnnnnnnnnnnnnnnnnnnnnnnnnnnnnnnnnnnnnnnnnnnnnnnnnnnnnnnnnnnn

SEQ ID NO: 4118 - DNA, 1069 bp, Xenorhabdus sp.
  CDS (409)..(876)
  unsure (1)..(1069): unsure at all n locations
nnnnnnnnnnnnnnnnnnnnnnnnnnnnnnnnnnnnnnnnnnnnnnnnnnnnnnnnnnnnnnnnnnnnnnnnnnnnnnnnnnnnnnnnnnnnnnnnnnnnnnnnnnnnnnnnnnnnnnnnnnnnnnnnnnnnnnnnnnnnnnnnnnnnnnnnnnnnnnnnnnnnnnnnnnnnnnnnnnnnnnnnnnnnnnnnnnnnnnnnnnnnnnnnnnnnnnnnnnnnnnnnnnnnnnnnnnnnnnnnnnnnnnnnnnnnnnnnnnnnnnnnnnnnnnnnnnnnnnnnnnnnnnnnnnnnnnnnnnnnnnnnnnnnnnnnnnnnnnnnnnnnnnnnnnnnnnnnnnnnnnnnnnnnnnnnnnnnnnnnnnnnnnnnnnnnnnnnnnnnnnnnnnnnnnnnnnnnnncgccagcagcatgttgaccatcggcagccagcagccgttccatccaagctcaatcaatgtcgccaacctgctgcgcggcatggccgatattctcgagatcgcggtcggccccaaatgccggatcgcgctcgatctcgatgacggtcttcccacaatcccgctcgacccggcacttttcgagcaatccatcctcaacctctgcctcaatgcggcggcagccatgcctgatggcggtctgatctcgatcgaggcggcctgcgagaaggatgcactggtgatatcggtcaccgacgaaggcatcggcatgacgccggaggcggtggacaaggcctttgagccctatttcaccacccgtggggaccatggcggcgcgggccttggccttgccatggtctatggcttcgtgcgccagagcggcggcgaggcgcatatcagttccaagcccggtgaaggggcgaaggtgcagctgacatttccggcaggcaccgggctggcgcaaaggtcggcctgaagcggcttccgcgctcggccaggcggccggtcaatccttcgcgccggcggcctccagcagcgcaacgatttccgtcagccctctttcgtgggcatgggcaagcgcggtccttccgtcaaaactttagagnnnnnnnnnnnnnnnnnnnnnnnnnnnnnnn

SEQ ID NO: 4119 - DNA, 926 bp, Xenorhabdus sp.
  CDS (277)..(477)
  unsure (1)..(926): unsure at all n locations
nnnnnnnnnnnnnnnnnnnnnnnnnnnnnngtgctctaaagctttagagcccctgaaactcatgtaccgaaagctgataacgtgaatgctgtcacaacacgcaatgtcgcatcagactccaccgaataaaagtacgcaggaggcaagctcgttggttgagacaattacagttcaaccgattacactatcgaaactacggctatggcaaaaacggacagagcgctggctacttgtatgctggatacttgaataccgaatataggactaccactgatcatgctcggactgagtatttactgcaacagccattactccaacgctcatgactccaccgctgaagccagcgacgttaaaatcagcgacattggagatctctacaatggcggtacttactatcaaggcactaaatgtcatgcctccctaagtgacgcatgccttactgccgaaagccgttacaacgaagccagctacaactaatcaaatacgggtggataagctactgttcgcgatgacaccatgcccgtttacgacctttctggcaacgatcattgtagtgacggttattggggtnnnnnnnnnnnnnnnnnnnnnnnnnnnnnnnnnnnnnnnnnnnnnnnnnnnnnnnnnnnnnnnnnnnnnnnnnnnnnnnnnnnnnnnnnnnnnnnnnnnnnnnnnnnnnnnnnnnnnnnnnnnnnnnnnnnnnnnnnnnnnnnnnnnnnnnnnnnnnnnnnnnnnnnnnnnnnnnnnnnnnnnnnnnnnnnnnnnnnnnnnnnnnnnnnnnnnnnnnnnnnnnnnnnnnnnnnnnnnnnnnnnnnnnnnnnnnnnnnnnnnnnnnnnnnnnnnnnnnnnnnnnnnnnnnnnnnnnnnnnnnnnnnnnnnnnnnnnnnnnnnnnnnnnnnnnnnnnnnnnnnnnnnnnnnnnnnnnn

SEQ ID NO: 4120 - DNA, 977 bp, Xenorhabdus sp.
  CDS (554)..(898)
  unsure (1)..(977): unsure at all n locations
nnnnnnnnnnnnnnnnnnnnnnnnnnnnnnnnnnnnnnnnnnnnnnnnnnnnnnnnnnnnnnnnnnnnnnnnnnnnnnnnnnnnnnnnnnnnnnnnnnnnnnnnnnnnnnnnnnnnnnnnnnnnnnnnnnnnnnnnnnnnnnnnnnnnnnnnnnnnnnnnnnnnnnnnnnnnnnnnnnnnnnnnnnnnnnnnnnnnnnnnnnnnnnnnnnnnnnnnnnnnnnnnnnnnnnnnnnnnnnnnnnnnnnnnnnnnnnnnnnnnnnnnnnnnnnnnnnnnnnnnnnnnnnnnnnnnnnnnnnnnnnnnnnnnnnnnnnnnnnnnnnnnnnnnnnnnnnnnnnnnnnnnnnnnnnnnnnnnnnnnnnnnnnnngcgccaattcgggtctgaaatccgaccgtcgggattacgtcgccatggcggctttcgatgcgccgattggtctttcgcggtcgtcgagcctgcgtctcgacaaggacgatctcgatatcaatcgttcggagacaggcctcagctattcggaccgccgtatcaccggcaagctcagctatacgcaggtgaaggcacagccgaaatatggctataacgaagaccgcgacatcgttcaggcctccggcatgttgcgcatggatgacaactggtcgctgttcggttcgatcaactacgatctgaacggcaagtttgccgccgagcgccggatcggcattctctaccaggatgaatgcacgatcttcaccgtcagctattccgacgagggcaacatcaattccagccggcagtccgccaatgactggtcgatcaatgcccgtctggcgttccgcacgctcggcgacatcagtgtcggctccgcaaacgaagactgggccgatatggatatcggctggaaaccgaacaattactgagtttaaaggcaggtcacacagcatcgtggcctgcctttttctgtagagnnnnnnnnnnnnnnnnnnnnnnnnnnnnnnn

SEQ ID NO: 4121 - DNA, 973 bp, Xenorhabdus sp.
  CDS (136)..(651)
  unsure (1)..(973): unsure at all n locations
nnnnnnnnnnnnnnnnnnnnnnnnnnnnnnnnnnnnnnnnnnnnnnnnnnnnnggcttaacctggttaatggggcgactttcgtccagttttaggggtttatatgttaatatttaattcttttttaacaaaaaataagcgcgccttttttgccgtcggcctcgccagcgcattgatgaacatacttaatctttccggctcgcttttcatgctggaggtttacgatcgcatcttgcccagcaagagcatcccgtcgcttgtggcgctggttgttctcctcatcattctctacgcatttctgatgggcttcgatatgctgcgcagccggatattggcacgcatctccgacgatatggacgacacgctcaatcaacggctcttccgggcgtcgatcggcgccccactccttgcctccaccaggatcgacgggttgcagatcgtcggcgatctcgaccagatacgccagtttctctccggccccggaccgggagcattttttgatattccctggttgcccatatatctgctgatctgctttgccctgcaccccgggatcggttttgcggtgcttggcggcgccgccattcttgtcgtattaacgcttctgaccaattggctcaccgaaaaagcgaccaaacaggcctatgccgcacgnnnnnnnnnnnnnnnnnnnnnnnnnnnnnnnnnnnnnnnnnnnnnnnnnnnnnnnnnnnnnnnnnnnnnnnnnnnnnnnnnnnnnnnnnnnnnnnnnnnnnnnnnnnnnnnnnnnnnnnnnnnnnnnnnnnnnnnnnnnnnnnnnnnnnnnnnnnnnnnnnnnnnnnnnnnnnnnnnnnnnnnnnnnnnnnnnnnnnnnnnnnnnnnnnnnnnnnnnnnnnnnnnnnnnnnnnnnnnnnnnnnnnnnnnnnnnnnnnnnnnnnnnnnnnnnnnnnnnnnnnnnnnnnnnnnnnnnnnnnnnnnnnnnnnnnnnnnnnnnn

SEQ ID NO: 4122 - DNA, 973 bp, Xenorhabdus sp.
  CDS (428)..(850)
  unsure (1)..(973): unsure at all n locations
nnnnnnnnnnnnnnnnnnnnnnnnnnnnnnnnnnnnnnnnnnnnnnnnnnnnnnnnnnnnnnnnnnnnnnnnnnnnnnnnnnnnnnnnnnnnnnnnnnnnnnnnnnnnnnnnnnnnnnnnnnnnnnnnnnnnnnnnnnnnnnnnnnnnnnnnnnnnnnnnnnnnnnnnnnnnnnnnnnnnnnnnnnnnnnnnnnnnnnnnnnnnnnnnnnnnnnnnnnnnnnnnnnnnnnnnnnnnnnnnnnnnnnnnnnnnnnnnnnnnnnnnnnnnnnnnnnnnnnnnnnnnnnnnnnnnnnnnnnnnnnnnnnnnnnnnnnnnnnnncgtgcggcataggcctgtttggtcgctttttcggtgagccaattggtcagaagcgttaatacgacaagaatggcggcgccgccaagcaccgcaaaaccgatcccggggtgcagggcaaagcagatcagcagatatatgggcaaccagggaatatcaaaaaatgctcccggtccggggccggagagaaactggcgtatctggtcgagatcgccgacgatctgcaacccgtcgatcctggtggaggcaaggagtggggcgccgatcgacgcccggaagagccgttgattgagcgtgtcgtccatatcgtcggagatgcgtgccaatatccggctgcgcagcatatcgaagcccatcagaaatgcgtagagaatgatgaggagaacaaccagcgccacaagcgacgggatgctcttgctgggcaagatgcgatcgtaaacctccagcatgaaaagcgagccggaaagattaagtatgttcatcaatgcgctggcgaggccgacggcaaaaaaggcgcgcttattttttgttaaaaaagaattaaatattaacatataaacccctaaaactggacgaaagtcgccccattaaccaggttaagccnnnnnnnnnnnnnnnnnnnnnnnnnnnnnnnnnnnnnnnnnnnnnnnnnnnnn

SEQ ID NO: 4123 - DNA, 1044 bp, Xenorhabdus sp.
  CDS (50)..(586)
  unsure (1)..(1044): unsure at all n locations
nnnnnnnnnnnnnnnnnnnnnnnnnnnnnnnnnnnnnnnnnnntaaagtattgatacggaggcggaggttcagggtgtgggcgaaaacctgcaggaccatctgcaactgcgcatggtctataaggtctccggtgttctgacgctgaatgaaagggcttccaccctgttcggcaaggcaaggatcggccttgaatatgcgctgacgcgctccgggccgatgtcgatggcgccgagccagctcgtggtcttcacccgttcttcgccggaaaaggaaaccgccgatctggaatatcatgtccagccggtttcgctcgacaagttcggcgatccggttcacacttttccggccattaccgaaagtgtctgcaatctgcagccggaaagccagggctcactgcatgtgaaaagaccggatttcgccatgcagccggatatccgcccctactatctttccacggaaggcgaccgccatgtggccatcgattacatgcggctgacgcgccgaatcgtcacccaggcggtctttgccccgttcaagccacatgaataccggcccaagacctcatttgaaaacgataatgatctnnnnnnnnnnnnnnnnnnnnnnnnnnnnnnnnnnnnnnnnnnnnnnnnnnnnnnnnnnnnnnnnnnnnnnnnnnnnnnnnnnnnnnnnnnnnnnnnnnnnnnnnnnnnnnnnnnnnnnnnnnnnnnnnnnnnnnnnnnnnnnnnnnnnnnnnnnnnnnnnnnnnnnnnnnnnnnnnnnnnnnnnnnnnnnnnnnnnnnnnnnnnnnnnnnnnnnnnnnnnnnnnnnnnnnnnnnnnnnnnnnnnnnnnnnnnnnnnnnnnnnnnnnnnnnnnnnnnnnnnnnnnnnnnnnnnnnnnnnnnnnnnnnnnnnnnnnnnnnnnnnnnnnnnnnnnnnnnnnnnnnnnnnnnnnnnnnnnnnnnnnnnnnnnnnnnnnnnnnnnnnnnnnnnnnnnnnnnnnnnnnnnnnnnnnnnnnnnnnnnnnnnnnnnnnnnnnnnnnnnnnnnnnnnnnnnnnnnnnn

SEQ ID NO: 4124 - DNA, 732 bp, Xenorhabdus sp.
  CDS (338)..(730)
  unsure (1)..(732): unsure at all n locations
nnnnnnnnnnnnnnnnnnnnnnnnnnnnnnnnnnnnnnnnnnntgaacaggatttactgactgccagtgataaaggatatgttgccggcgcaacacttgatgtctttgttgaagagccgctgtcaaatatgcacccattggtggactcatccccgaatcactattacgccgcatattgctgcaaacaccatcccggaacaggctatggacgctatttgtcagaatatccggagaatggagcagggacaaacaccaactggccttgtggatatatcgcttggctattaataagctgctttacagcatggcggatgattagcaaaataacgccatttgaatgagtcgttattttaaattattgggatttaatgaagtcatgaatgaattttctattgtctgccgcattttaggcaccctgtttaaccgcgcaccgcaagatcctatgttacagcctctgatgaacatgattgctgaaggtaaattaaagcaggcatggcctttggaacaggatgagttattggttcgcctgcaacaaaatagcgatttatctgtaatagaatcagactatcaggcgttgtttgtcggggagactgctaaagttgctatttgccgctctgattatactgatgaaacaaaaaatgaagtgcgtcagttcctgaacgagccgggtatgccattatctgatacagcagccgnnnnnnnnnnnnnnnnnnnnnnnnnnnnnnnnnnnnn

SEQ ID NO: 4125 - DNA, 903 bp, Xenorhabdus sp.
  CDS (396)..(830)
  unsure (1)..(903): unsure at all n locations
nnnnnnnnnnnnnnnnnnnnnnnnnnnnnnnnnnnnnnnnnnnnnnnnnnnnnnnnnnnnnnnnnnnnnnnnnnnnnnnnnnnnnnnnnnnnnnnnnnnnnnnnnnnnnnnnnnnnnnnnnnnnnnnnnnnnnnnnnnnnnnnnnnnnnnnnnnnnnnnnnnnnnnnnnnnnnnnnnnnnnnnnnnnnnnnnnnnnnnnnnnnnnnnnnnnnnnnnnnnnnnnnnnnnnnnnnnnnnnnnnnnnnnnnnnnnnnnnnnnnnnnnnnnnnnnnnnnnnnnnnnnnnnnnnnnnnnnnnnnnnnnnnnnnnnnnnnnnnnnnnnnnnnnnnnnnnnnnnnnnnnnnnnnnnnnnnnnnnnnnnnnnnnnnnnnnnnnnnnnnnnnnntgaaactgataatgctactccgtcagcagagaaaagcgcagataatcacccggctgctgccacgagtacaggcagtgagaagggagattatgatgctgctgtcgctttggctattaataccaaggagtatgataaggcaatcgtcgcttttcagaactttgtcaaagcgtatcctaagtcgaaatacctttcgaatgctaattattggttaggtcagctgaattacaacaaaggcaagaaagatgatgcggcttattattttgcgactgtggtgaaaaattatcctaagtcatcaaaaagcagcgattccttgtataaagttggtctgattatgcaggaaaaagggcaaaaggataaagccaaggcagtttatcagcaggtagttaagcaatatcccggtaccaacgcggcaaaaatggctgccaaaaagattactggaatgtaatagttatccccaaaaggttatatatcggtctttttggggactttagagcacannnnnnnnnnnnnnnnnnnnn

SEQ ID NO: 4126 - DNA, 932 bp, Xenorhabdus sp.
  CDS (53)..(526)
  unsure (1)..(932): unsure at all n locations
nnnnnnnnnnnnnnnnnnnnnnnnnnnnnnnnnnnnnnnnntgctctaaagactcgatccgccggggcttgcgcccgtctttctggcgctgaccgccggcatgacgcgcgaccagcgcagccaggtggcgctgcgcggttccatcatcgccttcggcatcctcgccgtctttgcccttttcggccttgccatcctcaacctgctcggcatttcgcttggcgccttccgcatcgccggcggccttctgctgttctggatttccttcgagatgattttcgagaagcgtcaggagcgcaaggaaaagacctccgagatcgccatcaccaaggaccaccttcacaatctggcggtctttccgctggcactccccctgatcgccggaccgggcgccatttccgccaccgtccttctcgccggaacgatgaagaccaccatcgagatggtcgtgctcatcctgatcctcgctttcgccatggctctcgtctacacggccctgatcgtttcggagcgtatggaccgggttctnnnnnnnnnnnnnnnnnnnnnnnnnnnnnnnnnnnnnnnnnnnnnnnnnnnnnnnnnnnnnnnnnnnnnnnnnnnnnnnnnnnnnnnnnnnnnnnnnnnnnnnnnnnnnnnnnnnnnnnnnnnnnnnnnnnnnnnnnnnnnnnnnnnnnnnnnnnnnnnnnnnnnnnnnnnnnnnnnnnnnnnnnnnnnnnnnnnnnnnnnnnnnnnnnnnnnnnnnnnnnnnnnnnnnnnnnnnnnnnnnnnnnnnnnnnnnnnnnnnnnnnnnnnnnnnnnnnnnnnnnnnnnnnnnnnnnnnnnnnnnnnnnnnnnnnnnnnnnnnnnnnnnnnnnnnnnnnnnnnnnnnnnnnnnnnnnnnnnnnnnnnnnnnnnnnnnnnnnnnnnnnnnnnnnnnnnnnnnnnnnnnnnnn

SEQ ID NO: 4127 - DNA, 894 bp, Xenorhabdus sp.
  CDS (186)..(335)
  unsure (1)..(894): unsure at all n locations
nnnnnnnnnnnnnnnnnnnnnnnnnnnnnnttaagttttccgatccagtttatcaaattcactttgtcgttttgatgtggaggatcggcccggatttctttctcttcgaaccgtataaatccatcctgggagaccgaagccaaaccgaggaacaacgtatcgagcgctgtaaccttgagccgaccatgagccaggagggaaatgcgattgcgcggagcgacaatgccttctggttcccgcaatatatgaagaacaacattctcggcgtcccttatgacgacatcgaggaggagttcgagcgtgagcgtgctgccaaggcgagagacgttcaatgagccagcatcttgatgatctcgtcaatgtcccggatacacgcgagcttgaactggcccgccgcgatctggatatgctgaaccagcgctataccgaaatcgcgaaagaagcgggttggctggctgcttcgtccgtgcccgtggtgggcggtgtcgtggatgttgcgagcgcgattggaaacnnnnnnnnnnnnnnnnnnnnnnnnnnnnnnnnnnnnnnnnnnnnnnnnnnnnnnnnnnnnnnnnnnnnnnnnnnnnnnnnnnnnnnnnnnnnnnnnnnnnnnnnnnnnnnnnnnnnnnnnnnnnnnnnnnnnnnnnnnnnnnnnnnnnnnnnnnnnnnnnnnnnnnnnnnnnnnnnnnnnnnnnnnnnnnnnnnnnnnnnnnnnnnnnnnnnnnnnnnnnnnnnnnnnnnnnnnnnnnnnnnnnnnnnnnnnnnnnnnnnnnnnnnnnnnnnnnnnnnnnnnnnnnnnnnnnnnnnnnnnnnnnnnnnnnnnnnnnnnnnnnnnnnnnnnnnnnnnnnnnnnnnnnnnnnnnnnnnnnnnnnnnnnnnnnnnnnnnnnnn

SEQ ID NO: 4128 - DNA, 924 bp, Xenorhabdus sp.
  CDS (149)..(280)
  unsure (1)..(924): unsure at all n locations
nnnnnnnnnnnnnnnnnnnnnnnnngctatcgccgcagatgcggaaacgctggtggcggtgctgcgcaatgcggaaaagccgatcctcatccattgcgaacacggtgccaaccgcaccgggcttgcctccgccatctatgtcggggccgtggccggcaagagcgaggcggccgccgaattccagctttcgccctattacgggcatgtgccgatccccggtattgggcgctatgaaatgtaccagtcctgggatgatttcgaggaaaccatcggcttttgaatgttaccttatacgcggggccatcctcggccctgtgccgaggatcgaaccacgttgcgtccggcagataggttgcagatgctgtggacaagcccgagcatgacggaagagaagccttcgaacgttgtcgtcagccgtcctccgttgcctgcaaggctgctcaataattcccgccactttccccgatcaccttcnnnnnnnnnnnnnnnnnnnnnnnnnnnnnnnnnnnnnnnnnnnnnnnnnnnnnnnnnnnnnnnnnnnnnnnnnnnnnnnnnnnnnnnnnnnnnnnnnnnnnnnnnnnnnnnnnnnnnnnnnnnnnnnnnnnnnnnnnnnnnnnnnnnnnnnnnnnnnnnnnnnnnnnnnnnnnnnnnnnnnnnnnnnnnnnnnnnnnnnnnnnnnnnnnnnnnnnnnnnnnnnnnnnnnnnnnnnnnnnnnnnnnnnnnnnnnnnnnnnnnnnnnnnnnnnnnnnnnnnnnnnnnnnnnnnnnnnnnnnnnnnnnnnnnnnnnnnnnnnnnnnnnnnnnnnnnnnnnnnnnnnnnnnnnnnnnnnnnnnnnnnnnnnnnnnnnnnnnnnnnnnnnnnnnnnnnnnnnnnnnnnnnnnnnnnnnnnnnnnnnnnnnnnnnnnnnnnnnnnnnnnnnnnnnn

SEQ ID NO: 4129 - DNA, 932 bp, Xenorhabdus sp.
  CDS (1)..(501)
  unsure (1)..(932): unsure at all n locations
nnnnnnnnnnnnnnnnnnnnnnnnnnnnnnnncctgagttttaatcagcttatgttccatctgcggcaggggctgtccatcattctggaagaacacgctattcagttaccactcactgaatactctcatggcctgaatatcgccacactacctaatgccaacatggtgaatacattcagctttattctggcggtccatgctgaaaccacgaatgaaaccctgatgagccattttccggctcagatgaaaattgcccctgtcgggcgtatccgtgaattagtgcagttgcagttacccggtattgcaatacgggctttgccatctgtgccgaggcaaattccctggcactcagggtatgtctatttcgaactagaaaaagagggcgatttgtggaaacaaatggataaagccggtggctttgcattgcacctggcgggtgattttcccggtttaaatatggagttttgggctgtccgtaaccagcctaaacaacctaaatgaaggtaacgacgcctatgatgagacaagaagctcttcatactgatcagatatggcttgctgatgacacccnnnnnnnnnnnnnnnnnnnnnnnnnnnnnnnnnnnnnnnnnnnnnnnnnnnnnnnnnnnnnnnnnnnnnnnnnnnnnnnnnnnnnnnnnnnnnnnnnnnnnnnnnnnnnnnnnnnnnnnnnnnnnnnnnnnnnnnnnnnnnnnnnnnnnnnnnnnnnnnnnnnnnnnnnnnnnnnnnnnnnnnnnnnnnnnnnnnnnnnnnnnnnnnnnnnnnnnnnnnnnnnnnnnnnnnnnnnnnnnnnnnnnnnnnnnnnnnnnnnnnnnnnnnnnnnnnnnnnnnnnnnnnnnnnnnnnnnnnnnnnnnnnnnnnnnnnnnnnnnnnnnnnnnnnnnnnnnnnnnnnnnnnnnnnnnnnnnnnnnnnn

SEQ ID NO: 4130 - DNA, 725 bp, Xenorhabdus sp.
  CDS (367)..(474)
  unsure (1)..(725): unsure at all n locations
nnnnnnnnnnnnnnnnnnnnnnnnnnnnnnnnnnnnnnnnnnnnnnnnnnnnnnnnnnnnnnnnnnnnnnnnnnnnnnnnnnnnnnnnnnnnnnnnnnnnnnnnnnnnnnnnnnnnnnnnnnnnnnnnnnnnnnnnnnnnnnnnnnnnnnnnnnnnnnnnnnnnnnnnnnnnnnnnnnnnnnnnnnnnnnnnnnnnnnnnnnnnnnnnnnnnnnnnnnnnnnnnnnnnnnnnnnnnnnnnnnnnnnnnnnnnnnnnnnnnnnnnnnnnnnnnnnnntcacagttgaatgcgcggcaacctgagagttattaagtaccggttatttgccgtgacccaatccttatgcctgatggggcggctagcgccatgcttagaactggtgcacaatggcatgacctttatctgggttggggcctgcaagggctcgacagcgggtctgatgtggggtgtatctctgtagctgacccgggttaaaatgcactaagcctggatggagcgtgatggatgggcactgccagtgagccgtactgtgtccctgggacaggtctgccaagcgtctatctcatctagcacagcgttaatgtggcaaaaaacgtctcgcggttctgccgtgtagccacagcaaatgagggcaggcccggcaatgagctcaagctcagcatcggccagattttggcctgnnnnnnnnnnnnnnnnnnnnnnnnnnnnnnnnnnnnnnnnnnnnn

SEQ ID NO: 4131 - DNA, 740 bp, Xenorhabdus sp.
  CDS (396)..(740)
  unsure (1)..(740): unsure at all n locations
nnnnnnnnnnnnnnnnnnnnnnnnnnnnnnnnnnnnnnnnnnnnnnnnnnnnnnnnnnnnnnnnnnnnnnnnnnnnnnnnnnnnnnnnnnnnnnnnnnnnnnnnnnnnnnnnnnnnnnnnnnnnnnnnnnnnnnnnnnnnngatttagaaaaatatctacctttaattgtttatgcgaaacaaataccttccttgtagcgtcatcattaacgtcacggacgtttttttgcatatgacccagcgtttaataaattcaatatttgaggaacaaaaacagtcaatgaaaaagatcccagtactggttgtcaccgccttgctgttaagcggctgtgcaacaccaaatcgtaacactattttaccaacacccttcgcaggtttgtcataccggcgaacccatgatccagactacactctactttggcctgaaccgtccatcagggccggtgattactgccgccgagtggcaaatattcattaatcgaaaggttacgccacgctttaaagacggtcttgcggtttttgatgctaagggacaatggttaggcaacgacggcaagcttacgccgcaaaacagcaaagcattactgttnnnnnnnnnnnnnnnnnnnnnnnnnnnnnnnnnnnnnnnnnnnnnnnnnnnnnnnnnnnnnnnnnnnnnnnnnnnnnnnnnnnnnnnnnnnnnnnnnnnnnnnnnnnnnnnnnnnnnnnnnnnnnnnnnnnnnnnnnnnnnnnnnnnnnnn

SEQ ID NO: 4132 - DNA, 917 bp, Xenorhabdus sp.
  CDS (37)..(324)
  unsure (1)..(917): unsure at all n locations
nnnnnnnnnnnnnnnnnnnnnnnnntgtgctctaaagccatgcaggcgatcagccgcacgccggaaaacctcgcttcgcaactctggaaccgtaaccatcaatatcctgacggcgccgtctttttccttggcacgatgttcgcgccggtaaaggaccgccatggcccaggcctcggtttcacccatgccaagggtgaccgtgtcgaaatctccacgcccaagctcggcaagctgatcaactgggtcacgacgaccgacgaatgcccggaatggacattcggcaccgcggccctgatgcgcaacctggcgaaacgagggctactctagatatttcttcgggaggggaaaatgcaaaagaccatcaatctcttttaccggattctcgaaatcattctcgtcctgctgctcgccggcatgtcgatcatggttttcgtcaacgtcgtcatgcgttacacgatgaattccggcatcaacgtctcgnnnnnnnnnnnnnnnnnnnnnnnnnnnnnnnnnnnnnnnnnnnnnnnnnnnnnnnnnnnnnnnnnnnnnnnnnnnnnnnnnnnnnnnnnnnnnnnnnnnnnnnnnnnnnnnnnnnnnnnnnnnnnnnnnnnnnnnnnnnnnnnnnnnnnnnnnnnnnnnnnnnnnnnnnnnnnnnnnnnnnnnnnnnnnnnnnnnnnnnnnnnnnnnnnnnnnnnnnnnnnnnnnnnnnnnnnnnnnnnnnnnnnnnnnnnnnnnnnnnnnnnnnnnnnnnnnnnnnnnnnnnnnnnnnnnnnnnnnnnnnnnnnnnnnnnnnnnnnnnnnnnnnnnnnnnnnnnnnnnnnnnnnnnnnnnnnnnnnnnnnnnnnnnnnnnnnnnnnnnnnnnnnnnnnnnnnnnnnnnnnnnnnnnnnnnnnnnnnnnnnnnnnnnnnnnnnnnnn

SEQ ID NO: 4133 - DNA, 882 bp, Xenorhabdus sp.
  CDS (314)..(847)
  unsure (1)..(882): unsure at all n locations
nnnnnnnnnnnnnnnnnnnnnnnnnnnnnnnnnnnnnnnnnnnnnnnnnnnnnnnnnnnnnnnnnnnnnnnnnnnnnnnnnnnnnnnnnnnnnnnnnnnnnnnnnnnnnnnnnnnnnnnnnnnnnnnnnnnnnnnnnnnnnnnnnnnnnnnnnnnnnnnnnnnnnnnnnnnnnnnnnnnnnnnnnnnnnnnnnnnnnnnnnnnnnnnnnnnnnnnnnnnnnnnnnnnnnnnnnnnnnnnnnnnnnnnnnnnnnnnnnnnnnnnnnnnnnnnnnnnnnnnnnnnnnnnnnnnnnnnnnnnnnnnnnnnnnnnnnggcatgctggtctcgcaggattatgctggctcgcaaaccggtgccgtcgcttatgccctggcgctggaggaaatcgccgccggtgatggcgcctgttccaccatcatgagcgtccataattccgttggctgcgtgccgatcctgaaattcggcacggaagaccagaaacagcggttcctgccgaaactcgcttccggcgaatggatcggcggttttgcgctgaccgaaccgcaggccggctccgatgcttccaacctgaagacccgcgcccggcgggatggcgaccgctatattcttgatggtgcaaaacagttcataacctcaggcaagaatggtgatgtcgtcatcgtctttgccgtcaccgatgcggcggcgggcaagaagggcatcaccgccttcatcgtgccgaccgatacgccgggttacgaggtcataagggtccaggaaaagctcggcctgcattcgtccgatacctgccagatcgccttcaccgagatggcggtcccggcccaactgcggctgggcgaagaggggcaggnnnnnnnnnnnnnnnnnnnnnnnnnnnnnnn

SEQ ID NO: 4134 - DNA, 882 bp, Xenorhabdus sp.
  CDS (3)..(248)
  unsure (1)..(882): unsure at all n locations
nnnnnnnnnnnnnnnnnnnnnnnnnnnnnnncctgcccctcttcgcccagccgcagttgggccgggaccgccatctcggtgaaggcgatctggcaggtatcggacgaatgcaggccgagcttttcctggacccttatgacctcgtaacccggcgtatcggtcggcacgatgaaggcggtgatgcccttcttgcccgccgccgcatcggtgacggcaaagacgatgacgacatcaccattcttgcctgaggttatgaactgttttgcaccatcaagaatatagcggtcgccatcccgccgggcgcgggtcttcaggttggaagcatcggagccggcctgcggttcggtcagcgcaaaaccgccgatccattcgccggaagcgagtttcggcaggaaccgctgtttctggtcttccgtgccgaatttcaggatcggcacgcagccaacggaattatggacgctcatgatggtggaacaggcgccatcaccggcggcgatttcctccagcgccagggcataagcgacggcaccggtttgcgagccagcataatcctgcgagaccagcatgccnnnnnnnnnnnnnnnnnnnnnnnnnnnnnnnnnnnnnnnnnnnnnnnnnnnnnnnnnnnnnnnnnnnnnnnnnnnnnnnnnnnnnnnnnnnnnnnnnnnnnnnnnnnnnnnnnnnnnnnnnnnnnnnnnnnnnnnnnnnnnnnnnnnnnnnnnnnnnnnnnnnnnnnnnnnnnnnnnnnnnnnnnnnnnnnnnnnnnnnnnnnnnnnnnnnnnnnnnnnnnnnnnnnnnnnnnnnnnnnnnnnnnnnnnnnnnnnnnnnnnnnnnnnnnnnnnnnnnnnnnnnnnnnnnnnnnnnnnnnnnnnnnnnnnnnnn

SEQ ID NO: 4135 - DNA, 948 bp, Xenorhabdus sp.
  CDS (392)..(538)
  unsure (1)..(948): unsure at all n locations
nnnnnnnnnnnnnnnnnnnnnnnnnnnnnnnnnnnnnncgctttttcctgagcgccttcccgtatttgtgtgcggtcctttgaccggcggcggatggttccgccgccggtttttatcgcgggatttcagtctcgggcgatagctgccgatgttatcggtatcataaatttggttgcgagaggtttcctcctgctccccggcgagccggtcccgatccgccgacgtcttccccgaacggactgcacattttgacgcaggtcaaaaaggtgatttgccgcttttcgttttttgcgttatcgaaatttcagaaattactgaaaattcaggaagcaaagaaatgccgaccacgctctccccgctcgttcagtccttcgtgctgcattttggcgagatgggcagccgctggggaatcaaccgcactgtcggccaagtctatgctttgctttatatttcgccgcagccgctctgcgcggacgatattgtggaggcgctcggcatttcccgttccaacgtgtcgatgagcctgaaggagctttaggcgtggaaccttgcaattctcannnnnnnnnnnnnnnnnnnnnnnnnnnnnnnnnnnnnnnnnnnnnnnnnnnnnnnnnnnnnnnnnnnnnnnnnnnnnnnnnnnnnnnnnnnnnnnnnnnnnnnnnnnnnnnnnnnnnnnnnnnnnnnnnnnnnnnnnnnnnnnnnnnnnnnnnnnnnnnnnnnnnnnnnnnnnnnnnnnnnnnnnnnnnnnnnnnnnnnnnnnnnnnnnnnnnnnnnnnnnnnnnnnnnnnnnnnnnnnnnnnnnnnnnnnnnnnnnnnnnnnnnnnnnnnnnnnnnnnnnnnnnnnnnnnnnnnnnnnnnnnnnnnnnnnnnnnnnnnnnnnnnnnnnnnnnnnnnnnnnnnnnnnnnnnnnnnnnnnnnnnnnnnnnnnnnnnnnnnnnnnnnnnn

SEQ ID NO: 4136 - DNA, 747 bp, Xenorhabdus sp.
  CDS (62)..(745)
  unsure (1)..(747): unsure at all n locations
nnnnnnnnnnnnnnnnnnnnnnnnnnnnnnnnnnnngcgcgttttcgatagggcaaacggctgggcatgggtgcaggcggatgccgatggttacgccggttatgtgccggaaacggccatcggtgatgtcgttgccgcgacccaccgggtgatcgcgccgcgcaccttgctttatccttcggccgagctgcgcaaaccgccggtggcggcgctgtcgatgggcagccttgtccgtatcgtcggtgaggcggaaactcgcggcacccgttacctgatgaccgacaagggcgaaggcatcatcgccggtcattgccagaccgtcgatgccgcttgtgacgacgattacgtcgctgtcgcgttacgtttcatcgagacgccctatctgtggggcggacgctcgggtttcggcatcgattggtccgggcctcgccagctttccatggcgatgacccggaggcgggttcttcccgatacccacatgcaagggaaggccctcggtggggaaataaaaccggaccaattgggccccggggatctcgtcttctggaaaggccctgtcgggcccatggagaaccaagaaaccctgctgcatgcccatgggcataccatgaatgtgccaccccagaatctcgatgccggcatcgaacctatcggctggctttatgaaaannnnnnnnnnnnnnnnnnnnnnnnnnnnnnnnnnnnnnnnnnnnnnnnnnnnnnnnnnnnnnnnnnnnnnnnnnnnnn

SEQ ID NO: 4137 - DNA, 990 bp, Xenorhabdus sp.
  CDS (3)..(959)
  unsure (1)..(990): unsure at all n locations
nnnnnnnnnnnnnnnnnnnnnnnnnnnnnnnnnnnnnnnnnnnnnnnnnnnnnnnnnnnnnnnnnnnnnnnnnnnnnnnnnnnnnnnnnnnnnnnnnnnnnnnnnnnnnnnnnnnnnnnnnnnnnnnnnnnnnnnnnnnnnnnnnnnnnnnnnnnnnnnnnnnnnnnnnnnnnnnnnnnnnnnnnnnnnnnnnnnnnnnnnnnnnnnnnnnnnnnnnnnnnnnnnnnnnnnnnnnnnnnnnnnnnnnnnnnnnnnnnnnnnnnnnnnnnnnnnnnnnnnnnnnnnnnnnnnnnnnnnnnnaaaaagcaggtgatctcgctgcgatgctgacgacctttgagcnccatgacgttttgtttattgacgaaatccaccgtttatctccggttgtagaagaaattctttatccggcgatggaagactatcagttggatatcatgattggcgaagggccggctgcccgttcaatcaagattgatttgcctccgtttacattagtcggcgctacaacccgcgcaggctctttaacttctcctttacgtgatcgatttggtatcgtgcagcgccttgagttttataacattgatgatctgcaaagtatcgtttcccgtagtgcccgttatatggggttggagatttcagacgatggagcaaggcaaattgccatgcgttcccgtggaaccccgcgtatcacaaaccgcttattacggcgggtacgtgactttgctcaggtaaaaggcgatggttcagttgacaatgatatcgccgctaaagctcttgatatgctgaatgtggattcagcgggttttgattatcttgaccgcaaattactggttgccattatcgataaatttatgggcggcccggttggtttggataacatcgccgcagctattggtgaagagcgggaaaccatagaagatgttctggagccttttctgatacagcagggcctttagagcacannnnnnnnnnnnnnnnnnnnnnnnn

SEQ ID NO: 4138 - DNA, 927 bp, Xenorhabdus sp.
  CDS (392)..(562)
  unsure (1)..(927): unsure at all n locations
nnnnnnnnnnnnnnnnnnnnnnnnnnnnnnnnnnnnnnnnnnnnnnnnnnnnnnnnnnnnnnnnnnnnnnnnnnnnnnnnnnnnnnnnnnnnnnnnnnnnnnnnnnnnnnnnnnnnnnnnnnnnnnnnnnnnnnnnnnnnnnnnnnnnnnnnnnnnnnnnnnnnnnnnnnnnnnnnnnnnnnnnnnnnnnnnnnnnnnnnnnnnnnnnnnnnnnnnnnnnnnnnnnnnnnnnnnnnnnnnnnnnnnnnnnnnnnnnnnnnnnnnnnnnnnnnnnnnnnnnnnnnnnnnnnnnnnnnnnnnnnnnnnnnnnnnnnnnnnnnnnnnnnnnnnnnnnnnnnnnnnnnnnnnnnngcccgtaatgtgtgaatcggtgggtggtgagcagcaacccatgtatgtcgaagaatgcagtatgcgtcgggccagaagatctggtctggtgtatatacgggatagtatagcgtgtcataagagtactcaggcagggctcgtcaatgcaataagttgtgcgggccgagcactgcaaagggtagttcagatgttgagatccggttggatgtaatgcgttggtgcatgcagatgatattgagtcatcgatgattctcgccagcgtttctgggtgagcatgaacagggagtctgaatgccgctacggagggaattaggccggctgggaaatgttgaatgttcatgttattcgttaagcctgttgaggttagcgtcaatgagggtcaaagtctcatgactggagctcgtgcaccatatgtgggtattgtagggaggcatccgtcccccgtaaatcatgccgctatgcatcaggcccacacgatgttggggtccgtatacagaaggacaggttactcccctgcacatnnnnnnnnnnnnnnnnnnnnnnnnnnnnnnnnnnnnnnnnnnnnnnnnnnnnnnn

SEQ ID NO: 4139 - DNA, 886 bp, Xenorhabdus sp.
  CDS (109)..(642)
  unsure (1)..(886): unsure at all n locations
nnnnnnnnnnnnnnnnnnnnnnnnnnnnnnttccggcccggttgaagcgtggttgcgctaagcctctcactggcacttggcggcgctggctcggccgccgcgcaaaccaagctgctcaacgtgtcctacgatccgacccgtgagctctacaaggatttcaacgaggccttcgccaagaaatggaaggccgacaccggcgaggatatcaccatccagcagtcgcatggcggctccggcaagcaggcgcgctcggtcatcgacggtctggaagcggatgtggtgacgctggcgctgcagagcgatatcgacgccatcgtcgaaaattccggcaagatcaacaaggactggcgcacccgcctgccgcataattcgtcgccttacacctcgaccatcgttttcctggtgcgcaagggcaaccccaagggcatccacaactggggcgatctggtgaagggcgatatccagatcgtcacaccgaacccgaaaacatccggcggtgcccgctggaactatcttgctgcctgggcctgggcgaatgaagagttcaagggcgatcaggagaagatcaaggcctatgtcggcgatctctacaagcgcgccccggttctcgataccggcgcccgcggctccacggtgaccttcgccnnnnnnnnnnnnnnnnnnnnnnnnnnnnnnnnnnnnnnnnnnnnnnnnnnnnnnnnnnnnnnnnnnnnnnnnnnnnnnnnnnnnnnnnnnnnnnnnnnnnnnnnnnnnnnnnnnnnnnnnnnnnnnnnnnnnnnnnnnnnnnnnnnnnnnnnnnnnnnnnnnnnnnnnnnnnnnnnnnnnnnnnnnnnnnnnnnnnnnnnnnnnnnnnnnnnnnnnnnnnnnnnnnnnnnnnnnnnnnnnn

SEQ ID NO: 4140 - DNA, 844 bp, Xenorhabdus sp.
  CDS (339)..(842)
  unsure (1)..(844): unsure at all n locations
nnnnnnnnnnnnnnnnnnnnnnnnnnnnnnnnnnnnnnnnnnnnnnnnnnnnnnnnnnnnnnnnnnnnnnnnnnnnnnnnnnnnnnnnnnnnnnnnnnnnnnnnnnnnnnnnnnnnnnnnnnnnnnnnnnnnnnnnnnnnnnnnnnnnnnnnnnnnnnnnnnnnnnnnnnnnnnnnnnnnnnnnnnnnnnnnnnnnnnnnnnnnnnnnnnnnnnnnnnnnnnnnnnnnnnnnnnnnnnnnnnnnnnnnnnnnnnnnnnnnnnnnnnnnnnnnnnnnnnnnnnnnnnnnnnnnnnnnnnnnnnnnnnnnnnnnnnaacacgttttacggccgctcgcaatttttcgagccggaattcctgtcctggctttcgagctatcaattgccgaaatacgagcttttcaagcgcgacgggcaatatgaactgaatttccatggccgctggatggatacgacgctctgggagattcccgcgctggcgatcatcaacgaactccgctcgcgtagcgccatgcgttctctcggttatttcacgctggatgtcctttatgcccgcgccaaggccaagatgtgggaaaaggtcgagcggctgcgggaactgccgggcttgcgcatttccgatttcggcacccgccgccgccacagcttcctgtggcagcgctggtgcgtcgaggcactgaaggaaggcatcggccctgctttcaccggcacgagcaatgtcctgctcgccatggattccgatctagaagctgtcggtaccaacgcgcatgagctgccgatggtggttgcggcacttgcccaaacgactttagagcacannnnnnnnnnnnnnnnnnnnnnnnnnnn

SEQ ID NO: 4141 - DNA, 982 bp, Xenorhabdus sp.
  CDS (358)..(666)
  unsure (1)..(982): unsure at all n locations
nnnnnnnnnnnnnnnnnnnnnnnnnnnnnnnnnnnnnnnnnnnnnnnnnnnnnnnnnnnnnnnnnnnnnnnnnnnnnnnnnnnnnnnnnnnnnnnnnnnnnnnnnnnnnnnnnnnnnnnnnnnnnnnnnnnnnnnnnnnnnnnnnnnnnnnnnnnnnnnnnnnnnnnnnnnnnnnnnnnnnnnnnnnnnnnnnnnnnnnnnnnnnnnnnnnnnnnnnnnnnnnnnnnnnnnnnnnnnnnnnnnnnnnnnnnnnnnnnnnnnnnnnnnnnnnnnnnnnnnnnnnnnnnnnnnnnnnnnnnnnnnnagaccatggtggtggtggaaggcgtgtcgcgcatgctcaatccgcgtttcaacatgtggaaggcggccgatccggtggtcggcggctggatccgcgacaatctcggtccgaagcgcattgccaccgatctgaaggatggcgtgaaggcggccctcaaacttgccgaggcagcaccggaaatcgccgccaagacggagaaactgcattctgatctgatgtatatgagcgagaatggcctgcgtttcgacgcgcagactgcggaagccatcggcaaggcggaggcgcgccacacaaaatggggccggatagcgctgtgggtgattgcgctgacgcttctctatattgctgtcagggtcagctgagcatctgaagacgaacgagtgccatgctggtgtaatctattggaggaataagggcctgatcttgaaacaagacaggtgatccatgcggataaaggcgttctcgccgcttgctttgatgctcatatccattcaactggctttggtgccggatgcgatggccgagcatcgggtccatgatccatgcaccgacgggcgcgcaagtgacgggaaaccacgcagctgtggcgaattgcggcgcgcgctacgccattcggacaggcccgtccctttagnnnnnnnnnnnnnnnnnnnnnnnnnnnnnnnnnnnnnnnnnnnn

SEQ ID NO: 4142 - DNA, 950 bp, Xenorhabdus sp.
  CDS (238)..(594)
  unsure (1)..(950): unsure at all n locations
nnnnnnnnnnnnnnnnnnnnnnnnnnnnnnnnnnnnnnnnnnnnnnnnnnnnnnnnnnnnnnnnnnnnnnnnnnnnnnnnnnnnnnnnnnnnnnnnnnnnnnnnnnnnnnnnnnnnnnnnnnnnnnnnnnnnnnnnnnnnnnnnnnnnnnnnnnnnnnnnnnnnnnnnnnnnnnnnnnnnnnnnnnnnnnnnnnnnnnnnccagccggnacagcnnnncnacgccgnncnncnnggagcgccatgctcgtcgacgggtacgctgcgcaaacatccggatgtctgctggaccaaggatgaaacggacattgccaagcttgcggctcttcagggccagatgctgcgccatgccgtgacgctggtgaggtctggcggtgtcgtggtgttctccaattgctcgctggacccttcggagggcgaagcgatgattgccgaggttctggcggagaatcccgatatcgagcgcattgccgtgcgcaaggaggactggccgggaatggaggtggcgatcagcccgcagggagatttgcgtacaacgccggatatgtttggcggcgtcgatgggttttttagcagtgtcttgcgtaagaagtagaaaaaagcgaagctttagcgaatcattgatattatcgataacgttccggtcatcacggttcactgataaaaacaaaactatgtgaagcgggaaacacagcttgtttgggtcctttgcaggcagcatgaatgcggccggtcttctttcacggatggcatatcgtcatctgtgtgtcggcctcacacttctgcgtctgcatgtcctcgcggtttgccaaccgtgttcccgatggtctggttgcggcgccgaccgatctcagggcgatcgatccgtattttgccgaggaattgttgcgcnnnnnnnnnnnnnnnnnnnnnnnnnnnnnnnnnnnnnnnnnnnnnnnnnnnnnnnnnnnn

SEQ ID NO: 4143 - DNA, 1102 bp, Xenorhabdus sp.
  CDS (515)..(1051)
  unsure (1)..(1102): unsure at all n locations
nnnnnnnnnnnnnnnnnnnnnnnnnnnnnnnnnnnnnnnnnnnnnnnnnnnnnnnnnnnnnnnnnnnnnnnnnnnnnnnnnnnnnnnnnnnnnnnnnnnnnnnnnnnnnnnnnnnnnnnnnnnnnnnnnnnnnnnnnnnnnnnnnnnnnnnnnnnnnnnnnnnnnnnnnnnnnnnnnnnnnnnnnnnnnnnnnnnnnnnnnnnnnnnnnnnnnnnnnnnnnnnnnnnnnnnnnnnnnnnnnnnnnnnnnnnnnnnnnnnnnnnnnnnnnnnnnnnnnnnnnnnnnnnnnnnnnnnnnnnnnnnnnnnnnnnnnnnnnnnnnnnnnnnnnnnnnnnnnnnnnnnnnnnnnnnnnnnnnnnnnnnnnnnnnnnnnnnnnnnnnnnnnnnnnnnnnnnnnnnnnnnnnnnnnnnnnnnnnnnnnnnnnnnnnnnnnnnnnnnnnnnnnnnnnnnnnnnnnnnnnnnnnnnnnnnnnnnnnnnnnnnnnnnnnnnnnnnnnnnnnnnnnnnnnnctccaccatcggtgtcgaattcatgcatatgtccagcccggaagaaaaaggctggattcaggagcgcatcgaaggtccggacaagggcgtcgccttcacggctgaaggcaagaaggccattttgtccaagctggtcgaagccgaaggctacgagcagttcctcgacgtgcgcttcaagggcaccaagcgtttcggccttgatggcggtgaatcgctgatcccggcgctcgagcagatcatcaagcgcggcggccaggaaggtctcgaagaagtcgttctcggtatggcccaccgtggccgcctgaacgttctgaccaatgtcatgggcaagccgcatcgtgccgtgttccacgaattcaagggcggttcgttcaagcctgacgatgtcgagggttccggtgacgtgaagtaccacctcggtgcctcctccgaccgcgaattcgacggcaacaaggttcacctgtcgctgacggccaacccgtcgcaccttgaaatcgtcaaccccgttgtgatgggcaaggcccgcgccaagcaggaccagcttgccactttagagcacnnnnnnnnnnnnnnnnnnnnnnnnnnnnnnnnn

SEQ ID NO: 4144 - DNA, 706 bp, Xenorhabdus sp.
  CDS (588)..(704)
  unsure (1)..(706): unsure at all n locations
nnnnnnnnnnnnnnnnnnnnnnnnnnnnnnnnnnnnnnnnnnnnnnnnnnccagaagcccgctgacggcggtcgatacgctgagcgtgcccttgacgcccgccgtgctgcggcccctggtgatggcggagggatagaccatacgcagattggcctgacggccgaaggtcaggatggcgttttccagcgggccggcgggaatggagaccgtgaccgttgcgggtgcaccgcttgcggcgggcggtgtctgcgctctggcgccggtggcgccgggacctgccgcgacgatgcccccgatgatcgccgtcgtcgtcagccagaaccagccgcgtgcctgcttgcccaaattcatgtctttccctctcaactcatgatctcaagccgtcccggcgaaagccgaaacgggtactgattgcctagagtgaaaaggcgggctgcctcctgacgtcggagccgtaaaaaagttactttttatcgcgagcggacaaaaaccagcatgtttgaaagccgtgacaccgaaacgggaaggctttcttcgagaatggtcagggcctgatcggtatccttcaggtcgaatatgccggatacgtgctgccttgccgccgcctcatccagaatgacgatgcggccccggcgatattgggagagggtatcgagaacctcgcgcagcggctggccggaaaagacgagcttgcctttccgcnnnn

SEQ ID NO: 4145 - DNA, 740 bp, Xenorhabdus sp.
  CDS (122)..(739)
  unsure (1)..(740): unsure at all n locations
nnnnnnnnnnnnnnnnnnnnnnnnnnnnnnnnnnnnnnnnnnnnnnnnnnnnnnnnnnnnnnnnnnnnnnnnnnnnnnnnnnnnnnnnnnnnnnnnnnnttaagtgtcgaaaaaagctgaaaagaagcagaacgccctctgggagaacgtcaaggtcatcattcaggcgctggtgctggccatggtcatccgcaccgtgttgtttcagcccttcaccatcccgtccggctcgatgatgccgacgcttctggtgggcgactatcttttcgtcaacaagttctcctacggctattcgaaatattcgctgcctttctcgccgaacctgttttcgggccgcattctcgaattcagcaagccgaagcgcggcgatgtcgtggtcttccgcctgccgcccaatcccgaggtcgattacatcaagcgtctggtcggcctgccgggtgatcgtgttcagatgatgaacggtgtgctgttcatcaacggccagccggtgccgaagcagcccgatggcactttcacttccgattaccgtgccgatccgggcgccaatgtgccggtcttccgcgaaacgctcgacaatggcgtcacctacgacacacttgaccagtcgccggactcgcgcggcgacaacacccgggaattcctggtgccggaaggccattatttcatgatgggcgacagcagagacaattcgctcgacagctgtagagcnnnnnnnnnnnnnnnnnnnnnnnnnnnnnnnn

SEQ ID NO: 4146 - DNA, 498 bp, Xenorhabdus sp.
  CDS (396)..(497)
  unsure (1)..(498): unsure at all n locations
nnnnnnnnnnnnnnnnnnnnnnnnnnnnnnngctctacagccttttccgcatcgccaaccgcatcttcgccgatagcatcaggaatatgctggcgcgcatgatgatcggctcgctggcggcagccctgccgatcggattgctgctgactatcaccaaccgggtcttttcaggcgcggaaatgggtttcggaccctttgtgcagagcagcctgtcgtccctgcctctttgcgccatcttttgcctgctgagctatctcaccgccagccagtcgcctgaaacagtgccaatcgccgcaacggacataggcaaaaacaccgcatgcgaagtgaaaagcaccgtgccgctgctggagcggctaccaccgcaaaagcgcggagaattgctgcggctgtcagtgcaggaccactatactgaaatcgtcaccacgcgcgggcatcagctcgttctgctgcgtttttccgatgcgctgaaggaagtcggccagacggagggcttnn

SEQ ID NO: 4147 - DNA, 900 bp, Xenorhabdus sp.
  CDS (366)..(899)
  unsure (1)..(900): unsure at all n locations
nnnnnnnnnnnnnnnnnnnnnnnnnnnnnnnnnnnnnnnnnnnnnnnnnnnnnnnnnnnnnnnnnnnnnnnnnnnnnnnnnnnnnnnnnnnnnnnnnnnnnnnnnnnnnnnnnnnnnnnnnnnnnnnnnnnnnnnnnnnnnnnnnnnnnnnnnnnnnnnnnnnnnnnnnnnnnnnnnnnnnnnnnnnnnnnnnnnnnnnnnnnnnnnnnnnnnnnnnnnnnnnnnnnnnnnnnnnnnnnnnnnnnnnnnnnnnnnnnnnnnnnnnnnnnnnnnnnnnnnnnnnnnnnnnnnnnnnnnnnnnnnnnnnnnnnnnnnnnnnnnnnnnnnnnnnnnnnnnnnnnnnnnnnnnnnnnnnnnncgaagtgatcgaggttcagggccgggtttccggcggcaatgcctttgcgcgtttcgtggccctcaacaatctgcgtgcagagcttgccgaactgcaggtggagcgcgagcgcctgatcgcctccgtctcgacatttcaggagcttctcgattccatcgagcaacccgtctggcggcgcaatggcgaaggcgacctcatctgggtcaaccatgcttatgcgcaggcggtggatgcgcggagcaccgaacaggccgttcaggaaaaacgcgagctgctgaacactgttacccggcagaagatacgcgcggcggcgaccccggaatcgccctatcatgaccgtatttcgacggtggtttccggcaaccgcacctttttcgatgtcgtcgacatcaagacggcggccggctcggccggcatcgccatcgatgccaccgaggcggaagccatcagcgaggaactcaagcgggtcctcaagagccacgccgaaacgctggatcnnnnnnnnnnnnnnnnnnnnnnnnnnnnnnnnnnnnnnnnnnnnn

SEQ ID NO: 4148 - DNA, 930 bp, Xenorhabdus sp.
  CDS (238)..(870)
  unsure (1)..(930): unsure at all n locations
nnnnnnnnnnnnnnnnnnnnnnnnnnnnnnnnnnnnnnnnnnnnnnnnnnnnnnnnnnnnnnnnnnnnnnnnnnnnnnnnnnnnnnnnnnnnnnnnnnnnnnnnnnnnnnnnnnnnnnnnnnnnnnnnnnnnnnnnnnnnnnnnnnnnnnnnnnnnnnnnnnnnnnnnnnnnnnnnnnnnnnnnnnnnnnnnnnnnnnnnnnnnnnnnnnnnnnnnnnnnnnnnnnnnnnnnnnntcatcattgtcagctccggcggtcgcggtcgcttgtccacttatgtggcaggcgctttcttgctgttcctcattctggtgttggacgatctcgtgcgcatcataccgatggcggcgctggtggctgtcatgatcatggtgtccatcggcaccttctcatggcgctccatcatcgatctccgccgcaacccgccatcgtcaagcatcgtcatgctggtaaccgtcggcacggtgcttgccacccatgaccttgcaaagggtgtgctggcgggcgtgcttctttccggcgtgtttttcgcaggcaaggtttccaagcttttccacgtcagaccggagctttcagccgatggtcgcgagcggatctaccgcgtcgacggccagattttcttcgcctcgacggaaagcttcatcgccgccttcgatttcgccgaagaggtggaggcggtaacgattgatgtgacggaggcgcatctgtgggatatttccgcggtcggcgcgctggacaaggtggtcctgaagttccgtaaagtcggcaggcgggtcgaggtgatcggcgtcaacgaggcgagcgcccatatgatcgaccgtttcgccctgcacgacaagcaggatgcggcggcagcgccgctgcactaagtgcaaaagaaaagcccccttagagcacannnnnnnnnnnnnnnnnnnnnnnnnnnnnnn

SEQ ID NO: 4149 - DNA, 995 bp, Xenorhabdus sp.
  CDS (46)..(609)
  unsure (1)..(995): unsure at all n locations
nnnnnnnnnnnnnnnnnnnnnnngctcgatccatgtgctctaaaggacaacaaatacggctgcaaggaatcgctcgtcgacggcattcgccgcgcaaccgacgtgatgatggccggcaaggttgcagtggtctgcggttacggcgatgtgggcaagggttctgccgcttcgctgcagggcgccggcgcccgcgtgaaagtcaccgaaatcgacccgatctgcgcgcttcaggccgccatggacggtttcgaagtcgttcgtctggaagatgtggtctcttccgccgatatcttcatcaccacgacaggcaacaaggacgtcatccgcatcgagcatatgcgcgagatgaaggacatggccatcgtcggcaatatcggccatttcgacaacgagattcaggtcgcctcgctgcgtaacctgaagtggacgaacatcaagccgcaggtcgacatgatcgaattcccgaagggcaaccgcatcatccttctgtccgaaggccgcctgctgaacctcggcaatgccaccggccacccgtccttcgtcatgtctgcgttcttcaccaaccaagtgcttggccaaatcgagctcttcaccaagcagggcgaatacnnnnnnnnnnnnnnnnnnnnnnnnnnnnnnnnnnnnnnnnnnnnnnnnnnnnnnnnnnnnnnnnnnnnnnnnnnnnnnnnnnnnnnnnnnnnnnnnnnnnnnnnnnnnnnnnnnnnnnnnnnnnnnnnnnnnnnnnnnnnnnnnnnnnnnnnnnnnnnnnnnnnnnnnnnnnnnnnnnnnnnnnnnnnnnnnnnnnnnnnnnnnnnnnnnnnnnnnnnnnnnnnnnnnnnnnnnnnnnnnnnnnnnnnnnnnnnnnnnnnnnnnnnnnnnnnnnnnnnnnnnnnnnnnnnnnnnnnnnnnnnnnnnnnnnnnnnnnnnnnnnnnnnnnnnnnnnnnnnnnnnnnnnnnnnnnnnnnnnnnnnnnnnnnnnnnnnnnnnnnnnnnnn

SEQ ID NO: 4150 - DNA, 1262 bp, Xenorhabdus sp.
  CDS (1)..(327)
  unsure (1)..(1262): unsure at all n locations
nnnnnnnnnnnnnnnnnnnnnnnnntaaattgtcaacattatcagggccgtctgcctccaggagctgatgacggtgccggtgctgctaatgaacagcgtgttgattcactggccgctgttggtgtggacaaaccgcttattgattcataccagggacattctgaacgtgttaagcggcttatccaacaaaccctcgctccataccctactttgcatatcattgatggtaacccttcctccgaacatagccctaaagcgctgaaacacacaggatacaatgccgataccgacgaatttcaacctggactctatactgactacccctaacgaacccgacctcgttctaccacacattaccttgattgctgacccagcagaaccactgaaagccacaggaatcccacatattcctgaccattgtctaaccctatctggtcacacacctgaacccattaccgaatgagcttatatgtggacaggagannnnnnnnnnnnnnnnnnnnnnnnnnnnnnnnnnnnnnnnnnnnnnnnnnnnnnnnnnnnnnnnnnnnnnnnnnnnnnnnnnnnnnnnnnnnnnnnnnnnnnnnnnnnnnnnnnnnnnnnnnnnnnnnnnnnnnnnnnnnnnnnnnnnnnnnnnnnnnnnnnnnnnnnnnnnnnnnnnnnnnnnnnnnnnnnnnnnnnnnnnnnnnnnnnnnnnnnnnnnnnnnnnnnnnnnnnnnnnnnnnnnnnnnnnnnnnnnnnnnnnnnnnnnnnnnnnnnnnnnnnnnnnnnnnnnnnnnnnnnnnnnnnnnnnnnnnnnnnnnnnnnnnnnnnnnnnnnnnnnnnnnnnnnnnnnnnnnnnnnnnnnnnnnnnnnnnnnnnnnnnnnnnnnnnnnnnnnnnnnnnnnnnnnnnnnnnnnnnnnnnnnnnnnnnnnnnnnnnnnnnnnnnnnnnnnnnnnnnnnnnnnnnnnnnnnnnnnnnnnnnnnnnnnnnnnnnnnnnnnnnnnnnnnnnnnnnnnnnnnnnnnnnnnnnnnnnnnnnnnnnnnnnnnnnnnnnnnnnnnnnnnnnnnnnnnnnnnnnnnnnnnnnnnnnnnnnnnnnnnnnnnnnnnnnnnnnnnnnnnnnnnnnnnnnnnnnnnnnnnnnnnnnnnnnnnnnnnnnnnnnnnnnnnnnnnnnnnnnnnnnnnnnnnnnnnnnnnnnnnnnnnnnnnnnnnnnnnnnnnnnnnnnnnnnnnnnnnnnnnnnnnnnnnnnnnnnnnnnnnnnnnnnnnnnnnnnnnnnn

SEQ ID NO: 4151 - DNA, 946 bp, Xenorhabdus sp.
  unsure (1)..(946): unsure at all n locations
nnnnnnnnnnnnnnnnnnnnnnnnnnnnnnnnnnnngtgctctaaaggatcgggttattattgatatcctgacctacggtgcaacagtgagtttacaaaacaggcaattaacactgaaaaataacagaaacaagctggtttatactttgagaaagcctgctcaataatgcgataagctaaagttattttattctttgtcatcgatattatagatttcaagatacgtcgaagaaaaaaggaaacgtgtttttccagtcaaagactggcctcttattcattcccggaagcatagataaccgaatgtttataaaacggtaactcgtgcagccaacaaagaggcaacttgaaagacgaagaatcacagttaaaacaaatcaggattacccgcatacgtcgggtaatctatttgtatatagaaaacctcgccaaagcgaggttataaaacttatatcataatcatttattatgacaacataatcccaatcattaacgagggcaaacgggtctaatttatacagatgaaaatcccactnnnnnnnnnnnnnnnnnnnnnnnnnnnnnnnnnnnnnnnnnnnnnnnnnnnnnnnnnnnnnnnnnnnnnnnnnnnnnnnnnnnnnnnnnnnnnnnnnnnnnnnnnnnnnnnnnnnnnnnnnnnnnnnnnnnnnnnnnnnnnnnnnnnnnnnnnnnnnnnnnnnnnnnnnnnnnnnnnnnnnnnnnnnnnnnnnnnnnnnnnnnnnnnnnnnnnnnnnnnnnnnnnnnnnnnnnnnnnnnnnnnnnnnnnnnnnnnnnnnnnnnnnnnnnnnnnnnnnnnnnnnnnnnnnnnnnnnnnnnnnnnnnnnnnnnnnnnnnnnnnnnnnnnnnnnnnnnnnnnnnnnnnnnnnnnnnnnnnnnnnnnnnnnnnnnnnnnnnnnnnnnnnnnnnnnnnnnnnnnnnnnnnnnnnnnnnn

SEQ ID NO: 4152 - DNA, 982 bp, Xenorhabdus sp.
  unsure (1)..(982): unsure at all n locations
nnnnnnnnnnnnnnnnnnnnnnnnnntgtgctctaagctcttatcccagattttttttccacattgatctgagggcaatagccactttcttatgagcttctagcgtgttatacaacagggtaaatttaaggggattgttctggttcaatccggctccctttaataacgctctggctattacaacccgctagcccctgctctcaacctacaacatccgtgcgtttctcttattattatcccattcataccggtgtgaccccattctttgtccttttgtctccgtgtgtcccttatttttgcccctgtttcccccagatttcctttggcttggctcttccttctttcttttcattttttttattatttcatccttttttttttctttcttctcttgcatttgctaattttcctttcttttccnnnnnnnnnnnnnnnnnnnnnnnnnnnnnnnnnnnnnnnnnnnnnnnnnnnnnnnnnnnnnnnnnnnnnnnnnnnnnnnnnnnnnnnnnnnnnnnnnnnnnnnnnnnnnnnnnnnnnnnnnnnnnnnnnnnnnnnnnnnnnnnnnnnnnnnnnnnnnnnnnnnnnnnnnnnnnnnnnnnnnnnnnnnnnnnnnnnnnnnnnnnnnnnnnnnnnnnnnnnnnnnnnnnnnnnnnnnnnnnnnnnnnnnnnnnnnnnnnnnnnnnnnnnnnnnnnnnnnnnnnnnnnnnnnnnnnnnnnnnnnnnnnnnnnnnnnnnnnnnnnnnnnnnnnnnnnnnnnnnnnnnnnnnnnnnnnnnnnnnnnnnnnnnnnnnnnnnnnnnnnnnnnnnnnnnnnnnnnnnnnnnnnnnnnnnnnnnnnnnnnnnnnnnnnnnnnnnnnnnnnnnnnnnnnnnnnnnnnnnnnnnnnnnnnnnnnnnnnnnnnnnnnnnnnnnnnnnnnnnnnnnnnnnnnnnnnnnnnnnnnnnnnnnnnnnnnnnnnnnnnnnnnnnnnnnnnnnnnnnnnn

SEQ ID NO: 4153 - DNA, 742 bp, Xenorhabdus sp.
  unsure (1)..(742): unsure at all n locations
nnnnnnnnnnnnnnnnnnnnnnnnnnnnnnnnnnnnnnnnntaaagaaatataggtatatttattttttggcattcccttactggtattccacctggttttatttggaatccccccaattaaccccttagaatttaccccttttcaattttaaatccttagggtgccaagattgttcagattaaatctttggaagtaaaaaatttttttatttttaattccgcccccccttcttaattatggtaaaccaggtaggttaatcccctaaaatttttggttgagacctttaaaaccggggaaatggaaatccccggttatttaaccaggtttttaccgggatggcgggttttaaattccggcggccccccttaaggggtaaattccggttattaccccccttaccccccctttattccaaaattttccccattcatggaccccctggcattggattttttattggatatttttaattattccggttacccggttaccgctttgggcaaaatccattggcgggggttttccaccccggaaggtcttcacctggtgggattttcttaccagggggnnnnnnnnnnnnnnnnnnnnnnnnnnnnnnnnnnnnnnnnnnnnnnnnnnnnnnnnnnnnnnnnnnnnnnnnnnnnnnnnnnnnnnnnnnnnnnnnnnnnnnnnnnnnnnnnnnnnnnnnnnnnnnnnnnnnnnnnnnnnnnnnnnnnnnnnnnnnnnnnnnnnnnnnnnnn

SEQ ID NO: 4154 - DNA, 1022 bp, Xenorhabdus sp.
  unsure (1)..(1022): unsure at all n locations
nnnnnnnnnnnnnnnnnnnnnnnnnnnnnnnnnttttccaaaaggtggcgggtaatacggctgttggttttaccactctttgatgcccggtatgaggcagctattccgagccgatagtcaataaacatggaatacattcgctgtcgttattttgcgagccgttttgcaaaggtcatttttgtcagtggcatgttatttgggcgggagatagagtggcgatgataatttcgacgcggctttaacgtgctaggaacacgttaaaaccgctaaccacaacaactaagagagtagttattatggctgacacgcattctactgcaagcctttgcatttacaaaatttcccaacccgaacgttatcaaaaaggggtttaccgcccccatggggtgaacacgaccaaccctggcattaatttaaacggaaaatggttggtggaagcccgggttttcatcaaggatccggtaaaaaataaaataatgggcccggttgtctgatcatcaccggcacaaaaatttttaatgaacctgtgacacctgccttaaaaaannnnnnnnnnnnnnnnnnnnnnnnnnnnnnnnnnnnnnnnnnnnnnnnnnnnnnnnnnnnnnnnnnnnnnnnnnnnnnnnnnnnnnnnnnnnnnnnnnnnnnnnnnnnnnnnnnnnnnnnnnnnnnnnnnnnnnnnnnnnnnnnnnnnnnnnnnnnnnnnnnnnnnnnnnnnnnnnnnnnnnnnnnnnnnnnnnnnnnnnnnnnnnnnnnnnnnnnnnnnnnnnnnnnnnnnnnnnnnnnnnnnnnnnnnnnnnnnnnnnnnnnnnnnnnnnnnnnnnnnnnnnnnnnnnnnnnnnnnnnnnnnnnnnnnnnnnnnnnnnnnnnnnnnnnnnnnnnnnnnnnnnnnnnnnnnnnnnnnnnnnnnnnnnnnnnnnnnnnnnnnnnnnnnnnnnnnnnnnnnnnnnnnnnnnnnnnnnnnnnnnnnnnnnnnnnnnnnnnnnnnnnnnnnnnnnnnnnnnnnnnnnnnnnnnnnnnnn

SEQ ID NO: 4155 - DNA, 571 bp, Xenorhabdus sp.
tgctcgagccatgtgctctaagtgtgctctggacaatgttccatcctcatccaatttgtttattcatttggcgaatcataggataattactgaagtgggctcaaatagatcttcggggatattggtgaatatatgcaaaaaaagtactctgacctccataatttgagtagaaatctgagaaacagtactctcacaccacatccgacgagctgtacaccaataggaatatcattatcactccagccaaatgactataaaatggctgtattataaaaatgctattttactcttttactcttcttttaatatgtgattcatacatattttttgttctttattacaagcaggtgattactttttgttatctcaatgtttttttgtttataactttttttaaaaaaataataccttttaattaaattaacaccttatttaaaatgagataaaaataccaaaaagaaatatattccatcatgaataattttgaaaaatcaacattattatttttattaaataggcattgacatttattttaatgtaatctatcgttcaatcgcagtgaaaatgcact

SEQ ID NO: 4156 - DNA, 750 bp, Xenorhabdus sp.
gccttttagacttacagaacgctccgctaccacttgcgattactcgcaaatcctcagcttcggttcttggctttagccccgttacattttcggcgcaggagacccttatttagaccagtgagctgctacgctttctttaaatgatggctgcttctaagccaacatcctggttgttttgggatcctcacatcctttcccacttagccatgacttggggaccttagctggaggtcagggttgttgcccttttcacgacggacgttagcacccgccgtgtgtctgccgactagtactcctcggtattcggagtttggttaggatcagtaagacggtgagtccccatagcccatccagtgctctacccccgagggtattcggtcgacgctctacctaaatagatttcgcggagaaccagctatttccgagtttgattggcctttcacccctagccacaagtcatcccgaactattgcaacagttatgggttcggccctccagttggtgttacccaaccttcagcctgctcatggctagatcactcggtttcgggtctaatgcaactaactcaatcgccctgttcagacttgctttcgctgggcctacacctaccggcttaagcttgcttgatacactaagtccgtgacccattatacaaaaagtacgccgtcacccttgcgggcttcgactgtttgtaggcatccggtttcaggttctatttcactccccttgtcggggtgctttttacctttc

SEQ ID NO: 4157 - DNA, 296 bp, Xenorhabdus sp.
aaattgttctcgcttaaccagcggggtttcctggctggatatattcggccacttatgatttttttggttgatgatcaaggttatgtgtctgggggagacatctacccacgacaagttgttggtatgtttctggggctactgctatcagacattacatccgataaattctcccgttgaggcgaactcccacgatgcctgcgactgtcctttccagagtaatcccgattacctatctcgacgcattgggccttgttggttgtgctttttgatcatcgcgagagactctagcagatgcg

SEQ ID NO: 4158 - DNA, 1144 bp, Xenorhabdus sp.
aaggatccataaaaatattccttcagatattgcttattttatcaggcaactatcatcatcattaggttatcttattatgatcaccatctgcaagaactgtctgcgtggagggacacatagattggcagatgtaagattatgtactttactatcatcaacttctttaacagcaacagtatcctaccttttttattatcgagccatagaaaagttacttccaataagagctatggctttaaatataacttattctatctgggcagttctctttgcatatataattataggagaacctatatctgtaaacttaatacttatatgcactggaatttctgtaggttcatttttaacagtcgctaatccccgtgatataataaaagtaagattaagtatcaaacgcaacaatataaatgattaaataaaatcagttataaaagattatatagcttttctgacaatgaggactaagatgtttacatgtgaatataagcgaaatggtttaaaaataatggaagttcattatcataccaacataaaaaatttttacgattcaaataaaggtaaatatgatatattaaaatgttatcaggttaacactcccctacctaatttaaacgaatttcatactcttcaaattgacttacagcaacagactgatgatataatcagcaaatttgctaaaaatactcgtaacgaaataaataaatgttatcgtgatgataatgtatcattctctgtcaatacacaagttgaagatatagatattgatgaatttattgtcttatttaatgaatttaataagctaaaaaatcttggtgcggatgtaattgagttaaaaaaaagccttattagaaaccgaaagaacatcgctttatttaaggccattaaagataacaatatcttagttttcaatgtctattattttgatgaaaacagagcaagattgaaatgttccatatcaattcgtagtcatgataatcaaaaaagaaacttaataggtagggcaaatagaacattatgccttgaagctataaaattattcaaagagaaaggctgtaaaatttttgatatgggtggtatttcactatctgatgatcaaaataagaaaaatatagattcttttaaatcgaaattggtgggatat

SEQ ID NO: 4159 - DNA, 990 bp, Xenorhabdus sp.
attatctaataaattgtttgcttgatctgagcctgtgaatgtatttttagggaggataatcagtgcatttattctatttttatctatctgggccattgatttgcttgtacaaaacctaatgtacgatatttcacaactgttttacgataaggaaaaatgaataaagtatttatttgagaatgcctcgcaaatgagataataacctgtctgctatttgatgatcctgagaggatcgattcctgcaatatctgttgtgatgagatatatgcttgcagttaattgtgtagaacgtcagataggatctgctgaagaaatttgcaaaacagggggttatggccactaaaattgtacatatgctattcagctctaaactcattggcataaagcactcctgcactactactttacctgtattattgatagcattaataattatggagctaagcattgaatacaacgctcattattcagtacgttaataggatagaaattgttatcctgaaaatattttttagtgaattgagtatttcataagtagtgtattgttgttagcattctaaaatgaacttatcttcaccattttggtgaatggttatgaataatcctcattaattggtatcttgttctatattgattaagaaaatgtcttatgtaatttctatactattcactaccagtgttaatggtttttagtagatatttagaataggtatagatgttattccttattatgaagttgctatcataataacgataaatttaacggtgtaatagaattgtatttatatgctatttttttaatttgaatcatttctttatatgactggttattatttatattttaaattaagaagaataactttcttttgttttttattttctttcattgctggattagtattttatttaaattatttattgttcttttaatttgattttatgatataagaagttattggtaaatttgcatttagttattattttatttcc

SEQ ID NO: 4160 - DNA, 506 bp, Xenorhabdus sp.
gcgttaaccgaatagttcctaaccgattgattattcagggattgaggaaaacaaccataggcgacatcggtcgtaaaatacacccgactgatatttgtcgagaaacatcaccggaaatcatttaccaataacggttgtttttcggccgacattgtgcaaaggtttttgtaattttttccaacgccgggcgataatatatttttacggttgagaaagttttattgtctgatgtcacccataattagtagactcgaggtcgggtagggtttttcgtgtgaatttaatcgagcttgtgtttcgaccaaaaagtgtcggctctaattttatcggctgagaaaacactggcaaaccttggcgaaaaaatatgactgatgggagattgatcggaaaaaatcctgcaggtcgactctagaggatccccgggtaccgagctcgaattcgtaatcatgtcataacctgttttctgtgtgaaattgttatccgctcacaatttccccacaatatta

SEQ ID NO: 4161 - DNA, 1254 bp, Xenorhabdus sp.
gtgctctaaaggatccctttttttccctttcgatgacatgaaactataatattatctcaaatcacaacctttattgccacaactaaaaaaatcagttaatctaaacttgtttaaatcgctttttagcgacaataaaaaaactcctgtagcctgaaagggagagcaagcattgcggtacatctgcacacttttggaagcagatatcgtcagacacctaacccatcgtctggcggtgaaagtttcccggtcttgttatgcaccggcttatcattcaggcagagcaatagcccctgccacgtccacaatcacaatttattctatacgatttttacctatactctgattaacgcacgaaaaacgtcccgaaaactgcgcggcgtcacttgcgtttaagcgcagcgattaccaagtgacgccgctgggcggccaacgtccagagcacgtccggtctggctttacgaccgatttcaaccccgtattactcagtgtcaccacttttcattggcatttttctgccttaattcacttatttcgtttgtttttcactcatcgccttgtaataggccgatgcaataaagaaaggagatatcacacgtcacgaataatgaggcgttcatcctgattgaatcaggcactgaacggggagtaaaccatcgccgtgctgagcacgcagcgaactcctgcaaaaactcaacataaccctcgccctgctacacattatctgacgcaccacggaacggtgaacctaaccgacacgcagggaaaatgtttctaaatgagtaaaatgagtctgaaaatcacaggggaaatacggacagcgaagcgatcacgaacgagaataaacaataaagattgatttagccgtctgtattctcccctgagtttgtgcactcttgagaggagttatagccgttacacttagccgttcagttattgagtaagctaaaacaatcagttaaagtattcccgccattggcaaaatccgatggtcggggattcgcaaccctgtaatgatcaacccactggtaggatgtttctgccagtgcgcctgcgttcgccttttctatggcggttcaggtgggggaggcttcggcctcgccggattggttgatctccggtattgcgaaccctgcttgaatcgccaccatcaatattaattaatggaaggggtagcaggaatgaataacaacaatgttcaaaatgactggcatcaggccgatattattgctgcattacgtaaacggggtacaacct

SEQ ID NO: 4162 - DNA, 803 bp, Xenorhabdus sp.
  unsure (1)..(803): unsure at all n locations
nnnnnnnnnnnnnnnnnnnnnnnnnnnnnnnnnnnnnnnnnnnnnnnnnnnnnnnnnnnnnnnnnnnnnnnnnnnnnnnnnnnnnnnnntcataataaccattcacattcataatataaaccaaattcttcattccccatccaccaanataacataaataatatattatttccacaaaaaaaatcatacattcaantcttatacttatattcatatccatttaacaataacaccaatattcatttataacatcctaaattcaatctttttccttccttacaccaaaactcctaatcacaattaatctatccattcacaatttatcaacaatattctcattttcatctaataatctatccatattataaatactctatacataacaaaatatntcttaaaatanataatattaactatatttattattnnnnnnnnnnnnnnnnnnnnnnnnnnnnnnnnnnnnnnnnnnnnnnnnnnnnnnnnnnnnnnnnnnnnnnnnnnnnnnnnnnnnnnnnnnnnnnnnnnnnnnnnnnnnnnnnnnnnnnnnnnnnnnnnnnnnnnnnnnnnnnnnnnnnnnnnnnnnnnnnnnnnnnnnnnnnnnnnnnnnnnnnnnnnnnnnnnnnnnnnnnnnnnnnnnnnnnnnnnnnnnnnnnnnnnnnnnnnnnnnnnnnnnnnnnnnnnnnnnnnnnnnnnnnnnnnnnnnnnnnnnnnnnnnnnnnnnnnnnnnnnnnnnnnnnnnnnnnnnnnnnnnnnnnnnnnnnnnnnnnnnnnnnnnnnnnnnnnnnnnnnnnnnnnnnnnnnnn

SEQ ID NO: 4163 - DNA, 1066 bp, Xenorhabdus sp.
  unsure (1)..(1066): unsure at all n locations
nnnnnnnnnnnnnnnnnnnnnnnnnnnnnnnnnnnnnnnnnnnnnnnnnnnnnnnnnnnnnnnnnnnnnnnnnnnnnnnnnnnnnnnnnnnnnnnnnnnnnnnnnnnnnnnnnnnnnnnnnnnnnnnnnnnnnnnnnnnnnnnnnnnnnnnnnnnnnnnnagaaacggccaacgcgcggggagaggcggaaagaggaaagcccccaccaccgcaaccacggtcacagacacgcagcgcacggacgagcagctgcggcgagcgggaacagcacacacaaaggcggaaacacggaaaaccacaaaagcaggggaaaacgcaggaaagaacatgagagcaaaaggccagcaaaaggcacaaaaaccgaaaaaagggcgcagagacggcgaaaaaacacaaggcaaacgcccaccaggacgagacaacaacaaaaacacgacgccacaaagacaaaggaaggcgaaaaccccgaccgggacaacaaaagaaacnnnnnnnnnnnnnnnnnnnnnnnnnnnnnnnnnnnnnnnnnnnnnnnnnnnnnnnnnnnnnnnnnnnnnnnnnnnnnnnnnnnnnnnnnnnnnnnnnnnnnnnnnnnnnnnnnnnnnnnnnnnnnnnnnnnnnnnnnnnnnnnnnnnnnnnnnnnnnnnnnnnnnnnnnnnnnnnnnnnnnnnnnnnnnnnnnnnnnnnnnnnnnnnnnnnnnnnnnnnnnnnnnnnnnnnnnnnnnnnnnnnnnnnnnnnnnnnnnnnnnnnnnnnnnnnnnnnnnnnnnnnnnnnnnnnnnnnnnnnnnnnnnnnnnnnnnnnnnnnnnnnnnnnnnnnnnnnnnnnnnnnnnnnnnnnnnnnnnnnnnnnnnnnnnnnnnnnnnnnnnnnnnnnnnnnnnnnnnnnnnnnnnnnnnnnnnnnnnnnnnnnnnnnnnnnnnnnnnnnnnnnnnnnnnnnnnnnnnnnnnnnnnnnnnnnnnnnnnnnnnnnnnnnnnnnnnnnnnnnnnnnnnnnnnnnnnnnnnnnnnnnnnnnnnnnnnnnnnnnnnnnnnnnnnnnnnnnnnnnnnnnnnnnnnnnnnnnnn

SEQ ID NO: 4164 - DNA, 861 bp, Xenorhabdus sp.
  unsure (1)..(861): unsure at all n locations
ggctccgaataaaagaggacaagggttgataggcgaagagtgctacgcaatcaattcacggggctccagactcgttgagggaggatgcatgaatgacaatcaattcatggggctctgaataaatgtggagaatggaggataggcgaatagcactaggcaatctattcgcggggctgaaactcgatggtggaggatgcatgaatgacaatcaattcacggggctcctaataaaagtggagaatggaggataggcgaacagcgctaggcaatcaattcgcggggctgcagactcgactttggaggatgcatgaatgacaatcaattcatggggctccgaataaaagtggagaatgaaggataggcgaacagtgctaggcaatcaattcgcgaggcaccaaactcactggtggatggtgcatgaatgacaatcaattcatggggcttccaataaaagtggaaaatggaggataggannnnnnnnnnnnnnnnnnnnnnnnnnnnnnnnnnnnnnnnnnnnnnnnnnnnnnnnnnnnnnnnnnnnnnnnnnnnnnnnnnnnnnnnnnnnnnnnnnnnnnnnnnnnnnnnnnnnnnnnnnnnnnnnnnnnnnnnnnnnnnnnnnnnnnnnnnnnnnnnnnnnnnnnnnnnnnnnnnnnnnnnnnnnnnnnnnnnnnnnnnnnnnnnnnnnnnnnnnnnnnnnnnnnnnnnnnnnnnnnnnnnnnnnnnnnnnnnnnnnnnnnnnnnnnnnnnnnnnnnnnnnnnnnnnnnnnnnnnnnnnnnnnnnnnnnnnnnnnnnnnnnnnnnnnnnnnnnnnnnnnnnnnnnnnnnnnnnnnnnnnnnnnnnnnnnnnnnnnnnnnnnnnnn

SEQ ID NO: 4165 - DNA, 1025 bp, Xenorhabdus sp.
  unsure (1)..(1025): unsure at all n locations
nnnnnnnnnnnnnnnnnnnnnnnnncatgtgctctaaaggatgccttccccggcattttcgacggcgcggttgatgctggaataaagataataaatatcgttccccgtgccgcccgccatcgttacattgacggaactgtcgccccacatggaatcattgccggctgtgccggcgagcagcgggccggaacccgtggcggagaaaaatccggtggaactcccgctataatagagtgtgtctccaagcgcattcaccactgtccgggccattaccgtctcctgtccgttagcgttggtttcctcactcctcctgcgagacagcctaacagggcaaaaagcgtcctgttagagccagaaattaggggtgcgtcttccagtacgaaaggtgcaaattcgatatagaaatgcactactcagctgtcgatcacccatttaagcatccgttttaggtaagcgggcaaggcttcgcgtttgcagtcagcgaacagattctggatcggataggaaagtagatattcaaagcaaaaacttcacggtattgaagggatttaacattatatcccatgctcttgtgctgtattttttgatgtatatcatatttcagtatttaattcagtttctaaatatttatgcgttagctatgcttttattcatgctctttcccatccgaatgaatnnnnnnnnnnnnnnnnnnnnnnnnnnnnnnnnnnnnnnnnnnnnnnnnnnnnnnnnnnnnnnnnnnnnnnnnnnnnnnnnnnnnnnnnnnnnnnnnnnnnnnnnnnnnnnnnnnnnnnnnnnnnnnnnnnnnnnnnnnnnnnnnnnnnnnnnnnnnnnnnnnnnnnnnnnnnnnnnnnnnnnnnnnnnnnnnnnnnnnnnnnnnnnnnnnnnnnnnnnnnnnnnnnnnnnnnnnnnnnnnnnnnnnnnnnnnnnnnnnnnnnnnnnnnnnnnnnnnnnnnnnnnnnnnnnnnnnnnnnnnnnnnnnnnnnnnnnnnnnnnnnnnnnnnnnnnnnnnnnnnnnnnnnnnn

SEQ ID NO: 4166 - DNA, 1013 bp, Xenorhabdus sp.
  unsure (1)..(1013): unsure at all n locations
ctctggctaccttgcggagcaaacatatatctcccccaatcacactgcctgtatgaacaaacaaactttgtacaaccagcttacgtggaaaagattcgatattctttctatgccaatagactcgtgacatccatgtactgagtcgtcaaatgagccacgttaagaaagcccaagcttatacgcattggctggcccacagggtgccccaatagggcccgaatgaaagacccaagcctacatgaaccatcaaagagagacctaccacactagatagcttaaaaatctcccatggcaaaacttgtgtttatgtgactgcgtgtgcttgttagattgcttggggttctatgttggccccactgtcaccttaggaaaatggacttatcgggtgtcttagactagaagcagaacagctaactcggactcaaggggcactatctgtacttgtnnnnnnnnnnnnnnnnnnnnnnnnnnnnnnnnnnnnnnnnnnnnnnnnnnnnnnnnnnnnnnnnnnnnnnnnnnnnnnnnnnnnnnnnnnnnnnnnnnnnnnnnnnnnnnnnnnnnnnnnnnnnnnnnnnnnnnnnnnnnnnnnnnnnnnnnnnnnnnnnnnnnnnnnnnnnnnnnnnnnnnnnnnnnnnnnnnnnnnnnnnnnnnnnnnnnnnnnnnnnnnnnnnnnnnnnnnnnnnnnnnnnnnnnnnnnnnnnnnnnnnnnnnnnnnnnnnnnnnnnnnnnnnnnnnnnnnnnnnnnnnnnnnnnnnnnnnnnnnnnnnnnnnnnnnnnnnnnnnnnnnnnnnnnnnnnnnnnnnnnnnnnnnnnnnnnnnnnnnnnnnnnnnnnnnnnnnnnnnnnnnnnnnnnnnnnnnnnnnnnnnnnnnnnnnnnnnnnnnnnnnnnnnnnnnnnnnnnnnnnnnnnnnnnnnnnnnnnnnnnnnnnnnnnnnnnnnnnnnnnnnnnnnnnnnnnnnnnnnnnnnnnnnnnnnnnnnnnnnnnnnnnnnnnnnnnnnnnnnnnnnnnnnnn

SEQ ID NO: 4167 - DNA, 999 bp, Xenorhabdus sp.
  unsure (1)..(999): unsure at all n locations
nnnnnnnnnnnnnnnnnnnnnnnnnnnnnnnnnnnnnnnnnnnnnnnnnnnnnnnnnnnnnnnnnnnnnnnnnnnnnnnnnnnnnnnnnnnnnnnnnnnnnnnnnnnnnnnnnnnnnnnnnnnnnnnnnnnnnnnnnnnnnngaacggnaaanaacattttcatcccacgggggcagaacgaacaaccaaggggaggggacaaccaggaaggacaacccgagggcgcaaacaaaaaaaggaccaaccaccgngaacacacagaggccccagcggacgccagaaaaagacgcgaannnnnnnnnnnnnnnnnnnnnnnnnnnnnnnnnnnnnnnnnnnnnnnnnnnnnnnnnnnnnnnnnnnnnnnnnnnnnnnnnnnnnnnnnnnnnnnnnnnnnnnnnnnnnnnnnnnnnnnnnnnnnnnnnnnnnnnnnnnnnnnnnnnnnnnnnnnnnnnnnnnnnnnnnnnnnnnnnnnnnnnnnnnnnnnnnnnnnnnnnnnnnnnnnnnnnnnnnnnnnnnnnnnnnnnnnnnnnnnnnnnnnnnnnnnnnnnnnnnnnnnnnnnnnnnnnnnnnnnnnnnnnnnnnnnnnnnnnnnnnnnnnnnnnnnnnnnnnnnnnnnnnnnnnnnnnnnnnnnnnnnnnnnnnnnnnnnnnnnnnnnnnnnnnnnnnnnnnnnnnnnnnnnnnnnnnnnnnnnnnnnnnnnnnnnnnnnnnnnnnnnnnnnnnnnnnnnnnnnnnnnnnnnnnnnnnnnnnnnnnnnnnnnnnnnnnnnnnnnnnnnnnnnnnnnnnnnnnnnnnnnnnnnnnnnnnnnnnnnnnnnnnnnnnnnnnnnnnnnnnnnnnnnnnnnnnnnnnnnnnnnnnnnnnnnnnnnnnnnnnnnnnnnnnnnnnnnnnnnnnnnnnnnnnnnnnnnnnnnnnnnnnnnnnnnnnnnnnnnnnnnnnnnnnnnnnnnnnnnnnnnnnnnnnnnnnnnnnnnnnnnnnnnnnnnnnnnnnnnnnnnnn

SEQ ID NO: 4168 - DNA, 973 bp, Xenorhabdus sp.
  unsure (1)..(973): unsure at all n locations
nnnnnnnnnnnnnnnnnnnnnnnnnnnnnnnnnnnnnnnnnnnnnnnnnnnnnnnnnnnnnnnnnnnnnnnnnnnnnnnnnnnnnnnnnnnnnnnnnnnnnnnnnnnnnnnnnaccngaaaaaacgnanactttgacgcccgaaaggggcnggaggcgaancaggaaagancnaggacagcggacgcgccgcagcaagaaaccccacagaaaacgccaagcaaacagagaccaagacgggagaaggcanaanaaaagggaaacagaaaaaacgccaagaacagaannaaccgccaagagaagcgggcgagccaaagggaaacccacaaacnnnnnnnnnnnnnnnnnnnnnnnnnnnnnnnnnnnnnnnnnnnnnnnnnnnnnnnnnnnnnnnnnnnnnnnnnnnnnnnnnnnnnnnnnnnnnnnnnnnnnnnnnnnnnnnnnnnnnnnnnnnnnnnnnnnnnnnnnnnnnnnnnnnnnnnnnnnnnnnnnnnnnnnnnnnnnnnnnnnnnnnnnnnnnnnnnnnnnnnnnnnnnnnnnnnnnnnnnnnnnnnnnnnnnnnnnnnnnnnnnnnnnnnnnnnnnnnnnnnnnnnnnnnnnnnnnnnnnnnnnnnnnnnnnnnnnnnnnnnnnnnnnnnnnnnnnnnnnnnnnnnnnnnnnnnnnnnnnnnnnnnnnnnnnnnnnnnnnnnnnnnnnnnnnnnnnnnnnnnnnnnnnnnnnnnnnnnnnnnnnnnnnnnnnnnnnnnnnnnnnnnnnnnnnnnnnnnnnnnnnnnnnnnnnnnnnnnnnnnnnnnnnnnnnnnnnnnnnnnnnnnnnnnnnnnnnnnnnnnnnnnnnnnnnnnnnnnnnnnnnnnnnnnnnnnnnnnnnnnnnnnnnnnnnnnnnnnnnnnnnnnnnnnnnnnnnnnnnnnnnnnnnnnnnnnnnnnnnnnnnnnnnnnnnnnnnnnnnnnnnnnnnnnnnnnnnnnnnnnnnnn

SEQ ID NO: 4169 - DNA, 1622 bp, Xenorhabdus sp.
  unsure (1)..(1622): unsure at all n locations
nnnnnnnnnnnnnnnnnnnnnnnnnnnnnnnnnnncctctaaagtccatcttataaacccacatgggattatctaataatcctaactacaactcacctaattttttttnnnnnnnnnnnnnnnnnnnnnnnnnnnnnnnnnnnnnnnnnnnnnnnnnnnnnnnnnnnnnnnnnnnnnnnnnnnnnnnnnnnnnnnnnnnnnnnnnnnnnnnnnnnnnnnnnnnnnnnnnnnnnnnnnnnnnnnnnnnnnnnnnnnnnnnnnnnnnnnnnnnnnnnnnnnnnnnnnnnnnnnnnnnnnnnnnnnnnnnnnnnnnnnnnnnnnnnnnnnnnnnnnnnnnnnnnnnnnnnnnnnnnnnnnnnnnnnnnnnnnnnnnnnnnnnnnnnnnnnnnnnnnnnnnnnnnnnnnnnnnnnnnnnnnnnnnnnnnnnnnnnnnnnnnnnnnnnnnnnnnnnnnnnnnnnnnnnnnnnnnnnnnnnnnnnnnnnnnnnnnnnnnnnnnnnnnnnnnnnnnnnnnnnnnnnnnnnnnnnnnnnnnnnnnnnnnnnnnnnnnnnnnnnnnnnnnnnnnnnnnnnnnnnnnnnnnnnnnnnnnnnnnnnnnnnnnnnnnnnnnnnnnnnnnnnnnnnnnnnnnnnnnnnnnnnnnnnnnnnnnnnnnnnnnnnnnnnnnnnnnnnnnnnnnnnnnnnnnnnnnnnnnnnnnnnnnnnnnnnnnnnnnnnnnnnnnnnnnnnnnnnnnnnnnnnnnnnnnnnnnnnnnnnnnnnnnnnnnnnnnnnnnnnnnnnnnnnnnnnnnnnnnnnnnnnnnnnnnnnnnnnnnnnnnnnnnnnnnnnnnnnnnnnnnnnnnnnnnnnnnnnnnnnnnnnnnnnnnnnnnnnnnnnnnnnnnnnnnnnnnnnnnnnnnnnnnnnnnnnnnnnnnnnnnnnnnnnnnnnnnnnnnnnnnnnnnnnnnnnnnnnnnnnnnnnnnnnnnnnnnnnnnnnnnnnnnnnnnnnnnnnnnnnnnnnnnnnnnnnnnnnnnnnnnnnnnnnnnnnnnnnnnnnnnnnnnnnnnnnnnnnnnnnnnnnnnnnnnnnnnnnnnnnnnnnnnnnnnnnnnnnnnnnnnnnnnnnnnnnnnnnnnnnnnnnnnnnnnnnnnnnnnnnnnnnnnnnnnnnnnnnnnnnnnnnnnnnnnnnnnnnnnnnnnnnnnnnnnnnnnnnnnnnnnnnnnnnnnnnnnnnnnnnnnnnnnnnnnnnnnnnnnnnnnnnnnnnnnnnnnnnnnnnnnnnnnnnnnnnnnnnnnnnnnnnnnnnnnnnnnnnnnnnnnnnnnnnnnnnnnnnnnnnnnnnnnnnnnnnnnnnnnnnnnnnnnnnnnnnnnnnnnnnnnnnnnnnnnnnnnnnnnnnnnnnnnnnnnnnnnnnnnnnnnnnnnnnnnnnnnnnnnnnnnnnnnnnnnnnnnnnnnnnnnnnnnnnnnnnnnnnnnnnnnnnnnnnnnnnnnnnnnnnnnnnnnnnnnnnnnnnnnnnnnnnnnnnnnnnnnnnnnnnnnnnnnnnnnnnnnnnnnnnnnnnnnnnnnnnnnnnnnnnnnnnnnnnnnnnnnnnnnnnnnnnnnnnnnnnnnnnnnnnnnnnnnnnnnnnnnnnnnnnnnnnnnn

SEQ ID NO: 4170 - DNA, 972 bp, Xenorhabdus sp.
  unsure (1)..(972): unsure at all n locations
nnnnnnnnnnnnnnnnnnnnnnnnnnnnnngtgctctaaagatttagggattttaaattttcgctcattgtcctggtctcaaattataatgatgatggctgatgtatggataataatagaatgctattttattttctgcaatagtgaatttactttctaaggctaaaagatccatttttaaaatgcaatttttttgataatcgatatattgtgttttaattctactattggatttatcatttctcgataacggttagacgtagattactcaaagctgctcaaggattaacttagacatataaaactaatttatagtcaatctgtaagatatgctaactattcatctgaaaataaattggttttcaagtgtgagatgaaattttttttatgggtaatcgattggttatgattatagcgatatggatcgagtaaaagtaaaccgttttgattattaatatgcaaattgtggaatataaaatcgatatttacttctgatattaattttgttcatttgtcatgcagtaagtgcttatcgtgctgattttatatgcacaaatgtgatgactatcataaaaatatttcttttaacgtcatttcggttttctttcatannnnnnnnnnnnnnnnnnnnnnnnnnnnnnnnnnnnnnnnnnnnnnnnnnnnnnnnnnnnnnnnnnnnnnnnnnnnnnnnnnnnnnnnnnnnnnnnnnnnnnnnnnnnnnnnnnnnnnnnnnnnnnnnnnnnnnnnnnnnnnnnnnnnnnnnnnnnnnnnnnnnnnnnnnnnnnnnnnnnnnnnnnnnnnnnnnnnnnnnnnnnnnnnnnnnnnnnnnnnnnnnnnnnnnnnnnnnnnnnnnnnnnnnnnnnnnnnnnnnnnnnnnnnnnnnnnnnnnnnnnnnnnnnnnnnnnnnnnnnnnnnnnnnnnnnnnnnnnnnnnnnnnnnnnnnnnnnnnnnnnnnnnnnnnnnnnnnnnnnn

SEQ ID NO: 4171 - DNA, 1079 bp, Xenorhabdus sp.
  unsure (1)..(1079): unsure at all n locations
nnnnnnnnnnnnnnnnnnnnnnnnnnnnnnnnnnnngtgctctaaagatccgcttgacgacgacatccgtcgtcggttgcggcatgtcgttgtcgccctcctaaacttcgttgtaggagatctgaccgctgaagctttcgccgtcgttctctggctgaagatacatgccccaggatgtcccgatgccgccgtggtcgcattgcgcgttcatctgcacaccgctctcggaaaagcgaactttgtcgatcaagacgcatttgacacccgaaggcttgggcatgaacggcaacgtttcggcggttatctcgcccgagacgcaaatgttgcgcgagnnnnnnnnnnnnnnnnnnnnnnnnnnnnnnnnnnnnnnnnnnnnnnnnnnnnnnnnnnnnnnnnnnnnnnnnnnnnnnnnnnnnnnnnnnnnnnnnnnnnnnnnnnnnnnnnnnnnnnnnnnnnnnnnnnnnnnnnnnnnnnnnnnnnnnnnnnnnnnnnnnnnnnnnnnnnnnnnnnnnnnnnnnnnnnnnnnnnnnnnnnnnnnnnnnnnnnnnnnnnnnnnnnnnnnnnnnnnnnnnnnnnnnnnnnnnnnnnnnnnnnnnnnnnnnnnnnnnnnnnnnnnnnnnnnnnnnnnnnnnnnnnnnnnnnnnnnnnnnnnnnnnnnnnnnnnnnnnnnnnnnnnnnnnnnnnnnnnnnnnnnnnnnnnnnnnnnnnnnnnnnnnnnnnnnnnnnnnnnnnnnnnnnnnnnnnnnnnnnnnnnnnnnnnnnnnnnnnnnnnnnnnnnnnnnnnnnnnnnnnnnnnnnnnnnnnnnnnnnnnnnnnnnnnnnnnnnnnnnnnnnnnnnnnnnnnnnnnnnnnnnnnnnnnnnnnnnnnnnnnnnnnnnnnnnnnnnnnnnnnnnnnnnnnnnnnnnnnnnnnnnnnnnnnnnnnnnnnnnnnnnnnnnnnnnnnnnnnnnnnnnnnnnnnnnnnnnnnnnnnnnnnnnnnnnnnnnnnnnnnnnnnnnnnnnnnnnnnnnnnnnnnnnnnnnnnnnnnnnnnnnnnnnnnnnnnnnnnnnnnnnnnnnnnnnnnnnnnnnnnnnnnnnn

SEQ ID NO: 4172 - DNA, 990 bp, Xenorhabdus sp.
  unsure (1)..(990): unsure at all n locations
nnnnnnnnnnnnnnnnnnnnnnnnnnnnnnnnnnnnngtgctctaaagctagcgagacaagcggttgatgtgcaccggtgctgccgttgccggcccggcctgaccgctacttctcactcctcggcaacagctgccaaatctgtctgcatgtatatgggtggctgggtgggttgcctgtctcttatcacggctatgctggctgtcctgatggacaggctgaagatgcgcacagtcttgccattttccccaaagaccatatcgaagccagctcttactgctattacttcggcctcttcgatctgcgcaatgatccctgtgctacctgtgctattgacaccgctaccggcgataccgcggataaagcggctaaacttgctgaacgtaccggccattccaaccctnnnnnnnnnnnnnnnnnnnnnnnnnnnnnnnnnnnnnnnnnnnnnnnnnnnnnnnnnnnnnnnnnnnnnnnnnnnnnnnnnnnnnnnnnnnnnnnnnnnnnnnnnnnnnnnnnnnnnnnnnnnnnnnnnnnnnnnnnnnnnnnnnnnnnnnnnnnnnnnnnnnnnnnnnnnnnnnnnnnnnnnnnnnnnnnnnnnnnnnnnnnnnnnnnnnnnnnnnnnnnnnnnnnnnnnnnnnnnnnnnnnnnnnnnnnnnnnnnnnnnnnnnnnnnnnnnnnnnnnnnnnnnnnnnnnnnnnnnnnnnnnnnnnnnnnnnnnnnnnnnnnnnnnnnnnnnnnnnnnnnnnnnnnnnnnnnnnnnnnnnnnnnnnnnnnnnnnnnnnnnnnnnnnnnnnnnnnnnnnnnnnnnnnnnnnnnnnnnnnnnnnnnnnnnnnnnnnnnnnnnnnnnnnnnnnnnnnnnnnnnnnnnnnnnnnnnnnnnnnnnnnnnnnnnnnnnnnnnnnnnnnnnnnnnnnnnnnnnnnnnnnnnnnnnnnnnnnnnnnnnnnnnnnnnnnnnnnnnnnnnnnnnnnnnnnnnnnnnnnnnnnnnnnnn

SEQ ID NO: 4173 - DNA, 826 bp, Xenorhabdus sp.
  unsure (1)..(826): unsure at all n locations
nnnnnnnnnnnnnnnnnnngtgctctaaaggatctactggggatacagctggaggcgtttctgcgagatactgccaatatcacgcagatggtctaacaaagcgatcagaggggggcacccatactttgactagaggatggtggccgcccataaaggacagtgaacgtacagctggacactattcatatctgctgttgctgccgcaatagcgcctgcatatgctgcagcaaacaaacgagggcacacctggcggctgaatctaaaggcgttcactctggacgtggaccatccgtatacaccactcattttcgccatcttaagtaacaaaggctgggtgcctcaagcatatagcgacgcttataagcaccacgtactactaactataaaagccaatgtactgtgtcacagagataataatcaacacttgtgggggcnnnnnnnnnnnnnnnnnnnnnnnnnnnnnnnnnnnnnnnnnnnnnnnnnnnnnnnnnnnnnnnnnnnnnnnnnnnnnnnnnnnnnnnnnnnnnnnnnnnnnnnnnnnnnnnnnnnnnnnnnnnnnnnnnnnnnnnnnnnnnnnnnnnnnnnnnnnnnnnnnnnnnnnnnnnnnnnnnnnnnnnnnnnnnnnnnnnnnnnnnnnnnnnnnnnnnnnnnnnnnnnnnnnnnnnnnnnnnnnnnnnnnnnnnnnnnnnnnnnnnnnnnnnnnnnnnnnnnnnnnnnnnnnnnnnnnnnnnnnnnnnnnnnnnnnnnnnnnnnnnnnnnnnnnnnnnnnnnnnnnnnnnnnnnnnnnnnnnnnnnnnnnnnnnnnnnnnnnnnnnnnnnnnnnnnn

SEQ ID NO: 4174 - DNA, 876 bp, Xenorhabdus sp.
  unsure (1)..(876): unsure at all n locations
nnnnnnnnnnnnnnnnnnnnnnnnnnnnnnnnnnnnnnaattcgaattgaaatctgcaattaaaacatttactcttacccggtttttttccagctgctggtcatctttttgaaggggctaatgcgcaacaagttgccacaaaaaataaattctttctcttttcgttaacaatagaaaaaacatcagacttaatctgattattgatgtgttcccggtgggaataaggagtgaatatttaacagttccatcgataccccaatatatctttttgatactgatttcatgatctgaatagccgatcgacaggaccgtatcatctttcgggtgaggacaactcatgaaacaaaaagtatgaaactgaaacagctttttccaccattattcgggtagcagttatattattaaattgtatagagtaaccatgagatttttttaatgctagactttgactgttcaatatattatctttgcgataataattggactaannnnnnnnnnnnnnnnnnnnnnnnnnnnnnnnnnnnnnnnnnnnnnnnnnnnnnnnnnnnnnnnnnnnnnnnnnnnnnnnnnnnnnnnnnnnnnnnnnnnnnnnnnnnnnnnnnnnnnnnnnnnnnnnnnnnnnnnnnnnnnnnnnnnnnnnnnnnnnnnnnnnnnnnnnnnnnnnnnnnnnnnnnnnnnnnnnnnnnnnnnnnnnnnnnnnnnnnnnnnnnnnnnnnnnnnnnnnnnnnnnnnnnnnnnnnnnnnnnnnnnnnnnnnnnnnnnnnnnnnnnnnnnnnnnnnnnnnnnnnnnnnnnnnnnnnnnnnnnnnnnnnnnnnnnnnnnnnnnnnnnnnnnnnnnnnnnnnnnnnnnnnnnnnnnnnnnnnnnnnnnnnnnnn

SEQ ID NO: 4175 - DNA, 921 bp, Xenorhabdus sp.
  unsure (1)..(921): unsure at all n locations
nnnnnnnnnnnnnnnnnnnnnnnnnnnnnnnnnnnnnntgttgctccgataccttgttcaaaaagatggcgaacttgaactttgatttgttgggatattttttatatactaaccctattacaataatacgaaggcgccgctgggaagcattgattaaaagaatatgattttttgattgatcaaccccgcatataaagtaggccagctgtttgacaattgtaaggctttggctgaaaccactatcggctaaatacgagggaagtcccttctaaaagaaatgttggatcatatgaattatatcgggagaaataaccaccaatcgggatccagctgttattactctaactatcataccccttnnnnnnnnnnnnnnnnnnnnnnnnnnnnnnnnnnnnnnnnnnnnnnnnnnnnnnnnnnnnnnnnnnnnnnnnnnnnnnnnnnnnnnnnnnnnnnnnnnnnnnnnnnnnnnnnnnnnnnnnnnnnnnnnnnnnnnnnnnnnnnnnnnnnnnnnnnnnnnnnnnnnnnnnnnnnnnnnnnnnnnnnnnnnnnnnnnnnnnnnnnnnnnnnnnnnnnnnnnnnnnnnnnnnnnnnnnnnnnnnnnnnnnnnnnnnnnnnnnnnnnnnnnnnnnnnnnnnnnnnnnnnnnnnnnnnnnnnnnnnnnnnnnnnnnnnnnnnnnnnnnnnnnnnnnnnnnnnnnnnnnnnnnnnnnnnnnnnnnnnnnnnnnnnnnnnnnnnnnnnnnnnnnnnnnnnnnnnnnnnnnnnnnnnnnnnnnnnnnnnnnnnnnnnnnnnnnnnnnnnnnnnnnnnnnnnnnnnnnnnnnnnnnnnnnnnnnnnnnnnnnnnnnnnnnnnnnnnnnnnnnnnnnnnnnnnnnnnnnnnnnnnnnnnnnnnnnnnnnnnnnnnnnnnnnnnnnnnnnnnnn

SEQ ID NO: 4176 - DNA, 1369 bp, Xenorhabdus sp.
  unsure (1)..(1369): unsure at all n locations
nnnnnnnnnnnnnnnnnnnnnnnnnnnnnnnnnnnnnnnnnnnnnnnnnnnnnnnacggtaaacgcacttttctgccagtaaattcacttattttttttttcgaatgtgatctgcgtggtgaggactattaacaacaacaatttctggaatgttattttaccgattgtctgcttgaagccgtgaatttcagtcatgccagattaaccaactgtaactttaaaggagcgggtttacagggggcatgtttatccaatgttaacgcgacccagtccctattgattgaatcggatttgactcgtggcacattgtattaaacagcttatttattcagtctatttgttgtcagtgcctgtcttagaataccgtttgacttacatacaaaatccatctttacaacaggccaatatttgcttaattgaatattgacggtaaatgcctcagttttactcggttgcnnnnnnnnnnnnnnnnnnnnnnnnnnnnnnnnnnnnnnnnnnnnnnnnnnnnnnnnnnnnnnnnnnnnnnnnnnnnnnnnnnnnnnnnnnnnnnnnnnnnnnnnnnnnnnnnnnnnnnnnnnnnnnnnnnnnnnnnnnnnnnnnnnnnnnnnnnnnnnnnnnnnnnnnnnnnnnnnnnnnnnnnnnnnnnnnnnnnnnnnnnnnnnnnnnnnnnnnnnnnnnnnnnnnnnnnnnnnnnnnnnnnnnnnnnnnnnnnnnnnnnnnnnnnnnnnnnnnnnnnnnnnnnnnnnnnnnnnnnnnnnnnnnnnnnnnnnnnnnnnnnnnnnnnnnnnnnnnnnnnnnnnnnnnnnnnnnnnnnnnnnnnnnnnnnnnnnnnnnnnnnnnnnnnnnnnnnnnnnnnnnnnnnnnnnnnnnnnnnnnnnnnnnnnnnnnnnnnnnnnnnnnnnnnnnnnnnnnnnnnnnnnnnnnnnnnnnnnnnnnnnnnnnnnnnnnnnnnnnnnnnnnnnnnnnnnnnnnnnnnnnnnnnnnnnnnnnnnnnnnnnnnnnnnnnnnnnnnnnnnnnnnnnnnnnnnnnnnnnnnnnnnnnnnnnnnnnnnnnnnnnnnnnnnnnnnnnnnnnnnnnnnnnnnnnnnnnnnnnnnnnnnnnnnnnnnnnnnnnnnnnnnnnnnnnnnnnnnnnnnnnnnnnnnnnnnnnnnnnnnnnnnnnnnnnnnnnnnnnnnnnnnnnnnnnnnnnnnnnnnnnnnnnnnnnnnnnnnnnnnnnnnnnnnnnnnnnnnnnnnnnnnnnnnnnnnnnnnnnnnnnnnnnnnnnnnnnnnnnnnnnnnnnnnnnnnnnnnnnnnnnnnnnnnnnnnnnnnnnnnnnnnnnnnnnnnnnnnnnnnnnnnnnnnnnnnnnnnnnnnnnnnnnnnnnnnn

SEQ ID NO: 4177 - DNA, 1001 bp, Xenorhabdus sp.
  unsure (1)..(1001): unsure at all n locations
nnnnnnnnnnnnnnnnnnnnnnnnnnnnnnnnnnnactttattaaaagaatgtccgagagcacttgccggaaccaacctgctgaatatggaaaatttttttttgtctttaagcggtttaatgtctggtggggaaagggtctcactaattcattatccaccgaatgatctagtaattctggtactgaatggccgtttattgatggcagttttgtccgggcttattagctcagttcaggcgcagctttaaaggataattatgcgactggaaaaagccggggtggnnnnnnnnnnnnnnnnnnnnnnnnnnnnnnnnnnnnnnnnnnnnnnnnnnnnnnnnnnnnnnnnnnnnnnnnnnnnnnnnnnnnnnnnnnnnnnnnnnnnnnnnnnnnnnnnnnnnnnnnnnnnnnnnnnnnnnnnnnnnnnnnnnnnnnnnnnnnnnnnnnnnnnnnnnnnnnnnnnnnnnnnnnnnnnnnnnnnnnnnnnnnnnnnnnnnnnnnnnnnnnnnnnnnnnnnnnnnnnnnnnnnnnnnnnnnnnnnnnnnnnnnnnnnnnnnnnnnnnnnnnnnnnnnnnnnnnnnnnnnnnnnnnnnnnnnnnnnnnnnnnnnnnnnnnnnnnnnnnnnnnnnnnnnnnnnnnnnnnnnnnnnnnnnnnnnnnnnnnnnnnnnnnnnnnnnnnnnnnnnnnnnnnnnnnnnnnnnnnnnnnnnnnnnnnnnnnnnnnnnnnnnnnnnnnnnnnnnnnnnnnnnnnnnnnnnnnnnnnnnnnnnnnnnnnnnnnnnnnnnnnnnnnnnnnnnnnnnnnnnnnnnnnnnnnnnnnnnnnnnnnnnnnnnnnnnnnnnnnnnnnnnnnnnnnnnnnnnnnnnnnnnnnnnnnnnnnnnnnnnnnnnnnnnnnnnnnnnnnnnnnnnnnnnnnnnnnnnnnnnnnnnnnnnnnnnnnnnnnnnnnnnnnnnnnnnnnnnnnnnnnnnnnnnnnnnnnnnnnnnnnnnnnnnnnnnnnnnnnn

SEQ ID NO: 4178 - DNA, 835 bp, Xenorhabdus sp.
  unsure (1)..(835): unsure at all n locations
nnnnnnnnnnnnnnnnnnnnnnnnnnnnnnnnnnnnnnnnnnnnnnnnnnnnnnnnnnnnnnnnnnnnnnnnaatgtgagtataacactcattacccttcttaaatccttttcgacacgaaaagacggaatccatttgcagatggatttgactataagggggtctccccccaatatcacccaaactaaataaatcaccttcttaccacctattaaccatatccaaaannnnnnnnnnnnnnnnnnnnnnnnnnnnnnnnnnnnnnnnnnnnnnnnnnnnnnnnnnnnnnnnnnnnnnnnnnnnnnnnnnnnnnnnnnnnnnnnnnnnnnnnnnnnnnnnnnnnnnnnnnnnnnnnnnnnnnnnnnnnnnnnnnnnnnnnnnnnnnnnnnnnnnnnnnnnnnnnnnnnnnnnnnnnnnnnnnnnnnnnnnnnnnnnnnnnnnnnnnnnnnnnnnnnnnnnnnnnnnnnnnnnnnnnnnnnnnnnnnnnnnnnnnnnnnnnnnnnnnnnnnnnnnnnnnnnnnnnnnnnnnnnnnnnnnnnnnnnnnnnnnnnnnnnnnnnnnnnnnnnnnnnnnnnnnnnnnnnnnnnnnnnnnnnnnnnnnnnnnnnnnnnnnnnnnnnnnnnnnnnnnnnnnnnnnnnnnnnnnnnnnnnnnnnnnnnnnnnnnnnnnnnnnnnnnnnnnnnnnnnnnnnnnnnnnnnnnnnnnnnnnnnnnnnnnnnnnnnnnnnnnnnnnnnnnnnnnnnnnnnnnnnnnnnnnnnnnnnnnnnnnnnnnnnnnnnnnnnnnnnnnnnnnnnnnnnnnnnnnnnnnnnnnnnnnnnnnnnnnnnnnnnnnnn

SEQ ID NO: 4179 - DNA, 1041 bp, Xenorhabdus sp.
  unsure (1)..(1041): unsure at all n locations
nnnnnnnnnnnnnnnnnnnnnnnnnnnnnnnnnnnnnnnnnnnnnnnnnnnnnnnnnnnnnnnnncccgagcgaaaaatattatacctaaaaatgcacaaggtttttcttctctcttccccaagatgctannnnnnnnnnnnnnnnnnnnnnnnnnnnnnnnnnnnnnnnnnnnnnnnnnnnnnnnnnnnnnnnnnnnnnnnnnnnnnnnnnnnnnnnnnnnnnnnnnnnnnnnnnnnnnnnnnnnnnnnnnnnnnnnnnnnnnnnnnnnnnnnnnnnnnnnnnnnnnnnnnnnnnnnnnnnnnnnnnnnnnnnnnnnnnnnnnnnnnnnnnnnnnnnnnnnnnnnnnnnnnnnnnnnnnnnnnnnnnnnnnnnnnnnnnnnnnnnnnnnnnnnnnnnnnnnnnnnnnnnnnnnnnnnnnnnnnnnnnnnnnnnnnnnnnnnnnnnnnnnnnnnnnnnnnnnnnnnnnnnnnnnnnnnnnnnnnnnnnnnnnnnnnnnnnnnnnnnnnnnnnnnnnnnnnnnnnnnnnnnnnnnnnnnnnnnnnnnnnnnnnnnnnnnnnnnnnnnnnnnnnnnnnnnnnnnnnnnnnnnnnnnnnnnnnnnnnnnnnnnnnnnnnnnnnnnnnnnnnnnnnnnnnnnnnnnnnnnnnnnnnnnnnnnnnnnnnnnnnnnnnnnnnnnnnnnnnnnnnnnnnnnnnnnnnnnnnnnnnnnnnnnnnnnnnnnnnnnnnnnnnnnnnnnnnnnnnnnnnnnnnnnnnnnnnnnnnnnnnnnnnnnnnnnnnnnnnnnnnnnnnnnnnnnnnnnnnnnnnnnnnnnnnnnnnnnnnnnnnnnnnnnnnnnnnnnnnnnnnnnnnnnnnnnnnnnnnnnnnnnnnnnnnnnnnnnnnnnnnnnnnnnnnnnnnnnnnnnnnnnnnnnnnnnnnnnnnnnnnnnnnnnnnnnnnnnnnnnnnnnnnnnnnnnnnnnnnnnnnnnnnnnnnnnnnnnnnnnnnnnnnnnnnnnnnnnnnnnnnnnnnnnnnnnnnnnnnnnnnnnnnnnnnnnnnn

SEQ ID NO: 4180 - DNA, 788 bp, Xenorhabdus sp.
  unsure (1)..(788): unsure at all n locations
nnnnnnnnnnnnnnnnnnnnnnnnnnnnnnnnnnnnnnnnnnnnnnnnnnnnnnnnnnnnnnnnnnnnnnnnnnnnnnnnnnnnnnnnnnnnnnnnnnnnnnnnnnnnnnnnnnnnnnnnnnnnnnnnnnntacttaacataaatacacaaccactcataatacctaatacttccatcaataaccaatatcgcccaacacctnnnnnnnnnnnnnnnnnnnnnnnnnnnnnnnnnnnnnnnnnnnnnnnnnnnnnnnnnnnnnnnnnnnnnnnnnnnnnnnnnnnnnnnnnnnnnnnnnnnnnnnnnnnnnnnnnnnnnnnnnnnnnnnnnnnnnnnnnnnnnnnnnnnnnnnnnnnnnnnnnnnnnnnnnnnnnnnnnnnnnnnnnnnnnnnnnnnnnnnnnnnnnnnnnnnnnnnnnnnnnnnnnnnnnnnnnnnnnnnnnnnnnnnnnnnnnnnnnnnnnnnnnnnnnnnnnnnnnnnnnnnnnnnnnnnnnnnnnnnnnnnnnnnnnnnnnnnnnnnnnnnnnnnnnnnnnnnnnnnnnnnnnnnnnnnnnnnnnnnnnnnnnnnnnnnnnnnnnnnnnnnnnnnnnnnnnnnnnnnnnnnnnnnnnnnnnnnnnnnnnnnnnnnnnnnnnnnnnnnnnnnnnnnnnnnnnnnnnnnnnnnnnnnnnnnnnnnnnnnnnnnnnnnnnnnnnnnnnnnnnnnnnnnnnnnnnnnnnnnnnnnnnnnnnnnnnnnnnnnnnnnnnnnnnnnnnnnnnnnnnnnnnnnnnnnnnnnnnnnnnnnnnn

SEQ ID NO: 4181 - DNA, 1349 bp, Xenorhabdus sp.
  unsure (1)..(1349): unsure at all n locations
nnnnnnnnnnnnnnnnnnnnnnnnnnnnnnnnncctccctcccgcatgtcagaagtacacctgtctatccattagttaatacttannnnnnnnnnnnnnnnnnnnnnnnnnnnnnnnnnnnnnnnnnnnnnnnnnnnnnnnnnnnnnnnnnnnnnnnnnnnnnnnnnnnnnnnnnnnnnnnnnnnnnnnnnnnnnnnnnnnnnnnnnnnnnnnnnnnnnnnnnnnnnnnnnnnnnnnnnnnnnnnnnnnnnnnnnnnnnnnnnnnnnnnnnnnnnnnnnnnnnnnnnnnnnnnnnnnnnnnnnnnnnnnnnnnnnnnnnnnnnnnnnnnnnnnnnnnnnnnnnnnnnnnnnnnnnnnnnnnnnnnnnnnnnnnnnnnnnnnnnnnnnnnnnnnnnnnnnnnnnnnnnnnnnnnnnnnnnnnnnnnnnnnnnnnnnnnnnnnnnnnnnnnnnnnnnnnnnnnnnnnnnnnnnnnnnnnnnnnnnnnnnnnnnnnnnnnnnnnnnnnnnnnnnnnnnnnnnnnnnnnnnnnnnnnnnnnnnnnnnnnnnnnnnnnnnnnnnnnnnnnnnnnnnnnnnnnnnnnnnnnnnnnnnnnnnnnnnnnnnnnnnnnnnnnnnnnnnnnnnnnnnnnnnnnnnnnnnnnnnnnnnnnnnnnnnnnnnnnnnnnnnnnnnnnnnnnnnnnnnnnnnnnnnnnnnnnnnnnnnnnnnnnnnnnnnnnnnnnnnnnnnnnnnnnnnnnnnnnnnnnnnnnnnnnnnnnnnnnnnnnnnnnnnnnnnnnnnnnnnnnnnnnnnnnnnnnnnnnnnnnnnnnnnnnnnnnnnnnnnnnnnnnnnnnnnnnnnnnnnnnnnnnnnnnnnnnnnnnnnnnnnnnnnnnnnnnnnnnnnnnnnnnnnnnnnnnnnnnnnnnnnnnnnnnnnnnnnnnnnnnnnnnnnnnnnnnnnnnnnnnnnnnnnnnnnnnnnnnnnnnnnnnnnnnnnnnnnnnnnnnnnnnnnnnnnnnnnnnnnnnnnnnnnnnnnnnnnnnnnnnnnnnnnnnnnnnnnnnnnnnnnnnnnnnnnnnnnnnnnnnnnnnnnnnnnnnnnnnnnnnnnnnnnnnnnnnnnnnnnnnnnnnnnnnnnnnnnnnnnnnnnnnnnnnnnnnnnnnnnnnnnnnnnnnnnnnnnnnnnnnnnnnnnnnnnnnnnnnnnnnnnnnnnnnnnnnnnnnnnnnnnnnnnnnnnnnnnnnnnnnnnnnnnnnnnnnnnnnnnnnnnnnnnnnnnnnnnnnnnnnnnnnnnnnnnnnnnnnnnnnnnnnnnnnnnnnnnnnnnnnnnnnnnnnnnnnnnnnnnnnnnnnnnnnnnnnnnnnnnnnnnnn

SEQ ID NO: 4182 - DNA, 946 bp, Xenorhabdus sp.
  unsure (1)..(946): unsure at all n locations
nnnnnnnnnnnnnnnnnnnnnnnnnnnnnnnnnnnnnnnnnnnnnnnnnnnnnnnnnnnnnnnnnnnnnnnnnnnnnnnnnnnnnnnnnnnnnnnnnnnnnnnnnnnnnnnnnnnnnnnnnnnnnnnnnnnnnnnnnnnnnnnnnnnnnnnnnnnnnnnnnnnnnnnnnnnnnnnnnnnnnnnnnnntgtgatttccggccaaccgaggatccaggggtggcttcctgatgataacgccctgctctgtaaggcacggcgggaatcattacggatctggcttgaccatccttgatcgcnnnnnnnnnnnnnnnnnnnnnnnnnnnnnnnnnnnnnnnnnnnnnnnnnnnnnnnnnnnnnnnnnnnnnnnnnnnnnnnnnnnnnnnnnnnnnnnnnnnnnnnnnnnnnnnnnnnnnnnnnnnnnnnnnnnnnnnnnnnnnnnnnnnnnnnnnnnnnnnnnnnnnnnnnnnnnnnnnnnnnnnnnnnnnnnnnnnnnnnnnnnnnnnnnnnnnnnnnnnnnnnnnnnnnnnnnnnnnnnnnnnnnnnnnnnnnnnnnnnnnnnnnnnnnnnnnnnnnnnnnnnnnnnnnnnnnnnnnnnnnnnnnnnnnnnnnnnnnnnnnnnnnnnnnnnnnnnnnnnnnnnnnnnnnnnnnnnnnnnnnnnnnnnnnnnnnnnnnnnnnnnnnnnnnnnnnnnnnnnnnnnnnnnnnnnnnnnnnnnnnnnnnnnnnnnnnnnnnnnnnnnnnnnnnnnnnnnnnnnnnnnnnnnnnnnnnnnnnnnnnnnnnnnnnnnnnnnnnnnnnnnnnnnnnnnnnnnnnnnnnnnnnnnnnnnnnnnnnnnnnnnnnnnnnnnnnnnnnnnnnnnnnnnnnnnnnnnnnnnnnnnnnnnnnnnnnnnnnnnnnnnnnnnnnnnnnnnnnnnnnnnnnnnnnnnnnnnnnnnnnnnnnnnnn

SEQ ID NO: 4183 - DNA, 1065 bp, Xenorhabdus sp.
  unsure (1)..(1065): unsure at all n locations
nnnnnnnnnnnnnnnnnnnnnnnnnnnnnnnnnnnnnnnnnnnnnnnnnnnnnnnnntggtcaagcttactgtgcctgaataggatgccaatttttccatatcgcctttttttcacatcattagaaaccagaaccggagggtgccagtttacatattcaggttgcggaacgtatgcattgatattcttttttctgtgctgttttnnnnnnnnnnnnnnnnnnnnnnnnnnnnnnnnnnnnnnnnnnnnnnnnnnnnnnnnnnnnnnnnnnnnnnnnnnnnnnnnnnnnnnnnnnnnnnnnnnnnnnnnnnnnnnnnnnnnnnnnnnnnnnnnnnnnnnnnnnnnnnnnnnnnnnnnnnnnnnnnnnnnnnnnnnnnnnnnnnnnnnnnnnnnnnnnnnnnnnnnnnnnnnnnnnnnnnnnnnnnnnnnnnnnnnnnnnnnnnnnnnnnnnnnnnnnnnnnnnnnnnnnnnnnnnnnnnnnnnnnnnnnnnnnnnnnnnnnnnnnnnnnnnnnnnnnnnnnnnnnnnnnnnnnnnnnnnnnnnnnnnnnnnnnnnnnnnnnnnnnnnnnnnnnnnnnnnnnnnnnnnnnnnnnnnnnnnnnnnnnnnnnnnnnnnnnnnnnnnnnnnnnnnnnnnnnnnnnnnnnnnnnnnnnnnnnnnnnnnnnnnnnnnnnnnnnnnnnnnnnnnnnnnnnnnnnnnnnnnnnnnnnnnnnnnnnnnnnnnnnnnnnnnnnnnnnnnnnnnnnnnnnnnnnnnnnnnnnnnnnnnnnnnnnnnnnnnnnnnnnnnnnnnnnnnnnnnnnnnnnnnnnnnnnnnnnnnnnnnnnnnnnnnnnnnnnnnnnnnnnnnnnnnnnnnnnnnnnnnnnnnnnnnnnnnnnnnnnnnnnnnnnnnnnnnnnnnnnnnnnnnnnnnnnnnnnnnnnnnnnnnnnnnnnnnnnnnnnnnnnnnnnnnnnnnnnnnnnnnnnnnnnnnnnnnnnnnnnnnnnnnnnnnnnnnnnnnnnnnnnnnnnnnnnnnnnnnnnnnnnnnnnnnnnnnnnnnnnnnnnnnnnnnnnnnnnnnnnnnnnn

SEQ ID NO: 4184 - DNA, 1095 bp, Xenorhabdus sp.
  unsure (1)..(1095): unsure at all n locations
nnnnnnnnnnnnnnnnnnnnnnnnnnnnnnnnnnnnnnnnnnnnnnnnnnnnnnnnttatgatgtttccatccaattctcacctagtacgctgcttttctctttcccttgaacagaccccattgaatgagggtcatatctaacgccttatggcgcccccnnnnnnnnnnnnnnnnnnnnnnnnnnnnnnnnnnnnnnnnnnnnnnnnnnnnnnnnnnnnnnnnnnnnnnnnnnnnnnnnnnnnnnnnnnnnnnnnnnnnnnnnnnnnnnnnnnnnnnnnnnnnnnnnnnnnnnnnnnnnnnnnnnnnnnnnnnnnnnnnnnnnnnnnnnnnnnnnnnnnnnnnnnnnnnnnnnnnnnnnnnnnnnnnnnnnnnnnnnnnnnnnnnnnnnnnnnnnnnnnnnnnnnnnnnnnnnnnnnnnnnnnnnnnnnnnnnnnnnnnnnnnnnnnnnnnnnnnnnnnnnnnnnnnnnnnnnnnnnnnnnnnnnnnnnnnnnnnnnnnnnnnnnnnnnnnnnnnnnnnnnnnnnnnnnnnnnnnnnnnnnnnnnnnnnnnnnnnnnnnnnnnnnnnnnnnnnnnnnnnnnnnnnnnnnnnnnnnnnnnnnnnnnnnnnnnnnnnnnnnnnnnnnnnnnnnnnnnnnnnnnnnnnnnnnnnnnnnnnnnnnnnnnnnnnnnnnnnnnnnnnnnnnnnnnnnnnnnnnnnnnnnnnnnnnnnnnnnnnnnnnnnnnnnnnnnnnnnnnnnnnnnnnnnnnnnnnnnnnnnnnnnnnnnnnnnnnnnnnnnnnnnnnnnnnnnnnnnnnnnnnnnnnnnnnnnnnnnnnnnnnnnnnnnnnnnnnnnnnnnnnnnnnnnnnnnnnnnnnnnnnnnnnnnnnnnnnnnnnnnnnnnnnnnnnnnnnnnnnnnnnnnnnnnnnnnnnnnnnnnnnnnnnnnnnnnnnnnnnnnnnnnnnnnnnnnnnnnnnnnnnnnnnnnnnnnnnnnnnnnnnnnnnnnnnnnnnnnnnnnnnnnnnnnnnnnnnnnnnnnnnnnnnnnnnnnnnnnnnnnnnnnnnnnnnnnnnnnnnnnnnnnnnnnnnnnnnnnnnnnnnnnnnnnnnnnnnnn

SEQ ID NO: 4185 - DNA, 1264 bp, Xenorhabdus sp.
  unsure (1)..(1264): unsure at all n locations
nnnnnnnnnnnnnnnnnnnnnnnnncgaggcccgcgcgcgcacaggcgctcagcggcgggaccaaccaccgcccacaaannnnnnnnnnnnnnnnnnnnnnnnnnnnnnnnnnnnnnnnnnnnnnnnnnnnnnnnnnnnnnnnnnnnnnnnnnnnnnnnnnnnnnnnnnnnnnnnnnnnnnnnnnnnnnnnnnnnnnnnnnnnnnnnnnnnnnnnnnnnnnnnnnnnnnnnnnnnnnnnnnnnnnnnnnnnnnnnnnnnnnnnnnnnnnnnnnnnnnnnnnnnnnnnnnnnnnnnnnnnnnnnnnnnnnnnnnnnnnnnnnnnnnnnnnnnnnnnnnnnnnnnnnnnnnnnnnnnnnnnnnnnnnnnnnnnnnnnnnnnnnnnnnnnnnnnnnnnnnnnnnnnnnnnnnnnnnnnnnnnnnnnnnnnnnnnnnnnnnnnnnnnnnnnnnnnnnnnnnnnnnnnnnnnnnnnnnnnnnnnnnnnnnnnnnnnnnnnnnnnnnnnnnnnnnnnnnnnnnnnnnnnnnnnnnnnnnnnnnnnnnnnnnnnnnnnnnnnnnnnnnnnnnnnnnnnnnnnnnnnnnnnnnnnnnnnnnnnnnnnnnnnnnnnnnnnnnnnnnnnnnnnnnnnnnnnnnnnnnnnnnnnnnnnnnnnnnnnnnnnnnnnnnnnnnnnnnnnnnnnnnnnnnnnnnnnnnnnnnnnnnnnnnnnnnnnnnnnnnnnnnnnnnnnnnnnnnnnnnnnnnnnnnnnnnnnnnnnnnnnnnnnnnnnnnnnnnnnnnnnnnnnnnnnnnnnnnnnnnnnnnnnnnnnnnnnnnnnnnnnnnnnnnnnnnnnnnnnnnnnnnnnnnnnnnnnnnnnnnnnnnnnnnnnnnnnnnnnnnnnnnnnnnnnnnnnnnnnnnnnnnnnnnnnnnnnnnnnnnnnnnnnnnnnnnnnnnnnnnnnnnnnnnnnnnnnnnnnnnnnnnnnnnnnnnnnnnnnnnnnnnnnnnnnnnnnnnnnnnnnnnnnnnnnnnnnnnnnnnnnnnnnnnnnnnnnnnnnnnnnnnnnnnnnnnnnnnnnnnnnnnnnnnnnnnnnnnnnnnnnnnnnnnnnnnnnnnnnnnnnnnnnnnnnnnnnnnnnnnnnnnnnnnnnnnnnnnnnnnnnnnnnnnnnnnnnnnnnnnnnnnnnnnnnnnnnnnnnnnnnnnnnnnnnnnnnnnnnnnnnnnnnnnnnnnnnnnnnnnnnnnnnnnnnnnnnnnnnnnnnnnnnnnnnnnnnnnnnnnnnnnnnn

SEQ ID NO: 4186 - DNA, 1204 bp, Xenorhabdus sp.
  unsure (1)..(1204): unsure at all n locations
nnnnnnnnnnnnnnnnnnnnnnnnnnnnnnnnnnnnnnnnnnnnnnnngatttatagtcagatagcaagatgcgctctttatcacacacgattacgttatcatggacttcaggcggccttgtnnnnnnnnnnnnnnnnnnnnnnnnnnnnnnnnnnnnnnnnnnnnnnnnnnnnnnnnnnnnnnnnnnnnnnnnnnnnnnnnnnnnnnnnnnnnnnnnnnnnnnnnnnnnnnnnnnnnnnnnnnnnnnnnnnnnnnnnnnnnnnnnnnnnnnnnnnnnnnnnnnnnnnnnnnnnnnnnnnnnnnnnnnnnnnnnnnnnnnnnnnnnnnnnnnnnnnnnnnnnnnnnnnnnnnnnnnnnnnnnnnnnnnnnnnnnnnnnnnnnnnnnnnnnnnnnnnnnnnnnnnnnnnnnnnnnnnnnnnnnnnnnnnnnnnnnnnnnnnnnnnnnnnnnnnnnnnnnnnnnnnnnnnnnnnnnnnnnnnnnnnnnnnnnnnnnnnnnnnnnnnnnnnnnnnnnnnnnnnnnnnnnnnnnnnnnnnnnnnnnnnnnnnnnnnnnnnnnnnnnnnnnnnnnnnnnnnnnnnnnnnnnnnnnnnnnnnnnnnnnnnnnnnnnnnnnnnnnnnnnnnnnnnnnnnnnnnnnnnnnnnnnnnnnnnnnnnnnnnnnnnnnnnnnnnnnnnnnnnnnnnnnnnnnnnnnnnnnnnnnnnnnnnnnnnnnnnnnnnnnnnnnnnnnnnnnnnnnnnnnnnnnnnnnnnnnnnnnnnnnnnnnnnnnnnnnnnnnnnnnnnnnnnnnnnnnnnnnnnnnnnnnnnnnnnnnnnnnnnnnnnnnnnnnnnnnnnnnnnnnnnnnnnnnnnnnnnnnnnnnnnnnnnnnnnnnnnnnnnnnnnnnnnnnnnnnnnnnnnnnnnnnnnnnnnnnnnnnnnnnnnnnnnnnnnnnnnnnnnnnnnnnnnnnnnnnnnnnnnnnnnnnnnnnnnnnnnnnnnnnnnnnnnnnnnnnnnnnnnnnnnnnnnnnnnnnnnnnnnnnnnnnnnnnnnnnnnnnnnnnnnnnnnnnnnnnnnnnnnnnnnnnnnnnnnnnnnnnnnnnnnnnnnnnnnnnnnnnnnnnnnnnnnnnnnnnnnnnnnnnnnnnnnnnnnnnnnnnnnnnnnnnnnnnnnnnnnnnnnnnnnnnnnnnnnnnnnnnnnnnnnnnnnnnnnnnnnnnnnnnnn

SEQ ID NO: 4187 - DNA, 1187 bp, Xenorhabdus sp.
  unsure (1)..(1187): unsure at all n locations
nnnnnnnnnnnnnnnnnnnnnnnnnnnnngctctaagaccttctccacatgtaataactacagcactacttaaagcttcatgtccactcagtgcggtttttttttcgcctaactcaatcctgaatcctcggagcttttcctgagagtcctattcgcccccttatctttttattattttttgtttattatttttttttcgttatttctttctcttattttannnnnnnnnnnnnnnnnnnnnnnnnnnnnnnnnnnnnnnnnnnnnnnnnnnnnnnnnnnnnnnnnnnnnnnnnnnnnnnnnnnnnnnnnnnnnnnnnnnnnnnnnnnnnnnnnnnnnnnnnnnnnnnnnnnnnnnnnnnnnnnnnnnnnnnnnnnnnnnnnnnnnnnnnnnnnnnnnnnnnnnnnnnnnnnnnnnnnnnnnnnnnnnnnnnnnnnnnnnnnnnnnnnnnnnnnnnnnnnnnnnnnnnnnnnnnnnnnnnnnnnnnnnnnnnnnnnnnnnnnnnnnnnnnnnnnnnnnnnnnnnnnnnnnnnnnnnnnnnnnnnnnnnnnnnnnnnnnnnnnnnnnnnnnnnnnnnnnnnnnnnnnnnnnnnnnnnnnnnnnnnnnnnnnnnnnnnnnnnnnnnnnnnnnnnnnnnnnnnnnnnnnnnnnnnnnnnnnnnnnnnnnnnnnnnnnnnnnnnnnnnnnnnnnnnnnnnnnnnnnnnnnnnnnnnnnnnnnnnnnnnnnnnnnnnnnnnnnnnnnnnnnnnnnnnnnnnnnnnnnnnnnnnnnnnnnnnnnnnnnnnnnnnnnnnnnnnnnnnnnnnnnnnnnnnnnnnnnnnnnnnnnnnnnnnnnnnnnnnnnnnnnnnnnnnnnnnnnnnnnnnnnnnnnnnnnnnnnnnnnnnnnnnnnnnnnnnnnnnnnnnnnnnnnnnnnnnnnnnnnnnnnnnnnnnnnnnnnnnnnnnnnnnnnnnnnnnnnnnnnnnnnnnnnnnnnnnnnnnnnnnnnnnnnnnnnnnnnnnnnnnnnnnnnnnnnnnnnnnnnnnnnnnnnnnnnnnnnnnnnnnnnnnnnnnnnnnnnnnnnnnnnnnnnnnnnnnnnnnnnnnnnnnnnnnnnnnnnnnnnnnnnnnnnnnnnnnnnnnnnnnnnnnnnnnnnnnnnnnnnnnnnnnnnnnnnnnnnnnnnnnnnnnnnnnnnnnnnnnnnnnnnnn

SEQ ID NO: 4188 - DNA, 1054 bp, Xenorhabdus sp.
  unsure (1)..(1054): unsure at all n locations
nnnnnnnnnnnnnnnnnnnnnnnnnnnnnnnnnnnnnnnnnnnnnnnnnnnnnnngtgagacagaccaacctgaaatgtaatgtgggcgaaatattttcttttcgtgtcgacaggagcttcctatacattagcgcctattacacagtcacggccaatttctgccatcatacttgggcnnnnnnnnnnnnnnnnnnnnnnnnnnnnnnnnnnnnnnnnnnnnnnnnnnnnnnnnnnnnnnnnnnnnnnnnnnnnnnnnnnnnnnnnnnnnnnnnnnnnnnnnnnnnnnnnnnnnnnnnnnnnnnnnnnnnnnnnnnnnnnnnnnnnnnnnnnnnnnnnnnnnnnnnnnnnnnnnnnnnnnnnnnnnnnnnnnnnnnnnnnnnnnnnnnnnnnnnnnnnnnnnnnnnnnnnnnnnnnnnnnnnnnnnnnnnnnnnnnnnnnnnnnnnnnnnnnnnnnnnnnnnnnnnnnnnnnnnnnnnnnnnnnnnnnnnnnnnnnnnnnnnnnnnnnnnnnnnnnnnnnnnnnnnnnnnnnnnnnnnnnnnnnnnnnnnnnnnnnnnnnnnnnnnnnnnnnnnnnnnnnnnnnnnnnnnnnnnnnnnnnnnnnnnnnnnnnnnnnnnnnnnnnnnnnnnnnnnnnnnnnnnnnnnnnnnnnnnnnnnnnnnnnnnnnnnnnnnnnnnnnnnnnnnnnnnnnnnnnnnnnnnnnnnnnnnnnnnnnnnnnnnnnnnnnnnnnnnnnnnnnnnnnnnnnnnnnnnnnnnnnnnnnnnnnnnnnnnnnnnnnnnnnnnnnnnnnnnnnnnnnnnnnnnnnnnnnnnnnnnnnnnnnnnnnnnnnnnnnnnnnnnnnnnnnnnnnnnnnnnnnnnnnnnnnnnnnnnnnnnnnnnnnnnnnnnnnnnnnnnnnnnnnnnnnnnnnnnnnnnnnnnnnnnnnnnnnnnnnnnnnnnnnnnnnnnnnnnnnnnnnnnnnnnnnnnnnnnnnnnnnnnnnnnnnnnnnnnnnnnnnnnnnnnnnnnnnnnnnnnnnnnnnnnnnnnnnnnnnnnnnnnnnnnnnnnnnnnn

SEQ ID NO: 4189 - DNA, 670 bp, Xenorhabdus sp.
  unsure (1)..(670): unsure at all n locations
nnnnnnnnnnnnnnnnnnnnnnnnnnnnnnnngttgctcaagacaggcccccattatgggattccttctcagacctgcaccaggaaacggggtctaacatgcccgacttatctatccacctgtaatagagggccnnnnnnnnnnnnnnnnnnnnnnnnnnnnnnnnnnnnnnnnnnnnnnnnnnnnnnnnnnnnnnnnnnnnnnnnnnnnnnnnnnnnnnnnnnnnnnnnnnnnnnnnnnnnnnnnnnnnnnnnnnnnnnnnnnnnnnnnnnnnnnnnnnnnnnnnnnnnnnnnnnnnnnnnnnnnnnnnnnnnnnnnnnnnnnnnnnnnnnnnnnnnnnnnnnnnnnnnnnnnnnnnnnnnnnnnnnnnnnnnnnnnnnnnnnnnnnnnnnnnnnnnnnnnnnnnnnnnnnnnnnnnnnnnnnnnnnnnnnnnnnnnnnnnnnnnnnnnnnnnnnnnnnnnnnnnnnnnnnnnnnnnnnnnnnnnnnnnnnnnnnnnnnnnnnnnnnnnnnnnnnnnnnnnnnnnnnnnnnnnnnnnnnnnnnnnnnnnnnnnnnnnnnnnnnnnnnnnnnnnnnnnnnnnnnnnnnnnnnnnnnnnnnnnnnnnnnnnnnnnnnnnnnnnnnnnnnnnnnnnnnnnnnnnnnnnnnnnnnnnnnnnnnnnnnnnnnnn

SEQ ID NO: 4190 - DNA, 1122 bp, Xenorhabdus sp.
  unsure (1)..(1122): unsure at all n locations
nnnnnnnnnnnnnnnnnnnnnnnnnnnnnnnnnnnnnnnnnnnnnnnnnnnnnncggacaataatacaattattcttatgtttaattaataaatttttttttttataccaaacatttttaatacataggggggggtttttttaaaaaccgagttttnnnnnnnnnnnnnnnnnnnnnnnnnnnnnnnnnnnnnnnnnnnnnnnnnnnnnnnnnnnnnnnnnnnnnnnnnnnnnnnnnnnnnnnnnnnnnnnnnnnnnnnnnnnnnnnnnnnnnnnnnnnnnnnnnnnnnnnnnnnnnnnnnnnnnnnnnnnnnnnnnnnnnnnnnnnnnnnnnnnnnnnnnnnnnnnnnnnnnnnnnnnnnnnnnnnnnnnnnnnnnnnnnnnnnnnnnnnnnnnnnnnnnnnnnnnnnnnnnnnnnnnnnnnnnnnnnnnnnnnnnnnnnnnnnnnnnnnnnnnnnnnnnnnnnnnnnnnnnnnnnnnnnnnnnnnnnnnnnnnnnnnnnnnnnnnnnnnnnnnnnnnnnnnnnnnnnnnnnnnnnnnnnnnnnnnnnnnnnnnnnnnnnnnnnnnnnnnnnnnnnnnnnnnnnnnnnnnnnnnnnnnnnnnnnnnnnnnnnnnnnnnnnnnnnnnnnnnnnnnnnnnnnnnnnnnnnnnnnnnnnnnnnnnnnnnnnnnnnnnnnnnnnnnnnnnnnnnnnnnnnnnnnnnnnnnnnnnnnnnnnnnnnnnnnnnnnnnnnnnnnnnnnnnnnnnnnnnnnnnnnnnnnnnnnnnnnnnnnnnnnnnnnnnnnnnnnnnnnnnnnnnnnnnnnnnnnnnnnnnnnnnnnnnnnnnnnnnnnnnnnnnnnnnnnnnnnnnnnnnnnnnnnnnnnnnnnnnnnnnnnnnnnnnnnnnnnnnnnnnnnnnnnnnnnnnnnnnnnnnnnnnnnnnnnnnnnnnnnnnnnnnnnnnnnnnnnnnnnnnnnnnnnnnnnnnnnnnnnnnnnnnnnnnnnnnnnnnnnnnnnnnnnnnnnnnnnnnnnnnnnnnnnnnnnnnnnnnnnnnnnnnnnnnnnnnnnnnnnnnnnnnnnnnnnnnnnnnnnnnnnnnnnnnnnnnnnnnnnnnnnnnnnnnnnnnnnnnnnnnnnnnnnn

SEQ ID NO: 4191 - DNA, 1110 bp, Xenorhabdus sp.
  unsure (1)..(1110): unsure at all n locations
nnnnnnnnnnnnnnnnnnnnnnnnnnnnnnnnnnnnnnnnnnnngatacttcatctattgatgtgtggcttgcttcccctcctccatccttaccatttttnnnnnnnnnnnnnnnnnnnnnnnnnnnnnnnnnnnnnnnnnnnnnnnnnnnnnnnnnnnnnnnnnnnnnnnnnnnnnnnnnnnnnnnnnnnnnnnnnnnnnnnnnnnnnnnnnnnnnnnnnnnnnnnnnnnnnnnnnnnnnnnnnnnnnnnnnnnnnnnnnnnnnnnnnnnnnnnnnnnnnnnnnnnnnnnnnnnnnnnnnnnnnnnnnnnnnnnnnnnnnnnnnnnnnnnnnnnnnnnnnnnnnnnnnnnnnnnnnnnnnnnnnnnnnnnnnnnnnnnnnnnnnnnnnnnnnnnnnnnnnnnnnnnnnnnnnnnnnnnnnnnnnnnnnnnnnnnnnnnnnnnnnnnnnnnnnnnnnnnnnnnnnnnnnnnnnnnnnnnnnnnnnnnnnnnnnnnnnnnnnnnnnnnnnnnnnnnnnnnnnnnnnnnnnnnnnnnnnnnnnnnnnnnnnnnnnnnnnnnnnnnnnnnnnnnnnnnnnnnnnnnnnnnnnnnnnnnnnnnnnnnnnnnnnnnnnnnnnnnnnnnnnnnnnnnnnnnnnnnnnnnnnnnnnnnnnnnnnnnnnnnnnnnnnnnnnnnnnnnnnnnnnnnnnnnnnnnnnnnnnnnnnnnnnnnnnnnnnnnnnnnnnnnnnnnnnnnnnnnnnnnnnnnnnnnnnnnnnnnnnnnnnnnnnnnnnnnnnnnnnnnnnnnnnnnnnnnnnnnnnnnnnnnnnnnnnnnnnnnnnnnnnnnnnnnnnnnnnnnnnnnnnnnnnnnnnnnnnnnnnnnnnnnnnnnnnnnnnnnnnnnnnnnnnnnnnnnnnnnnnnnnnnnnnnnnnnnnnnnnnnnnnnnnnnnnnnnnnnnnnnnnnnnnnnnnnnnnnnnnnnnnnnnnnnnnnnnnnnnnnnnnnnnnnnnnnnnnnnnnnnnnnnnnnnnnnnnnnnnnnnnnnnnnnnnnnnnnnnnnnnnnnnnnnnnnnnnnnnnnnnnnnnnnnnnnnnnnnnnnnnnnnnnnnnnnnnnnnnnnnnnnnnnnnn

SEQ ID NO: 4192 - DNA, 1139 bp, Xenorhabdus sp.
  unsure (1)..(1139): unsure at all n locations
nnnnnnnnnnnnnnnnnnnnnnnnnnnnnnnnnnnnnnnnnnnnnnnnnnnnnnnnnnnnnnnnnnnnnnnnnnnnnnnnnnnnnnnnnnnnnnnnnnnnnnnnnnnnnnnnnnnnnnnnnnnnnnnnnnnnnnnnnnnnnnnnnnnnnnnnnnnnnnngttctcggaatcatcggcagtcgtagaccaggatgcaagcagcggaccgccgctcttcatcggatagtcccgcgcgttctcaaccttacgctgcggcgcgacgaaagtagccgaactgtcgagaacgtagtcggacggatcgaacagcagatcgatattgtaaccgccacgctcgaggccgccggccagtgaaggcgtgaccgccgcgatgctgacagcgaaacataccgcgccgcgaaaaattgcagtttttgccatctctctccccaatcaaggcaatgtgatcgaggatagagtgaagtgctaaaggctaaatgacaatctgccgcaagctgcggctgccgcacgaatgcggcaatttttttacgtaagaattttatgtctaccctcttaaataatcattttaggctatttttctaatcctttcgaaaaaattgatacaaaacgaaacatattcccaacacgaaatggaaatgtcgccaaataaccacagtgggtaccttcccgaagaaannnnnnnnnnnnnnnnnnnnnnnnnnnnnnnnnnnnnnnnnnnnnnnnnnnnnnnnnnnnnnnnnnnnnnnnnnnnnnnnnnnnnnnnnnnnnnnnnnnnnnnnnnnnnnnnnnnnnnnnnnnnnnnnnnnnnnnnnnnnnnnnnnnnnnnnnnnnnnnnnnnnnnnnnnnnnnnnnnnnnnnnnnnnnnnnnnnnnnnnnnnnnnnnnnnnnnnnnnnnnnnnnnnnnnnnnnnnnnnnnnnnnnnnnnnnnnnnnnnnnnnnnnnnnnnnnnnnnnnnnnnnnnnnnnnnnnnnnnnnnnnnnnnnnnnnnnnnnnnnnnnnnnnnnnnnnnnnnnnnnnnnnnnnnnnnnnnnnnnnnnnnnnnnnnnnnnnnnnnnnnnnnnnnnnnnnnnnnnnnnnnnnnnnnnnnnnnnnnnnnnnnnnnnnnnnnnnnnnnnnnnnnnnnnnnnnnnnnnnnnnnnnnn

SEQ ID NO: 4193 - DNA, 1521 bp, Xenorhabdus sp.
  unsure (1)..(1521): unsure at all n locations
nnnnnnnnnnnnnnnnnnnnnnnnnnnnnnnnnnnnnnnnnnnnnnnnnnnnnnnnnnnnngccaccgcgccgccatcatgtatgccatccataccgatctattatgtcttcttaatgctcgacatctccggtgatttgcagggaacggggcgttattcatatgtattatcaggcttaaataggttcttggagcgctttattcctctctcttatnnnnnnnnnnnnnnnnnnnnnnnnnnnnnnnnnnnnnnnnnnnnnnnnnnnnnnnnnnnnnnnnnnnnnnnnnnnnnnnnnnnnnnnnnnnnnnnnnnnnnnnnnnnnnnnnnnnnnnnnnnnnnnnnnnnnnnnnnnnnnnnnnnnnnnnnnnnnnnnnnnnnnnnnnnnnnnnnnnnnnnnnnnnnnnnnnnnnnnnnnnnnnnnnnnnnnnnnnnnnnnnnnnnnnnnnnnnnnnnnnnnnnnnnnnnnnnnnnnnnnnnnnnnnnnnnnnnnnnnnnnnnnnnnnnnnnnnnnnnnnnnnnnnnnnnnnnnnnnnnnnnnnnnnnnnnnnnnnnnnnnnnnnnnnnnnnnnnnnnnnnnnnnnnnnnnnnnnnnnnnnnnnnnnnnnnnnnnnnnnnnnnnnnnnnnnnnnnnnnnnnnnnnnnnnnnnnnnnnnnnnnnnnnnnnnnnnnnnnnnnnnnnnnnnnnnnnnnnnnnnnnnnnnnnnnnnnnnnnnnnnnnnnnnnnnnnnnnnnnnnnnnnnnnnnnnnnnnnnnnnnnnnnnnnnnnnnnnnnnnnnnnnnnnnnnnnnnnnnnnnnnnnnnnnnnnnnnnnnnnnnnnnnnnnnnnnnnnnnnnnnnnnnnnnnnnnnnnnnnnnnnnnnnnnnnnnnnnnnnnnnnnnnnnnnnnnnnnnnnnnnnnnnnnnnnnnnnnnnnnnnnnnnnnnnnnnnnnnnnnnnnnnnnnnnnnnnnnnnnnnnnnnnnnnnnnnnnnnnnnnnnnnnnnnnnnnnnnnnnnnnnnnnnnnnnnnnnnnnnnnnnnnnnnnnnnnnnnnnnnnnnnnnnnnnnnnnnnnnnnnnnnnnnnnnnnnnnnnnnnnnnnnnnnnnnnnnnnnnnnnnnnnnnnnnnnnnnnnnnnnnnnnnnnnnnnnnnnnnnnnnnnnnnnnnnnnnnnnnnnnnnnnnnnnnnnnnnnnnnnnnnnnnnnnnnnnnnnnnnnnnnnnnnnnnnnnnnnnnnnnnnnnnnnnnnnnnnnnnnnnnnnnnnnnnnnnnnnnnnnnnnnnnnnnnnnnnnnnnnnnnnnnnnnnnnnnnnnnnnnnnnnnnnnnnnnnnnnnnnnnnnnnnnnnnnnnnnnnnnnnnnnnnnnnnnnnnnnnnnnnnnnnnnnnnnnnnnnnnnnnnnnnnnnnnnnnnnnnnnnnnnnnnnnnnnnnnnnnnnnnnnnnnnnnnnnnnnnnnnnnnnnnnnnnnnnnnnnnnnnnnnnnnnnnnnnnnnnnnnnnnnnnnnnnnnnnnnnnnnnnnnnnnnnnnnnnnnnnnnnnnnnnnn
